United States Patent Application Publication US 2024/0398993 A1 - sequence listing, part 11

SEQ ID NO: 33857 - protein, 883 aa, Homo sapiens
MDTSRLGVLLSLPVLLQLATGGSSPRSGVLLRGCPTHCHCEPDGRMLLRVDCSDLGLSELPSNLSVFTSYLDLSMNNISQLLPNPLPSLRFLEELRLAGNALTYIPKGAFTGLYSLKVLMLQNNQLRHVPTEALQNLRSLQSLRLDANHISYVPPSCFSGLHSLRHLWLDDNALTEIPVQAFRSLSALQAMTLALNKIHHIPDYAFGNLSSLVVLHLHNNRIHSLGKKCFDGLHSLETLDLNYNNLDEFPTAIRTLSNLKELHFYDNPIQFVGRSAFQHLPELRTLTLNGASQITEFPDLTGTANLESLTLTGAQISSLPQTVCNQLPNLQVLDLSYNLLEDLPSFSVCQKLQKIDLRHNEIYEIKVDTFQQLLSLRSLNLAWNKIAIIHPNAFSTLPSLIKLDLSSNLLSSFPITGLHGLTHLKLTGNHALQSLISSENFPELKVIEMPYAYQCCAFGVCENAYKISNQWNKGDNSSMDDLHKKDAGMFQAQDERDLEDFLLDFEEDLKALHSVQCSPSPGPFKPCEHLLDGWLIRIGVWTIAVLALTCNALVTSTVFRSPLYISPIKLLIGVIAAVNMLTGVSSAVLAGVDAFTFGSFARHGAWWENGVGCHVIGFLSIFASESSVFLLTLAALERGFSVKYSAKFETKAPFSSLKVIILLCALLALTMAAVPLLGGSKYGASPLCLPLPFGEPSTMGYMVALILLNSLCFLMMTIAYTKLYCNLDKGDLENIWDCSMVKHIALLLFTNCILNCPVAFLSFSSLINLTFISPEVIKFILLVVVPLPACLNPLLYILFNPHFKEDLVSLRKQTYVWTRSKHPSLMSINSDDVEKQSCDSTQALVTFTSSSITYDLPPSSVPSPAYPVTESCHLSSVAFVPCL

SEQ ID NO: 33858 - protein, 835 aa, Homo sapiens
MDTSRLGVLLSLPVLLQLATGGSSPRSGVLLRGCPTHCHCEPDGRMLLRVDCSDLGLSELPSNLSVFTSYLDLSMNNISQLLPNPLPSLRFLEELRLAGNALTYIPKGAFTGLYSLKVLMLQNNQLRHVPTEALQNLRSLQSLHLHNNRIHSLGKKCFDGLHSLETLDLNYNNLDEFPTAIRTLSNLKELGFHSNNIRSIPEKAFVGNPSLITIHFYDNPIQFVGRSAFQHLPELRTLTLNGASQITEFPDLTGTANLESLTLTGAQISSLPQTVCNQLPNLQVLDLSYNLLEDLPSFSVCQKLQKIDLRHNEIYEIKVDTFQQLLSLRSLNLAWNKIAIIHPNAFSTLPSLIKLDLSSNLLSSFPITGLHGLTHLKLTGNHALQSLISSENFPELKVIEMPYAYQCCAFGVCENAYKISNQWNKGDNSSMDDLHKKDAGMFQAQDERDLEDFLLDFEEDLKALHSVQCSPSPGPFKPCEHLLDGWLIRIGVWTIAVLALTCNALVTSTVFRSPLYISPIKLLIGVIAAVNMLTGVSSAVLAGVDAFTFGSFARHGAWWENGVGCHVIGFLSIFASESSVFLLTLAALERGFSVKYSAKFETKAPFSSLKVIILLCALLALTMAAVPLLGGSKYGASPLCLPLPFGEPSTMGYMVALILLNSLCFLMMTIAYTKLYCNLDKGDLENIWDCSMVKHIALLLFTNCILNCPVAFLSFSSLINLTFISPEVIKFILLVVVPLPACLNPLLYILFNPHFKEDLVSLRKQTYVWTRSKHPSLMSINSDDVEKQSCDSTQALVTFTSSSITYDLPPSSVPSPAYPVTESCHLSSVAFVPCL

SEQ ID NO: 33859 - protein, 180 aa, Homo sapiens
MAGAGPKRRALAAPVAEEKEEAREKMLASKRADGAAPAGEGEGVTLQRNITLLNGVAIIVGAIIGSGIFVTPTGVLKEAGSPGLALVMWAACGVFSIVGALCYAELGTTISKSGGDYAYMLDVYGSLPAFLKLWIELLVIRPSSQYIVALVFATYLLKPLFPSCPVPEEAAKLMACHCVH

SEQ ID NO: 33860 - protein, 919 aa, Homo sapiens
MAADVFMCSPRRPRSRGRQVLLKPQVSEDDDDSDTDEPSPPPASGAATPARAHASAAPPPPRAGPGREEPPRRQQIIHSGHFMVSSPHREHPPKKGYDFDTVNKQTCQTYSFGKTSSCHLSIDASLTKLFECMTLAYSGKLVSPKWKNFKGLKLQWRDKIRLNNAIWRAWYMQYLEKRKNPVCHFVTPLDGSVDVDEHRRPEAITTEGKYWKSRIEIVIREYHKWRTYFKKRLQQHKDEDLSSLVQDDDMLYWHKHGDGWKTPVPMEEDPLLDTDMLMSEFSDTLFSTLSSHQPVAWPNPREIAHLGNADMIQPGLIPLQPNLDFMDTFEPFQDLFSSSRSIFGSMLPASASAPVPDPNNPPAQESILPTTALPTVSLPDSLIAPPTAPSLAHMDEQGCEHTSRTEDPFIQPTDFGPSEPPLSVPQPFLPVFTMPLLSPSPAPPPISPVLPLVPPPATALNPPAPPTFHQPQKFAGVNKAPSVITHTASATLTHDAPATTFSQSQGLVITTHHPAPSAAPCGLALSPVTRPPQPRLTFVHPKPVSLTGGRPKQPHKIVPAPKPEPVSLVLKNARIAPAAFSGQPQAVIMTSGPLKREGMLASTVSQSNVVIAPAAIARAPGVPEFHSSILVTDLGHGTSSPPAPVSRLFPSTAQDPLGKGEQVPLHGGSPQVTVTGPSRDCPNSGQASPCASEQSPSPQSPQNNCSGKSDPKNVAALKNRQMKHISAEQKRRFNIKMCFDMLNSLISNNSKLTSHAITLQKTVEYITKLQQERGQMQEEARRLREEIEELNATIISCQQLLPATGVPVTRRQFDHMKDMFDEYVKTRTLQNWKFWIFSIIIKPLFESFKGMVSTSSLEELHRTALSWLDQHCSLPILRPMVLSTLRQLSTSTSILTDPAQLPEQASKAVTRIGKRLGES

SEQ ID NO: 33861 - protein, 526 aa, Homo sapiens
MDEQGCEHTSRTEDPFIQPTDFGPSEPPLSVPQPFLPVFTMPLLSPSPAPPPISPVLPLVPPPATALNPPAPPTFHQPQKFAGVNKAPSVITHTASATLTHDAPATTFSQSQGLVITTHHPAPSAAPCGLALSPVTRPPQPRLTFVHPKPVSLTGGRPKQPHKIVPAPKPEPVSLVLKNARIAPAAFSGQPQAVIMTSGPLKREGMLASTVSQSNVVIAPAAIARAPGVPEFHSSILVTDLGHGTSSPPAPVSRLFPSTAQDPLGKGEQVPLHGGSPQVTVTGPSRDCPNSGQASPCASEQSPSPQSPQNNCSGKSDPKNVAALKNRQMKHISAEQKRRFNIKMCFDMLNSLISNNSKLTSHAITLQKTVEYITKLQQERGQMQEEARRLREEIEELNATIISCQQLLPATGVPVTRRQFDHMKDMFDEYVKTRTLQNWKFWIFSIIIKPLFESFKGMVSTSSLEELHRTALSWLDQHCSLPILRPMVLSTLRQLSTSTSILTDPAQLPEQASKAVTRIGKRLGES

SEQ ID NO: 33862 - protein, 628 aa, Homo sapiens
MAADVFMCSPRRPRSRGRQVLLKPQVSEDDDDSDTDEPSPPPASGAATPARAHASAAPPPPRAGPGREEPPRRQQIIHSGHFMVSSPHREHPPKKGYDFDTVNKQTCQTYSFGKTSSCHLSIDASLTKLFECMTLAYSGKLVSPKWKNFKGLKLQWRDKIRLNNAIWRAWYMQYLEKRKNPVCHFVTPLDGSVDVDEHRRPEAITTEGKYWKSRIEIVIREYHKWRTYFKKRLQQHKDEDLSSLVQDDDMLYWHKHGDGWKTPVPMEEDPLLDTDMLMSEFSDTLFSTLSSHQPVAWPNPREIAHLGNADMIQPGLIPLQPNLDFMDTFEPFQDLFSSSRSIFGSMLPASASAPVPDPNNPPAQESILPTTALPTVSLPDSLIAPPTAPSLAHMDEQGCEHTSRTEDPFIQPTDFGPSEPPLSVPQPFLPVFTMPLLSPSPAPPPISPVLPLVPPPATALNPPAPPTFHQPQKFAGVNKAPSVITHTASATLTHDAPATTFSQSQGLVITTHHPAPSAAPCGLALSPVTRPPQPRLTFVHPKPVSLTGGRPKQPHKIVPAPKPEPVSLVLKNARIAPGEPGGETQCGAPPDPEGCFPIPKAFKLVTTTTTLVCTCMRTHIHLNETKVS

SEQ ID NO: 33863 - protein, 379 aa, Homo sapiens
MDEQGCEHTSRTEDPFIQPTDFGPSEPPLSVPQPFLPVFTMPLLSPSPAPPPISPVLPLVPPPATALNPPAPPTFHQPQKFAGVNKAPSVITHTASATLTHDAPATTFSQSQGLVITTHHPAPSAAPCGLALSPVTRPPQPRLTFVHPKPVSLTGGRPKQPHKIVPAPKPEPVSLVLKNARIAPAAFSGQPQAVIMTSGPLKREGMLASTVSQSNVVIAPAAIARAPGVPEFHSSILVTDLGHGTSSPPAPVSRLFPSTAQDPLGKGEQVPLHGGSPQVTVTGPSRDCPNSGQASPCASEQSPSPQSPQNNCSGKSDPKNVAALKNRQMKHISAEQKRRFNIKMCFDMLNSLISNNSKLTSHAITLQKTVEYITKLLLS

SEQ ID NO: 33864 - protein, 217 aa, Homo sapiens
MDEQGCEHTSRTEDPFIQPTDFGPSEPPLSVPPPISPVLPLVPPPATALNPPAPPTFHQPQKFAGVNKAPSVITHTASATLTHDAPATTFSQSQGLVITTHHPAPSAAPCGLALSPVTRPPQPRLTFVHPKPVSLTGGRPKQPHKIVPAPKPEPVSLVLKNARIAPGEPGGETQCGAPPDPEGCFPIPKAFKLVTTTTTLVCTCMRTHIHLNETKVS

SEQ ID NO: 33865 - protein, 117 aa, Homo sapiens
MDMRVPAQLLGLLLLWFPGARCDIQMTQSPSSLSASVGDRVTITCRASQGIRNDLGWYQQKPGKAPKRLIYAASSLQSGVPSRFSGSGSGTEFTLTISSLQPEDFATYYCLQHNSYP

SEQ ID NO: 33866 - protein, 131 aa, Homo sapiens
MAGIKALISLSFGGAIGLMFLMLGCALPIYNKYWPLFVLFFYILSPIPYCIARRLVDDTDAMSNACKELAIFLTTGIVVSAFGLPIVFARAHLIEWGACALVLTGNTVIFATILGFFLVFGSNDDFSWQQW

SEQ ID NO: 33867 - protein, 169 aa, Homo sapiens
MAGIKALISLSFGGAIGLMFLMLGCALPIYNKYWPLFVLFFYILSPIPYCIARRLVDDTDAMSNACKELAIFLTTGIVVSAFGLPIVFARAHLMGRLPFFSKMGTAESEGRETLTQQLPLPAAAMRRLLPASRVSTQPVLRLADSAESLLGRPALWALGFLLCPPSQAQ

SEQ ID NO: 33868 - protein, 181 aa, Homo sapiens
MVDVKCLSDCKLQNQLEKLGFSPGPILPSTRKLYEKKLVQLLVSPPCAPPVMNGPRELDGAQDSDDSEELNIILQGNIILSTEKSKKLKKWPEASTTKRKAVDTYCLDYKPSKGRRWAARAPSTRITYGTITKERDYCAEDQTIESWREEGFPVGLKLAVLGIFIIVVFVYLTVENKSLFG

SEQ ID NO: 33869 - protein, 29 aa, Homo sapiens
MVDVKCLSDCKLQNQLEKLGFSPGPILLA

SEQ ID NO: 33870 - protein, 140 aa, Homo sapiens
MVDVKCLSDCKLQNQLEKLGFSPGPILQLNIILQGNIILSTEKSKKLKKWPEASTTKRKAVDTYCLDYKPSKGRRWAARAPSTRITYGTITKERDYCAEDQTIESWREEGFPVGLKLAVLGIFIIVVFVYLTVENKSLFG

SEQ ID NO: 33871 - protein, 70 aa, Homo sapiens
MVDVKCLSDCKLQNQLEKLGFSPGPILPSTRKLYEKKLVQLLVSPPCAPPVMNGPRELDGAQDSDDSEVA

SEQ ID NO: 33872 - protein, 108 aa, Homo sapiens
MVDVKCLSDCKLQNQLEKLGFSPGPILPSTRKLYEKKLVQLLVSPPCAPPVMNGPRELDGAQDSDDSEGGLQEHQAPESHMGLSPKRETTARKTRLSRAGEKKVSQWA

SEQ ID NO: 33873 - protein, 67 aa, Homo sapiens
MVDVKCLSDCKLQNQLEKLGFSPGPILRGLQEHQAPESHMGLSPKRETTARKTRLSRAGEKKVSQWA

SEQ ID NO: 33874 - protein, 316 aa, Homo sapiens
MLPSSIQISGEPLSGAEVRDICRGLRDNAVRLLSLRGCRLCDRDFGRICRALAGATSLAQLNLNLGVVSSPSRIKQLAEALRTNRSIQSLFLHGSPLTDAGLALLNPALALHPALVALDLGDCMLGDEAINLICGLLPPDGAKSGLKELTLSANPGITPKGWSRLAIAVAHSSQVRVLNLDYNPLGDHVAGMLAVAVASSRTLEVLDLEGTGLTNQSAQTLLDMVENYPTALRSLVLAENSISPELQQQICDLLSEGEEEEEVAGGAGDTQEWERGREPAAHQRGSSSWMCPSDPSSQMVLMTSGLGDSLLAETEM

SEQ ID NO: 33875 - protein, 91 aa, Homo sapiens
MAANATTNPSQLLPLELVDKCIGSRIHIVMKSDKEIVGTLLGFDDFVNMVLEDVTEFEITPEGRRITKLDQILLNGNNITMLVPGGEGPEV

SEQ ID NO: 33876 - protein, 62 aa, Homo sapiens
MKSDKEIVGTLLGFDDFVNMVLEDVTEFEITPEGRRITKLDQILLNGNNITMLVPGGEGPEV

SEQ ID NO: 33877 - protein, 707 aa, Homo sapiens
MAGSRLPRQLFLQGVAAVFMFAFASLYTQIPGLYGPEGILPARRTLRPQGKGRWQQLWETPTLLWEAPRLGLDTAQGLELLSLLGALVALGALLLSPLRHPVIYLLLWAAYLSACQVGQVFLYFQWDSLLLETGFLAVLVAPLRPASHRKEAPQGRQAGALPHEDLPFWLVRWLLFRLMFASGVVKLTSRCPAWWGLTALTYHYETQCLPTPAAWFAHHLPVWLHKLSVVATFLIEIAVPPLFFAPIRRLRLAAFYSQVLLQVLIIITGNYNFFNLMTLVLTTALLDDQHLAAEPGHGSRKKTATSWPKALLATLSLLLELAVYGLLAYGTVHYFGLEVDWQQRTIHSRTTFTFHQFSQWLKTLTLPTVWLGVASLVWELLSALWRWTQVRGWLRKLSAVVQLSLVGTATVALFLISLVPYSYVEPGTHGRLWTGAHRLFGAVEHLQLANSYGLFRRMTGLGGRPEVVLEGSYDGHHWTEIEFMYKPGNLSRPPPVVVPHQPRLDWQMWFAALGPHTHSPWFTSLVLRLLQGKEPVIRLVQSQVARYPFHKQPPTYVRAQRYKYWFSQPGEQGQWWRRQWVEEFFPSVSLGDPTLETLLRQFGLQEKSPPRTRSANSTLAQALHWTRSQLSPLEAPALLWGLLMAVGAVRFVQALLAPCSLRSSPLAPVSGEKRRPASQKDSGAASEQATAAPNPCSSSSRTTRRKK

SEQ ID NO: 33878 - protein, 682 aa, Homo sapiens
MTCPPTGLYGPEGILPARRTLRPQGKGRWQQLWETPTLLWEAPRLGLDTAQGLELLSLLGALVALGALLLSPLRHPVIYLLLWAAYLSACQVGQVFLYFQWDSLLLETGFLAVLVAPLRPASHRKEAPQGRQAGALPHEDLPFWLVRWLLFRLMFASGVVKLTSRCPAWWGLTALTYHYETQCLPTPAAWFAHHLPVWLHKLSVVATFLIEIAVPPLFFAPIRRLRLAAFYSQVLLQVLIIITGNYNFFNLMTLVLTTALLDDQHLAAEPGHGSRKKTATSWPKALLATLSLLLELAVYGLLAYGTVHYFGLEVDWQQRTIHSRTTFTFHQFSQWLKTLTLPTVWLGVASLVWELLSALWRWTQVRGWLRKLSAVVQLSLVGTATVALFLISLVPYSYVEPGTHGRLWTGAHRLFGAVEHLQLANSYGLFRRMTGLGGRPEVVLEGSYDGHHWTEIEFMYKPGNLSRPPPVVVPHQPRLDWQMWFAALGPHTHSPWFTSLVLRLLQGKEPVIRLVQSQVARYPFHKQPPTYVRAQRYKYWFSQPGEQGQWWRRQWVEEFFPSVSLGDPTLETLLRQFGLQEKSPPRTRSANSTLAQALHWTRSQLSPLEAPALLWGLLMAVGAVRFVQALLAPCSLRSSPLAPVSGEKRRPASQKDSGAASEQATAAPNPCSSSSRTTRRKK

SEQ ID NO: 33879 - protein, 594 aa, Homo sapiens
MAGSRLPRQLFLQGVAAVFMFAFASLYTQIPGLYGPEGILPARRTLRPQGKGRWQQLWETPTLLWEAPRLGLDTAQGLELLSLLGALVALGALLLSPLRHPVIYLLLWAAYLSACQVGQVFLYFQWDSLLLETGFLAVLVAPLRPASHRKEAPQGRQAGALPHEDLPFWLVRWLLFRLMFASGVVKLTSRCPAWWGLTALTYHYETQCLPTPAAWFAHHLPVWLHKLSVVATFLIEIAVPPLFFAPIRRLRLAAFYSQVLLQVLIIITGNYNFFNLMTLVLTTALLDDQHLAAEPGHGSRKKTATSWPKALLATLSLLLELAVYGLLAYGTVHYFGLEVDWQQRTIHSRTTFTFHQFSQWLKTLTLPTVWLGVASLVWELLSALWRWTQVRDWQMWFAALGPHTHSPWFTSLVLRLLQGKEPVIRLVQSQVARYPFHKQPPTYVRAQRYKYWFSQPGEQGQWWRRQWVEEFFPSVSLGDPTLETLLRQFGLQEKSPPRTRSANSTLAQALHWTRSQLSPLEAPALLWGLLMAVGAVRFVQALLAPCSLRSSPLAPVSGEKRRPASQKDSGAASEQATAAPNPCSSSSRTTRRKK

SEQ ID NO: 33880 - protein, 347 aa, Homo sapiens
MTERLLIKALSGGKNTKIITLNGKKMTKMPSALGKLPGLKTLVLQNNLIPKVCPELCNLTQLTTLNLGNNLLEEVPEEMKYLTSLKNLHLSGNRICRFAPGACDGLQNLILLNLNNNHLTQLPQEVSRLKSLTYMSINYNQLASIPRELCFLENLVELQLNYNQLICIPEEIKFLKKLQKLLLARNNIGVLPEELCDLKKLRILDIAGNIIQIFPSGFQDLKLREFYCEGNPLFLQQPVISTQQENVWSLQEITSRFVMNQLAENNPFLMDDIERYPQVRSMISQGKTCAICGQYFITVWLECVRFVPPPKDWKISKNLKLVPLQVLICSYKCFTQRDPNLFGIAQV

SEQ ID NO: 33881 - protein, 191 aa, Homo sapiens
MTERLLIKALSGGKNTKIITLNGKKMTKMPSALGKLPGLKTLVLQNNLIPKVCPELCNLTQFQDLKLREFYCEGNPLFLQQPVISTQQENVWSLQEITSRFVMNQLAENNPFLMDDIERYPQVRSMISQGKTCAICGQYFITVWLECVRFVPPPKDWKISKNLKLVPLQVLICSYKCFTQRDPNLFGIAQV

SEQ ID NO: 33882 - protein, 131 aa, Homo sapiens
MTHSSQDTGSCGIQEDGKLYVVDSINDLNKLNLCPAGSQHLFPLEDKIPVLGTNSGNGSRSLFFVGLLIVLIVSLALVFFVIFLIVQTGNKMDDVSRRLTAEGKDIDDLKRINNMIVKRLNQLNQLDSEQN

SEQ ID NO: 33883 - protein, 59 aa, Homo sapiens
MTHSSQDTGSCGIQEDGKLYVVDSINDLNKLNLCPAGSQHLFLLRQSSKNFPKRSKEIA

SEQ ID NO: 33884 - protein, 259 aa, Homo sapiens
MNLVDLWLTRSLSMCLLLQSFVLMILCFHSASMCPKGCLCSSSGGLNVTCSNANLKEIPRDLPPETVLLYLDSNQITSIPNEIFKDLHQLRVLNLSKNGIEFIDEHAFKGVAETLQTLDLSDNRIQSVHKNAFNNLKARARIANNPWHCDCTLQQVLRSMASNHETAHNVICKTSVLDEHAGRPFLNAANDADLCNLPKKTTDYAMLVTMFGWFTMVISYVVYYVRQNQEDARRHLEYLKSLPSRQKKADEPDDISTVV

SEQ ID NO: 33885 - protein, 195 aa, Homo sapiens
MAAPPGEYFSVGSQVSCRTCQEQRLQGEVVAFDYQSKMLALKCPSSSGKPNHADILLINLQYVSEVEIINDRTETPPPLASLNVSKLASKARTEKEEKLSQAYAISAGVSLEGQQLFQTIHKTIKDCKWQEKNIVVMEEVVITPPYQVENCKGKEGSALSHVRKIVEKHFRDVESQKILQRSQAQQPQKEAALSS

SEQ ID NO: 33886 - protein, 198 aa, Homo sapiens
MAAPPGEYFSVGSQVSCRTCQEQRLQGEVVAFDYQSKMLALISPECPSSSGKPNHADILLINLQYVSEVEIINDRTETPPPLASLNVSKLASKARTEKEEKLSQAYAISAGVSLEGQQLFQTIHKTIKDCKWQEKNIVVMEEVVITPPYQVENCKGKEGSALSHVRKIVEKHFRDVESQKILQRSQAQQPQKEAALSS

SEQ ID NO: 33887 - protein, 192 aa, Homo sapiens
MNKRDYMNTSVQEPPLDYSFRSIHVIQDLVNEEPRTGLRPLKRSKSGKSLTQSLWLNNNVLNDLRDFNQVASQLLEHPENLAWIDLSFNDLTSIDPVLTTFFNLSVLYLHGNSIQRLGEVNKLAVLPRLRSLTLHGNPMEEEKGYRQYVLCTLSRITTFDFSGVTKADRTTAEVWKRMNIKPKKAWTKQNTL

SEQ ID NO: 33888 - protein, 158 aa, Homo sapiens
MNKRDYMNTSVQEPPLDYSFRSIHVIQDLVNEEPRTGLRPLKRSKSGKSLTQSLWLNNNVLNDLRDFNQVASQLLEHPENLAWIDLSFNDLTSIDPVLTTFFNLSVLYLHGNSIQRLGEVNKLAVLPRLRSLTLHGNPMEEEKGYRVPGSVEMPHRPP

SEQ ID NO: 33889 - protein, 146 aa, Homo sapiens
MNKRDYMNTSVQEPPLDYSFRSIHVIQDLVNEEPRTGLRPLKRSKSGKSLTQSLWLNNNVLNDLRDFNQVASQLLEHPENLAWIDLSFNDLTSIDPVLTTFFNLSVLYLHGNSIQRLGEVNKLAVLPRLRSLTLHGNPMEEEKGYR

SEQ ID NO: 33890 - protein, 227 aa, Homo sapiens
MNKRDYMNTSVQEPPLDYSFRSIHVIQDLVNEEPRTGLRPLKRSKSGKSLTQSLWLNNNVLNDLRDFNQVASQLLEHPENLAWIDLSFNDLTSIDPVLTTFFNLSVLYLHGNSIQRLGEVNKLAVLPRLRSLTLHGNPMEEEKGYSRPWTPRPVLCSGPPAQGPGRDHVPCHCIGLPATGGNIAGAVPALLPIAGAHGLAAKPPRLPVRAADRGAGLQLRAHPCPAR

SEQ ID NO: 33891 - protein, 187 aa, Homo sapiens
MNKRDYMNTSVQEPPLDYSFRSIHVIQDLVNEEPRTGLRPLKRSKSGKSLTQSLWLNNNVLNDLRDFNQVASQLLEHPENLAWIDLSFNDLTSIDPVLTTFFNLSVLYLHGNSIQRLGEVNKLAVLPRLRSLTLHGNPMEEEKGYSRPWTPRPVLCSGPPAQPPRLPVRAADRGAGLQLRAHPCPAR

SEQ ID NO: 33892 - protein, 174 aa, Homo sapiens
MVEFQPSVTDLVNEEPRTGLRPLKRSKSGKSLTQSLWLNNNVLNDLRDFNQVASQLLEHPENLAWIDLSFNDLTSIDPVLTTFFNLSVLYLHGNSIQRLGEVNKLAVLPRLRSLTLHGNPMEEEKGYRQYVLCTLSRITTFDFSGVTKADRTTAEVWKRMNIKPKKAWTKQNTL

SEQ ID NO: 33893 - protein, 295 aa, Homo sapiens
MGLPVSWAPPALWVLGCCALLLSLWALCTACRRPEDAVAPRKRARRQRARLQGSATAAEASLLRRTHLCSLSKSDTRLHELHRGPRSSRALRPASMDLLRPHWLEVSRDITGPQAAPSAFPHQELPRALPAAAATAGCAGLEATYSNVGLAALPGVSLAASPVVAEYARVQKRKGTHRSPQEPQQGKTEVTPAAQVDVLYSRVCKPKRRDPGPTTDPLDPKGQGAILALAGDLAYQTLPLRALDVDSGPLENVYESIRELGDPAGRSSTCGAGTPPASSCPSLGRGWRPLPASLP

SEQ ID NO: 33894 - protein, 200 aa, Homo sapiens
MDLLRPHWLEVSRDITGPQAAPSAFPHQELPRALPAAAATAGCAGLEATYSNVGLAALPGVSLAASPVVAEYARVQKRKGTHRSPQEPQQGKTEVTPAAQVDVLYSRVCKPKRRDPGPTTDPLDPKGQGAILALAGDLAYQTLPLRALDVDSGPLENVYESIRELGDPAGRSSTCGAGTPPASSCPSLGRGWRPLPASLP

SEQ ID NO: 33895 - protein, 423 aa, Homo sapiens
MAAPRVFPLSCAVQQYAWGKMGSNSEVARLLASSDPLAQIAEDKPYAELWMGTHPRGDAKILDNRISQKTLSQWIAENQDSLGSKVKDTFNGNLPFLFKVLSVETPLSIQAHPNKELAEKLHLQAPQHYPDANHKPEMAIALTPFQGLCGFRPVEEIVTFLKKVPEFQFLIGDEAATHLKQTMSHDSQAVASSLQSCFSHLMKSEKKVVVEQLNLLVKRISQQAAAGNNMEDIFGELLLQLHQQYPGDIGCFAIYFLNLLTLKPGEAMFLEANVPHAYLKGDCVECMACSDNTVRAGLTPKFIDVPTLCEMLSYTPSSSKDRLFLPTRSQEDPYLSIYDPPVPDFTIMKTEVPGSVTEYKVLALDSASILLMVQGTVIASTPTTQTPIPLQRGGVLFIGANESVSLKLTEPKDLLIFRACCLL

SEQ ID NO: 33896 - protein, 362 aa, Homo sapiens
MAAPRVFPLSCAVQQYAWGKMGSNSEVARLLASSDPLAQIAEDKPYAELWMGTHPRGDAKILDNRISQKTLSQWIAENQDSLGSKVKDTFNGNLPFLFKVLSVETPLSIQAHPNKELAEKLHLQAPQHYPDANHKPEMAIALTPFQGLCGFRPVEEIVTFLKTAAGNNMEDIFGELLLQLHQQYPGDIGCFAIYFLNLLTLKPGEAMFLEANVPHAYLKGDCVECMACSDNTVRAGLTPKFIDVPTLCEMLSYTPSSSKDRLFLPTRSQEDPYLSIYDPPVPDFTIMKTEVPGSVTEYKVLALDSASILLMVQGTVIASTPTTQTPIPLQRGGVLFIGANESVSLKLTEPKDLLIFRACCLL

SEQ ID NO: 33897 - protein, 325 aa, Homo sapiens
MLCPWRTANLGLLLILTIFLVAASSSLCMDEKQITQNYSKVLAEVNTSWPVKMATNAVLCCPPIALRNLIIITWEIILRGQPSCTKAYKKETNETKETNCTDERITWVSRPDQNSDLQIRTVAITHDGYYRCIMVTPDGNFHRGYHLQVLVTPEVTLFQNRNRTAVCKAVAGKPAAHISWIPEGDCATKQEYWSNGTVTVKSTCHWEVHNVSTVTCHVSHLTGNKSLYIELLPVPGAKKSAKLYIPYIILTIIILTIVGFIWLLKVNGCRKYKLNKTESTPVVEEDEMQPYASYTEKNNPLYDTTNKVKASEALQSEVDTDLHTL

SEQ ID NO: 33898 - protein, 188 aa, Homo sapiens
MLCPWRTANLGLLLILTIFLVAEAEGAAQPNNSLMLQTSKENHALASSSLCMDEKQITQNYSKVLAEVNTSWPVKMATNAVLCCPPIALRNLIIITWEIILRGQPSCTKAYKKETNETKETNCTDERITWVSRPDQNSDLQIRTVAITHDGYYRCIMVTPDGNFHRGYHLQVLGKEHHILRYFTSPDL

SEQ ID NO: 33899 - protein, 165 aa, Homo sapiens
MLCPWRTANLGLLLILTIFLVAASSSLCMDEKQITQNYSKVLAEVNTSWPVKMATNAVLCCPPIALRNLIIITWEIILRGQPSCTKAYKKETNETKETNCTDERITWVSRPDQNSDLQIRTVAITHDGYYRCIMVTPDGNFHRGYHLQVLGKEHHILRYFTSPDL

SEQ ID NO: 33900 - protein, 348 aa, Homo sapiens
MLCPWRTANLGLLLILTIFLVAEAEGAAQPNNSLMLQTSKENHALASSSLCMDEKQITQNYSKVLAEVNTSWPVKMATNAVLCCPPIALRNLIIITWEIILRGQPSCTKAYKKETNETKETNCTDERITWVSRPDQNSDLQIRTVAITHDGYYRCIMVTPDGNFHRGYHLQVLVTPEVTLFQNRNRTAVCKAVAGKPAAHISWIPEGDCATKQEYWSNGTVTVKSTCHWEVHNVSTVTCHVSHLTGNKSLYIELLPVPGAKKSAKLYIPYIILTIIILTIVGFIWLLKVNGCRKYKLNKTESTPVVEEDEMQPYASYTEKNNPLYDTTNKVKASEALQSEVDTDLHTL

SEQ ID NO: 33901 - protein, 308 aa, Homo sapiens
MRQINQTQVTEFLLLGLSDGPHTEQLLFIVLLGVYLVTVLGNLLLISLVHVDSQLHTPMYFFLCNLSLADLCFSTNIVPQALVHLLSRKKVIAFTLCAARLLFFLIFGCTQCALLAVMSYDRYVAICNPLRYPNIMTWKVCVQLATGSWTSGILVSVVDTTFILRLPYRGSNSIAHFFCEAPALLILASTDTHASEMAIFLMGVVILLIPVFLILVSYGRIIVTVVKMKSTVGSLKAFSTCGSHLMVVILFYGSAIITYMTPKSSKQQEKSVSVFYAIVTPMLNPLIYSLRNKDVKAALRKVATRNFP

SEQ ID NO: 33902 - protein, 396 aa, Homo sapiens
MAMIELGFGRQNFHPLKRKSSLLLKLIAVVFAVLLFCEFLIYYLAIFQCNWPEVKTTASDGEQTTREPVLKAMFLADTHLLGEFLGHWLDKLRREWQMERAFQTALWLLQPEVVFILGDIFDEGKWSTPEAWADDVERFQKMFRHPSHVQLKVVAGNHDIGFHYEMNTYKVERFEKVFSSERLFSWKGINFVMVNSVALNGDGCGICSETEAELIEVSHRLNCSREARGSSRCGPGPLLPTSAPVLLQHYPLYRRSDANCSGEDAAPAEERDIPFKENYDVLSREASQKLLWWLQPRLVLSGHTHSACEVHHGGRVPELSVPSFSWRNRNNPSFIMGSITPTDYTLSKCYLPREDVVLIIYCGVVGFLVVLTLTHFGLLASPFLSGLNLLGKRKTR

SEQ ID NO: 33903 - protein, 340 aa, Homo sapiens
MAMIELGFGRQNFHPLKRKSSLLLKLIAVVFAVLLFCEFLIYYLAIFQCNWPEVKTTASDGEQTTREPVLKAMFLADTHLLGEFLGHWLDKLRREWQMERAFQTALWLLQPEVVFILGDIFDEGKWSTPEAWADDVERFQKMFRHPSHVQLKVVAGNHDIGFHYEMNTYKVERFEKVFSSERLFSWKGINFVMVNSVALNGDGCGICSETEAELIEVSHRLNCSREARGSSRCGPGPLLPTSAPVLLQHYPLYRRSDANCSGEDAAPAEERDIPFKENYDVLSREASQKLLWWLQPRLVLSGHTHSACEVHHGGRVPELSVPSFSWRNRNNPSFIMGTDA

SEQ ID NO: 33904 - protein, 341 aa, Homo sapiens
MAMIELGFGRQNFHPLKRKSSLLLKLIAVVFAVLLFCEFLIYYLAIFQCNWPEVKTTASDGEQTTREPVLKAMFLADTHLLGEFLGHWLDKLRREWQMERAFQTALWLLQPEVVFILGDIFDEGKWSTPEAWADDVERFQKMFRHPSHVQLKVVAGNHDIGFHYEMNTYKVERFEKVFSSERLFSWKGINFVMVNSVALNGDGCGICSETEAELIEVSHRLNCSREQARGSSRCGPGPLLPTSAPVLLQHYPLYRRSDANCSGEDAAPAEERDIPFKENYDVLSREASQKLLWWLQPRLVLSGHTHSACEVHHGGRVPELSVPSFSWRNRNNPSFIMGTDA

SEQ ID NO: 33905 - protein, 333 aa, Homo sapiens
MAMIELGFGRQNFHPLKRKSSLLLKLIAVVFAVLLFCEFLIYYLAIFQCNWPEVKTTASDGEQTTREPVLKAMFLADTHLLGEFLGHWLDKLRREWQMERAFQTALWLLQPEVVFILGDIFDEGKWSTPEAWADDVERFQKMFRHPSHVQLKVVAGNHDIGFHYEMNTYKVERFEKVFSSERLFSWKGINFVMVNSVALNGDGCGICSETEAELIEVSHRLNCSRELLWWLQPRLVLSGHTHSACEVHHGGRVPELSVPSFSWRNRNNPSFIMGSITPTDYTLSKCYLPREDVVLIIYCGVVGFLVVLTLTHFGLLASPFLSGLNLLGKRKTR

SEQ ID NO: 33906 - protein, 256 aa, Homo sapiens
MAMIELGFGRQNFHPLKRKSSLLLKLIAVVFAVLLFCEFLIYYLAIFQCNWPEVKTTASDGEQTTREPVLKAMFLADTHLLGEFLGHWLDKLRREWQMERAFQTALWLLQPEVVFILGDIFDEGKWSTPEAWADDVERFQKMFRHPSHVQLKVVAGNHDIGFHYEMNTYKVERFEKVFSSERLFSWKGINFVMVNSVALNGDGCGICSETEAELIEVSHRLNCSREVGEHLNATGAFCPVLLRFGCSLSPLALLAL

SEQ ID NO: 33907 - protein, 512 aa, Homo sapiens
MKAIIHLTLLALLSVNTATNQGNSADAVTTTETATSGPTVAAADTTETNFPETASTTANTPSFPTATSPAPPIISTHSSSTIPTPAPPIISTHSSSTIPIPTAADSESTTNVNSLATSDIITASSPNDGLITMVPSETQSNNEMSPTTEDNQSSGPPTGTALLETSTLNSTGPSNPCQDDPCADNSLCVKLHNTSFCLCLEGYYYNSSTCKKGKVFPGKISVTVSETFDPEEKHSMAYQDLHSEITSLFKDVFGTSVYGQTVILTVSTSLSPRSEMRADDKFVNVTIVTILAETTSDNEKTVTEKINKAIRSSSSNFLNYDLTLRCDYYGCNQTADDCLNGLACDCKSDLQRPNPQSPFCVASSLKCPDACNAQHKQCLIKKSGGAPECACVPGYQEDANGNCQKCAFGYSGLDCKDKFQLILTIVGTIAGIVILSMIIALIVTARSNNKTKHIEEENLIDEDFQNLKLRSTGFTNLGAEGSVFPKVRITASRDSQMQNPYSRHSSMPRPDY

SEQ ID NO: 33908 - protein, 334 aa, Homo sapiens
MLALAKILLISTLFYSLLSGSHGKENQDINTTQNIAEVFKTMENKPISLESEANLNSDKENITTSNLKASHSPPLNLPNNSHGITDFSSNSSAEHSLGSLKPTSTISTSPPLIHSFVSKVPWNAPIADEDLLPISAHPNATPALSSENFTWSLVNDTVKTPDNSSITVSILSSEPTSPSVTPLIVEPSGWLTTNSDSFTGFTPYQEKTTLQPTLKFTNNSKLFPNTSDPQKENRNTGIVFGAILGAILGVSLLTLVGYLLCGKRKTDSFSHRRLYDDRNEPVLRLDNAPEPYDVSFGNSSYYNPTLNDSAMPESEENARDGIPMDDIPPLRTSV

SEQ ID NO: 33909 - protein, 284 aa, Homo sapiens
MLALAKILLISTLFYSLLSGSHGKENQDINTTQNIAEVFKTMENKPISLESEANLNSDKENITTSNLKASHSPPLNLPNNSHGITDFSSNSSAEHSLGSLKPTSTISTSPPLIHSFVSKVPWNAPIADEDLLPISAHPNATPALSSENFTWSLVNDTVKTPDNSSITVSILSSEPTSPSVTPLIVEPSGWLTTNSDSFTGFTPYQEKTTLQPTLKFTNNSKLFPNTSDPQKVLRLDNAPEPYDVSFGNSSYYNPTLNDSAMPESEENARDGIPMDDIPPLRTSV

SEQ ID NO: 33910 - protein, 1940 aa, Homo sapiens
MSSDTEMEVFGIAAPFLRKSEKERIEAQNQPFDAKTYCFVVDSKEEYAKGKIKSSQDGKVTVETEDNRTLVVKPEDVYAMNPPKFDRIEDMAMLTHLNEPAVLYNLKDRYTSWMIYTYSGLFCVTVNPYKWLPVYNPEVVEGYRGKKRQEAPPHIFSISDNAYQFMLTDRENQSILITGESGAGKTVNTKRVIQYFATIAATGDLAKKKDSKMKGTLEDQIISANPLLEAFGNAKTVRNDNSSRFGKFIRIHFGTTGKLASADIETYLLEKSRVTFQLKAERSYHIFYQILSNKKPELIELLLITTNPYDYPFISQGEILVASIDDAEELLATDSAIDILGFTPEEKSGLYKLTGAVMHYGNMKFKQKQREEQAEPDGTEVADKTAYLMGLNSSDLLKALCFPRVKVGNEYVTKGQTVDQVHHAVNALSKSVYEKLFLWMVTRINQQLDTKLPRQHFIGVLDIAGFEIFEYNSLEQLCINFTNEKLQQFFNHHMFVLEQEEYKKEGIEWTFIDFGMDLAACIELIEKPMGIFSILEEECMFPKATDTSFKNKLYDQHLGKSNNFQKPKVVKGRAEAHFSLIHYAGTVDYSVSGWLEKNKDPLNETVVGLYQKSSNRLLAHLYATFATADADSGKKKVAKKKGSSFQTVSALFRENLNKLMSNLRTTHPHFVRCIIPNETKTPGAMEHSLVLHQLRCNGVLEGIRICRKGFPNRILYGDFKQRYRVLNASAIPEGQFIDSKKACEKLLASIDIDHTQYKFGHTKVFFKAGLLGTLEEMRDDRLAKLITRTQAVCRGFLMRVEFQKMVQRRESIFCIQYNIRSFMNVKHWPWMKLFFKIKPLLKSAETEKEMATMKEEFQKTKDELAKSEAKRKELEEKLVTLVQEKNDLQLQVQAESENLLDAEERCDQLIKAKFQLEAKIKEVTERAEDEEEINAELTAKKRKLEDECSELKKDIDDLELTLAKVEKEKHATENKVKNLTEELSGLDETIAKLTREKKALQEAHQQALDDLQAEEDKVNSLNKTKSKLEQQVEDLESSLEQEKKLRVDLERNKRKLEGDLKLAQESILDLENDKQQLDERLKKKDFEYCQLQSKVEDEQTLGLQFQKKIKELQARIEELEEEIEAERATRAKTEKQRSDYARELEELSERLEEAGGVTSTQIELNKKREAEFLKLRRDLEEATLQHEAMVAALRKKHADSVAELGEQIDNLQRVKQKLEKEKSEFKLEIDDLSSSMESVSKSKANLEKICRTLEDQLSEARGKNEEIQRSLSELTTQKSRLQTEAGELSRQLEEKESIVSQLSRSKQAFTQQTEELKRQLEEENKAKNALAHALQSSRHDCDLLREQYEEEQEGKAELQRALSKANSEVAQWRTKYETDAIQRTEELEEAKKKLAQRLQDSEEQVEAVNAKCASLEKTKQRLQGEVEDLMVDVERANSLAAALDKKQRNFDKVLAEWKTKCEESQAELEASLKESRSLSTELFKLKNAYEEALDQLETVKRENKNLEQEIADLTEQIAENGKTIHELEKSRKQIELEKADIQLALEEAEAALEHEEAKILRIQLELTQVKSEIDRKIAEKDEEIEQLKRNYQRTVETMQSALDAEVRSRNEAIRLKKKMEGDLNEIEIQLSHANRQAAETLKHLRSVQGQLKDTQLHLDDALRGQEDLKEQLAIVERRANLLQAEVEELRATLEQTERARKLAEQELLDSNERVQLLHTQNTSLIHTKKKLETDLMQLQSEVEDASRDARNAEEKAKKAITDAAMMAEELKKEQDTSAHLERMKKNLEQTVKDLQHRLDEAEQLALKGGKKQIQKLETRIRELEFELEGEQKKNTESVKGLRKYERRVKELTYQSEEDRKNVLRLQDLVDKLQVKVKSYKRQAEEADEQANAHLTKFRKAQHELEEAEERADIAESQVNKLRAKTRDFTSSRMVVHESEE

SEQ ID NO: 33911 - protein, 215 aa, Homo sapiens
MPGEATETVPATEQELPQPQAETGSGTESDSDESVPELEEQDSTQATTQQAQLAAAAEIDEEPVSKAKQSRSEKKARKAMSKLGLRQVTGVTRVTIRKSKNILFVITKPDVYKSPASDTYIVFGEAKIEDLSQQAQLAAAEKFKVQGEAVSNIQENTQTPTVQEESEEEEVDETGVEVKDIELVMSQANVSRAKAVRALKNNSNDIVNAIMELTM

SEQ ID NO: 33912 - protein, 2157 aa, Homo sapiens
MSVKEAGSSGRREQAAYHLHIYPQLSTTESQASCRVTATKDSTTSDVIKDAIASLRLDGTKCYVLVEVKESGGEEWVLDANDSPVHRVLLWPRRAQDEHPQEDGYYFLLQERNADGTIKYVHMQLVAQATATRRLVERGLLPRQQADFDDLCNLPELTEGNLLKNLKHRFLQQKIYTYAGSILVAINPFKFLPIYNPKYVKMYENQQLGKLEPHVFALADVAYYTMLRKRVNQCIVISGESGSGKTQSTNFLIHCLTALSQKGYASGVERTILGAGPVLEAFGNAKTAHNNNSSRFGKFIQVSYLESGIVRGAVVEKYLLEKSRLVSQEKDERNYHVFYYLLLGVSEEERQEFQLKQPEDYFYLNQHNLKIEDGEDLKHDFERLKQAMEMVGFLPATKKQIFAVLSAILYLGNVTYKKRATGREEGLEVGPPEVLDTLSQLLKVKREILVEVLTKRKTVTVNDKLILPYSLSEAITARDSMAKSLYSALFDWIVLRINHALLNKKDVEEAVSCLSIGVLDIFGFEDFERNSFEQFCINYANEQLQYYFNQHIFKLEQEEYQGEGITWHNIGYTDNVGCIHLISKKPTGLFYLLDEESNFPHATSQTLLAKFKQQHEDNKYFLGTPVMEPAFIIQHFAGKVKYQIKDFREKNMDYMRPDIVALLRGSDSSYVRELIGMDPVAVFRWAVLRAAIRAMAVLREAGRLRAERAEKAAGMSSPGAQSHPEELPRGASTPSEKLYRDLHNQMIKSIKGLPWQGEDPRSLLQSLSRLQKPRAFILKSKGIKQKQIIPKNLLDSKSLKLIISMTLHDRTTKSLLHLHKKKKPPSISAQFQTSLNKLLEALGKAEPFFIRCIRSNAEKKELCFDDELVLQQLRYTGMLETVRIRRSGYSAKYTFQDFTEQFQVLLPKDAQPCREVISTLLEKMKIDKRNYQIGKTKVFLKETERQALQETLHREVVRKILLLQSWFRMVLERRHFLQMKRAAVTIQACWRSYRVRRALERTQAAVYLQASWRGYWQRKLYRHQKQSIIRLQSLCRGHLQRKSFSQMISEKQKAEEKEREALEAARAGAEEGGQGQAAGGQQVAEQGPEPAEDGGHLASEPEVQPSDRSPLEHSSPEKEAPSPEKTLPPQKTVAAESHEKVPSSREKRESRRQRGLEHVKFQNKHIQSCKEESALREPSRRVTQEQGVSLLEDKKESREDETLLVVETEAENTSQKQPTEQPQAMAVGKVSEETEKTLPSGSPRPGQLERPTSLALDSRVSPPAPGSAPETPEDKSKPCGSPRVQEKPDSPGGSTQIQRYLDAERLASAVELWRGKKLVAAASPSAMLSQSLDLSDRHRATGAALTPTEERRTSFSTSDVSKLLPSLAKAQPAAETTDGERSAKKPAVQKKKPGDASSLPDAGLSPGSQVDSKSTFKRLFLHKTKDKKYSLEGAEELENAVSGHVVLEATTMKKGLEAPSGQQHRHAAGEKRTKEPGGKGKKNRNVKIGKITVSEKWRESVFRQITNANELKYLDEFLLNKINDLRSQKTPIESLFIEATEKFRSNIKTMYSVPNGKIHVGYKDLMENYQIVVSNLATERGQKDTNLVLNLFQSLLDEFTRGYTKNDFEPVKQSKAQKKKRKQERAVQEHNGHVFASYQVSIPQSCEQCLSYIWLMDKALLCSVCKMTCHKKCVHKIQSHCSYTYGRKGEPGVEPGHFGVCVDSLTSDKASVPIVLEKLLEHVEMHGLYTEGLYRKSGAANRTRELRQALQTDPAAVKLENFPIHAITGVLKQWLRELPEPLMTFAQYGDFLRAVELPEKQEQLAAIYAVLEHLPEANHNSLERLIFHLVKVALLEDVNRMSPGALAIIFAPCLLRCPDNSDPLTSMKDVLKITTCVEMLIKEQMRKYKVKMEEISQLEAAESIAFRRLSLLRQNAPWPLKLGFSSPYEGVLNKSPKTRDIQEEELEVLLEEEAAGGDEDREKEILIERIQSIKEEKEDITYRLPELDPRGSDEENLDSETSASTESLLEERAGRGASEGPPAPALPCPGAPTPSPLPTVAAPPRRRPSSFVTVRVKTPRRTPIMPTANIKLPPGLPSHLPRWAPGAREAAAPVRRREPPARRPDQIHSVYITPGADLPVQGALEPLEEDGQPPGAKRRYSDPPTYCLPPASGQTNG

SEQ ID NO: 33913 - protein, 2022 aa, Homo sapiens
MSVKEAGSSGRREQAAYHLHIYPQLSTTESQASCRVTATKDSTTSDVIKDAIASLRLDGTKCYVLVEVKESGGEEWVLDANDSPVHRVLLWPRRAQDEHPQEDGYYFLLQERNADGTIKYVHMQLVAQATATRRLVERGLLPRQQADFDDLCNLPELTEGNLLKNLKHRFLQQKIYTYAGSILVAINPFKFLPIYNPKYVKMYENQQLGKLEPHVFALADVAYYTMLRKRVNQCIVISGESGSGKTQSTNFLIHCLTALSQKGYASGVERTILGAGPVLEAFGNAKTAHNNNSSRFGKFIQVSYLESGIVRGAVVEKYLLEKSRLVSQEKDERNYHVFYYLLLGVSEEERQEFQLKQPEDYFYLNQHNLKIEDGEDLKHDFERLKQAMEMVGFLPATKKQIFAVLSAILYLGNVTYKKRATGREEGLEVGPPEVLDTLSQLLKVKREILVEVLTKRKTVTVNDKLILPYSLSEAITARDSMAKSLYSALFDWIVLRINHALLNKKDVEEAVSCLSIGVLDIFGFEDFERNSFEQFCINYANEQLQYYFNQHIFKLEQEEYQGEGITWHNIGYTDNVGCIHLISKKPTGLFYLLDEESNFPHATSQTLLAKFKQQHEDNKYFLGTPVMEPAFIIQHFAGKVKYQIKDFREKNMDYMRPDIVALLRGSDSSYVRELIGMDPVAVFRWAVLRAAIRAMAVLREAGRLRAERAEKAAGMSSPGAQSHPEELPRGASTPSEKLYRDLHNQMIKSIKGLPWQGEDPRSLLQSLSRLQKPRAFILKSKGIKQKQIIPKNLLDSKSLKLIISMTLHDRTTKSLLHLHKKKKPPSISAQFQTSLNKLLEALGKAEPFFIRCIRSNAEKKELCFDDELVLQQLRYTGMLETVRIRRSGYSAKYTFQDFTEQFQVLLPKDAQPCREVISTLLEKMKIDKRNYQIGKTKVFLKETERQALQETLHREVVRKILLLQSWFRMVLERRHFLQMKRAAVTIQACWRSYRVRRALERTQAAVYLQASWRGYWQRKLYRHQKQSIIRLQSLCRGHLQRKSFSQMISEKQKAEEKEREALEAARAGAEEGGQGQAAGGQQVAEQGPEPAEDGGHLASEPEVQPSDRSPLEHSSPEKEAPSPEKTLPPQKTVAAESHEKVPSSREKRESRRQRGLEHVKFQNKHIQSCKEESALREPSRRVTQEQGVSLLEDKKESREDETLLVVETEAENTSQKQPTEQPQAMAVGKVSEETEKTLPSGSPRPGQLERPTSLALDSRVSPPAPGSAPETPEDKSKPCGSPRVQEKPDSPGGSTQIQRYLDAERLASAVELWRGKKLVAAASPSAMLSQSLDLSDRHRATGAALTPTEERRTSFSTSDVSKLLPSLAKAQPAAETTDGERSAKKPAVQKKKPGDASSLPDAGLSPGSQVDSKSTFKRLFLHKTKDKKYSLEGAEELENAVSGHVVLEATTMKKGLEAPSGQQHRHAAGEKRTKEPGGKGKKNRNVKIGKITVSEKWRESVFRQITNANELKYLDEFLLNKINDLRSQKTPIESLFIEATEKFRSNIKTMYSVPNGKIHVGYKDLMENYQIVVSNLATERGQKDTNLVLNLFQSLLDEFTRGYTKNDFEPVKQSKAQKKKRKQERAVQEHNGHVFASYQVSIPQSCEQCLSYIWLMDKALLCSVCKMTCHKKCVHKIQSHCSYTYGRKGEPGVEPGHFGVCVDSLTSDKASVPIVLEKLLEHVEMHGLYTEGLYRKSGAANRTRELRQALQTDPAAVKLENFPIHAITGVLKQWLRELPEPLMTFAQYGDFLRAVELPEKQEQLAAIYAVLEHLPEANHNSLERLIFHLVKVALLEDVNRMSPGALAIIFAPCLLRCPDNSDPLTSMKDVLKITTCVEMLIKEQMRKYKVKMEEISQLEAAESIAFRRLSLLRQNAPWPLKLGFSSPYEGVLNKSPKTRDIQEEELEVLLEEEAAGGDEDREKEILIERIQSIKEEKEDITYRLPELDPRGSDEENLDSETSASTESLLEERAGRGASEGQY

SEQ ID NO: 33914 - protein, 215 aa, Homo sapiens
MPGEATETVPATEQELPQSQAETGSGTASDSGESVPGIEEQDSTQTTTQKAWLVAAAEIDEEPVGKAKQSRSEKRARKAMSKLGLLQVTGVTRVTIWKSKNILFVITKLDVYKSPASDAYIVFGEAKIQDLSQQAQLAAAEKFRVQGEAVGNIQENTQTPTVQEESEEEEVDETGVEVKDVKLVMSQANVSRAKAVRALKNNSNDIVNAIMELTV

SEQ ID NO: 33915 - protein, 153 aa, Homo sapiens
MNVGTAHSEVNPNTRVMNSRGIWLSYVLAIGLLHIVLLSIPFVSVPVVWTLTNLIHNMGMYIFLHTVKGTPFETPDQGKARLLTHWEQMDYGVQFTASRKFLTITPIVLYFLTSFYTKYDQIHFVLNTVSLMSVLIPKLPQLHGVRIFGINKY

SEQ ID NO: 33916 - protein, 137 aa, Homo sapiens
MNVGTAHSEVNPNTRVMNSRGIWLSYVLAIGLLHIVLLSIPFGMYIFLHTVKGTPFETPDQGKARLLTHWEQMDYGVQFTASRKFLTITPIVLYFLTSFYTKYDQIHFVLNTVSLMSVLIPKLPQLHGVRIFGINKY

SEQ ID NO: 33917 - protein, 365 aa, Homo sapiens
MGNITADNSSMSCTIDHTIHQTLAPVVYVTVLVVGFPANCLSLYFGYLQIKARNELGVYLCNLTVADLFYICSLPFWLQYVLQHDNWSHGDLSCQVCGILLYENIYISVGFLCCISVDRYLAVAHPFRFHQFRTLKAAVGVSVVIWAKELLTSIYFLMHEEVIEDENQHRVCFEHYPIQAWQRAINYYRFLVGFLFPICLLLASYQGILRAVRRSHGTQKSRKDQIQRLVLSTVVIFLACFLPYHVLLLVRSVWEASCDFAKGVFNAYHFSLLLTSFNCVADPVLYCFVSETTHRDLARLRGACLAFLTCSRTGRAREAYPLGAPEASGKSGAQGEEPELLTKLHPAFQTPNSPGSGGFPTGRLA

SEQ ID NO: 33918 - protein, 396 aa, Homo sapiens
MPPKKGGDGIKPPPIIGRFGTSLKIGIVGLPNVGKSTFFNVLTNSQASAENFPFCTIDPNESRVPVPDERFDFLCQYHKPASKIPAFLNVVDIAGLVKGAHNGQGLGNAFLSHISACDGIFHLTRAFEDDDITHVEGSVDPIRDIEIIHEELQLKDEEMIGPIIDKLEKVAVRGGDKKLKPEYDIMCKVKSWVIDQKKPVRFYHDWNDKEIEVLNKHLFLTSKPMVYLVNLSEKDYIRKKNKWLIKIKEWVDKYDPGALVIPFSGALELKLQELSAEERQKYLEANMTQSALPKIIKAGFAALQLEYFFTAGPDEVRAWTIRKGTKAPQAAGKIHTDFEKGFIMAEVMKYEDFKEEGSENAVKAAGKYRQQGRNYIVEDGDIIFFKFNTPQQPKKK

SEQ ID NO: 33919 - protein, 238 aa, Homo sapiens
MIGPIIDKLEKVAVRGGDKKLKPEYDIMCKVKSWVIDQKKPVRFYHDWNDKEIEVLNKHLFLTSKPMVYLVNLSEKDYIRKKNKWLIKIKEWVDKYDPGALVIPFSGALELKLQELSAEERQKYLEANMTQSALPKIIKAGFAALQLEYFFTAGPDEVRAWTIRKGTKAPQAAGKIHTDFEKGFIMAEVMKYEDFKEEGSENAVKAAGKYRQQGRNYIVEDGDIIFFKFNTPQQPKKK

SEQ ID NO: 33920 - protein, 278 aa, Homo sapiens
MPPKKGGDGIKPPPIIGRFGTSLKIGIVGLPNVGKSTFFNVLTNSQASAENFPFCTIDPNESRVPVPDERFDFLCQYHKPASKIPAFLNVVDIAGLVKGAHNGQGLGNAFLSHISACDGIFHLTRAFEDDDITHVEGSVDPIRDIEIIHEELQLKDEEMIGPIIDKLEKVAVRGGDKKLKPEYDIMCKVKSWVIDQKKPVRFYHDWNDKEIEVLNKHLFLTSKPMVYLVNLSEKDYIRKKNKWLLESTDNKAEIILLKMEILSSSNLTHLNNRRRNKI

SEQ ID NO: 33921 - protein, 432 aa, Homo sapiens
MPAGRAARTCALLALCLLGAGAQDFGPTRFICTSVPVDADMCAASVAAGGAEELRSSVLQLRETVLQQKETILSQKETIRELTAKLGRCESQSTLDPGAGEARAGGGRKQPGSGKNTMGDLSRTPAAETLSQLGQTLQSLKTRLENLEQYSRLNSSSQTNSLKDLLQSKIDELERQVLSRVNTLEEGKGGPRNDTEERVKIETALTSLHQRISELEKGQKDNRPGDKFQLTFPLRTNYMYAKVKKSLPEMYAFTVCMWLKSSATPGVGTPFSYAVPGQANELVLIEWGNNPMEILINDKVAKLPFVINDGKWHHICVTWTTRDGVWEAYQDGTQGGSGENLAPYHPIKPQGVLVLGQEQDTLGGGFDATQAFVGELAHFNIWDRKLTPGEVYNLATCSTKALSGNVIAWAESHIEIYGGATKWTFEACRQIN

SEQ ID NO: 33922 - protein, 320 aa, Homo sapiens
METGNQTHAQEFLLLGFSATSEIQFILFGLFLSMYLVTFTGNLLIILAICSDSHLHTPMYFFLSNLSFADLCFTSTTVPKMLLNILTQNKFITYAGCLSQIFFFTSFGCLDNLLLTVMAYDRFVAVCHPLHYTVIMNPQLCGLLVLGSWCISVMGSLLETLTVLRLSFCTEMEIPHFFCDLLEVLKLACSDTFINNVVIYFATGVLGVISFTGIFFSYYKIVFSILRISSAGRKHKAFSTCGSHLSVVTLFYGTGFGVYLSSAATPSSRTSLVASVMYTMVTPMLNPFIYSLRNTDMKRALGRLLSRATFFNGDITAGLS

SEQ ID NO: 33923 - protein, 477 aa, Homo sapiens
MSSSRKDHLGASSSEPLPVIIVGNGPSGICLSYLLSGYTPYTKPDAIHPHPLLQRKLTEAPGVSILDQDLDYLSEGLEGRSQSPVALLFDALLRPDTDFGGNMKSVLTWKHRKEHAIPHVVLGRNLPGGAWHSIEGSMVILSQGQWMGLPDLEVKDWMQKKRRGLRNSRATAGDIAHYYRDYVVKKGLGHNFVSGAVVTAVEWGTPDPSSCGAQDSSPLFQVSGFLTRNQAQQPFSLWARNVVLATGTFDSPARLGIPGEALPFIHHELSALEAATRVGAVTPASDPVLIIGAGLSAADAVLYARHYNIPVIHAFRRAVDDPGLVFNQLPKMLYPEYHKVHQMMREQSILSPSPYEGYRSLPRHQLLCFKEDCQAVFQDLEGVEKVFGVSLVLVLIGSHPDLSFLPGAGADFAVDPDQPLSAKRNPIDVDPFTYQSTRQEGLYAMGPLAGDNFVRFVQGGALAVASSLLRKETRKPP

SEQ ID NO: 33924 - protein, 313 aa, Homo sapiens
MEPRNQTSASQFILLGLSEKPEQETLLFSLFFCMYLVMVVGNLLIILAISIDSHLHTPMYFFLANLSLVDFCLATNTIPKMLVSLQTGSKAISYPCCLIQMYFFHFFGIVDSVIIAMMAYDRFVAICHPLHYAKIMSLRLCRLLVGALWAFSCFISLTHILLMARLVFCGSHEVPHYFCDLTPILRLSCTDTSVNRIFILIVAGMVIATPFVCILASYARILVAIMKVPSAGGRKKAFSTCSSHLSVVALFYGTTIGVYLCPSSVLTTVKEKASAVMYTAVTPMLNPFIYSLRNRDLKGALRKLVNRKITSSS

SEQ ID NO: 33925 - protein, 595 aa, Homo sapiens
MTSPLCRAASANALPPQDQASTPSSRVKGREASGKPSHLRGKGTAQAWTPGRSKGGSFHRGAGKPSVHSQVAELHKKIQLLEGDRKAFFESSQWNIKKNQETISQLRKETKALELKLLDLLKGDEKVVQAVIREWKWEKPYLKNRTGQALEHLDHRLREKVKQQNALRHQVVLRQRRLEELQLQHSLRLLEMAEAQNRHTEVAKTMRNLENRLEKAQMKAQEAEHITSVYLQLKAYLMDESLNLENRLDSMEAEVVRTKHELEALHVVNQEALNARDIAKNQLQYLEETLVRERKKRERYISECKKRAEEKKLENERMERKTHREHLLLQSDDTIQDSLHAKEEELRQRWSMYQMEVIFGKVKDATGTDETHSLVRRFLAQGDTFAQLETLKSENEQTLVRLKQEKQQLQRELEDLKYSGEATLVSQQKLQAEAQERLKKEERRHAEAKDQLERALRAMQVAKDSLEHLASKLIHITVEDGRFAGKELDPQADNYVPNLLGLVEEKLLKLQAQLQGHDVQEMLCHIANREFLASLEGRLPEYNTRIALPLATSKDKFFDEESEEEDNEVVTRASLKIRSQKLIESHKKHRRSRRS

SEQ ID NO: 33926 - protein, 541 aa, Homo sapiens
MHPPVAPCKKLRCPPTRSFTPTRGRSKEGDRKAFFESSQWNIKKNQETISQLRKETKALELKLLDLLKGDEKVVQAVIREWKWEKPYLKNRTGQALEHLDHRLREKVKQQNALRHQVVLRQRRLEELQLQHSLRLLEMAEAQNRHTEVAKTMRNLENRLEKAQMKAQEAEHITSVYLQLKAYLMDESLNLENRLDSMEAEVVRTKHELEALHVVNQEALNARDIAKNQLQYLEETLVRERKKRERYISECKKRAEEKKLENERMERKTHREHLLLQSDDTIQDSLHAKEEELRQRWSMYQMEVIFGKVKDATGTDETHSLVRRFLAQGDTFAQLETLKSENEQTLVRLKQEKQQLQRELEDLKYSGEATLVSQQKLQAEAQERLKKEERRHAEAKDQLERALRAMQVAKDSLEHLASKLIHITVEDGRFAGKELDPQADNYVPNLLGLVEEKLLKLQAQLQGHDVQEMLCHIANREFLASLEGRLPEYNTRIALPLATSKDKFFDEESEEEDNEVVTRASLKIRSQKLIESHKKHRRSRRS

SEQ ID NO: 33927 - protein, 979 aa, Homo sapiens
MALFAVFQTTFFLTLLSLRTYQSEVLAERLPLTPVSLKVSTNSTRQSLHLQWTVHNLPYHQELKMVFQIQISRIETSNVIWVGNYSTTVKWNQVLHWSWESELPLECATHFVRIKSLVDDAKFPEPNFWSNWSSWEEVSVQDSTGQDILFVFPKDKLVEEGTNVTICYVSRNIQNNVSCYLEGKQIHGEQLDPHVTAFNLNSVPFIRNKGTNIYCEASQGNVSEGMKGIVLFVSKVLEEPKDFSCETEDFKTLHCTWDPGTDTALGWSKQPSQSYTLFESFSGEKKLCTHKNWCNWQITQDSQETYNFTLIAENYLRKRSVNILFNLTHRVYLMNPFSVNFENVNATNAIMTWKVHSIRNNFTYLCQIELHGEGKMMQYNVSIKVNGEYFLSELEPATEYMARVRCADASHFWKWSEWSGQNFTTLEAAPSEAPDVWRIVSLEPGNHTVTLFWKPLSKLHANGKILFYNVVVENLDKPSSSELHSIPAPANSTKLILDRCSYQICVIANNSVGASPASVIVISADPENKEVEEERIAGTEGGFSLSWKPQPGDVIGYVVDWCDHTQDVLGDFQWKNVGPNTTSTVISTDAFRPGVRYDFRIYGLSTKRIACLLEKKTGYSQELAPSDNPHVLVDTLTSHSFTLSWKDYSTESQPGFIQGYHVYLKSKARQCHPRFEKAVLSDGSECCKYKIDNPEEKALIVDNLKPESFYEFFITPFTSAGEGPSATFTKVTTPDEHSSMLIHILLPMVFCVLLIMVMCYLKSQWIKETCYPDIPDPYKSSILSLIKFKENPHLIIMNVSDCIPDAIEVVSKPEGTKIQFLGTRKSLTETELTKPNYLYLLPTEKNHSGPGPCICFENLTYNQAASDSGSCGHVPVSPKAPSMLGLMTSPENVLKALEKNYMNSLGEIPAGETSLNYVSQLASPMFGDKDSLPTNPVEAPHCSEYKMQMAVSLRLALPPPTENSSLSSITLLDPGEHYC

SEQ ID NO: 33928 - protein, 342 aa, Homo sapiens
MALFAVFQTTFFLTLLSLRTYQSEVLAERLPLTPVSLKVSTNSTRQSLHLQWTVHNLPYHQELKMVFQIQISRIETSNVIWVGNYSTTVKWNQVLHWSWESELPLECATHFVRIKSLVDDAKFPEPNFWSNWSSWEEVSVQDSTGQDILFVFPKDKLVEEGTNVTICYVSRNIQNNVSCYLEGKQIHGEQLDPHVTAFNLNSVPFIRNKGTNIYCEASQGNVSEGMKGIVLFVSKVLEEPKDFSCETEDFKTLHCTWDPGTDTALGWSKQPSQSYTLFESFSGEKKLCTHKNWCNWQITQDSQETYNFTLIAENYLRKRSVNILFNLTHRGETRVVTAHRGH

SEQ ID NO: 33929 - protein, 273 aa, Homo sapiens
MTFDDLKIQTVKDQPDEKSNGKKAKGLQFLYSPWWCLAAATLGVLCLGLVVTIMVLGMQLSQVSDLLTQEQANLTHQKKKLEGQISARQQAEEASQESENELKEMIETLARKLNEKSKEQMELHHQNLNLQETLKRVANCSAPCPQDWIWHGENCYLFSSGSFNWEKSQEKCLSLDAKLLKINSTADLDFIQQAISYSSFPFWMGLSRRNPSYPWLWEDGSPLMPHLFRVRGAVSQTYPSGTCAYIQRGAVYAENCILAAFSICQKKANLRAQ

SEQ ID NO: 33930 - protein, 181 aa, Homo sapiens
MTFDDLKIQTVKDQPDEKSNGKKAKGLQFLYSPWWCLAAATLGVLCLGLVVTIMVLGMQLSQVSDLLTQEQANLTHQKKKLEGQISARQQAEEASQESENELKEMIETLARKLNEKSKEQMELHHQNLNLQETLKRVANCSGLHPASNFLFQFSILDGAVSEEPQLPMALGGRFSFDAPLI

SEQ ID NO: 33931 - protein, 189 aa, Homo sapiens
MTFDDLKIQTVKDQPDEKSNGKKAKGLQFLYSPWWCLAAATLGVLCLGLVVTIMVLGMQLSQVSDLLTQEQANLTHQKKKLEGQISARQQAEEASQESENELKEMIETLARKLNEKSKEQMELHHQNLNLQETLKRVANCSAPCPQDWIWHGENCYLFSSGSFNWEKSQEKCLSLDAKLLKINSTADLI

SEQ ID NO: 33932 - protein, 861 aa, Homo sapiens
MAHYPTRLKTRKTYSWVGRPLLDRKLHYQTYREMCVKTEGCSTEIHIQIGQFVLIEGDDDENPYVAKLLELFEDDSDPPPKKRARVQWFVRFCEVPACKRHLLGRKPGAQEIFWYDYPACDSNINAETIIGLVRVIPLAPKDVVPTNLKNEKTLFVKLSWNEKKFRPLSSELFAELNKPQESAAKCQKPVRAKSKSAESPSWTPAEHVAKRIESRHSASKSRQTPTHPLTPRARKRLELGNLGNPQMSQQTSCASLDSPGRIKRKVAFSEITSPSKRSQPDKLQTLSPALKAPEKTRETGLSYTEDDKKASPEHRIILRTRIAASKTIDIREERTLTPISGGQRSSVVPSVILKPENIKKRDAKEAKAQNEATSTPHRIRRKSSVLTMNRIRQQLRFLGNSKSDQEEKEILPAAEISDSSSDEEEASTPPLPRRAPRTVSRNLRSSLKSSLHTLTKVPKKSLKPRTPRCAAPQIRSRSLAAQEPASVLEEARLRLHVSAVPESLPCREQEFQDIYNFVESKLLDHTGGCMYISGVPGTGKTATVHEVIRCLQQAAQANDVPPFQYIEVNGMKLTEPHQVYVQILQKLTGQKATANHAAELLAKQFCTRGSPQETTVLLVDELDLLWTHKQDIMYNLFDWPTHKEARLVVLAIANTMDLPERIMMNRVSSRLGLTRMCFQPYTYSQLQQILRSRLKHLKAFEDDAIQLVARKVAALSGDARRCLDICRRATEICEFSQQKPDSPGLVTIAHSMEAVDEMFSSSYITAIKNSSVLEQSFLRAILAEFRRSGLEEATFQQIYSQHVALCRMEGLPYPTMSETMAVCSHLGSCRLLLVEPSRNDLLLRVRLNVSQDDVLYALKDE

SEQ ID NO: 33933 - protein, 270 aa, Homo sapiens
MFAPRLLDFQKTKYARFMNHRVPAHKRYQPTEYEHAANCATHAFWIIPSILGSSNLYFLSDDDWETISAWIYGLGLCGLFVVSTVFHTISWKKSHLRMVEHCLHMFDRMVIYFFIAASYAPWLNLRELGPWASHMRWLVWIMASVGTIYVFFFHERTGSCVQFLRGEACPKAGTACLPARYKLVELLCYVVMGFFPALVILSMPNTEGIWELVTGGVFYCLGMVFFKSDGRIPFAHAIWHLFVAFGAGTHYYAIWRYLYLPSTLQTKVSK

SEQ ID NO: 33934 - protein, 246 aa, Homo sapiens
MFAPRLLDFQKTKYARFMNHRVPAHKRYQPTEYEHAANCATHAFWIIPSILGSSNLYFLSDDDWETISAWIYGLGLCGLFVVSTVFHTISWKKSHLRMVEHCLHMFDRMVIYFFIAASYAPWLNLRELGPWASHMRWLVWIMASVGTIYVFFFHERYKLVELLCYVVMGFFPALVILSMPNTEGIWELVTGGVFYCLGMVFFKSDGRIPFAHAIWHLFVAFGAGTHYYAIWRYLYLPSTLQTKVSK

SEQ ID NO: 33935 - protein, 193 aa, Homo sapiens
MFAPRLLDFQKTKYARFMNHRVPAHKRYQPTEYEHAANCATHAFWIIPSILGSSNLYFLSDDDWETISAWIYGLGLCGLFVVSTVFHTISWKKSHLRMVEHCLHMFDRMVIYFFIAASYAPWLNLRELGPWASHMRWLVWIMASVGTIYVFFFHERYKLVELLCYVVMGFFPALVILSMAGKLRPGMTCLKRQ

SEQ ID NO: 33936 - protein, 321 aa, Homo sapiens
MVNLTSMSGFLLMGFSDERKLQILHALVFLVTYLLALTGNLLIITIITVDRRLHSPMYYFLKHLSLLDLCFISVTVPQSIANSLMGNGYISLVQCILQVFFFIALASSEVAILTVMSYDRYAAICQPLHYETIMDPRACRHAVIAVWIAGGLSGLMHAAINFSIPLCGKRVIHQFFCDVPQMLKLACSYEFINEIALAAFTTSAAFICLISIVLSYIRIFSTVLRIPSAEGRTKVFSTCLPHLFVATFFLSAAGFEFLRLPSDSSSTVDLVFSVFYTVIPPTLNPVIYSLRNDSMKAALRKMLSKEELPQRKMCLKAMFKL

SEQ ID NO: 33937 - protein, 311 aa, Homo sapiens
MGSFNTSFEDGFILVGFSDWPQLEPILFVFIFIFYSLTLFGNTIIIALSWLDLRLHTPMYFFLSHLSLLDLCFTTSTVPQLLINLCGVDRTITRGGCVAQLFIYLALGSTECVLLVVMAFDRYAAVCRPLHYMAIMHPHLCQTLAIASWGAGFVNSLIQTGLAMAMPLCGHRLNHFFCEMPVFLKLACADTEGTEAKMFVARVIVVAVPAALILGSYVHIAHAVLRVKSTAGRRKAFGTCGSHLLVVFLFYGSAIYTYLQSIHNYSEREGKFVALFYTIITPILNPLIYTLRNKDVKGALWKVLWRGRDSG

SEQ ID NO: 33938 - protein, 238 aa, Homo sapiens
MRFKNRFQRFMNHRAPANGRYKPTCYEHAANCYTHAFLIVPAIVGSALLHRLSDDCWEKITAWIYGMGLCALFIVSTVFHIVSWKKSHLRTVEHCFHMCDRMVIYFFIAASYAPWLNLRELGPLASHMRWFIWLMAAGGTIYVFLYHEKYKVVELFFYLTMGFSPALVVTSMNNTDGLQELACGGLIYCLGVVFFKSDGIIPFAHAIWHLFVATAAAVHYYAIWKYLYRSPTDFMRHL

SEQ ID NO: 33939 - protein, 1997 aa, Homo sapiens
MALLIHLKTVSELRGRGDRIAKVTFRGQSFYSRVLENCEDVADFDETFRWPVASSIDRNEMLEIQVFNYSKVFSNKLIGTFRMVLQKVVEESHVEVTDTLIDDNNAIIKTSLCVEVRYQATDGTVGSWDDGDFLGDESLQEEEKDSQETDGLLPGSRPSSRPPGEKSFRRAGRSVFSAMKLGKNRSHKEEPQRPDEPAVLEMEDLDHLAIRLGDGLDPDSVSLASVTALTTNVSNKRSKPDIKMEPSAGRPMDYQVSITVIEARQLVGLNMDPVVCVEVGDDKKYTSMKESTNCPYYNEYFVFDFHVSPDVMFDKIIKISVIHSKNLLRSGTLVGSFKMDVGTVYSQPEHQFHHKWAILSDPDDISSGLKGYVKCDVAVVGKGDNIKTPHKANETDEDDIEGNLLLPEGVPPERQWARFYVKIYRAEGLPRMNTSLMANVKKAFIGENKDLVDPYVQVFFAGQKGKTSVQKSSYEPLWNEQVVFTDLFPPLCKRMKVQIRDSDKVNDVAIGTHFIDLRKISNDGDKGFLPTLGPAWVNMYGSTRNYTLLDEHQDLNEGLGEGVSFRARLLLGLAVEIVDTSNPELTSSTEVQVEQATPISESCAGKMEEFFLFGAFLEASMIDRRNGDKPITFEVTIGNYGNEVDGLSRPQRPRPRKEPGDEEEVDLIQNASDDEAGDAGDLASVSSTPPMRPQVTDRNYFHLPYLERKPCIYIKSWWPDQRRRLYNANIMDHIADKLEEGLNDIQEMIKTEKSYPERRLRGVLEELSCGCCRFLSLADKDQGHSSRTRLDRERLKSCMRELENMGQQARMLRAQVKRHTVRDKLRLCQNFLQKLRFLADEPQHSIPDIFIWMMSNNKRVAYARVPSKDLLFSIVEEETGKDCAKVKTLFLKLPGKRGFGSAGWTVQAKVELYLWLGLSKQRKEFLCGLPCGFQEVKAAQGLGLHAFPPVSLVYTKKQAFQLRAHMYQARSLFAADSSGLSDPFARVFFINQSQCTEVLNETLCPTWDQMLVFDNLELYGEAHELRDDPPIIVIEIYDQDSMGKADFMGRTFAKPLVKMADEAYCPPRFPPQLEYYQIYRGNATAGDLLAAFELLQIGPAGKADLPPINGPVDVDRGPIMPVPMGIRPVLSKYRVEVLFWGLRDLKRVNLAQVDRPRVDIECAGKGVQSSLIHNYKKNPNFNTLVKWFEVDLPENELLHPPLNIRVVDCRAFGRYTLVGSHAVSSLRRFIYRPPDRSAPSWNTTVRLLRRCRVLCNGGSSSHSTGEVVVTMEPEVPIKKLETMVKLDATSEAVVKVDVAEEEKEKKKKKKGTAEEPEEEEPDESMLDWWSKYFASIDTMKEQLRQQEPSGIDLEEKEEVDNTEGLKGSMKGKEKARAAKEEKKKKTQSSGSGQGSEAPEKKKPKIDELKVYPKELESEFDNFEDWLHTFNLLRGKTGDDEDGSTEEERIVGRFKGSLCVYKVPLPEDVSREAGYDSTYGMFQGIPSNDPINVLVRVYVVRATDLHPADINGKADPYIAIRLGKTDIRDKENYISKQLNPVFGKSFDIEASFPMESMLTVAVYDWDLVGTDDLIGETKIDLENRFYSKHRATCGIAQTYSTHGYNIWRDPMKPSQILTRLCKDGKVDGPHFGPPGRVKVANRVFTGPSEIEDENGQRKPTDEHVALLALRHWEDIPRAGCRLVPEHVETRPLLNPDKPGIEQGRLELWVDMFPMDMPAPGTPLDISPRKPKKYELRVIIWNTDEVVLEDDDFFTGEKSSDIFVRGWLKGQQEDKQDTDVHYHSLTGEGNFNWRYLFPFDYLAAEEKIVISKKESMFSWDETEYKIPARLTLQIWDADHFSADDFLGAIELDLNRFPRGAKTAKQCTMEMATGEVDVPLVSIFKQKRVKGWWPLLARNENDEFELTGKVEAELHLLTAEEAEKNPVGLARNEPDPLEKPNRPDTSFIWFLNPLKSARYFLWHTYRWLLLKLLLLLLLLLLLALFLYSVPGYLVKKILGA

SEQ ID NO: 33940 - protein, 1230 aa, Homo sapiens
MIKTEKSYPERRLRGVLEELSCGCCRFLSLADKDQGHSSRTRLDRERLKSCMRELENMGQQARMLRAQVKRHTVRDKLRLCQNFLQKLRFLADEPQHSIPDIFIWMMSNNKRVAYARVPSKDLLFSIVEEETGKDCAKVKTLFLKLPGKRGFGSAGWTVQAKVELYLWLGLSKQRKEFLCGLPCGFQEVKAAQGLGLHAFPPVSLVYTKKQAFQLRAHMYQARSLFAADSSGLSDPFARVFFINQSQCTEVLNETLCPTWDQMLVFDNLELYGEAHELRDDPPIIVIEIYDQDSMGKADFMGRTFAKPLVKMADEAYCPPRFPPQLEYYQIYRGNATAGDLLAAFELLQIGPAGKADLPPINGPVDVDRGPIMPVPMGIRPVLSKYRVEVLFWGLRDLKRVNLAQVDRPRVDIECAGKGVQSSLIHNYKKNPNFNTLVKWFEVDLPENELLHPPLNIRVVDCRAFGRYTLVGSHAVSSLRRFIYRPPDRSAPSWNTTGEVVVTMEPEVPIKKLETMVKLDATSEAVVKVDVAEEEKEKKKKKKGTAEEPEEEEPDESMLDWWSKYFASIDTMKEQLRQQEPSGIDLEEKEEVDNTEGLKGSMKGKEKARAAKEEKKKKTQSSGSGQGSEAPEKKKPKIDELKVYPKELESEFDNFEDWLHTFNLLRGKTGDDEDGSTEEERIVGRFKGSLCVYKVPLPEDVSREAGYDSTYGMFQGIPSNDPINVLVRVYVVRATDLHPADINGKADPYIAIRLGKTDIRDKENYISKQLNPVFGKSFDIEASFPMESMLTVAVYDWDLVGTDDLIGETKIDLENRFYSKHRATCGIAQTYSTHGYNIWRDPMKPSQILTRLCKDGKVDGPHFGPPGRVKVANRVFTGPSEIEDENGQRKPTDEHVALLALRHWEDIPRAGCRLVPEHVETRPLLNPDKPGIEQGRLELWVDMFPMDMPAPGTPLDISPRKPKKYELRVIIWNTDEVVLEDDDFFTGEKSSDIFVRGWLKGQQEDKQDTDVHYHSLTGEGNFNWRYLFPFDYLAAEEKIVISKKESMFSWDETEYKIPARLTLQIWDADHFSADDFLGAIELDLNRFPRGAKTAKQCTMEMATGEVDVPLVSIFKQKRVKGWWPLLARNENDEFELTGKVEAELHLLTAEEAEKNPVGLARNEPDPLEKPNRPDTAFVWFLNPLKSIKYLICTRYKWLIIKIVLALLGLLMLGLFLYSLPGYMVKKLLGA

SEQ ID NO: 33941 - protein, 1307 aa, Homo sapiens
MMTDTQDGPSESSQIMRSLTPLINREEAFGEAGEAGLWPSITHTPDSQEEGLNDIQEMIKTEKSYPERRLRGVLEELSCGCCRFLSLADKDQGHSSRTRLDRERLKSCMRELENMGQQARMLRAQVKRHTVRDKLRLCQNFLQKLRFLADEPQHSIPDIFIWMMSNNKRVAYARVPSKDLLFSIVEEETGKDCAKVKTLFLKLPGKRGFGSAGWTVQAKVELYLWLGLSKQRKEFLCGLPCGFQEVKAAQGLGLHAFPPVSLVYTKKQAFQLRAHMYQARSLFAADSSGLSDPFARVFFINQSQCTEVLNETLCPTWDQMLVFDNLELYGEAHELRDDPPIIVIEIYDQDSMGKADFMGRTFAKPLVKMADEAYCPPRFPPQLEYYQIYRGNATAGDLLAAFELLQIGPAGKADLPPINGPVDVDRGPIMPVPMGIRPVLSKYRVEVLFWGLRDLKRVNLAQVDRPRVDIECAGKGVQSSLIHNYKKNPNFNTLVKWFEVDLPENELLHPPLNIRVVDCRAFGRYTLVGSHAVSSLRRFIYRPPDRSAPSWNTTVRLLRRCRVLCNGGSSSHSTGEVVVTMEPEVPIKKLETMVKLDATSEAVVKVDVAEEEKEKKKKKKGTAEEPEEEEPDESMLDWWSKYFASIDTMKEQLRQQEPSGIDLEEKEEVDNTEGLKGSMKGKEKARAAKEEKKKKTQSSGSGQGSEAPEKKKPKIDELKVYPKELESEFDNFEDWLHTFNLLRGKTGDDEDGSTEEERIVGRFKGSLCVYKVPLPEDVSREAGYDSTYGMFQGIPSNDPINVLVRVYVVRATDLHPADINGKADPYIAIRLGKTDIRDKENYISKQLNPVFGKSFDIEASFPMESMLTVAVYDWDLVGTDDLIGETKIDLENRFYSKHRATCGIAQTYSTHGYNIWRDPMKPSQILTRLCKDGKVDGPHFGPPGRVKVANRVFTGPSEIEDENGQRKPTDEHVALLALRHWEDIPRAGCRLVPEHVETRPLLNPDKPGIEQGRLELWVDMFPMDMPAPGTPLDISPRKPKKYELRVIIWNTDEVVLEDDDFFTGEKSSDIFVRGWLKGQQEDKQDTDVHYHSLTGEGNFNWRYLFPFDYLAAEEKIVISKKESMFSWDETEYKIPARLTLQIWDADHFSADDFLGAIELDLNRFPRGAKTAKQCTMEMATGEVDVPLVSIFKQKRVKGWWPLLARNENDEFELTGKVEAELHLLTAEEAEKNPVGLARNEPDPLEKPNRPDTSFIWFLNPLKSARYFLWHTYRWLLLKLLLLLLLLLLLALFLYSVPGYLVKKILGA

SEQ ID NO: 33942 - protein, 1230 aa, Homo sapiens
MIKTEKSYPERRLRGVLEELSCGCCRFLSLADKDQGHSSRTRLDRERLKSCMRELENMGQQARMLRAQVKRHTVRDKLRLCQNFLQKLRFLADEPQHSIPDIFIWMMSNNKRVAYARVPSKDLLFSIVEEETGKDCAKVKTLFLKLPGKRGFGSAGWTVQAKVELYLWLGLSKQRKEFLCGLPCGFQEVKAAQGLGLHAFPPVSLVYTKKQAFQLRAHMYQARSLFAADSSGLSDPFARVFFINQSQCTEVLNETLCPTWDQMLVFDNLELYGEAHELRDDPPIIVIEIYDQDSMGKADFMGRTFAKPLVKMADEAYCPPRFPPQLEYYQIYRGNATAGDLLAAFELLQIGPAGKADLPPINGPVDVDRGPIMPVPMGIRPVLSKYRVEVLFWGLRDLKRVNLAQVDRPRVDIECAGKGVQSSLIHNYKKNPNFNTLVKWFEVDLPENELLHPPLNIRVVDCRAFGRYTLVGSHAVSSLRRFIYRPPDRSAPSWNTTGEVVVTMEPEVPIKKLETMVKLDATSEAVVKVDVAEEEKEKKKKKKGTAEEPEEEEPDESMLDWWSKYFASIDTMKEQLRQQEPSGIDLEEKEEVDNTEGLKGSMKGKEKARAAKEEKKKKTQSSGSGQGSEAPEKKKPKIDELKVYPKELESEFDNFEDWLHTFNLLRGKTGDDEDGSTEEERIVGRFKGSLCVYKVPLPEDVSREAGYDSTYGMFQGIPSNDPINVLVRVYVVRATDLHPADINGKADPYIAIRLGKTDIRDKENYISKQLNPVFGKSFDIEASFPMESMLTVAVYDWDLVGTDDLIGETKIDLENRFYSKHRATCGIAQTYSTHGYNIWRDPMKPSQILTRLCKDGKVDGPHFGPPGRVKVANRVFTGPSEIEDENGQRKPTDEHVALLALRHWEDIPRAGCRLVPEHVETRPLLNPDKPGIEQGRLELWVDMFPMDMPAPGTPLDISPRKPKKYELRVIIWNTDEVVLEDDDFFTGEKSSDIFVRGWLKGQQEDKQDTDVHYHSLTGEGNFNWRYLFPFDYLAAEEKIVISKKESMFSWDETEYKIPARLTLQIWDADHFSADDFLGAIELDLNRFPRGAKTAKQCTMEMATGEVDVPLVSIFKQKRVKGWWPLLARNENDEFELTGKVEAELHLLTAEEAEKNPVGLARNEPDPLEKPNRPDTSFIWFLNPLKSARYFLWHTYRWLLLKLLLLLLLLLLLALFLYSVPGYLVKKILGA

SEQ ID NO: 33943 - protein, 1997 aa, Homo sapiens
MALLIHLKTVSELRGRGDRIAKVTFRGQSFYSRVLENCEDVADFDETFRWPVASSIDRNEMLEIQVFNYSKVFSNKLIGTFRMVLQKVVEESHVEVTDTLIDDNNAIIKTSLCVEVRYQATDGTVGSWDDGDFLGDESLQEEEKDSQETDGLLPGSRPSSRPPGEKSFRRAGRSVFSAMKLGKNRSHKEEPQRPDEPAVLEMEDLDHLAIRLGDGLDPDSVSLASVTALTTNVSNKRSKPDIKMEPSAGRPMDYQVSITVIEARQLVGLNMDPVVCVEVGDDKKYTSMKESTNCPYYNEYFVFDFHVSPDVMFDKIIKISVIHSKNLLRSGTLVGSFKMDVGTVYSQPEHQFHHKWAILSDPDDISSGLKGYVKCDVAVVGKGDNIKTPHKANETDEDDIEGNLLLPEGVPPERQWARFYVKIYRAEGLPRMNTSLMANVKKAFIGENKDLVDPYVQVFFAGQKGKTSVQKSSYEPLWNEQVVFTDLFPPLCKRMKVQIRDSDKVNDVAIGTHFIDLRKISNDGDKGFLPTLGPAWVNMYGSTRNYTLLDEHQDLNEGLGEGVSFRARLLLGLAVEIVDTSNPELTSSTEVQVEQATPISESCAGKMEEFFLFGAFLEASMIDRRNGDKPITFEVTIGNYGNEVDGLSRPQRPRPRKEPGDEEEVDLIQNASDDEAGDAGDLASVSSTPPMRPQVTDRNYFHLPYLERKPCIYIKSWWPDQRRRLYNANIMDHIADKLEEGLNDIQEMIKTEKSYPERRLRGVLEELSCGCCRFLSLADKDQGHSSRTRLDRERLKSCMRELENMGQQARMLRAQVKRHTVRDKLRLCQNFLQKLRFLADEPQHSIPDIFIWMMSNNKRVAYARVPSKDLLFSIVEEETGKDCAKVKTLFLKLPGKRGFGSAGWTVQAKVELYLWLGLSKQRKEFLCGLPCGFQEVKAAQGLGLHAFPPVSLVYTKKQAFQLRAHMYQARSLFAADSSGLSDPFARVFFINQSQCTEVLNETLCPTWDQMLVFDNLELYGEAHELRDDPPIIVIEIYDQDSMGKADFMGRTFAKPLVKMADEAYCPPRFPPQLEYYQIYRGNATAGDLLAAFELLQIGPAGKADLPPINGPVDVDRGPIMPVPMGIRPVLSKYRVEVLFWGLRDLKRVNLAQVDRPRVDIECAGKGVQSSLIHNYKKNPNFNTLVKWFEVDLPENELLHPPLNIRVVDCRAFGRYTLVGSHAVSSLRRFIYRPPDRSAPSWNTTVRLLRRCRVLCNGGSSSHSTGEVVVTMEPEVPIKKLETMVKLDATSEAVVKVDVAEEEKEKKKKKKGTAEEPEEEEPDESMLDWWSKYFASIDTMKEQLRQQEPSGIDLEEKEEVDNTEGLKGSMKGKEKARAAKEEKKKKTQSSGSGQGSEAPEKKKPKIDELKVYPKELESEFDNFEDWLHTFNLLRGKTGDDEDGSTEEERIVGRFKGSLCVYKVPLPEDVSREAGYDSTYGMFQGIPSNDPINVLVRVYVVRATDLHPADINGKADPYIAIRLGKTDIRDKENYISKQLNPVFGKSFDIEASFPMESMLTVAVYDWDLVGTDDLIGETKIDLENRFYSKHRATCGIAQTYSTHGYNIWRDPMKPSQILTRLCKDGKVDGPHFGPPGRVKVANRVFTGPSEIEDENGQRKPTDEHVALLALRHWEDIPRAGCRLVPEHVETRPLLNPDKPGIEQGRLELWVDMFPMDMPAPGTPLDISPRKPKKYELRVIIWNTDEVVLEDDDFFTGEKSSDIFVRGWLKGQQEDKQDTDVHYHSLTGEGNFNWRYLFPFDYLAAEEKIVISKKESMFSWDETEYKIPARLTLQIWDADHFSADDFLGAIELDLNRFPRGAKTAKQCTMEMATGEVDVPLVSIFKQKRVKGWWPLLARNENDEFELTGKVEAELHLLTAEEAEKNPVGLARNEPDPLEKPNRPDTAFVWFLNPLKSIKYLICTRYKWLIIKIVLALLGLLMLGLFLYSLPGYMVKKLLGA

SEQ ID NO: 33944 - protein, 312 aa, Homo sapiens
MENYNQTSTDFILLGFFPPSRIGLFLFILIVFIFLMALIGNLSMILLIFLDTHLHTPMYFLLSQLSLIDLNYISTIVPKMASDFLSGNKSISFTGCGIQSFFFSALGGAEALLLASMAYDRYIAICFPLHYPIRMSKRMCVLMITGSWIIGSINACAHTVYVLHIPYCQSRAINHFFCDVPAMVTLACMDTWVYEGTVFLSTTIFLVFPFIAISCSYGRVLLAVYHMKSAEGRKKAYLTCSTHLTVVTFYYAPFVYTYLRPRSLRSPTEDKVLAVFYTTLTPMLNPIIYSLRNKEVMGALTRVSQRICSGKM

SEQ ID NO: 33945 - protein, 312 aa, Homo sapiens
MEPLNRTEVSEFFLKGFSGYPALEHLLFPLCSAMYLVTLLGNTAIMAVSVLDIHLHTPVYFFLGNLSTLDICYTPTFVPLMLVHLLSSRKTISFAVCAIQMCLSLSTGSTECLLLAITAYDRYLAICQPLRYHVLMSHRLCVLLMGAAWVLCLLKSVTEMVISMRLPFCGHHVVSHFTCKILAVLKLACGNTSVSEDFLLAGSILLLPVPLAFICLSYLLILATILRVPSAARCCKAFSTCLAHLAVVLLFYGTIIFMYLKPKSKEAHISDEVFTVLYAMVTTMLNPTIYSLRNKEVKEAARKVWGRSRASR

SEQ ID NO: 33946 - protein, 178 aa, Homo sapiens
MADGKAGDEKPEKSQRAGAAGGPEEEAEKPVKTKTVSSSNGGESSSRSAEKRSAEEEAADLPTKPTKISKFGFAIGSQTTKKASAISIKLGSSKPKETVPTLAPKTLSVAAAFNEDEDSEPEEMPPEAKMRMKNIGRDTPTSAGPNSFNKGKHGFSDNQKLWERNIKSHLGNVHDQDN

SEQ ID NO: 33947 - protein, 130 aa, Homo sapiens
MADGKAGDEKPEKSQRAGAAGGPEEEAEKPVKTKTVSSSNGGESSSRSAEKRSAEEEAADLPTKPTKISKFGFAIGSQTTKKASAISIKLGSSKPKETVPTLAPKTLSVAAAFNEDEDGYTNISWTKLLQ

SEQ ID NO: 33948 - protein, 55 aa, Homo sapiens
MPPEAKMRMKNIGRDTPTSAGPNSFNKGKHGFSDNQKLWERNIKSHLGNVHDQDN

SEQ ID NO: 33949 - protein, 316 aa, Homo sapiens
MVNQSSPMGFLLLGFSEHPALERTLFVVVFTSYLLTLVGNTLIILLSVLYPRLHSPMYFFLSDLSFLDLCFTTSCVPQMLVNLWGPKKTISFLGCSVQLFIFLSLGTTECILLTVMAFDRYVAVCQPLHYATIIHPRLCWQLASVAWVMSLVQSIVQTPSTLHLPFCPHQQIDDFLCEVPSLIRLSCGDTSYNEIQLAVSSVIFVVVPLSLILASYGATAQAVLRINSATAWRKAFGTCSSHLTVVTLFYSSVIAVYLQPKNPYAQGRGKFFGLFYAVGTPSLNPLVYTLRNKEIKRALRRLLGKERDSRESWRAA

SEQ ID NO: 33950 - protein, 340 aa, Homo sapiens
MEPGRTQIKLDPRYTADLLEVLKTNYGIPSACFSQPPTAAQLLRALGPVELALTSILTLLALGSIAIFLEDAVYLYKNTLCPIKRRTLLWKSSAPTVVSVLCCFGLWIPRSLVLVEMTITSFYAVCFYLLMLVMVEGFGGKEAVLRTLRDTPMMVHTGPCCCCCPCCPRLLLTRKKLQLLMLGPFQYAFLKITLTLVGLFLVPDGIYDPADISEGSTALWINTFLGVSTLLALWTLGIISRQARLHLGEQNMGAKFALFQVLLILTALQPSIFSVLANGGQIACSPPYSSKTRSQVMNCHLLILETFLMTVLTRMYYRRKDHKVGYETFSSPDLDLNLKA

SEQ ID NO: 33951 - protein, 309 aa, Homo sapiens
MEPRKNVTDFVLLGFTQNPKEQKVLFVMFLLFYILTMVGNLLIVVTVTVSETLGSPMYFFLAGLSFIDIIYSSSISPRLISGLFFGNNSISFQSCMAQLFIEHIFGGSEVFLLLVMAYDCYVAICKPLHYLVIMRQWVCVVLLVVSWVGGFLHSVFQLSIIYGLPFCGPNVIDHFFCDMYPLLKLVCTDTHAIGLLVVANGGLACTIVFLLLLISYGVILHSLKNLSQKGRQKALSTCSSHMTVVVFFFVPCIFMYARPARTFPIDKSVSVFYTVITPMLNPLIYTLRNSEMTSAMKKLWRRDLISSST

SEQ ID NO: 33952 - protein, 316 aa, Homo sapiens
MRLMKEVRGRNQTEVTEFLLLGLSDNPDLQGVLFALFLLIYMANMVGNLGMIVLIKIDLCLHTPMYFFLSSLSFVDASYSSSVTPKMLVNLMAENKAISFHGCAAQFYFFGSFLGTECFLLAMMAYDRYAAIWNPLLYPVLVSGRICFLLIATSFLAGCGNAAIHTGMTFRLSFCGSNRINHFYCDTPPLLKLSCSDTHFNGIVIMAFSSFIVISCVMIVLISYLCIFIAVLKMPSLEGRHKAFSTCASYLMAVTIFFGTILFMYLRPTSSYSMEQDKVVSVFYTVIIPVLNPLIYSLKNKDVKKALKKILWKHIL

SEQ ID NO: 33953 - protein, 310 aa, Homo sapiens
MEGNKTWITDITLPRFQVGPALEILLCGLFSAFYTLTLLGNGVIFGIICLDCKLHTPMYFFLSHLAIVDISYASNYVPKMLTNLMNQESTISFFPCIMQTFLYLAFAHVECLILVVMSYDRYADICHPLRYNSLMSWRVCTVLAVASWVFSFLLALVPLVLILSLPFCGPHEINHFFCEILSVLKLACADTWLNQVVIFAACVFILVGPLCLVLVSYLRILAAILRIQSGEGRRKAFSTCSSHLCVVGLFFGSAIVTYMAPKSRHPEEQQKVLSLFYSLFNPMLNPLIYSLRNAEVKGALRRALRKERLT

SEQ ID NO: 33954 - protein, 391 aa, Homo sapiens
MDLEKNYPTPRTSRTGHGGVNQLGGVFVNGRPLPDVVRQRIVELAHQGVRPCDISRQLRVSHGCVSKILGRYYETGSIKPGVIGGSKPKVATPKVVEKIAEYKRQNPTMFAWEIRDRLLAERVCDNDTVPSVSSINRIIRTKVQQPPNQPVPASSHSIVSTGSVTQVSSVSTDSAGSSYSISGILGITSPSADTNKRKRDEGIQESPVPNGHSLPGRDFLRKQMRGDLFTQQQLEVLDRVFERQHYSDIFTTTEPIKPEQTTEYSAMASLAGGLDDMKANLASPTPADIGSSVPGPQSYPIVTGRDLASTTLPGYPPHVPPAGQGSYSAPTLTGMVPGSEFSGSPYSHPQYSSYNDSWRFPNPGLLGSPYYYSAAARGAAPPAAATAYDRH

SEQ ID NO: 33955 - protein, 362 aa, Homo sapiens
MDLEKNYPTPRTSRTGHGGVNQLGGVFVNGRPLPDVVRQRIVELAHQGVRPCDISRQLRVSHGCVSKILGRYYETGSIKPGVIGGSKPKVATPKVVEKIAEYKRQNPTMFAWEIRDRLLAERVCDNDTVPSVSSINRIIRTKVQQPPNQPVPASSHSIVSTGSVTQVSSVSTDSAGSSYSISGILGITSPSADTNKRKRDEGIQESPVPNGHSLPGRDFLRKQMRGDLFTQQQLEVLDRVFERQHYSDIFTTTEPIKPEQTTEYSAMASLAGGLDDMKANLASPTPADIGSSVPGPQSYPIVTGRDLASTTLPGYPPHVPPAGQGSYSAPTLTGMVPGSPYYYSAAARGAAPPAAATAYDRH

SEQ ID NO: 33956 - protein, 324 aa, Homo sapiens
MDLEKNYPTPRTSRTGHGGVNQLGGVFVNGRPLPDVVRQRIVELAHQGVRPCDISRQLRVSHGCVSKILGRYYETGSIKPGVIGGSKPKVATPKVVEKIAEYKRQNPTMFAWEIRDRLLAERVCDNDTVPSVSSINRIIRTKVQQPPNQPVPASSHSIVSTGSVTQVSSVSTDSAGSSYSISGILGITSPSADTNKRKRDEGIQESPVPNGHSLPGRDFLRKQMRGDLFTQQQLEVLDRVFERQHYSDIFTTTEPIKPEQGVSFPGVPTATLSIPRTTTPGGSPTRGCLAPPIIIALPPEEPPHLQPPLPMTVTDPWSQAGTKH

SEQ ID NO: 33957 - protein, 295 aa, Homo sapiens
MDLEKNYPTPRTSRTGHGGVNQLGGVFVNGRPLPDVVRQRIVELAHQGVRPCDISRQLRVSHGCVSKILGRYYETGSIKPGVIGGSKPKVATPKVVEKIAEYKRQNPTMFAWEIRDRLLAERVCDNDTVPSVSSINRIIRTKVQQPPNQPVPASSHSIVSTGSVTQVSSVSTDSAGSSYSISGILGITSPSADTNKRKRDEGIQESPVPNGHSLPGRDFLRKQMRGDLFTQQQLEVLDRVFERQHYSDIFTTTEPIKPEQAPPIIIALPPEEPPHLQPPLPMTVTDPWSQAGTKH

SEQ ID NO: 33958 - protein, 288 aa, Homo sapiens
MDLEKNYPTPRTSRTGHGGVNQLGGVFVNGRPLPDVVRQRIVELAHQGVRPCDISRQLRVSHGCVSKILGRYYETGSIKPGVIGGSKPKVATPKVVEKIAEYKRQNPTMFAWEIRDRLLAERVCDNDTVPSVSSINRIIRTKVQQPPNQPVPASSHSIVSTGSVTQVSSVSTDSAGSSYSISGILGITSPSADTNKRKRDEGIQESPVPNGHSLPGRDFLRKQMRGDLFTQQQLEVLDRVFERQHYSDIFTTTEPIKPEQAVTWRARPSPGTLHTSPPLDRAATQHRR

SEQ ID NO: 33959 - protein, 357 aa, Homo sapiens
MDLEKNYPTPRTSRTGHGGVNQLGGVFVNGRPLPDVVRQRIVELAHQGVRPCDISRQLRVSHGCVSKILGRYYETGSIKPGVIGGSKPKVATPKVVEKIAEYKRQNPTMFAWEIRDRLLAERVCDNDTVPSVSSINRIIRTKVQQPPNQPVPASSHSIVSTGSVTQVSSVSTDSAGSSYSISGILGITSPSADTNKRKRDEGIQESPVPNGHSLPGRDFLRKQMRGDLFTQQQLEVLDRVFERQHYSDIFTTTEPIKPEQTTEYSAMASLAGGLDDMKANLASPTPADIGSSVPGPQSYPIVTGSEFSGSPYSHPQYSSYNDSWRFPNPGLLGSPYYYSAAARGAAPPAAATAYDRH

SEQ ID NO: 33960 - protein, 328 aa, Homo sapiens
MDLEKNYPTPRTSRTGHGGVNQLGGVFVNGRPLPDVVRQRIVELAHQGVRPCDISRQLRVSHGCVSKILGRYYETGSIKPGVIGGSKPKVATPKVVEKIAEYKRQNPTMFAWEIRDRLLAERVCDNDTVPSVSSINRIIRTKVQQPPNQPVPASSHSIVSTGSVTQVSSVSTDSAGSSYSISGILGITSPSADTNKRKRDEGIQESPVPNGHSLPGRDFLRKQMRGDLFTQQQLEVLDRVFERQHYSDIFTTTEPIKPEQTTEYSAMASLAGGLDDMKANLASPTPADIGSSVPGPQSYPIVTGSPYYYSAAARGAAPPAAATAYDRH

SEQ ID NO: 33961 - protein, 348 aa, Homo sapiens
MDLEKNYPTPRTSRTGHGGVNQLGGVFVNGRPLPDVVRQRIVELAHQGVRPCDISRQLRVSHGCVSKILGRYYETGSIKPGVIGGSKPKVATPKVVEKIAEYKRQNPTMFAWEIRDRLLAERVCDNDTVPSVSSINRIIRTKVQQPPNQPVPASSHSIGIQESPVPNGHSLPGRDFLRKQMRGDLFTQQQLEVLDRVFERQHYSDIFTTTEPIKPEQTTEYSAMASLAGGLDDMKANLASPTPADIGSSVPGPQSYPIVTGRDLASTTLPGYPPHVPPAGQGSYSAPTLTGMVPGSEFSGSPYSHPQYSSYNDSWRFPNPGLLGSPYYYSAAARGAAPPAAATAYDRH

SEQ ID NO: 33962 - protein, 319 aa, Homo sapiens
MDLEKNYPTPRTSRTGHGGVNQLGGVFVNGRPLPDVVRQRIVELAHQGVRPCDISRQLRVSHGCVSKILGRYYETGSIKPGVIGGSKPKVATPKVVEKIAEYKRQNPTMFAWEIRDRLLAERVCDNDTVPSVSSINRIIRTKVQQPPNQPVPASSHSIGIQESPVPNGHSLPGRDFLRKQMRGDLFTQQQLEVLDRVFERQHYSDIFTTTEPIKPEQTTEYSAMASLAGGLDDMKANLASPTPADIGSSVPGPQSYPIVTGRDLASTTLPGYPPHVPPAGQGSYSAPTLTGMVPGSPYYYSAAARGAAPPAAATAYDRH

SEQ ID NO: 33963 - protein, 291 aa, Homo sapiens
MDLEKNYPTPRTSRTGHGGVNQLGGVFVNGRPLPDVVRQRIVELAHQGVRPCDISRQLRVSHGCVSKILGRIIRTKVQQPPNQPVPASSHSIVSTGSVTQVSSVSTDSAGSSYSISGILGITSPSADTNKRKRDEGIQESPVPNGHSLPGRDFLRKQMRGDLFTQQQLEVLDRVFERQHYSDIFTTTEPIKPEQTTEYSAMASLAGGLDDMKANLASPTPADIGSSVPGPQSYPIVTGSEFSGSPYSHPQYSSYNDSWRFPNPGLLGSPYYYSAAARGAAPPAAATAYDRH

SEQ ID NO: 33964 - protein, 307 aa, Homo sapiens
MDLEKNYPTPRTSRTGHGGVNQLGGVFVNGRPLPDVVRQRIVELAHQGVRPCDISRQLRVSHGCVSKILGRYYETGSIKPGVIGGSKPKVATPKVVEKIAEYKRQNPTMFAWEIRDRLLAERVCDNDTVPSVSSINRIIRTKVQQPPNQPVPASSHSIVSTGSVTQVSSVSTDSAGSSYSISGILGITSPSADTNKRKRDEGIQESPVPNGHSLPGRDFLRKQMRGDLFTQQQLEVLDRVFERQHYSDIFTTTEPIKPEQWCPVLMRQYLVQPQAVLFQAVTWRARPSPGTLHTSPPLDRAATQHRR

SEQ ID NO: 33965 - protein, 346 aa, Homo sapiens
MAMAQKLSHLLPSLRQVIQEPQLSLQPEPVFTVDRAEVPPLFWKPYIYAGYRPLHQTWRFYFRTLFQQHNEAVNVWTHLLAALVLLLRLALFVETVDFWGDPHALPLFIIVLASFTYLSFSALAHLLQAKSEFWHYSFFFLDYVGVAVYQFGSALAHFYYAIEPAWHAQVQAVFLPMAAFLAWLSCIGSCYNKYIQKPGLLGRTCQEVPSVLAYALDISPVVHRIFVSSDPTTDDPALLYHKCQVVFFLLAAAFFSTFMPERWFPGSCHVFGQGHQLFHIFLVLCTLAQLEAVALDYEARRPIYEPLHTHWPHNFSGLFLLTVGSSILTAFLLSQLVQRKLDQKTK

SEQ ID NO: 33966 - protein, 320 aa, Homo sapiens
MAETLQLNSTFLHPNFFILTGFPGLGSAQTWLTLVFGPIYLLALLGNGALPAVVWIDSTLHQPMFLLLAILAATDLGLATSIAPGLLAVLWLGPRSVPYAVCLVQMFFVHALTAMESGVLLAMACDRAAAIGRPLHYPVLVTKACVGYAALALALKAVAIVVPFPLLVAKFEHFQAKTIGHTYCAHMAVVELVVGNTQATNLYGLALSLAISGMDILGITGSYGLIAHAVLQLPTREAHAKAFGTCSSHICVILAFYIPGLFSYLTHRFGHHTVPKPVHILLSNIYLLLPPALNPLIYGARTKQIRDRLLETFTFRKSPL

SEQ ID NO: 33967 - protein, 1135 aa, Homo sapiens
MHQMNAKMHFRFVFALLIVSFNHDVLGKNLKYRIYEEQRVGSVIARLSEDVADVLLKLPNPSTVRFRAMQRGNSPLLVVNEDNGEISIGATIDREQLCQKNLNCSIEFDVITLPTEHLQLFHIEVEVLDINDNSPQFSRSLIPIEISESAAVGTRIPLDSAFDPDVGENSLHTYSLSANDFFNIEVRTRTDGAKYAELIVVRELDRELKSSYELQLTASDMGVPQRSGSSILKISISDSNDNSPAFEQQSYIIQLLENSPVGTLLLDLNATDPDEGANGKIVYSFSSHVSPKIMETFKIDSERGHLTLFKQVDYEITKSYEIDVQAQDLGPNSIPAHCKIIIKVVDVNDNKPEININLMSPGKEEISYIFEGDPIDTFVALVRVQDKDSGLNGEIVCKLHGHGHFKLQKTYENNYLILTNATLDREKRSEYSLTVIAEDRGTPSLSTVKHFTVQINDINDNPPHFQRSRYEFVISENNSPGAYITTVTATDPDLGENGQVTYTILESFILGSSITTYVTIDPSNGAIYALRIFDHEEVSQITFVVEARDGGSPKQLVSNTTVVLTIIDENDNVPVVIGPALRNNTAEITIPKGAESGFHVTRIRAIDRDSGVNAELSCAIVAGNEENIFIIDPRSCDIHTNVSMDSVPYTEWELSVIIQDKGNPQLHTKVLLKCMIFEYAESVTSTAMTSVSQASLDVSMIIIISLGAICAVLLVIMVLFATRCNREKKDTRSYNCRVAESTYQHHPKRPSRQIHKGDITLVPTINGTLPIRSHHRSSPSSSPTLERGQMGSRQSHNSHQSLNSLVTISSNHVPENFSLELTHATPAVEQVSQLLSMLHQGQYQPRPSFRGNKYSRSYRYALQDMDKFSLKDSGRGDSEAGDSDYDLGRDSPIDRLLGEGFSDLFLTDGRIPAAMRLCTEECRVLGHSDQCWMPPLPSPSSDYRSNMFIPGEEFPTQPQQQHPHQSLEDDAQPADSGEKKKSFSTFGKDSPNDEDTGDTSTSSLLSEMSSVFQRLLPPSLDTYSECSEVDRSNSLERRKGPLPAKTVGYPQGVAAWAASTHFQNPTTNCGPPLGTHSSVQPSSKWLPAMEEIPENYEEDDFDNVLNHLNDGKHELMDASELVAEINKLLQDVRQS

SEQ ID NO: 33968 - protein, 1134 aa, Homo sapiens
MHQMNAKMHFRFVFALLIVSFNHDVLGKNLKYRIYEEQRVGSVIARLSEDVADVLLKLPNPSTVRFRAMQRGNSPLLVVNEDNGEISIGATIDREQLCQKNLNCSIEFDVITLPTEHLQLFHIEVEVLDINDNSPQFSRSLIPIEISESAAVGTRIPLDSAFDPDVGENSLHTYSLSANDFFNIEVRTRTDGAKYAELIVVRELDRELKSSYELQLTASDMGVPQRSGSSILKISISDSNDNSPAFEQQSYIIQLLENSPVGTLLLDLNATDPDEGANGKIVYSFSSHVSPKIMETFKIDSERGHLTLFKQVDYEITKSYEIDVQAQDLGPNSIPAHCKIIIKVVDVNDNKPEININLMSPGKEEISYIFEGDPIDTFVALVRVQDKDSGLNGEIVCKLHGHGHFKLQKTYENNYLILTNATLDREKRSEYSLTVIAEDRGTPSLSTVKHFTVQINDINDNPPHFQRSRYEFVISENNSPGAYITTVTATDPDLGENGQVTYTILESFILGSSITTYVTIDPSNGAIYALRIFDHEEVSQITFVVEARDGGSPKQLVSNTTVVLTIIDENDNVPVVIGPALRNNTAEITIPKGAESGFHVTRIRAIDRDSGVNAELSCAIVAGNEENIFIIDPRSCDIHTNVSMDSVPYTEWELSVIIQDKGNPQLHTKVLLKCMIFEYAESVTSTAMTSVSQASLDVSMIIIISLGAICAVLLVIMVLFATRCNREKKDTRSYNCRVAESTYQHHPKRPSRQIHKGDITLVPTINGTLPIRSHHRSSPSSSPTLERGQMGSRQSHNSHQSLNSLVTISSNHVPENFSLELTHATPAVEVSQLLSMLHQGQYQPRPSFRGNKYSRSYRYALQDMDKFSLKDSGRGDSEAGDSDYDLGRDSPIDRLLGEGFSDLFLTDGRIPAAMRLCTEECRVLGHSDQCWMPPLPSPSSDYRSNMFIPGEEFPTQPQQQHPHQSLEDDAQPADSGEKKKSFSTFGKDSPNDEDTGDTSTSSLLSEMSSVFQRLLPPSLDTYSECSEVDRSNSLERRKGPLPAKTVGYPQGVAAWAASTHFQNPTTNCGPPLGTHSSVQPSSKWLPAMEEIPENYEEDDFDNVLNHLNDGKHELMDASELVAEINKLLQDVRQS

SEQ ID NO: 33969 - protein, 322 aa, Homo sapiens [sequence omitted]

SEQ ID NO: 33970 - protein, 403 aa, Homo sapiens
MSGSDGGLEEEPELSITLTLRMLMHGKEVGSIIGKKGETVKRIREQSSARITISEGSCPERITTITGSTAAVFHAVSMIAFKLDEDLCAAPANGGNVSRPPVTLRLVIPASQCGSLIGKAGTKIKEIRETTGAQVQVAGDLLPNSTERAVTVSGVPDAIILCVRQICAVILESPPKGATIPYHPSLSLGTVLLSANQGFSVQGQYGAVTPAEVTKLQQLSSHAVPFATPSVVPGLDPGTQTSSQEFLVPNDLIGCVIGRQGSKISEIRQMSGAHIKIGNQAEGAGERHVTITGSPVSIALAQYLITACLETAKSTSGGTPSSAPADLPAPFSPPLTALPTAPPGLLGTPYAISLSNFIGLKPMPFLALPPASPGPPPGLAAYTAKMAAANGSKKAERQKFSPY

SEQ ID NO: 33971 - protein, 360 aa, Homo sapiens
MSGSDGGLEEEPELSITLTLRMLMHGKEVGSIIGKKGETVKRIREQSSARITISEGSCPERITTITGSTAAVFHAVSMIAFKLDEDLCAAPANGGNVSRPPVTLRLVIPASQCGSLIGKAGTKIKEIRESPPKGATIPYHPSLSLGTVLLSANQGFSVQGQYGAVTPAEVTKLQQLSSHAVPFATPSVVPGLDPGTQTSSQEFLVPNDLIGCVIGRQGSKISEIRQMSGAHIKIGNQAEGAGERHVTITGSPVSIALAQYLITACLETAKSTSGGTPSSAPADLPAPFSPPLTALPTAPPGLLGTPYAISLSNFIGLKPMPFLALPPASPGPPPGLAAYTAKMAAANGSKKAERQKFSPY

SEQ ID NO: 33972 - protein, 417 aa, Homo sapiens
MDMHCKADPFSAMHPGHGGVNQLGGVFVNGRPLPDVVRQRIVELAHQGVRPCDISRQLRVSHGCVSKILGRYYETGSIKPGVIGGSKPKVATPKVVDKIAEYKRQNPTMFAWEIRDRLLAEGICDNDTVPSVSSINRIIRTKVQQPFHPTPDGAGTGVTAPGHTIVPSTASPPVSSASNDPVGSYSINGILGIPRSNGEKRKRDEVEVYTDPAHIRGGGGLHLVWTLRDVSEGSVPNGDSQSGVDSLRKHLRADTFTQQQLEALDRVFERPSYPDVFQASEHIKSEQGNEYSLPALTPGLDEVKSSLSASTNPELGSNVSGTQTYPVVTGRDMASTTLPGYPPHVPPTGQGSYPTSTLAGMVPGSEFSGNPYSHPQYTAYNEAWRFSNPALLSSPYYYSAAPRGSAPAAAAAAYDRH

SEQ ID NO: 33973 - protein, 419 aa, Homo sapiens
MDMHCKADPFSAMHPGHGGVNQLGGVFVNGRPLPDVVRQRIVELAHQGVRPCDISRQLRVSHGCVSKILGRYYETGSIKPGVIGGSKPKVATPKVVDKIAEYKRQNPTMFAWEIRDRLLAEGICDNDTVPSVSSINRIIRTKVQQPFHPTPDGAGTGVTAPGHTIVPSTASPPVSSASNDPVGSYSINGILGIPRSNGEKRKRDEVEVYTDPAHIRGGGGLHLVWTLRDVSEGSVPNGDSQSGVDSLRKHLRADTFTQQQLEALDRVFERPSYPDVFQASEHIKSEQGNEYSLPALTPGLDEVKSSLSASTNPELGSNVSGTQTYPVVTGRDMASTTLPGYPPHVPPTGQGSYPTSTLAGMVPEAAVGPSSSLMSKPGRKLAEVPPCVQPTGASSPATRTATPSTRPTTRLGDSATPPY

SEQ ID NO: 33974 - protein, 394 aa, Homo sapiens
MDMHCKADPFSAMHPGHGGVNQLGGVFVNGRPLPDVVRQRIVELAHQGVRPCDISRQLRVSHGCVSKILGRYYETGSIKPGVIGGSKPKVATPKVVDKIAEYKRQNPTMFAWEIRDRLLAEGICDNDTVPSVSSINRIIRTKVQQPFHPTPDGAGTGVTAPGHTIVPSTASPPVSSASNDPVGSYSINGILGIPRSNGEKRKRDEDVSEGSVPNGDSQSGVDSLRKHLRADTFTQQQLEALDRVFERPSYPDVFQASEHIKSEQGNEYSLPALTPGLDEVKSSLSASTNPELGSNVSGTQTYPVVTGRDMASTTLPGYPPHVPPTGQGSYPTSTLAGMVPGSEFSGNPYSHPQYTAYNEAWRFSNPALLSSPYYYSAAPRGSAPAAAAAAYDRH

SEQ ID NO: 33975 - protein, 396 aa, Homo sapiens
MDMHCKADPFSAMHPGHGGVNQLGGVFVNGRPLPDVVRQRIVELAHQGVRPCDISRQLRVSHGCVSKILGRYYETGSIKPGVIGGSKPKVATPKVVDKIAEYKRQNPTMFAWEIRDRLLAEGICDNDTVPSVSSINRIIRTKVQQPFHPTPDGAGTGVTAPGHTIVPSTASPPVSSASNDPVGSYSINGILGIPRSNGEKRKRDEDVSEGSVPNGDSQSGVDSLRKHLRADTFTQQQLEALDRVFERPSYPDVFQASEHIKSEQGNEYSLPALTPGLDEVKSSLSASTNPELGSNVSGTQTYPVVTGRDMASTTLPGYPPHVPPTGQGSYPTSTLAGMVPEAAVGPSSSLMSKPGRKLAEVPPCVQPTGASSPATRTATPSTRPTTRLGDSATPPY

SEQ ID NO: 33976 - protein, 937 aa, Homo sapiens
MVCPNGYDPGGRHLLLFIIILAAWEAGRGQLHYSVPEEAKHGNFVGRIAQDLGLELAELVPRLFRAVCKFRGDLLEVNLQNGILFVNSRIDREELCGRSAECSIHLEVIVERPLQVFHVDVEVKDINDNPPVFPATQRNLFIAESRPLDSRFPLEGASDADIGENALLTYRLSPNEYFFLDVPTSNQQVKPLGLVLRKLLDREETPELHLLLTATDGGKPELTGTVQLLITVLDNNDNAPVFDRTLYTVKLPENVSIGTLVIHPNASDLDEGLNGDIIYSFSSDVSPDIKSKFHMDPLSGAITVIGHMDFEESRAHKIPVEAVDKGFPPLAGHCTVLVEVVDVNDNAPQLTLTSLSLPIPEDAQPGTVITLISVFDRDFGVNGQVTCSLTPRVPFKLVSTFKNYYSLVLDSALDRESVSAYELVVTARDGGSPSLWATASVSVEVADVNDNAPAFAQPEYTVFVKENNPPGCHIFTVSAGDADAQKNALVSYSLVELRVGERALSSYVSVHAESGKVYALQPLDHEELELLQFQVSARDAGVPPLGSNVTLQVFVLDENDNAPALLAPRVGGTGGAVRELVPRSVGAGHVVAKVRAVDADSGYNAWLSYELQPVAAGASIPFRVGLYTGEISTTRALDETDAPRHRLLVLVKDHGEPSLTATATVLVSLVESGQAPKASSRASLGIAGPETELVDVNVYLIIAICAVSSLLVLTLLLYTALRCSAPSSEGACSLVKPTLVCSSAVGSWSFSQQRRQRVCSGEGPPKTDLMAFSPSLPQGPSSTDNPRQPNPDWRYSASLRAGMHSSVHLEEAGILRAGPGGPDQQWPTVSSATPEPEAGEVSPPVGAGVNSNSWTFKYGPGNPKQSGPGELPDKFIIPGSPAIISIRQEPTNSQIDKSDFITFGKKEETKKKKKKKKGNKTQEKKEKGNSTTDNSDQ

SEQ ID NO: 33977 - protein, 789 aa, Homo sapiens
MVCPNGYDPGGRHLLLFIIILAAWEAGRGQLHYSVPEEAKHGNFVGRIAQDLGLELAELVPRLFRAVCKFRGDLLEVNLQNGILFVNSRIDREELCGRSAECSIHLEVIVERPLQVFHVDVEVKDINDNPPVFPATQRNLFIAESRPLDSRFPLEGASDADIGENALLTYRLSPNEYFFLDVPTSNQQVKPLGLVLRKLLDREETPELHLLLTATDGGKPELTGTVQLLITVLDNNDNAPVFDRTLYTVKLPENVSIGTLVIHPNASDLDEGLNGDIIYSFSSDVSPDIKSKFHMDPLSGAITVIGHMDFEESRAHKIPVEAVDKGFPPLAGHCTVLVEVVDVNDNAPQLTLTSLSLPIPEDAQPGTVITLISVFDRDFGVNGQVTCSLTPRVPFKLVSTFKNYYSLVLDSALDRESVSAYELVVTARDGGSPSLWATASVSVEVADVNDNAPAFAQPEYTVFVKENNPPGCHIFTVSAGDADAQKNALVSYSLVELRVGERALSSYVSVHAESGKVYALQPLDHEELELLQFQVSARDAGVPPLGSNVTLQVFVLDENDNAPALLAPRVGGTGGAVRELVPRSVGAGHVVAKVRAVDADSGYNAWLSYELQPVAAGASIPFRVGLYTGEISTTRALDETDAPRHRLLVLVKDHGEPSLTATATVLVSLVESGQAPKASSRASLGIAGPETELVDVNVYLIIAICAVSSLLVLTLLLYTALRCSAPSSEGACSLVKPTLVCSSAVGSWSFSQQRRQRVCSGEGPPKTDLMAFSPSLPQGPSSTDNVSHK

SEQ ID NO: 33978 - protein, 678 aa, Homo sapiens
MWKLLLWVGLVLVLKHHDGAAHKLVCYFTNWAHSRPGPASILPHDLDPFLCTHLIFAFASMNNNQIVAKDLQDEKILYPEFNKLKERNRELKTLLSIGGWNFGTSRFTTMLSTFANREKFIASVISLLRTHDFDGLDLFFLYPGLRGSPMHDRWTFLFLIEELLFAFRKEALLTMRPRLLLSAAVSGVPHIVQTSYDVRFLGRLLDFINVLSYDLHGSWERFTGHNSPLFSLPEDPKSSAYAMNYWRKLGAPSEKLIMGIPTYGRTFRLLKASKNGLQARAIGPASPGKYTKQEGFLAYFEICSFVWGAKKHWIDYQYVPYANKGKEWVGYDNAISFSYKAWFIRREHFGGAMVWTLDMDDVRGTFCGTGPFPLVYVLNDILVRAEFSSTSLPQFWLSSAVNSSSTDPERLAVTTAWTTDSKILPPGGEAGVTEIHGKCENMTITPRGTTVTPTKETVSLGKHTVALGEKTEITGAMTMTSVGHQSMTPGEKALTPVGHQSVTTGQKTLTSVGYQSVTPGEKTLTPVGHQSVTPVSHQSVSPGGTTMTPVHFQTETLRQNTVAPRRKAVAREKVTVPSRNISVTPEGQTMPLRGENLTSEVGTHPRMGNLGLQMEAENRMMLSSSPVIQLPEQTPLAFDNRFVPIYGNHSSVNSVTPQTSPLSLKKEIPENSAVDEEA

SEQ ID NO: 33979 - protein, 801 aa, Homo sapiens
MEASGKLICRQRQVLFSFLLLGLSLAGAAEPRSYSVVEETEGSSFVTNLAKDLGLEQREFSRRGVRVVSRGNKLHLQLNQETADLLLNEKLDREDLCGHTEPCVLRFQVLLESPFEFFQAELQVIDINDHSPVFLDKQMLVKVSESSPPGTAFPLKNAEDLDIGQNNIENYIISPNSYFRVLTRKRSDGRKYPELVLDKALDREEEAELRLTLTALDGGSPPRSGTAQVYIEVVDVNDNAPEFEQPFYRVQISEDSPISFLVVKVSATDVDTGVNGEISYSLFQASDEISKTFKVDFLTGEIRLKKQLDFEKFQSYEVNIEARDAGGFSGKCTVLIQVIDVNDHAPEVTMSAFTSPIPENAPETVVALFSVSDLDSGENGKISCSIQEDLPFLLKSSVGNFYTLLTETPLDRESRAEYNVTITVTDLGTPRLTTHLNMTVLVSDVNDNAPAFTQTSYTLFVRENNSPALHIGSVSATDRDSGTNAQVTYSLLPPQDPHLPLASLVSINTDNGHLFALRSLDYEALQAFEFRVGASDRGSPALSSEALVRVLVLDANDNSPFVLYPLQNGSAPCTELVPRAAEPGYLVTKVVAVDGDSGQNAWLSYQLLKATEPGLFGVWAHNGEVRTARLLSERDAAKQRLVVLVKDNGEPPCSATATLHVLLVDGFSQPYLPLPEAAPAQGQADSLTVYLVVALASVSSLFLFSVLLFVAVLLCRRSRAASVGRCSVPEGPFPGHLVDVRGTGSLSQNYQYEVCLAGGSGTNEFQLLKPVLPNIQGHSFGPEMEQNSNFRNGFGFSLQLK

SEQ ID NO: 33980 - protein, 468 aa, Homo sapiens
MAGVVHVSLAALLLLPMAPAMHSDCIFKKEQAMCLEKIQRANELMGFNDSSPGCPGMWDNITCWKPAHVGEMVLVSCPELFRIFNPDQVWETETIGESDFGDSNSLDLSDMGVVSRNCTEDGWSEPFPHYFDACGFDEYESETGDQDYYYLSVKALYTVGYSTSLVTLTTAMVILCRFRKLHCTRNFIHMNLFVSFMLRAISVFIKDWILYAEQDSNHCFISTVECKAVMVFFHYCVVSNYFWLFIEGLYLFTLLVETFFPERRYFYWYTIIGWGTPTVCVTVWATLRLYFDDTGCWDMNDSTALWWVIKGPVVGSIMVNFVLFIGIIVILVQKLQSPDMGGNESSIYLRLARSTLLLIPLFGIHYTVFAFSPENVSKRERLVFELGLGSFQGFVVAVLYCFLNGEVQAEIKRKWRSWKVNRYFAVDFKHRHPSLASSGVNGGTQLSILSKSSSQIRMSGLPADNLAT

SEQ ID NO: 33981 - protein, 496 aa, Homo sapiens
MAGVVHVSLAALLLLPMAPAMHSDCIFKKEQAMCLEKIQRANELMGFNDSSPGCPGMWDNITCWKPAHVGEMVLVSCPELFRIFNPDQVWETETIGESDFGDSNSLDLSDMGVVSRNCTEDGWSEPFPHYFDACGFDEYESETGDQDYYYLSVKALYTVGYSTSLVTLTTAMVILCRFRKLHCTRNFIHMNLFVSFMLRAISVFIKDWILYAEQDSNHCFISTVECKAVMVFFHYCVVSNYFWLFIEGLYLFTLLVETFFPERRYFYWYTIIGWGTPTVCVTVWATLRLYFDDTGCWDMNDSTALWWVIKGPVVGSIMVNFVLFIGIIVILVQKLQSPDMGGNESSIYFSCVQKCYCKPQRAQQHSCKMSELSTITLRLARSTLLLIPLFGIHYTVFAFSPENVSKRERLVFELGLGSFQGFVVAVLYCFLNGEVQAEIKRKWRSWKVNRYFAVDFKHRHPSLASSGVNGGTQLSILSKSSSQIRMSGLPADNLAT

SEQ ID NO: 33982 - protein, 447 aa, Homo sapiens
MAGVVHVSLAALLLLPMAPAMHSDCIFKKEQAMCLEKIQRANELMGFNDSSPGCPGMWDNITCWKPAHVGEMVLVSCPELFRIFNPDQDMGVVSRNCTEDGWSEPFPHYFDACGFDEYESETGDQDYYYLSVKALYTVGYSTSLVTLTTAMVILCRFRKLHCTRNFIHMNLFVSFMLRAISVFIKDWILYAEQDSNHCFISTVECKAVMVFFHYCVVSNYFWLFIEGLYLFTLLVETFFPERRYFYWYTIIGWGTPTVCVTVWATLRLYFDDTGCWDMNDSTALWWVIKGPVVGSIMVNFVLFIGIIVILVQKLQSPDMGGNESSIYLRLARSTLLLIPLFGIHYTVFAFSPENVSKRERLVFELGLGSFQGFVVAVLYCFLNGEVQAEIKRKWRSWKVNRYFAVDFKHRHPSLASSGVNGGTQLSILSKSSSQIRMSGLPADNLAT

SEQ ID NO: 33983 - protein, 475 aa, Homo sapiens
MAGVVHVSLAALLLLPMAPAMHSDCIFKKEQAMCLEKIQRANELMGFNDSSPGCPGMWDNITCWKPAHVGEMVLVSCPELFRIFNPDQDMGVVSRNCTEDGWSEPFPHYFDACGFDEYESETGDQDYYYLSVKALYTVGYSTSLVTLTTAMVILCRFRKLHCTRNFIHMNLFVSFMLRAISVFIKDWILYAEQDSNHCFISTVECKAVMVFFHYCVVSNYFWLFIEGLYLFTLLVETFFPERRYFYWYTIIGWGTPTVCVTVWATLRLYFDDTGCWDMNDSTALWWVIKGPVVGSIMVNFVLFIGIIVILVQKLQSPDMGGNESSIYFSCVQKCYCKPQRAQQHSCKMSELSTITLRLARSTLLLIPLFGIHYTVFAFSPENVSKRERLVFELGLGSFQGFVVAVLYCFLNGEVQAEIKRKWRSWKVNRYFAVDFKHRHPSLASSGVNGGTQLSILSKSSSQIRMSGLPADNLAT

SEQ ID NO: 33984 - protein, 411 aa, Homo sapiens
MAGVVHVSLAALLLLPMAPAMHSDCIFKKEQAMCLEKIQRANELMGFNDSSPDMGVVSRNCTEDGWSEPFPHYFDACGFDEYESETGDQDYYYLSVKALYTVGYSTSLVTLTTAMVILCRFRKLHCTRNFIHMNLFVSFMLRAISVFIKDWILYAEQDSNHCFISTVECKAVMVFFHYCVVSNYFWLFIEGLYLFTLLVETFFPERRYFYWYTIIGWGTPTVCVTVWATLRLYFDDTGCWDMNDSTALWWVIKGPVVGSIMVNFVLFIGIIVILVQKLQSPDMGGNESSIYLRLARSTLLLIPLFGIHYTVFAFSPENVSKRERLVFELGLGSFQGFVVAVLYCFLNGEVQAEIKRKWRSWKVNRYFAVDFKHRHPSLASSGVNGGTQLSILSKSSSQIRMSGLPADNLAT

SEQ ID NO: 33985 - protein, 976 aa, Homo sapiens
MNAGPGCEPCTKRPRWGAATTSPAASDARSFPSRQRRVLDPKDAHVQFRVPPSSPACVPGRAGQHRGSATSLVFKQKTITSWMDTKGIKTAESESLDSKENNNTRIESMMSSVQKDNFYQHNVEKLENVSQLSLDKSPTEKSTQYLNQHQTAAMCKWQNEGKHTEQLLESEPQTVTLVPEQFSNANIDRSPQNDDHSDTDSEENRDNQQFLTTVKLANAKQTTEDEQAREAKSHQKCSKSCDPGEDCASCQQDEIDVVPESPLSDVGSEDVGTGPKNDNKLTRQESCLGNSPPFEKESEPESPMDVDNSKNSCQDSEADEETSPGFDEQEDGSSSQTANKPSRFQARDADIEFRKRYSTKGGEVRLHFQFEGGESRTGMNDLNAKLPGNISSLNVECRNSKQHGKKDSKITDHFMRLPKAEDRRKEQWETKHQRTERKIPKYVPPHLSPDKKWLGTPIEEMRRMPRCGIRLPLLRPSANHTVTIRVDLLRAGEVPKPFPTHYKDLWDNKHVKMPCSEQNLYPVEDENGERTAGSRWELIQTALLNKFTRPQNLKDAILKYNVAYSKKWDFTALIDFWDKVLEEAEAQHLYQSILPDMVKIALCLPNICTQPIPLLKQKMNHSITMSQEQIASLLANAFFCTFPRRNAKMKSEYSSYPDINFNRLFEGRSSRKPEKLKTLFCYFRRVTEKKPTGLVTFTRQSLEDFPEWERCEKPLTRLHVTYEGTIEENGQGMLQVDFANRFVGGGVTSAGLVQEEIRFLINPELIISRLFTEVLDHNECLIITGTEQYSEYTGYAETYRWSRSHEDGSERDDWQRRCTEIVAIDALHFRRYLDQFVPEKMRRELNKAYCGFLRPGVSSENLSAVATGNWGCGAFGGDARLKALIQILAAAAAERDVVYFTFGDSELMRDIYSMHIFLTERKLTVGDVYKLLLRYYNEECRNCSTPGPDIKLYPFIYHAVESCAETADHSGQRTGT

SEQ ID NO: 33986 - protein, 894 aa, Homo sapiens
MDTKGIKTAESESLDSKENNNTRIESMMSSVQKDNFYQHNVEKLENVSQLSLDKSPTEKSTQYLNQHQTAAMCKWQNEGKHTEQLLESEPQTVTLVPEQFSNANIDRSPQNDDHSDTDSEENRDNQQFLTTVKLANAKQTTEDEQAREAKSHQKCSKSCDPGEDCASCQQDEIDVVPESPLSDVGSEDVGTGPKNDNKLTRQESCLGNSPPFEKESEPESPMDVDNSKNSCQDSEADEETSPGFDEQEDGSSSQTANKPSRFQARDADIEFRKRYSTKGGEVRLHFQFEGGESRTGMNDLNAKLPGNISSLNVECRNSKQHGKKDSKITDHFMRLPKAEDRRKEQWETKHQRTERKIPKYVPPHLSPDKKWLGTPIEEMRRMPRCGIRLPLLRPSANHTVTIRVDLLRAGEVPKPFPTHYKDLWDNKHVKMPCSEQNLYPVEDENGERTAGSRWELIQTALLNKFTRPQNLKDAILKYNVAYSKKWDFTALIDFWDKVLEEAEAQHLYQSILPDMVKIALCLPNICTQPIPLLKQKMNHSITMSQEQIASLLANAFFCTFPRRNAKMKSEYSSYPDINFNRLFEGRSSRKPEKLKTLFCYFRRVTEKKPTGLVTFTRQSLEDFPEWERCEKPLTRLHVTYEGTIEENGQGMLQVDFANRFVGGGVTSAGLVQEEIRFLINPELIISRLFTEVLDHNECLIITGTEQYSEYTGYAETYRWSRSHEDGSERDDWQRRCTEIVAIDALHFRRYLDQFVPEKMRRELNKAYCGFLRPGVSSENLSAVATGNWGCGAFGGDARLKALIQILAAAAAERDVVYFTFGDSELMRDIYSMHIFLTERKLTVGDVYKLLLRYYNEECRNCSTPGPDIKLYPFIYHAVESCAETADHSGQRTGT

SEQ ID NO: 33987 - protein, 868 aa, Homo sapiens
MMSSVQKDNFYQHNVEKLENVSQLSLDKSPTEKSTQYLNQHQTAAMCKWQNEGKHTEQLLESEPQTVTLVPEQFSNANIDRSPQNDDHSDTDSEENRDNQQFLTTVKLANAKQTTEDEQAREAKSHQKCSKSCDPGEDCASCQQDEIDVVPESPLSDVGSEDVGTGPKNDNKLTRQESCLGNSPPFEKESEPESPMDVDNSKNSCQDSEADEETSPGFDEQEDGSSSQTANKPSRFQARDADIEFRKRYSTKGGEVRLHFQFEGGESRTGMNDLNAKLPGNISSLNVECRNSKQHGKKDSKITDHFMRLPKAEDRRKEQWETKHQRTERKIPKYVPPHLSPDKKWLGTPIEEMRRMPRCGIRLPLLRPSANHTVTIRVDLLRAGEVPKPFPTHYKDLWDNKHVKMPCSEQNLYPVEDENGERTAGSRWELIQTALLNKFTRPQNLKDAILKYNVAYSKKWDFTALIDFWDKVLEEAEAQHLYQSILPDMVKIALCLPNICTQPIPLLKQKMNHSITMSQEQIASLLANAFFCTFPRRNAKMKSEYSSYPDINFNRLFEGRSSRKPEKLKTLFCYFRRVTEKKPTGLVTFTRQSLEDFPEWERCEKPLTRLHVTYEGTIEENGQGMLQVDFANRFVGGGVTSAGLVQEEIRFLINPELIISRLFTEVLDHNECLIITGTEQYSEYTGYAETYRWSRSHEDGSERDDWQRRCTEIVAIDALHFRRYLDQFVPEKMRRELNKAYCGFLRPGVSSENLSAVATGNWGCGAFGGDARLKALIQILAAAAAERDVVYFTFGDSELMRDIYSMHIFLTERKLTVGDVYKLLLRYYNEECRNCSTPGPDIKLYPFIYHAVESCAETADHSGQRTGT

SEQ ID NO: 33988 - protein, 527 aa, Homo sapiens
MVQAGAEKDAQSISLRKEQWETKHQRTERKIPKYVPPHLSPDKKWLGTPIEEMRRMPRCGIRLPLLRPSANHTVTIWNGERTAGSRWELIQTALLNKFTRPQNLKDAILKYNVAYSKKWDFTALIDFWDKVLEEAEAQHLYQSILPDMVKIALCLPNICTQPIPLLKQKMNHSITMSQEQIASLLANAFFCTFPRRNAKMKSEYSSYPDINFNRLFEGRSSRKPEKLKTLFCYFRRVTEKKPTGLVTFTRQSLEDFPEWERCEKPLTRLHVTYEGTIEENGQGMLQVDFANRFVGGGVTSAGLVQEEIRFLINPELIISRLFTEVLDHNECLIITGTEQYSEYTGYAETYRWSRSHEDGSERDDWQRRCTEIVAIDALHFRRYLDQFVPEKMRRELNKAYCGFLRPGVSSENLSAVATGNWGCGAFGGDARLKALIQILAAAAAERDVVYFTFGDSELMRDIYSMHIFLTERKLTVGDVYKLLLRYYNEECRNCSTPGPDIKLYPFIYHAVESCAETADHSGQRTGT

SEQ ID NO: 33989 - protein, 475 aa, Homo sapiens
MRRMPRCGIRLPLLRPSANHTVTIWNGERTAGSRWELIQTALLNKFTRPQNLKDAILKYNVAYSKKWDFTALIDFWDKVLEEAEAQHLYQSILPDMVKIALCLPNICTQPIPLLKQKMNHSITMSQEQIASLLANAFFCTFPRRNAKMKSEYSSYPDINFNRLFEGRSSRKPEKLKTLFCYFRRVTEKKPTGLVTFTRQSLEDFPEWERCEKPLTRLHVTYEGTIEENGQGMLQVDFANRFVGGGVTSAGLVQEEIRFLINPELIISRLFTEVLDHNECLIITGTEQYSEYTGYAETYRWSRSHEDGSERDDWQRRCTEIVAIDALHFRRYLDQFVPEKMRRELNKAYCGFLRPGVSSENLSAVATGNWGCGAFGGDARLKALIQILAAAAAERDVVYFTFGDSELMRDIYSMHIFLTERKLTVGDVYKLLLRYYNEECRNCSTPGPDIKLYPFIYHAVESCAETADHSGQRTGT

SEQ ID NO: 33990 - protein, 793 aa, Homo sapiens
MEARVERAVQKRQVLFLCVFLGMSWAGAEPLRYFVAEETERGTFLTNLAKDLGLGVGELRARGTRIVSDQNMQILLLSSLTGDLLLNEKLDREELCGPREPCVLPFQLLLEKPFQIFRAELWVRDINDHAPVFLDREISLKILESTTPGAAFLLESAQDSDVGTNSLSNYTISPNAYFHINVHDSGEGNIYPELVLNQVLDREEIPEFSLTLTALDGGSPPRSGTALVRILVLDVNDNAPDFVRSLYKVQVPENSPVGSMVVSVSARDLDTGSNGEIAYAFSYATERILKTFQINPTSGSLHLKAQLDYEAIQTYTLTIQAKDGGGLSGKCTVVVDVTDINDNRPELLLSSLTSPIAENSPETVVAVFRIRDRDSGNNGKTVCSIQDDVPFILKPSVENFYTLVTEKPLDRERNTEYNITITVTDLGTPRLKTEHNITVLVSDVNDNAPAFTQTSYTLFVRENNSPALPIGSVSATDRDSGTNAQVIYSLLPSQDPHLPLASLVSINADNGHLFALRSLDYEALQAFEFRVGATDRGSPALSSEALVRVLVLDANDNSPFVLYPLQNSSAPCTEPLPRAAEPGYLVTKVVAVDGDSGQNAWLSYQLLKATEPGLFGVWAHNGEVRTARLLSERDAAKQRLVVLVKDNGEPPRSATATLHVLLVDGFSQPYLRLPEAAPDQANSLTVYLVVALASVSSLFLLSVLLFVAVRLCRRSRAAPVGRCSVPEGPFPRHLVDLSGTGTLSQSYQYEVCLTGGSGTNEFKFLKPIIPNLLPQSTGREVEENRPFQNNLGF

SEQ ID NO: 33991 - protein, 797 aa, Homo sapiens
MKTRGFSFPRQRQVLFLFLFWGVSLAGSGFGRYSVTEETEKGSFVVNLAKDLGLAEGELAARGTRVVSDDNKQYLLLDSHTGNLLTNEKLDREKLCGPKEPCMLYFQILMDDPFQIYRAELRVRDINDHSPVFRHKEMVLKISENTAEGTAFRLERAQDPDEGHNSIQNYTISSNSFFHIKISGSDEGMIYPELVLDKALDREEQEELSLTLTALDGGSPSRSGTSTIRIVVLDVNDNAPQFAQALYETQAPENSPVGSLIVKVSAGDADSGVNAEVSYSFFDASEDILTTFQINPFSGEIFLRELLDYELVNSYKINIQAMDGGGLSARCTVLIKVLDSNDNPPELIISSLSNSVAENSPGIVLAVFKIKDRDSGENGKTICYVQDNLPFFLKPSVDNFYILMTEGALDRESKAEYNITITVTDLGTPRLKTEHSITLQVSDVNDNAPAFTQTSYTLFVRENNSPALHIGSVSATDRDSGTNAQVTYSLLPPQDPHLPLASLVSINADNGHLFALRSLDYEALQAFDFRVGASDRGSPALSSEALVRVLVLDANDNSPFVLYPLQNGSAPCTELVPRAAEPGYLVTKVVAVDGDSGQNAWLSYQLLKATEPGLFGVWAHNGEVRTARLLSERDAAKHRLVVLVKDNGEPPRSATATLHVLLVDGFSQPYLPLPEAAPAQAQADLLTVYLVVALASVSSLFLLSVLLFVAVRLCRRSRAASVGRCSVPEGPFPGHLVDVSGTGTLFQSYQYEVCLTGGSETGEFKFLKPITPHLPPHRGGKEIEENSTLPNSFGFNY

SEQ ID NO: 33992 - protein, 797 aa, Homo sapiens
MENQGTRTQQIRQVLLLFVLLGMSQAGSETWSFSVAEEMQSGSFVGNLAKDLGLKVRELSSRGARVVSNDKKQRLQLDINTGDLLLSETLDREELCGSIEPCVLHLQVLMQNPTQFLQIELQVRDINDHSPIFSEKQMLLEIPENSPVGAVFLLESAKDLDVGINAVKSYTISPNSHFHIKMRVIPDNRKYPELVLDKALDYEELPELSFILSALDGGSPPRSGTALVRVVVVDINDNSPEFEQAFYEVKIRENSILGSLILIVSAWDLDSGTNGEICYTFSHASEDIRKTFEINQKSGEITLRAPLDFETIESYSIIIQATDGGGLFGKSTVIIHVIDVNDNAPEITVSSITSPIPENTPETVVMVFSIQDIDSGDNGRIVCSIPEDLPFVLKSSVENYYTLETERPLDRESTAEYNITITVTDLGIPRLKTEHNTTVLVSDVNDNAPTFTQTSYTLFVRENNSPALHIGSVSATDRDSGTNAQVNYSLLPPQDLHLPLASLVSINTDNGHLFALRSLDYEALQAFDFRVGATDRGSPALSSEALVRVLVLDANDNSPFVLYPLQNGSAPCTELVPRAAEPGYLVTKVVAVDGDSGQNAWLSYQLLKATEPGLFGVWAHNGEVRTARLLSERDAAKHRLVVLVKDNGEPPRSATATLQVLLVDGFSQPYLPLPEAAPAQAQADSLTVYLVVALASVSSLFLFSVLLFVAVRLCRRSRAASVGSCSVPKGPFPGHLVDVSGTGTLSQSYQYEVCLTGGSETNEFKFLKPVIPNIQAKGLGKNSEENSTFRNSFGFNF

SEQ ID NO: 33993 - protein, 432 aa, Homo sapiens
MVFSIQDIDSGDNGRIVCSIPEDLPFVLKSSVENYYTLETERPLDRESTAEYNITITVTDLGIPRLKTEHNTTVLVSDVNDNAPTFTQTSYTLFVRENNSPALHIGSVSATDRDSGTNAQVNYSLLPPQDLHLPLASLVSINTDNGHLFALRSLDYEALQAFDFRVGATDRGSPALSSEALVRVLVLDANDNSPFVLYPLQNGSAPCTELVPRAAEPGYLVTKVVAVDGDSGQNAWLSYQLLKATEPGLFGVWAHNGEVRTARLLSERDAAKHRLVVLVKDNGEPPRSATATLQVLLVDGFSQPYLPLPEAAPAQAQADSLTVYLVVALASVSSLFLFSVLLFVAVRLCRRSRAASVGSCSVPKGPFPGHLVDVSGTGTLSQSYQYEVCLTGGSETNEFKFLKPVIPNIQAKGLGKNSEENSTFRNSFGFNF

SEQ ID NO: 33994 - protein, 889 aa, Homo sapiens
MAERGRLGLPGAPGALNTPVPMNLFATWEVDGSSPSCVPRLCSLTLKKLVVFKELEKELISVVIAVKMQGSKRILRSHEIVLPPSGQVETDLALTFSLQYPHFLKREGNKLQIMLQRRKRYKNRTILGYKTLAAGSISMAEVMQHPSEGGQVLSLCSSIKEAPVKAAEIWIASLSSQPIDHEDSTMQAGPKAKSTDNYSEEEYESFSSEQEASDDAVQGQDLDEDDFDVGKPKKQRRSIVRTTSMTRQQNFKQKVVALLRRFKVSDEVLDSEQDPAEHIPEAEEDLDLLYDTLDMEHPSDSGPDMEDDDSVLSTPKPKLRPYFEGLSHSSSQTEIGSIHSARSHKEPPSPADVPEKTRSLGGRQPSDSVSDTVALGVPGPREHPGQPEDSPEAEASTLDVFTERLPPSGRITKTESLVIPSTRSEGKQAGRRGRSTSLKERQAARPQNERANSLDNERCPDARSQLQIPRKTVYDQLNHILISDDQLPENIILVNTSDWQGQFLSDVLQRHTLPVVCTCSPADVQAAFSTIVSRIQRYCNCNSQPPTPVKIAVAGAQHYLSAILRLFVEQLSHKTPDWLGYMRFLVIPLGSHPVARYLGSVDYRYNNFFQDLAWRDLFNKLEAQSAVQDTPDIVSRITQYIAGANCAHQLPIAEAMLTYKQKSPDEESSQKFIPFVGVVKVGIVEPSSATSGDSDDAAPSGSGTLSSTPPSASPAAKEASPTPPSSPSVSGGLSSPSQGVGAELMGLQVDYWTAAQPADRKRDAEKKDLPVTKNTLKCTFRSLQVSRLPSSGEAAATPTMSMTVVTKEKNKKVMFLPKKAKDKDVESKSQCIEGISRLICTARQQQNMLRVLIDGVECSDVKFFQLAAQWSSHVKHFPICIFGHSKATF

SEQ ID NO: 33995 - protein, 904 aa, Homo sapiens
MAERGRLGLPGAPGALNTPVPMNLFATWEVDGSSPSCVPRLCSLTLKKLVVFKELEKELISVVIAVKMQGSKRILRSHEIVLPPSGQVETDLALTFSLQYPHFLKREGNKLQIMLQRRKRYKNRTILGYKTLAAGSISMAEVMQHPSEGGQVLSLCSSIKEAPVKAAEIWIASLSSQPIDHEDSTMQAGPKAKSTDNYSEEEYESFSSEQEASDDAVQGQDLDEDDFDVGKPKKQRRSIVRTTSMTRQQNFKQKVVALLRRFKVSDEVLDSEQDPAEHIPEAEEDLDLLYDTLDMEHPSDSGPDMEDDDSVLSTPKPKLRPYFEGLSHSSSQTEIGSIHSARSHKEPPSPADVPEKTRSLGGRQPSDSVSDTVALGVPGPREHPGQPEDSPEAEASTLDVFTERLPPSGRITKTESLVIPSTRSEGKQAGRRGRSTSLKERQAARPQNERANSLDNERCPDARSQLQVQLQIPRKTVYDQLNHILISDDQLPENIILVNTSDWQGQFLSDVLQRHTLPVVCTCSPADVQAAFSTIVSRIQRYCNCNSQPPTPVKIAVAGAQHYLSAILRLFVEQLSHKTPDWLGYMRFLVIPLGSHPVARYLGSVDYRYNNFFQDLAWRDLFNKLEAQSAVQDTPDIVSRITQYIAGANCAHQLPIAEAMLTYKQKRKKHFHFDFTLSPDEESSQKFIPFVGVVKVGIVEPSSATSGDSDDAAPSGSGTLSSTPPSASPAAKEASPTPPSSPSVSGGLSSPSQGVGAELMGLQVDYWTAAQPADRKRDAEKKDLPVTKNTLKCTFRSLQVSRLPSSGEAAATPTMSMTVVTKEKNKKVMFLPKKAKDKDVESKSQCIEGISRLICTARQQQNMLRVLIDGVECSDVKFFQLAAQWSSHVKHFPICIFGHSKATF

SEQ ID NO: 33996 - protein, 890 aa, Homo sapiens
TGTGTTAGTRGLEPRPPHCERAGLPCGAPASEGRPAGAGLRRNPSGAYRLCSLTLKKLVVFKELEKELISVVIAVKMQGSKRILRSHEIVLPPSGQVETDLALTFSLQYPHFLKREGNKLQIMLQRRKRYKNRTILGYKTLAAGSISMAEVMQHPSEGGQVLSLCSSIKEAPVKAAEIWIASLSSQPIDHEDSTMQAGPKAKSTDNYSEEEYESFSSEQEASDDAVQGQDLDEDDFDVGKPKKQRRSIQQNFKQKVVALLRRFKVSDEVLDSEQDPAEHIPEAEEDLDLLYDTLDMEHPSDSGPDMEDDDSVLSTPKPKLRPYFEGLSHSSSQTEIGSIHSARSHKEPPSPADVPEKTRSLGGRQPSDSVSDTVALGVPGPREHPGQPEDSPEAEASTLDVFTERLPPSGRITKTESLVIPSTRSEGKQAGRRGRSTSLKERQAARPQNERANSLDNERCPDARSQLQIPRKTVYDQLNHILISDDQLPENIILVNTSDWQGQFLSDVLQRHTLPVVCTCSPADVQAAFSTIVSRIQRYCNCNSQPPTPVKIAVAGAQHYLSAILRLFVEQLSHKTPDWLGYMRFLVIPLGSHPVARYLGSVDYRYNNFFQDLAWRDLFNKLEAQSAVQDTPDIVSRITQYIAGANCAHQLPIAEAMLTYKQKSPDEESSQKFIPFVGVVKVGIVEPSSATSGDSDDAAPSGSGTLSSTPPSASPAAKEASPTPPSSPSVSGGLSSPSQGVGAELMGLQVDYWTAAQPADRKRDAEKKDLPVTKNTLKCTFRSLQVSRLPSSGEAAATPTMSMTVVTKEKNKKVMFLPKKAKDKDVESKSQCIEGISRLICTARQQQNMLRVLIDGVECSDVKFFQLAAQWSSHVKHFPICIFGHSKATF

SEQ ID NO: 33997 - protein, 814 aa, Homo sapiens
MQGSKRILRSHEIVLPPSGQVETDLALTFSLQYPHFLKREGNKLQIMLQRRKRYKNRTILGYKTLAAGSISMAEVMQHPSEGGQVLSLCSSIKEAPVKAAEIWIASLSSQPIDHEDSTMQAGPKAKSTDNYSEEEYESFSSEQEASDDAVQGQDLDEDDFDVGKPKKQRRSIQQNFKQKVVALLRRFKVSDEVLDSEQDPAEHIPEAEEDLDLLYDTLDMEHPSDSGPDMEDDDSVLSTPKPKLRPYFEGLSHSSSQTEIGSIHSARSHKEPPSPADVPEKTRSLGGRQPSDSVSDTVALGVPGPREHPGQPEDSPEAEASTLDVFTERLPPSGRITKTESLVIPSTRSEGKQAGRRGRSTSLKERQAARPQNERANSLDNERCPDARSQLQIPRKTVYDQLNHILISDDQLPENIILVNTSDWQGQFLSDVLQRHTLPVVCTCSPADVQAAFSTIVSRIQRYCNCNSQPPTPVKIAVAGAQHYLSAILRLFVEQLSHKTPDWLGYMRFLVIPLGSHPVARYLGSVDYRYNNFFQDLAWRDLFNKLEAQSAVQDTPDIVSRITQYIAGANCAHQLPIAEAMLTYKQKSPDEESSQKFIPFVGVVKVGIVEPSSATSGDSDDAAPSGSGTLSSTPPSASPAAKEASPTPPSSPSVSGGLSSPSQGVGAELMGLQVDYWTAAQPADRKRDAEKKDLPVTKNTLKCTFRSLQVSRLPSSGEAAATPTMSMTVVTKEKNKKVMFLPKKAKDKDVESKSQCIEGISRLICTARQQQNMLRVLIDGVECSDVKFFQLAAQWSSHVKHFPICIFGHSKATF

SEQ ID NO: 33998 - protein, 425 aa, Homo sapiens
MEPSATPGAQMGVPPGSREPSPVPPDYEDEFLRYLWRDYLYPKQYEWVLIAAYVAVFVVALVGNTLVCLAVWRNHHMRTVTNYFIVNLSLADVLVTAICLPASLLVDITESWLFGHALCKVIPYLQAVSVSVAVLTLSFIALDRWYAICHPLLFKSTARRARGSILGIWAVSLAIMVPQAAVMECSSVLPELANRTRLFSVCDERWADDLYPKIYHSCFFIVTYLAPLGLMAMAYFQIFRKLWGRQIPGTTSALVRNWKRPSDQLGDLEQGLSGEPQPRARAFLAEVKQMRARRKTAKMLMVVLLVFALCYLPISVLNVLKRVFGMFRQASDREAVYACFTFSHWLVYANSAANPIIYNFLSGKFREQFKAAFSCCLPGLGPCGSLKAPSPRSSASHKSLSLQSRCSISKISEHVVLTSVTTVLP

SEQ ID NO: 33999 - protein, 1007 aa, Homo sapiens
MEQAGTRPAATEHPRLRRPMPWLLLLPLLLLLLLLLPGPAASQLRYSVPEEQAPGALVGNVARALGLELRRLGPGCLRINHLGAPSPRYLELDLTSGALFVNERIDREALCEQRPRCLLSLEVLAHNPVAVSAVEVEILDINDNSPRFPRPNYQLQVSESVAPGARFHIESAQDPDVGANSVQTYELSPSEHFELDLKPLQENSKVLELVLRKGLDREQAALHHLVLTAVDGGIPARSGTAQISVRVLDTNDNSPAFDQSTYRVQLREDSPPGTLVVKLNASDPDEGSNGELRYSLSSYTSDRERQLFSIDASTGEVRVIGGLDYEEASSYQIYVQATDRGPVPMAGHCKVLVDIVDVNDNAPEVVLTDLYSPVPENATPNTIVAVLSVNDQDSGPNRKVSLGLEATLPFRLNGFGNSYTLVVSGPLDRERVAVYNITVTATDGGIPQLTSLRTLKVEISDINDNPPSFLEDSYSIYIQENNLPGVLLCTVQATDPDEKENAEVTYSLLEREIQGLPVTSYVSINSASGSLYAVNSFDYEKFREFFVTVEAQDKGSPPLSSTVTANVYVVDMNDHAPHILYPTSTNSSAAFEMVPRTAPAGYLVTKVIAMDSDSGQNAWLFYHLAQTSDLDLFKVELHTGEIRTTRKMGDESGSTFNLTVVVRDNGEPSLSASVAITVAVVDRVSKILPDTQRHVKSPRTYSEITLYLIIALSTVSFIFLLTIIILSIIKCYRYTAYGTACCGGFCGVRERSPAELYKQANNNIDARIPHGLKVQPHFIEVRGNGSLTKTYCYKACLTAGSGSDTFMFYNTGAQTGPGPSGAQAAVTDSRNLTGQSGQNAGNLIILKNEAVSQNEPRQPNPDWRYSASLRAGMHSSVHLEEAGILRAGPGGPDQQWPTVSSATPEPEAGEVSPPVGAGVNSNSWTFKYGPGNPKQSGPGELPDKFIIPGSPAIISIRQEPTNSQIDKSDFITFGKKEETKKKKKKKKGNKTQEKKEKGNSTTDNSDQ

SEQ ID NO: 34000 - protein, 884 aa, Homo sapiens
MEQAGTRPAATEHPRLRRPMPWLLLLPLLLLLLLLLPGPAASQLRYSVPEEQAPGALVGNVARALGLELRRLGPGCLRINHLGAPSPRYLELDLTSGALFVNERIDREALCEQRPRCLLSLEVLAHNPVAVSAVEVEILDINDNSPRFPRPNYQLQVSESVAPGARFHIESAQDPDVGANSVQTYELSPSEHFELDLKPLQENSKVLELVLRKGLDREQAALHHLVLTAVDGGIPARSGTAQISVRVLDTNDNSPAFDQSTYRVQLREDSPPGTLVVKLNASDPDEGSNGELRYSLSSYTSDRERQLFSIDASTGEVRVIGGLDYEEASSYQIYVQATDRGPVPMAGHCKVLVDIVDVNDNAPEVVLTDLYSPVPENATPNTIVAVLSVNDQDSGPNRKVSLGLEATLPFRLNGFGNSYTLVVSGPLDRERVAVYNITVTATDGGIPQLTSLRTLKVEISDINDNPPSFLEDSYSIYIQENNLPGVLLCTVQATDPDEKENAEVTYSLLEREIQGLPVTSYVSINSASGSLYAVNSFDYEKFREFFVTVEAQDKGSPPLSSTVTANVYVVDMNDHAPHILYPTSTNSSAAFEMVPRTAPAGYLVTKVIAMDSDSGQNAWLFYHLAQTSDLDLFKVELHTGEIRTTRKMGDESGSTFNLTVVVRDNGEPSLSASVAITVAVVDRVSKILPDTQRHVKSPRTYSEITLYLIIALSTVSFIFLLTIIILSIIKCYRYTAYGTACCGGFCGVRERSPAELYKQANNNIDARIPHGLKVQPHFIEVRGNGSLTKTYCYKACLTAGSGSDTFMFYNTGAQTGPGPSGAQAAVTDSRNLTGQSGQNAGNLIILKNEAVSQNEVRQWSGGLLQTHAFVTHPPISCDLALLSH

SEQ ID NO: 34001 - protein, 583 aa, Homo sapiens
MAARRRRSTGGGRARALNESKRVNNGNTAPEDSSPAKKTRRCQRQESKKMPVAGGKANKDRTEDKQDGMPGRSWASKRVSESVKALLLKGKAPVDPECTAKVGKAHVYCEGNDVYDVMLNQTNLQFNNNKYYLIQLLEDDAQRNFSVWMRWGRVGKMGQHSLVACSGNLNKAKEIFQKKFLDKTKNNWEDREKFEKVPGKYDMLQMDYATNTQDEEETKKEESLKSPLKPESQLDLRVQELIKLICNVQAMEEMMMEMKYNTKKAPLGKLTVAQIKAGYQSLKKIEDCIRAGQHGRALMEACNEFYTRIPHDFGLRTPPLIRTQKELSEKIQLLEALGDIEIAIKLVKTELQSPEHPLDQHYRNLHCALRPLDHESYEFKVISQYLQSTHAPTHSDYTMTLLDLFEVEKDGEKEAFREDLHNRMLLWHGSRMSNWVGILSHGLRIAPPEAPITGYMFGKGIYFADMSSKSANYCFASRLKNTGLLLLSEVALGQCNELLEANPKAEGLLQGKHSTKGLGKMAPSSAHFVTLNGSTVPLGPASDTGILNPDGYTLNYNEYIVYNPNQVRMRYLLKVQFNFLQLW

SEQ ID NO: 34002 - protein, 570 aa, Homo sapiens
MAARRRRSTGGGRARALNESKRVNNGNTAPEDSSPAKKTRRCQRQESKKMPVAGGKANKDRTEDKQDESVKALLLKGKAPVDPECTAKVGKAHVYCEGNDVYDVMLNQTNLQFNNNKYYLIQLLEDDAQRNFSVWMRWGRVGKMGQHSLVACSGNLNKAKEIFQKKFLDKTKNNWEDREKFEKVPGKYDMLQMDYATNTQDEEETKKEESLKSPLKPESQLDLRVQELIKLICNVQAMEEMMMEMKYNTKKAPLGKLTVAQIKAGYQSLKKIEDCIRAGQHGRALMEACNEFYTRIPHDFGLRTPPLIRTQKELSEKIQLLEALGDIEIAIKLVKTELQSPEHPLDQHYRNLHCALRPLDHESYEFKVISQYLQSTHAPTHSDYTMTLLDLFEVEKDGEKEAFREDLHNRMLLWHGSRMSNWVGILSHGLRIAPPEAPITGYMFGKGIYFADMSSKSANYCFASRLKNTGLLLLSEVALGQCNELLEANPKAEGLLQGKHSTKGLGKMAPSSAHFVTLNGSTVPLGPASDTGILNPDGYTLNYNEYIVYNPNQVRMRYLLKVQFNFLQLW

SEQ ID NO: 34003 - protein, 931 aa, Homo sapiens
MKIQKKLTGCSRLMLLCLSLELLLEAGAGNIHYSVPEETDKGSFVGNIAKDLGLQPQELADGGVRIVSRGRMPLFALNPRSGSLITARRIDREELCAQSMPCLVSFNILVEDKMKLFPVEVEIIDINDNTPQFQLEELEFKMNEITTPGTRVSLPFGQDLDVGMNSLQSYQLSSNPHFSLDVQQGADGPQHPEMVLQSPLDREEEAVHHLILTASDGGEPVRSGTLRIYIQVVDANDNPPAFTQAQYHINVPENVPLGTQLLMVNATDPDEGANGEVTYSFHNVDHRVAQIFRLDSYTGEISNKEPLDFEEYKMYSMEVQAQDGAGLMAKVKVLIKVLDVNDNAPEVTITSVTTAVPENFPPGTIIALISVHDQDSGDNGYTTCFIPGNLPFKLEKLVDNYYRLVTERTLDRELISGYNITITAIDQGTPALSTETHISLLVTDINDNSPVFHQDSYSAYIPENNPRGASIFSVRAHDLDSNENAQITYSLIEDTIQGAPLSAYLSINSDTGVLYALRSFDYEQFRDMQLKVMARDSGDPPLSSNVSLSLFLLDQNDNAPEILYPALPTDGSTGVELAPLSAEPGYLVTKVVAVDRDSGQNAWLSYRLLKASEPGLFSVGLHTGEVRTARALLDRDALKQSLVVAVQDHGQPPLSATVTLTVAVADRISDILADLGSLEPSAKPNDSDLTLYLVVAAAAVSCVFLAFVIVLLAHRLRRWHKSRLLQASGGGLASMPGSHFVGVDGVRAFLQTYSHEVSLTADSRKSHLIFPQPNYADTLISQESCEKKGFLSAPQSLLEDKKEPFSQQAPPNTDWRFSQAQRPGTSGSQNGDDTGTWPNNQFDTEMLQAMILASASEAADGSSTLGGGAGTMGLSARYGPQFTLQHVPDYRQNVYIPGSNATLTNAAGKRDGKAPAGGNGNKKKSGKKEKK

SEQ ID NO: 34004 - protein, 823 aa, Homo sapiens
MKIQKKLTGCSRLMLLCLSLELLLEAGAGNIHYSVPEETDKGSFVGNIAKDLGLQPQELADGGVRIVSRGRMPLFALNPRSGSLITARRIDREELCAQSMPCLVSFNILVEDKMKLFPVEVEIIDINDNTPQFQLEELEFKMNEITTPGTRVSLPFGQDLDVGMNSLQSYQLSSNPHFSLDVQQGADGPQHPEMVLQSPLDREEEAVHHLILTASDGGEPVRSGTLRIYIQVVDANDNPPAFTQAQYHINVPENVPLGTQLLMVNATDPDEGANGEVTYSFHNVDHRVAQIFRLDSYTGEISNKEPLDFEEYKMYSMEVQAQDGAGLMAKVKVLIKVLDVNDNAPEVTITSVTTAVPENFPPGTIIALISVHDQDSGDNGYTTCFIPGNLPFKLEKLVDNYYRLVTERTLDRELISGYNITITAIDQGTPALSTETHISLLVTDINDNSPVFHQDSYSAYIPENNPRGASIFSVRAHDLDSNENAQITYSLIEDTIQGAPLSAYLSINSDTGVLYALRSFDYEQFRDMQLKVMARDSGDPPLSSNVSLSLFLLDQNDNAPEILYPALPTDGSTGVELAPLSAEPGYLVTKVVAVDRDSGQNAWLSYRLLKASEPGLFSVGLHTGEVRTARALLDRDALKQSLVVAVQDHGQPPLSATVTLTVAVADRISDILADLGSLEPSAKPNDSDLTLYLVVAAAAVSCVFLAFVIVLLAHRLRRWHKSRLLQASGGGLASMPGSHFVGVDGVRAFLQTYSHEVSLTADSRKSHLIFPQPNYADTLISQESCEKKGFLSAPQSLLEDKKEPFSQVNFCDECISYLEKNNS

SEQ ID NO: 34005 - protein, 927 aa, Homo sapiens
MQRAREAEMMKSQVLFPFLLSLFCGAISQQIRYTIPEELANGSRVGKLAKDLGLSVRELPTRKLRVSAEDYFNVSLESGDLLVNGRIDREKICGRKLECALEFETVAENPMNVFHVVVVIQDINDNAPRFVAKGIDLEICESALPGVKFSLDSAQDADVEGNSLKLYTINPNQYFSLSTKESPDGSKYPVLLLEKPLDREHQSSHRLILTAMDGGDPPLSGTTHIWIRVTDANDNAPVFSQEVYRVSLQENVPWGTSVLRVMATDQDEGINAEITYAFLNSPISTSLFNLNPNTGDITTNGTLDFEETSRYVLSVEAKDGGVHTAHCNVQIEIVDENDNAPEVTFMSFSNQIPEDSDLGTVIALIKVRDKDSGQNGMVTCYTQEEVPFKLESTSKNYYKLVIAGALNREQTADYNVTIIATDKGKPALSSRTSITLHISDINDNAPVFHQASYVVHVSENNPPGASIAQVSASDPDLGPNGRVSYSILASDLEPRELLSYVSVSPQSGVVFAQRAFDHEQLRAFELTLQARDQGSPALSANVSLRVLVGDLNDNAPRVLYPALGPDGSALFDMVPRAAEPGYLVTKVVAVDADSGHNAWLSYHVLQASEPGLFSLGLRTGEVRTARALGDRDAARQRLLVAVRDGGQPPLSATATLHLIFADSLQEVLPDLSDRPEPSDPQTELQFYLVVALALISVLFLLAVILAIALRLRRSSSLDTEGCFQTGLCSKSGPGVPPNHSEGTLPYSYNLCIASHSAKTEFNSLNLTPEMAPPQDLLCDDPSMVVCASNEDHKIAYDPSLSSHQAPPNTDWRFSQAQRPGTSGSQNGDDTGTWPNNQFDTEMLQAMILASASEAADGSSTLGGGAGTMGLSARYGPQFTLQHVPDYRQNVYIPGSNATLTNAAGKRDGKAPAGGNGNKKKSGKKEKK

SEQ ID NO: 34006 - protein, 810 aa, Homo sapiens
MQRAREAEMMKSQVLFPFLLSLFCGAISQQIRYTIPEELANGSRVGKLAKDLGLSVRELPTRKLRVSAEDYFNVSLESGDLLVNGRIDREKICGRKLECALEFETVAENPMNVFHVVVVIQDINDNAPRFVAKGIDLEICESALPGVKFSLDSAQDADVEGNSLKLYTINPNQYFSLSTKESPDGSKYPVLLLEKPLDREHQSSHRLILTAMDGGDPPLSGTTHIWIRVTDANDNAPVFSQEVYRVSLQENVPWGTSVLRVMATDQDEGINAEITYAFLNSPISTSLFNLNPNTGDITTNGTLDFEETSRYVLSVEAKDGGVHTAHCNVQIEIVDENDNAPEVTFMSFSNQIPEDSDLGTVIALIKVRDKDSGQNGMVTCYTQEEVPFKLESTSKNYYKLVIAGALNREQTADYNVTIIATDKGKPALSSRTSITLHISDINDNAPVFHQASYVVHVSENNPPGASIAQVSASDPDLGPNGRVSYSILASDLEPRELLSYVSVSPQSGVVFAQRAFDHEQLRAFELTLQARDQGSPALSANVSLRVLVGDLNDNAPRVLYPALGPDGSALFDMVPRAAEPGYLVTKVVAVDADSGHNAWLSYHVLQASEPGLFSLGLRTGEVRTARALGDRDAARQRLLVAVRDGGQPPLSATATLHLIFADSLQEVLPDLSDRPEPSDPQTELQFYLVVALALISVLFLLAVILAIALRLRRSSSLDTEGCFQTGLCSKSGPGVPPNHSEGTLPYSYNLCIASHSAKTEFNSLNLTPEMAPPQDLLCDDPSMVVCASNEDHKIAYDPSLSSHVSFCKSS

SEQ ID NO: 34007 - protein, 929 aa, Homo sapiens
MGGSCAQRRRAGPRQVLFPLLLPLFYPTLCEPIRYSIPEELAKGSVVGNLAKDLGLSVLDVSARELRVSAEKLHFSVDAQSGDLLVKDRIDREQICKERRRCELQLEAVVENPLNIFHVIVVIEDVNDHAPQFRKDEINLEISESVSLGMGTILESAEDPDISMNSLSKYQLSPNEYFSLVEKDNPDGGKYPELVLQKTLDRETQSAHHLVLTALDGGDPPRSGTAQIRILVIDANDNPPVFSQDVYRVSLREDVPPGTSILRVKATDQDEGINSEITYSFFGVADKAQHVFSLDYTTGNILTQQPLDFEEVERYTINIEAKDRGSLSTRCKVIVEVVDENDNSPEIIITSLSDQIMEDSPPGVVVALFKTRDQDSGENGEVRCSLSRGVPFKIHSSSNNYYKLVTDEALDREQTPEYNVTIAATDRGKPPLSSSKTITLHITDVNDNAPVFGQSAYLVHVPENNQPGASIAQVSASDPDFGLNGRVSYSLIASDLESRTLSSYVSVSAQSGVVFAQRAFDHEQLRTFELTLQARDQGSPALSANVSLRVLVGDRNDNAPRVLYPALGPDGSALFDTVPRAAQPGYLVTKVVAVDADSGHNAWLSYHVVQASEPGLFSLGLRTGEVRMVRALGDKDSVRQRLLVAVRDGGQPPLSATATLHLVFADSLQEVLPDFSDHPTPSDSQAEMQFYLVVALALISVLFLLAVILAIALRLRQSFSPTAGDCFESVLCSKSGPVGPPNYSEGTLPYAYNFCVPGDQMNPEFNFFTSVDHCPATQDNLNKDSMLLASILTPSVEADKKILKQQAPPNTDWRFSQAQRPGTSGSQNGDDTGTWPNNQFDTEMLQAMILASASEAADGSSTLGGGAGTMGLSARYGPQFTLQHVPDYRQNVYIPGSNATLTNAAGKRDGKAPAGGNGNKKKSGKKEKK

SEQ ID NO: 34008 - protein, 808 aa, Homo sapiens
MGGSCAQRRRAGPRQVLFPLLLPLFYPTLCEPIRYSIPEELAKGSVVGNLAKDLGLSVLDVSARELRVSAEKLHFSVDAQSGDLLVKDRIDREQICKERRRCELQLEAVVENPLNIFHVIVVIEDVNDHAPQFRKDEINLEISESVSLGMGTILESAEDPDISMNSLSKYQLSPNEYFSLVEKDNPDGGKYPELVLQKTLDRETQSAHHLVLTALDGGDPPRSGTAQIRILVIDANDNPPVFSQDVYRVSLREDVPPGTSILRVKATDQDEGINSEITYSFFGVADKAQHVFSLDYTTGNILTQQPLDFEEVERYTINIEAKDRGSLSTRCKVIVEVVDENDNSPEIIITSLSDQIMEDSPPGVVVALFKTRDQDSGENGEVRCSLSRGVPFKIHSSSNNYYKLVTDEALDREQTPEYNVTIAATDRGKPPLSSSKTITLHITDVNDNAPVFGQSAYLVHVPENNQPGASIAQVSASDPDFGLNGRVSYSLIASDLESRTLSSYVSVSAQSGVVFAQRAFDHEQLRTFELTLQARDQGSPALSANVSLRVLVGDRNDNAPRVLYPALGPDGSALFDTVPRAAQPGYLVTKVVAVDADSGHNAWLSYHVVQASEPGLFSLGLRTGEVRMVRALGDKDSVRQRLLVAVRDGGQPPLSATATLHLVFADSLQEVLPDFSDHPTPSDSQAEMQFYLVVALALISVLFLLAVILAIALRLRQSFSPTAGDCFESVLCSKSGPVGPPNYSEGTLPYAYNFCVPGDQMNPEFNFFTSVDHCPATQDNLNKDSMLLASILTPSVEADKKILKQVSI

SEQ ID NO: 34009 - protein, 622 aa, Homo sapiens
MPPQLQNGLNLSAKVVQGSLDSLPQAVREFLENNAELCQPDHIHICDGSEEENGRLLGQMEEEGILRRLKKYDNCWLALTDPRDVARIESKTVIVTQEQRDTVPIPKTGLSQLGRWMSEEDFEKAFNARFPGCMKGRTMYVIPFSMGPLGSPLSKIGIELTDSPYVVASMRIMTRMGTPVLEAVGDGEFVKCLHSVGCPLPLQKPLVNNWPCNPELTLIAHLPDRREIISFGSGYGGNSLLGKKCFALRMASRLAKEEGWLAEHMLILGITNPEGEKKYLAAAFPSACGKTNLAMMNPSLPGWKVECVGDDIAWMKFDAQGHLRAINPENGFFGVAPGTSVKTNPNAIKTIQKNTIFTNVAETSDGGVYWEGIDEPLASGVTITSWKNKEWSSEDGEPCAHPNSRFCTPASQCPIIDAAWESPEGVPIEGIIFGGRRPAGVPLVYEALSWQHGVFVGAAMRSEATAAAEHKGKIIMHDPFAMRPFFGYNFGKYLAHWLSMAQHPAAKLPKIFHVNWFRKDKEGKFLWPGFGENSRVLEWMFNRIDGKASTKLTPIGYIPKEDALNLKGLGHINMMELFSISKEFWEKEVEDIEKYLEDQVNADLPCEIEREILALKQRISQM

SEQ ID NO: 34010 - protein, 305 aa, Homo sapiens
MTTGHLRAINPENGFFGVAPGTSVKTNPNAIKTIQKNTIFTNVAETSDGGVYWEGIDEPLASGVTITSWKNKEWSSEDGEPCAHPNSRFCTPASQCPIIDAAWESPEGVPIEGIIFGGRRPAGVPLVYEALSWQHGVFVGAAMRSEATAAAEHKGKIIMHDPFAMRPFFGYNFGKYLAHWLSMAQHPAAKLPKIFHVNWFRKDKEGKFLWPGFGENSRVLEWMFNRIDGKASTKLTPIGYIPKEDALNLKGLGHINMMELFSISKEFWEKEVEDIEKYLEDQVNADLPCEIEREILALKQRISQM

SEQ ID NO: 34011 - protein, 931 aa, Homo sapiens
MKASSGRCGLVRWLQVLLPFLLSLFPGALPVQIRYSIPEELAKNSVVGNLAKDLGLSVRDLPARKLRVSAEKEYFTVNPESGDLLVSDRIDREQICGKQPLCVLDFDTVAENPLNIFYIAVIVQDINDNTPLFKQTKINLKIGESTKPGTTFPLDPALDSDVGPNSLQRYHLNDNEYFDLAEKQTPDGRKYPELILKHSLDREEHSLHQLVLTAVDGGDPPQSGTTQIRIKVTDANDNPPVFSQDVYRVTLREDVPPGFFVLQVTATDRDEGINAEITYSFHNVDEQVKHFFNLNEKTGEITTKDDLDFEIASSYTLSIEAKDPGDLAAHCSIQVEILDDNDCAPEVIVTSVSTPLPEDSPPGTVIALIKTRDRDSGENGEVYCQVLGNAKFILKSSSKNYYKLVTDGALDREEIPEYNLTITATDGGKPPLSSSIIVTLHISDVNDNAPVFQQTSYMVHVAENNPPGASIAQISASDPDLGPSGQVSYSIVASDLKPREILSYVSVSAQSGVVFAQRAFDHEQLRAFELTLQARDQGSPALSANVSLRVLVGDLNDNAPRVLYPALGPDGSALFDMVPRAAEPGYLVTKVVAVDADSGHNAWLSYHVLQASEPGLFSLGLRTGEVRTARALGDRDAARQRLLVAVRDGGQPPLSATATLHLIFADSLQEVLPDLSDRREPSDPQAKLQFYLVVALALISVLFFLAVILAISLRLRLSSRSDAWDCFQPGLSSKPGPGVLPNYSEGTLPYSYNLCVASQSAKTEFNFLNITPELVPAQDLVCDNASWEQNTNHGAAGVPFASDTILKQAPPNTDWRFSQAQRPGTSGSQNGDDTGTWPNNQFDTEMLQAMILASASEAADGSSTLGGGAGTMGLSARYGPQFTLQHVPDYRQNVYIPGSNATLTNAAGKRDGKAPAGGNGNKKKSGKKEKK

SEQ ID NO: 34012 - protein, 811 aa, Homo sapiens
MKASSGRCGLVRWLQVLLPFLLSLFPGALPVQIRYSIPEELAKNSVVGNLAKDLGLSVRDLPARKLRVSAEKEYFTVNPESGDLLVSDRIDREQICGKQPLCVLDFDTVAENPLNIFYIAVIVQDINDNTPLFKQTKINLKIGESTKPGTTFPLDPALDSDVGPNSLQRYHLNDNEYFDLAEKQTPDGRKYPELILKHSLDREEHSLHQLVLTAVDGGDPPQSGTTQIRIKVTDANDNPPVFSQDVYRVTLREDVPPGFFVLQVTATDRDEGINAEITYSFHNVDEQVKHFFNLNEKTGEITTKDDLDFEIASSYTLSIEAKDPGDLAAHCSIQVEILDDNDCAPEVIVTSVSTPLPEDSPPGTVIALIKTRDRDSGENGEVYCQVLGNAKFILKSSSKNYYKLVTDGALDREEIPEYNLTITATDGGKPPLSSSIIVTLHISDVNDNAPVFQQTSYMVHVAENNPPGASIAQISASDPDLGPSGQVSYSIVASDLKPREILSYVSVSAQSGVVFAQRAFDHEQLRAFELTLQARDQGSPALSANVSLRVLVGDLNDNAPRVLYPALGPDGSALFDMVPRAAEPGYLVTKVVAVDADSGHNAWLSYHVLQASEPGLFSLGLRTGEVRTARALGDRDAARQRLLVAVRDGGQPPLSATATLHLIFADSLQEVLPDLSDRREPSDPQAKLQFYLVVALALISVLFFLAVILAISLRLRLSSRSDAWDCFQPGLSSKPGPGVLPNYSEGTLPYSYNLCVASQSAKTEFNFLNITPELVPAQDLVCDNASWEQNTNHGAAGVPFASDTILKVSFN

SEQ ID NO: 34013 - protein, 694 aa, Homo sapiens
MVSVEGRAMSFQSIIHLSLDSPVHAVCVLGTEICLDLSGCAPQKCQCFTIHGSGRVLIDVANTVISEKEDATIWWPLSDPTYATVKMTSPSPSVDADKVSVTYYGPNEDAPVGTAVLYLTGIEVSLEVDIYRNGQVEMSSDKQAKKKWIWGPSGWGAILLVNCNPADVGQQLEDKKTKKVIFSEEITNLSQMTLNVQGPSCILKKYRLVLHTSKEESKKARVYWPQKDNSSTFELVLGPDQHAYTLALLGNHLKETFYVEAIAFPSAEFSGLISYSVSLVEESQDPSIPETVLYKDTVVFRVAPCVFIPCTQVPLEVYLCRELQLQGFVDTVTKLSEKSNSQVASVYEDPNRLGRWLQDEMAFCYTQAPHKTTSLILDTPQAADLDEFPMKYSLSPGIGYMIQDTEDHKVASMDSIGNLMVSPPVKVQGKEYPLGRVLIGSSFYPSAEGRAMSKTLRDFLYAQQVQAPVELYSDWLMTGHVDEFMCFIPTDDKNEGKKGFLLLLASPSACYKLFREKQKEGYGDALLFDELRADQLLSNGREAKTIDQLLADESLKKQNEYVEKCIHLNRDILKTELGLVEQDIIEIPQLFCLEKLTNIPSDQQPKRSFARPYFPDLLRMIVMGKNLGIPKPFGPQIKGTCCLEEKICCLLEPLGFKCTFINDFDCYLTEVGDICACANIRRVPFAFKWWKMVP

SEQ ID NO: 34014 - protein, 934 aa, Homo sapiens
MVPEAWRSGLVSTGRVVGVLLLLGALNKASTVIHYEIPEEREKGFAVGNVVANLGLDLGSLSARRFRVVSGASRRFFEVNRETGEMFVNDRLDREELCGTLPSCTVTLELVVENPLELFSVEVVIQDINDNNPAFPTQEMKLEISEAVAPGTRFPLESAHDPDVGSNSLQTYELSRNEYFALRVQTREDSTKYAELVLERALDREREPSLQLVLTALDGGTPALSASLPIHIKVLDANDNAPVFNQSLYRARVLEDAPSGTRVVQVLATDLDEGPNGEIIYSFGSHNRAGVRQLFALDLVTGMLTIKGRLDFEDTKLHEIYIQAKDKGANPEGAHCKVLVEVVDVNDNAPEITVTSVYSPVPEDAPLGTVIALLSVTDLDAGENGLVTCEVPPGLPFSLTSSLKNYFTLKTSADLDRETVPEYNLSITARDAGTPSLSALTIVRVQVSDINDNPPQSSQSSYDVYIEENNLPGAPILNLSVWDPDAPQNARLSFFLLEQGAETGLVGRYFTINRDNGIVSSLVPLDYEDRREFELTAHISDGGTPVLATNISVNIFVTDRNDNAPQVLYPRPGGSSVEMLPRGTSAGHLVSRVVGWDADAGHNAWLSYSLLGSPNQSLFAIGLHTGQISTARPVQDTDSPRQTLTVLIKDNGEPSLSTTATLTVSVTEDSPEARAEFPSGSAPREQKKNLTFYLLLSLILVSVGFVVTVFGVIIFKVYKWKQSRDLYRAPVSSLYRTPGPSLHADAVRGGLMSPHLYHQVYLTTDSRRSDPLLKKPGAASPLASRQNTLRSCDPVFYRQVLGAESAPPGQQAPPNTDWRFSQAQRPGTSGSQNGDDTGTWPNNQFDTEMLQAMILASASEAADGSSTLGGGAGTMGLSARYGPQFTLQHVPDYRQNVYIPGSNATLTNAAGKRDGKAPAGGNGNKKKSGKKEKK

SEQ ID NO: 34015 - protein, 863 aa, Homo sapiens
MVPEAWRSGLVSTGRVVGVLLLLGALNKASTVIHYEIPEEREKGFAVGNVVANLGLDLGSLSARRFRVVSGASRRFFEVNRETGEMFVNDRLDREELCGTLPSCTVTLELVVENPLELFSVEVVIQDINDNNPAFPTQEMKLEISEAVAPGTRFPLESAHDPDVGSNSLQTYELSRNEYFALRVQTREDSTKYAELVLERALDREREPSLQLVLTALDGGTPALSASLPIHIKVLDANDNAPVFNQSLYRARVLEDAPSGTRVVQVLATDLDEGPNGEIIYSFGSHNRAGVRQLFALDLVTGMLTIKGRLDFEDTKLHEIYIQAKDKGANPEGAHCKVLVEVVDVNDNAPEITVTSVYSPVPEDAPLGTVIALLSVTDLDAGENGLVTCEVPPGLPFSLTSSLKNYFTLKTSADLDRETVPEYNLSITARDAGTPSLSALTIVRVQVSDINDNPPQSSQSSYDVYIEENNLPGAPILNLSVWDPDAPQNARLSFFLLEQGAETGLVGRYFTINRDNGIVSSLVPLDYEDRREFELTAHISDGGTPVLATNISVNIFVTDRNDNAPQVLYPRPGGSSVEMLPRGTSAGHLVSRVVGWDADAGHNAWLSYSLLGSPNQSLFAIGLHTGQISTARPVQDTDSPRQTLTVLIKDNGEPSLSTTATLTVSVTEDSPEARAEFPSGSAPREQKKNLTFYLLLSLILVSVGFVVTVFGVIIFKVYKWKQSRDLYRAPVSSLYRTPGPSLHADAVRGGLMSPHLYHQVYLTTDSRRSDPLLKKPGAASPLASRQNTLRSCDPVFYRQVLGAESAPPGQVRFSKSCLTLLVLFYSYIILRKEWSCFFSDEDVFLVMHSHFQLALPRSKLVPL

SEQ ID NO: 34016 - protein, 341 aa, Homo sapiens
MDTARIAVVGAGVVGLSTAVCISKLVPRCSVTIISDKFTPDTTSDVAAGMLIPHTYPDTPIHTQKQWFRETFNHLFAIANSAEAGDAGVHLVSGWQIFQSTPTEEVPFWADVVLGFRKMTEAELKKFPQYVFGQAFTTLKCECPAYLPWLEKRIKGSGGWTLTRRIEDLWELHPSFDIVVNCSGLGSRQLAGDSKIFPVRGQVLQVQAPWVEHFIRDGSGLTYIYPGTSHVTLGGTRQKGDWNLSPDAENSREILSRCCALEPSLHGACNIREKVGLRPYRPGVRLQTELLARDGQRLPVVHHYGHGSGGISVHWGTALEAARLVSECVHALRTPIPKSNL

SEQ ID NO: 34017 - protein, 282 aa, Homo sapiens
MDTARIAVVGAGVVGLSTAVCISKLVPRCSVTIISDKFTPDTTSDVAAGMLIPHTYPDTPIHTQKQWFRETFNHLFAIANSAEAGDAGVHLVSGIKGSGGWTLTRRIEDLWELHPSFDIVVNCSGLGSRQLAGDSKIFPVRGQVLQVQAPWVEHFIRDGSGLTYIYPGTSHVTLGGTRQKGDWNLSPDAENSREILSRCCALEPSLHGACNIREKVGLRPYRPGVRLQTELLARDGQRLPVVHHYGHGSGGISVHWGTALEAARLVSECVHALRTPIPKSNL

SEQ ID NO: 34018 - protein, 369 aa, Homo sapiens
MRPARHWETRFGARDFGGFQDCFFRDRLMDTARIAVVGAGVVGLSTAVCISKLVPRCSVTIISDKFTPDTTSDVAAGMLIPHTYPDTPIHTQKQWFRETFNHLFAIANSAEAGDAGVHLVSGWQIFQSTPTEEVPFWADVVLGFRKMTEAELKKFPQYVFGQAFTTLKCECPAYLPWLEKRIKGSGGWTLTRRIEDLWELHPSFDIVVNCSGLGSRQLAGDSKIFPVRGQVLQVQAPWVEHFIRDGSGLTYIYPGTSHVTLGGTRQKGDWNLSPDAENSREILSRCCALEPSLHGACNIREKVGLRPYRPGVRLQTELLARDGQRLPVVHHYGHGSGGISVHWGTALEAARLVSECVHALRTPIPKSNL

SEQ ID NO: 34019 - protein, 310 aa, Homo sapiens
MRPARHWETRFGARDFGGFQDCFFRDRLMDTARIAVVGAGVVGLSTAVCISKLVPRCSVTIISDKFTPDTTSDVAAGMLIPHTYPDTPIHTQKQWFRETFNHLFAIANSAEAGDAGVHLVSGIKGSGGWTLTRRIEDLWELHPSFDIVVNCSGLGSRQLAGDSKIFPVRGQVLQVQAPWVEHFIRDGSGLTYIYPGTSHVTLGGTRQKGDWNLSPDAENSREILSRCCALEPSLHGACNIREKVGLRPYRPGVRLQTELLARDGQRLPVVHHYGHGSGGISVHWGTALEAARLVSECVHALRTPIPKSNL

SEQ ID NO: 34020 - protein, 932 aa, Homo sapiens
MAPPQRHPQRSEQVLLLTLLGTLWGAAAAQIRYSIPEELEKGSFVGNIVKDLGLEPQELAEHGVRIVSRGRMQLFSLNPRNGSLVTAGRIDREELCAQSPRCLVSFNILVEDKLNLYPVEVEIVDINDNTPRFLKEELEVKILENAAPSSRFPLMEVYDPDVGMNSLQGFKLSGNSHFSVDVQSEAHGPKYPELVLEGTLDREGEAVYRLVLTAMDGGDPVRSSVAQILVTVLDVNDNTPMFTQPVYRVSVPENLPVGTPVLAVTATDQDEGVHGEVTYSFVKITEKISQIFCLNVLTGEISTSANLDYEDSSFYELGVEARDGPGLRDRAKVLITILDVNDNVPEVVVTSGSRTIAESAPPGTVIALFQVFDRDSGLNGLVTCSIPRSLPFELEKSVGNYYRLVTNAALDREEVFLYNITVTATDKGTPPLSTETIISLNVADTNDNPPTFPHSSYSVYVLENNPRGASIFSVNALDPDVDQNAQVSYSLAEDTLQGAPLSSYVSINSDTGILYALRSFDYEQLRDLQLWVTASDSGDPPLSSNVSLSLFVLDQNDNAPEILYPALPTDGSTGVELAPRSAEPGYLVTKVVAVDRDSGQNAWLSYRLLKASEPGLFSVGLHTGEVRTARALLDRDALKQSLVVAVQDHGQPPLSATVTLTVAVADRIPDILADLGSLEPSAKPNDSDLTLYLVVAVAAVSCVFLAFVIVLLALRLQRWHKSRLLQASGGGLASMPGSHFVGVEGVRAFLQTYSHEVSLTADSRKSHLIFPQPNYADTLINQESYEKSEPLLITQDLLETKGEPRQLQQAPPNTDWRFSQAQRPGTSGSQNGDDTGTWPNNQFDTEMLQAMILASASEAADGSSTLGGGAGTMGLSARYGPQFTLQHVPDYRQNVYIPGSNATLTNAAGKRDGKAPAGGNGNKKKSGKKEKK

SEQ ID NO: 34021 - protein, 818 aa, Homo sapiens
MAPPQRHPQRSEQVLLLTLLGTLWGAAAAQIRYSIPEELEKGSFVGNIVKDLGLEPQELAEHGVRIVSRGRMQLFSLNPRNGSLVTAGRIDREELCAQSPRCLVSFNILVEDKLNLYPVEVEIVDINDNTPRFLKEELEVKILENAAPSSRFPLMEVYDPDVGMNSLQGFKLSGNSHFSVDVQSEAHGPKYPELVLEGTLDREGEAVYRLVLTAMDGGDPVRSSVAQILVTVLDVNDNTPMFTQPVYRVSVPENLPVGTPVLAVTATDQDEGVHGEVTYSFVKITEKISQIFCLNVLTGEISTSANLDYEDSSFYELGVEARDGPGLRDRAKVLITILDVNDNVPEVVVTSGSRTIAESAPPGTVIALFQVFDRDSGLNGLVTCSIPRSLPFELEKSVGNYYRLVTNAALDREEVFLYNITVTATDKGTPPLSTETIISLNVADTNDNPPTFPHSSYSVYVLENNPRGASIFSVNALDPDVDQNAQVSYSLAEDTLQGAPLSSYVSINSDTGILYALRSFDYEQLRDLQLWVTASDSGDPPLSSNVSLSLFVLDQNDNAPEILYPALPTDGSTGVELAPRSAEPGYLVTKVVAVDRDSGQNAWLSYRLLKASEPGLFSVGLHTGEVRTARALLDRDALKQSLVVAVQDHGQPPLSATVTLTVAVADRIPDILADLGSLEPSAKPNDSDLTLYLVVAVAAVSCVFLAFVIVLLALRLQRWHKSRLLQASGGGLASMPGSHFVGVEGVRAFLQTYSHEVSLTADSRKSHLIFPQPNYADTLINQESYEKSEPLLITQDLLETKGEPRQLQVSFFPPKREE

SEQ ID NO: 34022 - protein, 929 aa, Homo sapiens
MGNSSGWRGPAGQRRMLFLFLLSLLDQALSEPIRYAIPEELDRGSLVGNLAKDLGFGVGDLPTRNLRVIAEKKFFTVSPENGNLLVSDRIDREEICGKKSTCVLEFEMVAEKPLNFFHVTVLIQDINDNPPTFSQNITELEISELALTGATFALESAQDPDVGVNSLQQYYLSPDPHFSLIQKENLDGSRYPELVLKAPLDREEQPHHHLVLTAVDGGEPSRSCTTQIRVIVADANDNPPVFTQDMYRVNVAENLPAGSSVLKVMAIDMDEGINAEIIYAFINIGKEVRQLFKLDSKTGELTTIGELDFEERDSYTIGVEAKDGGHHTAYCKVQIDISDENDNAPEITLASESQHIQEDAELGTAVALIKTHDLDSGFNGEILCQLKGNFPFKIVQDTKNTYRLVTDGALDREQIPEYNVTITATDKGNPPLSSSKTITLHILDVNDNVPVFHQASYTVHVAENNPPGASIAHVRASDPDLGPNGLVSYYIVASDLEPRELSSYVSVSARSGVVFAQRAFDHEQLRAFELTLQARDQGSPTLSANVSLRVLVDDRNDNAPLVLYPALGPEGSALFDMVPRSAEPGYLVTKVVAVDADSGYNAWLSYHIVQASEPGLFSLGLRTGEVRTARTLGDREAARQRLLVTVRDGGQQPLSATVMLHLIFADSLQEIQPDLSDRPTPSDPQAELQFHLVVALALISVLFLLAVILAISLRLRCSSRPATEGYFQPGVCFKTVPGVLPTYSERTLPYSYNPCAASHSSNTEFKFLNIKAENAAPQDLLCDEASWFESNDNPEMPSNSGNLQKQAPPNTDWRFSQAQRPGTSGSQNGDDTGTWPNNQFDTEMLQAMILASASEAADGSSTLGGGAGTMGLSARYGPQFTLQHVPDYRQNVYIPGSNATLTNAAGKRDGKAPAGGNGNKKKSGKKEKK

SEQ ID NO: 34023 - protein, 814 aa, Homo sapiens
MGNSSGWRGPAGQRRMLFLFLLSLLDQALSEPIRYAIPEELDRGSLVGNLAKDLGFGVGDLPTRNLRVIAEKKFFTVSPENGNLLVSDRIDREEICGKKSTCVLEFEMVAEKPLNFFHVTVLIQDINDNPPTFSQNITELEISELALTGATFALESAQDPDVGVNSLQQYYLSPDPHFSLIQKENLDGSRYPELVLKAPLDREEQPHHHLVLTAVDGGEPSRSCTTQIRVIVADANDNPPVFTQDMYRVNVAENLPAGSSVLKVMAIDMDEGINAEIIYAFINIGKEVRQLFKLDSKTGELTTIGELDFEERDSYTIGVEAKDGGHHTAYCKVQIDISDENDNAPEITLASESQHIQEDAELGTAVALIKTHDLDSGFNGEILCQLKGNFPFKIVQDTKNTYRLVTDGALDREQIPEYNVTITATDKGNPPLSSSKTITLHILDVNDNVPVFHQASYTVHVAENNPPGASIAHVRASDPDLGPNGLVSYYIVASDLEPRELSSYVSVSARSGVVFAQRAFDHEQLRAFELTLQARDQGSPTLSANVSLRVLVDDRNDNAPLVLYPALGPEGSALFDMVPRSAEPGYLVTKVVAVDADSGYNAWLSYHIVQASEPGLFSLGLRTGEVRTARTLGDREAARQRLLVTVRDGGQQPLSATVMLHLIFADSLQEIQPDLSDRPTPSDPQAELQFHLVVALALISVLFLLAVILAISLRLRCSSRPATEGYFQPGVCFKTVPGVLPTYSERTLPYSYNPCAASHSSNTEFKFLNIKAENAAPQDLLCDEASWFESNDNPEMPSNSGNLQKVSFFKPFLP

SEQ ID NO: 34024 - protein, 379 aa, Homo sapiens
MAWRGWAQRGWGCGQAWGASVGGRSCEELTAVLTPPQLLGRRFNFFIQQKCGFRKAPRKVEPRRSDPGTSGEAYKRSALIPPVEETVFYPSPYPIRSLIKPLFFTVGFTGCAFGSAAIWQYESLKSRVQSYFDGIKADWLDSIRPQKEGDFRKEINKWWNNLSDGQRTVTGIIAANVLVFCLWRVPSLQRTMIRYFTSNPASKVLCSPMLLSTFSHFSLFHMAANMYVLWSFSSSIVNILGQEQFMAVYLSAGVISNFVSYVGKVATGRYGPSLGASGAIMTVLAAVCTKIPEGRLAIIFLPMFTFTAGNALKAIIAMDTAGMILGWKFFDHAAHLGGALFGIWYVTYGHELIWKNREPLVKIWHEIRTNGPKKGGGSK

SEQ ID NO: 34025 - protein, 329 aa, Homo sapiens
MAWRGWAQRGWGCGQAWGASVGGRSCEELTAVLTPPQLLGRRFNFFIQQKCGFRKAPRKVEPRRSDPGTSGEAYKRSALIPPVEETVFYPSPYPIRSLIKPLFFTVGFTGCAFGSAAIWQYESLKSRVQSYFDGIKADWLDSIRPQKEGDFRKEINKWWNNLSDGQRTVTGIIAANVLVFCLWRVPSLQRTMIRYFTSNPASSVISNFVSYVGKVATGRYGPSLGASGAIMTVLAAVCTKIPEGRLAIIFLPMFTFTAGNALKAIIAMDTAGMILGWKFFDHAAHLGGALFGIWYVTYGHELIWKNREPLVKIWHEIRTNGPKKGGGSK

SEQ ID NO: 34026 - protein, 840 aa, Homo sapiens
MAVVKTPSRGLKNAKEPFNNASPHLLKNLVEEPKKRKEVPNHLLESKVYAKLVNNKVIQARPGIIHFGGYQVEKQHQQILHLVNVSNEDTRVHILPPQTKYFEINYVRKEHHLVPGLSLTVTVTFSPDEWRYYYDCIRVHCKGDDTLLVPIHAYPVMNSLDFPSFINLSNVLLGESKTYVIPLQCSCPVDFEFYITLIQSHQAFAIEPTSGIIPANGKMTVTIKFTPFQYGTAQIKMQLWISQFNSQPYECVFTGTCYPNMALPLEEFERLNTLSKKVNVPPEKAMMHINFHRPPAKPKPQKVKEIEYQNLRFPVDLSNPFAVATVLNQEPGKLKIKELREVLDQGTEISKTRQMKEALFEQKVRQDIHEEMENHLKWQVHLGKDPMSFKLKKELTEEWQKACAKYKLDRGDPILDEEFQRLKTEVSHKRVVRNQEEKIKEFHPTFDPLINNTWLSRSRAQKRFQQVARKVMIQGRLFNMLSAVREMDKESILRKIGQAKQSIAQEANFFKFFLRRISQDDYTSRFSVSPKEVLPFAFPDCSPPQDSNELAPDGLGLVPIKSSEVQIKQSYSFFNLQVPQLYKIKRYQPFSVHKSSTSYRPQKLARALKQGAEDEVTTITALPKQDSTTQLSGKTSVLSMKPPEALAMSLDYDPLYVFNPNPGLFAVMHPLTYAETLIDYHLCSHPKYKFTKESRHGSSIPVTQKQFLHHTDIIPGIMHWKSFQSLVLSSLPDPSKMETTKSCDSFNSFMLPIDVPAILDALPEEDRLETVERELCEQNVEVMLTPEMIKVEFPMLNYKDIRKEKEVKDQAQPAEKAGEKLLEEMRNLRGKALNTYLILE

SEQ ID NO: 34027 - protein, 554 aa, Homo sapiens
MHINFHRPPAKPKPQKVKEIEYQNLRFPVDLSNPFAVATVLNQEPGKLKIKELREVLDQGTEISKTRQMKEALFEQKVRQDIHEEMENHLKWQVHLGKDPMSFKLKKELTEEWQKACAKYKLDRGDPILDEEFQRLKTEVSHKRVVRNQEEKIKEFHPTFDPLINNTWLSRSRAQKRFQQVARKVMIQGRLFNMLSAVREMDKESILRKIGQAKQSIAQEANFFKFFLRRISQDDYTSRFSVSPKEVLPFAFPDCSPPQDSNELAPDGLGLVPIKSSEVQIKQSYSFFNLQVPQLYKIKRYQPFSVHKSSTSYRPQKLARALKQGAEDEVTTITALPKQDSTTQLSGKTSVLSMKPPEALAMSLDYDPLYVFNPNPGLFAVMHPLTYAETLIDYHLCSHPKYKFTKESRHGSSIPVTQKQFLHHTDIIPGIMHWKSFQSLVLSSLPDPSKMETTKSCDSFNSFMLPIDVPAILDALPEEDRLETVERELCEQNVEVMLTPEMIKVEFPMLNYKDIRKEKEVKDQAQPAEKAGEKLLEEMRNLRGKALNTYLILE

SEQ ID NO: 34028 - protein, 522 aa, Homo sapiens
MNSLDFPSFINLSNVLLGESKTYVIPLQCSCPVDFEFYITLIQSHQAFAIEPTSGIIPANGKMTVTIKFTPFQYGTAQIKMQLWISQFNSQPYECVFTGTCYPNMALPLEEFERLNTLSKKVNVPPEKAMMHINFHRPPAKPKPQKVKEIEYQNLRFPVDLSNPFAVATVLNQEPGKLKIKELREVLDQGTEISKTRQMKEALFEQKVRQDIHEEMENHLKWQVHLGKDPMSFKLKKELTEEWQKACAKYKLDRGDPILDEEFQRLKTEVSHKRVVRNQEEKIKEFHPTFDPLINNTWLSRSRAQKRFQQVARKVMIQGRLFNMLSAVREMDKESILRKIGQAKQSIAQEANFFKFFLRRISQDDYTSRFSVSPKEVLPFAFPDCSPPQDSNELAPDGLGLVPIKSSEVQIKQSYSFFNLQVPQLYKIKRYQPFSVHKSSTSYRPQKLARALKQGAEDEVTTITALPKQDSTTQLSGKTSVLSMKPPEALAMSLDYDPLYVFVSDNWQKPCFLCSFISAITL

SEQ ID NO: 34029 - protein, 187 aa, Homo sapiens
MAVVKTPSRGLKNAKEPFNNASPHLLKNLVEEPKKRKEVPNHLLESKVYAKLVNNKVIQARPGIIHFGGYQVEKQHQQILHLVNVSNEDTRVHILPPQTKYFEINYVRKEHHLVPGLSLTVTVTFSPDEWRYYYDCIRVHCKGDDTLLVPIHAYPVMNSLDFPSFINLSNVLLGESLPNSVFLVPDN

SEQ ID NO: 34030 - protein, 944 aa, Homo sapiens
MGPKTLPQLAGKWQVLCMLSLCCWGWVSGQLRYSVVEESEPGTLVGNVAQDLGLKMTDLLSRRLQLGSEENGRYFSLSLMSGALAVNQKIDRESLCGASTSCLLPVQVVTEHPLELIRVEVEILDLNDNSPSFATPEREMRISESAASGARFPLDSAQDPDVGTNTVSFYTLSPNSHFSLNVKTLKDGKPFPELVLEQQLDREAQARHQLVLTAVDGGTPARSGTTLISVIVLDINDNAPTFQSSVLRVGIPENAPIGTLLLRLNATDPDEGTNGQLDYSFGDHTSEAVRNLFGLDPSSGAIHVLGPIDFEESRFYEIHARARDQGQPAMEGHCVIQVDVGDVNDNAPEVLLASLANPVLESTPVGTVVGLFNVRDRDSGRNGEVSLDISPDLPFQIKPSENHYSLLTSQPLDREATSHYIIELLASDAGSPSLHKHLTIRLNISDVNDNAPRFNQQLYTAYILENRPPGSLLCTVAASDPDTGDNARLTYSIVGNQVQGAPASSFVYVNPEDGRIFAQRTFDYELLQMLQIVVGVRDSGSPPLHANTSLHVFVLDENDNAPAVLHPRPDWEHSAPQRLPRSAPPGSLVTKVTAVDADAGHNAWLSYSLLPQSTAPGLFLVSTHTGEVRTARALLEDDSDTQQVVVLVRDNGDPSLSSTATVLLVLEDEDPEEMPKSSDFLIHPPERSDLTLYLIVALATVSLLSLVTFTFLSAKCLQGNADGDGGGGQCCRRQDSPSPDFYKQSSPNLQVSSDGTLKYMEVTLRPTDSQSHCYRTCFSPASDGSDFTFLRPLSVQQPTALALEPDAIRSRSNTLRERSQQAPPNTDWRFSQAQRPGTSGSQNGDDTGTWPNNQFDTEMLQAMILASASEAADGSSTLGGGAGTMGLSARYGPQFTLQHVPDYRQNVYIPGSNATLTNAAGKRDGKAPAGGNGNKKKSGKKEKK

SEQ ID NO: 34031 - protein, 878 aa, Homo sapiens
MGPKTLPQLAGKWQVLCMLSLCCWGWVSGQLRYSVVEESEPGTLVGNVAQDLGLKMTDLLSRRLQLGSEENGRYFSLSLMSGALAVNQKIDRESLCGASTSCLLPVQVVTEHPLELIRVEVEILDLNDNSPSFATPEREMRISESAASGARFPLDSAQDPDVGTNTVSFYTLSPNSHFSLNVKTLKDGKPFPELVLEQQLDREAQARHQLVLTAVDGGTPARSGTTLISVIVLDINDNAPTFQSSVLRVGIPENAPIGTLLLRLNATDPDEGTNGQLDYSFGDHTSEAVRNLFGLDPSSGAIHVLGPIDFEESRFYEIHARARDQGQPAMEGHCVIQVDVGDVNDNAPEVLLASLANPVLESTPVGTVVGLFNVRDRDSGRNGEVSLDISPDLPFQIKPSENHYSLLTSQPLDREATSHYIIELLASDAGSPSLHKHLTIRLNISDVNDNAPRFNQQLYTAYILENRPPGSLLCTVAASDPDTGDNARLTYSIVGNQVQGAPASSFVYVNPEDGRIFAQRTFDYELLQMLQIVVGVRDSGSPPLHANTSLHVFVLDENDNAPAVLHPRPDWEHSAPQRLPRSAPPGSLVTKVTAVDADAGHNAWLSYSLLPQSTAPGLFLVSTHTGEVRTARALLEDDSDTQQVVVLVRDNGDPSLSSTATVLLVLEDEDPEEMPKSSDFLIHPPERSDLTLYLIVALATVSLLSLVTFTFLSAKCLQGNADGDGGGGQCCRRQDSPSPDFYKQSSPNLQVSSDGTLKYMEVTLRPTDSQSHCYRTCFSPASDGSDFTFLRPLSVQQPTALALEPDAIRSRSNTLRERSQVRGSAPPRATPGGGTGEAARPHKGLNLHPLLSGRLGRWLRSTRFSGSLDRLRETRVAD

SEQ ID NO: 34032 - protein, 296 aa, Homo sapiens
MGAAAPAESADLGNFWKAGEPLLQGPDALAAPMSRSPSTPQTTPSPQGRQSPWPLRSLTQSHIQYFQWGRPVPSTHLIEVRPTQDPAKPQRVVSEGWRRPALPGETALGRDLSCAWEGCMKGGLCRAWNPGRTWSPVTIGIAPPERQESPWRSPGQRARPAGRPAAQELLDPCTRETLLGALSQCPKGSARFDGPLWFEVSDSKGGRRNLQPRPSAFKPLSKNGAVASFVPRPGPLKPSLGPWSLSFCDDAWPSVLVQPAPSAIWDFWEATTPSCGSCSRVSFALEVTQSAGPFGS

SEQ ID NO: 34033 - protein, 452 aa, Homo sapiens
MKVQPSVTCVASWGGIVHLEAFGDPVIVLRGAWAVPRVDCLIDTLRTPNASCMRKGTHLLVPCLEEEELALHRRRLDMSEALPCPGKETPTPGCRLGALYWACVHNDPTQLQAILDGGVSPEEATQVDSNGRTGLMVACYHGFQSVVALLSHCPFLDVNQQDKGGDTALMLAAQAGHVPLVSLLLNYYVGLDLERRDQRGLTALMKAAMRNRCADLTAVDPVRGKTALEWAVLTDSFDTVWRIRQLLRRPQVEQLSQHYKPEWPALSGLVAQAQAQAQVAPSLLERLQATLSLPFAPSPQEGGVLDHLVTATTSLASPFVTTACHTLCPDHPPSLGTRSKSVPELLGTAPPPPLVPQSPPGSPQRSPWVFVPYQSPQGILSKCLQWLQPRDSTSPRPQVPKILLSKASSSSHQCQPKPSPSGHQSLALPLWRYQELRIEKRKQEEEARMAQK

SEQ ID NO: 34034 - protein, 272 aa, Homo sapiens
MVACYHGFQSVVALLSHCPFLDVNQQDKGGDTALMLAAQAGHVPLVSLLLNYYVGLDLERRDQRGLTALMKAAMRNRCECVATLLMAGADLTAVDPVRGKTALEWAVLTDSFDTVWRIRQLLRRPQVEQLSQHYKPEWPALSGLVAQAQAQAQVAPSLLERLQATLSLPFAPSPQEGGVLDHLVTATTSLASPFVTTACHTLCPDHPPSLGTRSKSVPELLVPAEAQSFRTPKSGPSSLAIPGAQDREEETGGGGQNGTEVGEDGIGQAGNR

SEQ ID NO: 34035 - protein, 370 aa, Homo sapiens
MKIKDAKKPSFPWFGMDIGGTLVKLSYFEPIDITAEEEQEEVESLKSIRKYLTSNVAYGSTGIRDVHLELKDLTLFGRRGNLHFIRFPTQDLPTFIQMGRDKNFSTLQTVLCATGGGAYKFEKDFRTIGNLHLHKLDELDCLVKGLLYIDSVSFNGQAECYYFANASEPERCQKMPFNLDDPYPLLVVNIGSGVSILAVHSKDNYKRVTGTSLGGGTFLGLCSLLTGCESFEEALEMASKGDSTQADKLVRDIYGGDYERFGLPGWAVASSFGNMIYKEKRESVSKEDLARATLVTITNNIGSVARMCAVNEKINRVVFVGNFLRVNTLSMKLLAYALDYWSKGQLKALFLEHEGYFGAVGALLGLPNFS

SEQ ID NO: 34036 - protein, 567 aa, Homo sapiens
MAPLALHLLVLVPILLSLVASQDWKAERSQDPFEKCMQDPDYEQLLKVVTWGLNRTLKPQRVIVVGAGVAGLVAAKVLSDAGHKVTILEADNRIGGRIFTYRDQNTGWIGELGAMRMPSSHRILHKLCQGLGLNLTKFTQYDKNTWTEVHEVKLRNYVVEKVPEKLGYALRPQEKGHSPEDIYQMALNQALKDLKALGCRKAMKKFERHTLLEYLLGEGNLSRPAVQLLGDVMSEDGFFYLSFAEALRAHSCLSDRLQYSRIVGGWDLLPRALLSSLSGLVLLNAPVVAMTQGPHDVHVQIETSPPARNLKVLKADVVLLTASGPAVKRITFSPPLPRHMQEALRRLHYVPATKVFLSFRRPFWREEHIEGGHSNTDRPSRMIFYPPPREGALLLASYTWSDAAAAFAGLSREEALRLALDDVAALHGPVVRQLWDGTGVVKRWAEDQHSQGGFVVQPPALWQTEKDDWTVPYGRIYFAGEHTAYPHGWVETAVKSALRAAIKINSRKGPASDTASPEGHASDMEGQGHVHGVASSPSHDLAKEEGSHPPVQGQLSLQNTTHTRTSH

SEQ ID NO: 34037 - protein, 589 aa, Homo sapiens
MPNDDFCPGLTIKAMGAERAPQRQPCTLHLLVLVPILLSLVASQDWKAERSQDPFEKCMQDPDYEQLLKVVTWGLNRTLKPQRVIVVGAGVAGLVAAKVLSDAGHKVTILEADNRIGGRIFTYRDQNTGWIGELGAMRMPSSHRILHKLCQGLGLNLTKFTQYDKNTWTEVHEVKLRNYVVEKVPEKLGYALRPQEKGHSPEDIYQMALNQALKDLKALGCRKAMKKFERHTLLEYLLGEGNLSRPAVQLLGDVMSEDGFFYLSFAEALRAHSCLSDRLQYSRIVGGWDLLPRALLSSLSGLVLLNAPVVAMTQGPHDVHVQIETSPPARNLKVLKADVVLLTASGPAVKRITFSPPLPRHMQEALRRLHYVPATKVFLSFRRPFWREEHIEGGHSNTDRPSRMIFYPPPREGALLLASYTWSDAAAAFAGLSREEALRLALDDVAALHGPVVRQLWDGTGVVKRWAEDQHSQGGFVVQPPALWQTEKDDWTVPYGRIYFAGEHTAYPHGWVETAVKSALRAAIKINSRKGPASDTASPEGHASDMEGQGHVHGVASSPSHDLAKEEGSHPPVQGQLSLQNTTHTRTSH

SEQ ID NO: 34038 - protein, 441 aa, Homo sapiens
MVPPKLHVLFCLCGCLAVVYPFDWQYINPVAHMKSSAWVNKIQVLMAAASFGQTKIPRGNGPYSVGCTDLMFDHTNKGTFLRLYYPSQDNDRLDTLWIPNKEYFWGLSKFLGTHWLMGNILRLLFGSMTTPANWNSPLRPGEKYPLVVFSHGLGAFRTLYSAIGIDLASHGFIVAAVEHRDRSASATYYFKDQSAAEIGDKSWLYLRTLKQEEETHIRNEQVRQRAKECSQALSLILDIDHGKPVKNALDLKFDMEQLKDSIDREKIAVIGHSFGGATVIQTLSEDQRFRCGIALDAWMFPLGDEVYSRIPQPLFFINSEYFQYPANIIKMKKCYSPDKERKMITIRGSVHQNFADFTFATGKIIGHMLKLKGDIDSNVAIDLSNKASLAFLQKHLGLHKDFDQWDCLIEGDDENLIPGTNINTTNQHIMLQNSSGIEKYN

SEQ ID NO: 34039 - protein, 736 aa, Homo sapiens
MAVRALKLLTTLLAVVAAASQAEVESEAGWGMVTPDLLFAEGTAAYARGDWPGVVLSMERALRSRAALRALRLRCRTQCAADFPWELDPDWSPSPAQASGAAALRDLSFFGGLLRRAACLRRCLGPPAAHSLSEEMELEFRKRSPYNYLQVAYFKINKLEKAVAAAHTFFVGNPEHMEMQQNLDYYQTMSGVKEADFKDLETQPHMQEFRLGVRLYSEEQPQEAVPHLEAALQEYFVAYEECRALCEGPYDYDGYNYLEYNADLFQAITDHYIQVLNCKQNCVTELASHPSREKPFEDFLPSHYNYLQFAYYNIGNYTQAVECAKTYLLFFPNDEVMNQNLAYYAAMLGEEHTRSIGPRESAKEYRQRSLLEKELLFFAYDVFGIPFVDPDSWTPEEVIPKRLQEKQKSERETAVRISQEIGNLMKEIETLVEEKTKESLDVSRLTREGGPLLYEGISLTMNSKLLNGSQRVVMDGVISDHECQELQRLTNVAATSGDGYRGQTSPHTPNEKFYGVTVFKALKLGQEGKVPLQSAHLYYNVTEKVRRIMESYFRLDTPLYFSYSHLVCRTAIEEVQAERKDDSHPVHVDNCILNAETLVCVKEPPAYTFRDYSAILYLNGDFDGGNFYFTELDAKTVTAEVQPQCGRAVGFSSGTENPHGVKAVTRGQRCAIALWFTLDPRHSERDRVQADDLVKMLFSPEEMDLSQEQPLDAQQGPPEPAQESLSGSESKPKDEL

SEQ ID NO: 34040 - protein, 363 aa, Homo sapiens
MAVRALKLLTTLLAVVAAASQAEVESEAGWGMVTPDLLFAEGTAAYARGDWPGVVLSMERALRSRAALRALRLRCRTQCAADFPWELDPDWSPSPAQASGAAALRDLSFFGGLLRRAACLRRCLGPPAAHSLSEEMELEFRKRSPYNYLQVAYFKINKLEKAVAAAHTFFVGNPEHMEMQQNLDYYQTMSGVKEADFKDLETQPHMQEFRLGVRLYSEEQPQEAVPHLEAALQEYFVAYEECRALCEGPYDYDGYNYLEYNADLFQAITDHYIQVLNCKQNCVTELASHPSREKPFEDFLPSHYNYLQFAYYNIGNYTQAVECAKTYLLFFPNDEVMNQNLAYYAAMLGEEHTRSIGPREQGT

SEQ ID NO: 34041 - protein, 804 aa, Homo sapiens
MAVRALKLLTTLLAVVAAASQAEVESEAGWGMVTPDLLFAEGTAAYARGDWPGVVLSMERALRSRAALRALRLRCRTQCAADFPWELDPDWSPSPAQASGAAALRDLSFFGGLLRRAACLRRCLGPPAAHSLSEEMELEFRKRSPYNYLQVAYFKINKLEKAVAAAHTFFVGNPEHMEMQQNLDYYQTMSGVKEADFKDLETQPHMQEFRLGVRLYSEEQPQEAVPHLEAALQEYFVAYEECRALCEGPYDYDGYNYLEYNADLFQAITDHYIQVLNCKQNCVTELASHPSREKPFEDFLPSHYNYLQFAYYNIGNYTQAVECAKTYLLFFPNDEVMNQNLAYYAAMLGEEHTRSIGPRESAKEYRQRSLLEKELLFFAYDVFGIPFVDPDSWTPEEVIPKRLQEKQKSERETAVRISQEIGNLMKEIETLVEEKTKESLDVSRLTREGGPLLYEGISLTMNSKLLNGSQRVVMDGVISDHECQELQRLTNVAATSGDGYRGQTSPHTPNEKFYGVTVFKALKLGQEGKVPLQSAHLYYNVTEKVRRIMESYFRLDTPLYFSYSHLVCRTAIEEVQAERKDDSHPVHVDNCILNAETLVCVKEPPAYTFRDYSAILYLNGDFDGGNFYFTELDAKTVTAEVQPQCGRAVGFSSGTENPHGVKAVTRGQRCAIALWFTLDPRHSERVRAARAGESSWCCGDPFPERPWFAFLFPKSHCQWLRHERSTWDTSSNALSLWSHCLVLPGPAVNGIQVGKEVKTGSDAEFLVPSLGPTSAVLFQRVGPAGKEMSLGPLRNLPCPLGSSS

SEQ ID NO: 34042 - protein, 697 aa, Homo sapiens
MAVRALKLLTTLLAVVAAASQAEVESEAGWGMVTPDLLFAEGTAAYARGDWPGVVLSMERALRSRAALRALRLRCRTQCAADFPWELDPDWSPSPAQASGAAALRDLSFFGGLLRRAACLRRCLGPPAAHSLSEEMELEFRKRSPYNYLQVAYFKINKLEKAVAAAHTFFVGNPEHMEMQQNLDYYQTMSGVKEADFKDLETQPHMQEFRLGVRLYSEEQPQEAVPHLEAALQEYFVAYEECRALCEGPYDYDGYNYLEYNADLFQAITDHYIQVLNCKQNCVTELASHPSREKPFEDFLPSHYNYLQFAYYNIGNYTQAVECAKTYLLFFPNDEVMNQNLAYYAAMLGEEHTRSIGPRESAKEYRQRSLLEKELLFFAYDVFGIPFVDPDSWTPEEVIPKRLQEKQKSERETAVRISQEIGNLMKEIETLVEEKTKESLDVSRLTREGGPLLYEGISLTMNSKLLNGSQRVVMDGVISDHECQELQRLTNVAATSGDGYRGQTSPHTPNEKFYGVTVFKALKLGQEGKVPLQSAHLYYNVTEKVRRIMESYFRLDTPLYFSYSHLVCRTAIEEVQAERKDDSHPVHVDNCILNAETLVCVKEPPAYTFRDYSAILYLNGDFDGGNFYFTELDAKTVTAEVQPQCGRAVGFSSGTENPHGVKAVTRGQRCAIALWFTLDPRHSERVRAARAGQGAGR

SEQ ID NO: 34043 - protein, 394 aa, Homo sapiens
MSGEDEQQEQTIAEDLVVTKYKMGGDIANRVLRSLVEASSSGVSVLSLCEKGDAMIMEETGKIFKKEKEMKKGIAFPTSISVNNCVCHFSPLKSDQDYILKEGDLVKIDLGVHVDGFIANVAHTFVVDVAQGTQVTGRKADVIKAAHLCAEAALRLVKPGNQNTQVTEAWNKVAHSFNCTPIEGMLSHQLKQHVIDGEKTIIQNPTDQQKKDHEKAEFEVHEVYAVDVLVSSGEGKAKDAGQRTTIYKRDPSKQYGLKMKTSRAFFSEVERRFDAMPFTLRAFEDEKKARMGVVECAKHELLQPFNVLYEKEGEFVAQFKFTVLLMPNGPMRITSGPFEPDLYKSEMEVQDAELKALLQSSASRKTQKKKKKKASKTAENATSGETLEENEAGD

SEQ ID NO: 34044 - protein, 340 aa, Homo sapiens
MIMEETGKIFKKEKEMKKGIAFPTSISVNNCVCHFSPLKSDQDYILKEGDLVKIDLGVHVDGFIANVAHTFVVDVAQGTQVTGRKADVIKAAHLCAEAALRLVKPGNQNTQVTEAWNKVAHSFNCTPIEGMLSHQLKQHVIDGEKTIIQNPTDQQKKDHEKAEFEVHEVYAVDVLVSSGEGKAKDAGQRTTIYKRDPSKQYGLKMKTSRAFFSEVERRFDAMPFTLRAFEDEKKARMGVVECAKHELLQPFNVLYEKEGEFVAQFKFTVLLMPNGPMRITSGPFEPDLYKSEMEVQDAELKALLQSSASRKTQKKKKKKASKTAENATSGETLEENEAGD

SEQ ID NO: 34045 - protein, 133 aa, Homo sapiens
MLDWRLASAHFILAVTLTLWSSGKVLSVDVTTTEAFDSGVIDVQSTPTVREEKSATDLTAKLLLLDELVSLENDVIETKKKRSFSGFGSPLDRLSAGSVDHKGKQRKVVDHPKRRFGIPMDRIGRNRLSNSRG

SEQ ID NO: 34046 - protein, 633 aa, Homo sapiens
MTEEACRTRSQKRALERDPTEDDVESKKIKMERGLLASDLNTDGDMRVTPEPGAGPTQGLLRATEATAMAMGRGEGLVGDGPVDMRTSHSDMKSERRPPSPDVIVLSDNEQPSSPRVNGLTTVALKETSTEALMKSSPEERERMIKQLKEELRLEEAKLVLLKKLRQSQIQKEATAQKPTGSVGSTVTTPPPLVRGTQNIPAGKPSLQTSSARMPGSVIPPPLVRGGQQASSKLGPQASSQVVMPPLVRGAQQIHSIRQHSSTGPPPLLLAPRASVPSVQIQGQRIIQQGLIRVANVPNTSLLVNIPQPTPASLKGTTATSAQANSTPTSVASVVTSAESPASRQAAAKLALRKQLEKTLLEIPPPKPPAPEMNFLPSAANNEFIYLVGLEEVVQNLLETQGRMSAATVLSREPYMCAQCKTDFTCRWREEKSGAIMCENCMTTNQKKALKVEHTSRLKAAFVKALQQEQEIEQRLLQQGTAPAQAKAEPTAAPHPVLKQVIKPRRKLAFRSGEARDWSNGAVLQASSQLSRGSATTPRGVLHTFSPSPKLQNSASATALVSRTGRHSERTVSAGKGSATSNWKKTPLSTGGTLAFVSPSLAVHKSSSAVDRQREYLLDMIPPRSIPQSATWK

SEQ ID NO: 34047 - protein, 608 aa, Homo sapiens
MTEEACRTRSQKRALERDPTEDDVESKKIKMERGLLASDLNTDGDMRVTPEPGAGPTQGLLRATEATAMAMGRGEGLVGDGPVDMRTSHSDMKSERRPPSPDVIVLSDNEQPSSPRVNGLTTVALKETSTEALMKSSPEERERMIKQLKEELRLEEAKLVLLKKLRQSQIQKEATAQKPTGSVGSTVTTPPPLVRGTQNIPAGKPSLQTSSARMPGSVIPPPLVRGGQQASSKLGPQASSQVVMPPLVRGAQQIHSIRQHSSTGPPPLLLAPRASVPSVQIQGQRIIQQGLIRVANVPNTSLLVNIPQPTPASLKGTTATSAQANSTPTSVASVVTSAESPASRQAAAKLALRKQLEKTLLEIPPPKPPAPEMNFLPSAANNEFIYLVGLEEVVQNLLETQGRMSAATVLSREPYMCAQCKTDFTCRWREEKSGAIMCENCMTTNQKKALKVEHTSRLKAAFVKALQQEQEIEQRLLQQGTAPAQAKAEPTAAPHPVLKQASSQLSRGSATTPRGVLHTFSPSPKLQNSASATALVSRTGRHSERTVSAGKGSATSNWKKTPLSTGGTLAFVSPSLAVHKSSSAVDRQREYLLDMIPPRSIPQSATWK

SEQ ID NO: 34048 - protein, 634 aa, Homo sapiens
MTEEACRTRSQKRALERDPTEDDVESKKIKMERGLLASDLNTDGDMRVTPEPGAGPTQGLLRATEATAMAMGRGEGLVGDGPVDMRTSHSDMKSERRPPSPDVIVLSDNEQPSSPRVNGLTTVALKETSTEALMKSSPEERERMIKQLKEELRLEEAKLVLLKKLRQSQIQKEATAQKPTGSVGSTVTTPPPLVRGTQNIPAGKPSLQTSSARMPGSVIPPPLVRGGQQASSKLGPQASSQVVMPPLVRGAQQIHSIRQHSSTGPPPLLLAPRASVPSVQIQGQRIIQQGLIRVANVPNTSLLVNIPQPTPASLKGTTATSAQANSTPTSVASVVTSAESPASRQAAAKLALRKQLEKTLLEIPPPKPPAPEMNFLPSAANNEFIYLVGLEEVVQNLLETQAGRMSAATVLSREPYMCAQCKTDFTCRWREEKSGAIMCENCMTTNQKKALKVEHTSRLKAAFVKALQQEQEIEQRLLQQGTAPAQAKAEPTAAPHPVLKQVIKPRRKLAFRSGEARDWSNGAVLQASSQLSRGSATTPRGVLHTFSPSPKLQNSASATALVSRTGRHSERTVSAGKGSATSNWKKTPLSTGGTLAFVSPSLAVHKSSSAVDRQREYLLDMIPPRSIPQSATWK

SEQ ID NO: 34049 - protein, 142 aa, Homo sapiens
MKSPHVLVFLCLLVALVTGNLVQFGVMIEKMTGKSALQYNDYGCYCGIGGSHWPVDQTDWCCHAHDCCYGRLEKLGCEPKLEKYLFSVSERGIFCAGRTTCQRLTCECDKRAALCFRRNLGTYNRKYAHYPNKLCTGPTPPC

SEQ ID NO: 34050 - protein, 145 aa, Homo sapiens
MELALLCGLVVMAGVIPIQGGILNLNKMVKQVTGKMPILSYWPYGCHCGLGGRGQPKDATDWCCQTHDCCYDHLKTQGCSIYKDYYRYNFSQGNIHCSDKGSWCEQQLCACDKEVAFCLKRNLDTYQKRLRFYWRPHCRGQTPGC

SEQ ID NO: 34051 - protein, 62 aa, Homo sapiens
MELALLCGLVVMAGVIPIQGGILNLNKMVKQVTGKMPILSYWPYGCHCGLGGRGQPKDATDC

SEQ ID NO: 34052 - protein, 288 aa, Homo sapiens
MQIPQAPWPVVWAVLQLGWRPGWFLDSPDRPWNPPTFSPALLVVTEGDNATFTCSFSNTSESFVLNWYRMSPSNQTDKLAAFPEDRSQPGQDCRFRVTQLPNGRDFHMSVVRARRNDSGTYLCGAISLAPKAQIKESLRAELRVTERRAEVPTAHPSPSPRPAGQFQTLVVGVVGGLLGSLVLLVWVLAVICSRAARGTIGARRTGQPLKEDPSAVPVFSVDYGELDFQWREKTPEPPVPCVPEQTEYATIVFPSGMGTSSPARRGSADGPRSAQPLRPEDGHCSWPL

SEQ ID NO: 34053 - protein, 593 aa, Homo sapiens
MDRMTEDALRLNLLKRSLDPADERDDVLAKRLKMEGHEAMERLKMLALLKRKDLANLEVPHELPTKQDGSGVKGYEEKLNGNLRPHGDNRTAGRPGKENINDEPVDMSARRSEPERGRLTPSPDIIVLSDNEASSPRSSSRMEERLKAANLEMFKGKGIEERQQLIKQLRDELRLEEARLVLLKKLRQSQLQKENVVQKTPVVQNAASIVQPSPAHVGQQGLSKLPSRPGAQGVEPQNLRTLQGHSVIRSATNTTLPHMLMSQRVIAPNPAQLQGQRGPPKPGLVRTTTPNMNPAINYQPQSSSSVPCQRTTSSAIYMNLASHIQPGTVNRVSSPLPSPSAMTDAANSQAAAKLALRKQLEKTLLEIPPPKPPAPLLHFLPSAANSEFIYMVGLEEVVQSVIDSQGKSCASLLRVEPFVCAQCRTDFTPHWKQEKNGKILCEQCMTSNQKKALKAEHTNRLKNAFVKALQQEQEIEQRLQQQAALSPTTAPAVSSVSKQETIMRHHTLRQAPQPQSSLQRGIPTSARSMLSNFAQAPQLSVPGGLLGMPGVNIAYLNTGIGGHKGPSLADRQREYLLDMIPPRSISQSISGQK

SEQ ID NO: 34054 - protein, 241 aa, Homo sapiens
MQDPNEDTEWNDILRDFGILPPKEESKDEIEEMVLRLQKEAMVKPFEKMTLAQLKEAEDEFDEEDMQAVETYRKKRLQEWKALKKKQKFGELREISGNQYVNEVTNAEEDVWVIIHLYRSSIPMCLLVNQHLSLLARKFPETKFVKAIVNSCIQHYHDNCLPTIFVYKNGQIEAKFIGIIECGGINLKLEELEWKLAEVGAIQTDLEENPRKDMVDMMVSSIRNTSIHDDSDSSNSDNDTK

SEQ ID NO: 34055 - protein, 191 aa, Homo sapiens
MAAYSYRPGPGAGPGPAAGAALPDQSFLWNVFQRVDKDRSGVISDTELQQALSNGTWTPFNPVTVRSIISMFDRENKAGVNFSEFTGVWKYITDWQNVFRTYDRDNSGMIDKNELKQALSGFGYRLSDQFHDILIRKFDRQGRGQIAFDDFIQGCIVLQRLTDIFRRYDTDQDGWIQVSYEQYLSMVFSIV

SEQ ID NO: 34056 - protein, 189 aa, Homo sapiens
MAAYSYRPGPGAGPGPAAGAALPDQSFLWNVFQRVDKDRSGVISDTELQQALSNGTWTPFNPVTVRSIISMFDRENKAGVNFSEFTGVWKYITDWQNVFRTYDRDNSGMIDKNELKQALSGYRLSDQFHDILIRKFDRQGRGQIAFDDFIQGCIVLQRLTDIFRRYDTDQDGWIQVSYEQYLSMVFSIV

SEQ ID NO: 34057 - protein, 69 aa, Homo sapiens
MAAYSYRPGPGAGPGPAAGAALPDQSFLWNVFQRVDKDRSGVISDTELQQALSNGTWTPFNPVTVRSII

SEQ ID NO: 34058 - protein, 485 aa, Homo sapiens
MALPPFFGQGRPGPPPPQPPPPAPFGCPPPPLPSPAFPPPLPQRPGPFPGASAPFLQPPLALQPRASAEASRGGGGAGAFYPVPPPPLPPPPPQCRPFPGTDAGERPRPPPPGPGPPWSPRWPEAPPPPADVLGDAALQRLRDRQWLEAVFGTPRRAGCPVPQRTHAGPSLGEVRARLLRALRLVRRLRGLSQALREAEADGAAWVLLYSQTAPLRAELAERLQPLTQAAYVGEARRRLERVRRRRLRLRERAREREAEREAEAARAVEREQEIDRWRVKCVQEVEEKKREQELKAAADGVLSEVRKKQADTKRMVDILRALEKLRKLRKEAAARKGVCPPASADETFTHHLQRLRKLIKKRSELYEAEERALRVMLEGEQEEERKRELEKKQRKEKEKILLQKREIESKLFGDPDEFPLAHLLEPFRQYYLQAEHSLPALIQIRHDWDQYLVPSDHPKGNFVPQGWVLPPLPSNDIWATAVKLH

SEQ ID NO: 34059 - protein, 779 aa, Homo sapiens
MRIEERKSQHLTGLTDEKVKAYLSLHPQVLDEFVSESVSAETVEKWLKRKNNKSEDESAPKEVSRYQDTNMQGVVYELNSYIEQRLDTGGDNQLLLYELSSIIKIATKADGFALYFLGECNNSLCIFTPPGIKEGKPRLIPAGPITQGTTVSAYVAKSRKTLLVEDILGDERFPRGTGLESGTRIQSVLCLPIVTAIGDLIGILELYRHWGKEAFCLSHQEVATANLAWASVAIHQVQVCRGLAKQTELNDFLLDVSKTYFDNIVAIDSLLEHIMIYAKNLVNADRCALFQVDHKNKELYSDLFDIGEEKEGKPVFKKTKEIRFSIEKGIAGQVARTGEVLNIPDAYADPRFNREVDLYTGYTTRNILCMPIVSRGSVIGVVQMVNKISGSAFSKTDENNFKMFAVFCALALHCANMYHRIRHSECIYRVTMEKLSYHSICTSEEWQGLMQFTLPVRLCKEIELFHFDIGPFENMWPGIFVYMVHRSCGTSCFELEKLCRFIMSVKKNYRRVPYHNWKHAVTVAHCMYAILQNNHTLFTDLERKGLLIACLCHDLDHRGFSNSYLQKFDHPLAALYSTSTMEQHHFSQTVSILQLEGHNIFSTLSSSEYEQVLEIIRKAIIATDLALYFGNRKQLEEMYQTGSLNLNNQSHRDRVIGLMMTACDLCSVTKLWPVTKLTANDIYAEFWAEGDEMKKLGIQPIPMMDRDKKDEVPQGQLGFYNAVAIPCYTTLTQILPPTEPLLKACRDNLSQWEKVIRGEETATWISSPSVAQKAAASED

SEQ ID NO: 34060 - protein, 789 aa, Homo sapiens
MEDGPSNNASCFRRLTECFLSPSLTDEKVKAYLSLHPQVLDEFVSESVSAETVEKWLKRKNNKSEDESAPKEVSRYQDTNMQGVVYELNSYIEQRLDTGGDNQLLLYELSSIIKIATKADGFALYFLGECNNSLCIFTPPGIKEGKPRLIPAGPITQGTTVSAYVAKSRKTLLVEDILGDERFPRGTGLESGTRIQSVLCLPIVTAIGDLIGILELYRHWGKEAFCLSHQEVATANLAWASVAIHQVQVCRGLAKQTELNDFLLDVSKTYFDNIVAIDSLLEHIMIYAKNLVNADRCALFQVDHKNKELYSDLFDIGEEKEGKPVFKKTKEIRFSIEKGIAGQVARTGEVLNIPDAYADPRFNREVDLYTGYTTRNILCMPIVSRGSVIGVVQMVNKISGSAFSKTDENNFKMFAVFCALALHCANMYHRIRHSECIYRVTMEKLSYHSICTSEEWQGLMQFTLPVRLCKEIELFHFDIGPFENMWPGIFVYMVHRSCGTSCFELEKLCRFIMSVKKNYRRVPYHNWKHAVTVAHCMYAILQNNHTLFTDLERKGLLIACLCHDLDHRGFSNSYLQKFDHPLAALYSTSTMEQHHFSQTVSILQLEGHNIFSTLSSSEYEQVLEIIRKAIIATDLALYFGNRKQLEEMYQTGSLNLNNQSHRDRVIGLMMTACDLCSVTKLWPVTKLTANDIYAEFWAEGDEMKKLGIQPIPMMDRDKKDEVPQGQLGFYNAVAIPCYTTLTQILPPTEPLLKACRDNLSQWEKVIRGEETATWISSPSVAQKAAASED

SEQ ID NO: 34061 - protein, 933 aa, Homo sapiens
MAASRLDFGEVETFLDRHPELFEDYLMRKGKQEMVEKWLQRHSQGQGALGPRPSLAGTSSLAHSTCRGGSSVGGGTGPNGSAHSQPLPGGGDCGGVPLSPSWAGGSRGDGNLQRRASQKELRKSFARSKAIHVNRTYDEQVTSRAQEPLSSVRRRALLRKASSLPPTTAHILSALLESRVNLPRYPPTAIDYKCHLKKHNERQFFLELVKDISNDLDLTSLSYKILIFVCLMVDADRCSLFLVEGAAAGKKTLVSKFFDVHAGTPLLPCSSTENSNEVQVPWGKGIIGYVGEHGETVNIPDAYQDRRFNDEIDKLTGYKTKSLLCMPIRSSDGEIIGVAQAINKIPEGAPFTEDDEKVMQMYLPFCGIAISNAQLFAASRKEYERSRALLEVVNDLFEEQTDLEKIVKKIMHRAQTLLKCERCSVLLLEDIESPVVKFTKSFELMSPKCSADAENSFKESMEKSSYSDWLINNSIAELVASTGLPVNISDAYQDPRFDAEADQISGFHIRSVLCVPIWNSNHQIIGVAQVLNRLDGKPFDDADQRLFEAFVIFCGLGINNTIMYDQVKKSWAKQSVALDVLSYHATCSKAEVDKFKAANIPLVSELAIDDIHFDDFSLDVDAMITAALRMFMELGMVQKFKIDYETLCRWLLTVRKNYRMVLYHNWRHAFNVCQLMFAMLTTAGFQDILTEVEILAVIVGCLCHDLDHRGTNNAFQAKSGSALAQLYGTSATLEHHHFNHAVMILQSEGHNIFANLSSKEYSDLMQLLKQSILATDLTLYFERRTEFFELVSKGEYDWNIKNHRDIFRSMLMTACDLGAVTKPWEISRQVAELVTSEFFEQGDRERLELKLTPSAIFDRNRKDELPRLQLEWIDSICMPLYQALVKVNVKLKPMLDSVATNRSKWEELHQKRLLASTASSSPASVMVAKEDRN

SEQ ID NO: 34062 - protein, 683 aa, Homo sapiens
MLKQARRPLFRNVLSATQWKKVKITRLVQISGASLAEKQEKHQDFLIQRQTKTKDRRFNDEIDKLTGYKTKSLLCMPIRSSDGEIIGVAQAINKIPEGAPFTEDDEKVMQMYLPFCGIAISNAQLFAASRKEYERSRALLEVVNDLFEEQTDLEKIVKKIMHRAQTLLKCERCSVLLLEDIESPVVKFTKSFELMSPKCSADAENSFKESMEKSSYSDWLINNSIAELVASTGLPVNISDAYQDPRFDAEADQISGFHIRSVLCVPIWNSNHQIIGVAQVLNRLDGKPFDDADQRLFEAFVIFCGLGINNTIMYDQVKKSWAKQSVALDVLSYHATCSKAEVDKFKAANIPLVSELAIDDIHFDDFSLDVDAMITAALRMFMELGMVQKFKIDYETLCRWLLTVRKNYRMVLYHNWRHAFNVCQLMFAMLTTAGFQDILTEVEILAVIVGCLCHDLDHRGTNNAFQAKSGSALAQLYGTSATLEHHHFNHAVMILQSEGHNIFANLSSKEYSDLMQLLKQSILATDLTLYFERRTEFFELVSKGEYDWNIKNHRDIFRSMLMTACDLGAVTKPWEISRQVAELVTSEFFEQGDRERLELKLTPSAIFDRNRKDELPRLQLEWIDSICMPLYQALVKVNVKLKPMLDSVATNRSKWEELHQKRLLASTASSSPASVMVAKEDRN

SEQ ID NO: 34063 - protein, 575 aa, Homo sapiens
MQMYLPFCGIAISNAQLFAASRKEYERSRALLEVVNDLFEEQTDLEKIVKKIMHRAQTLLKCERCSVLLLEDIESPVVKFTKSFELMSPKCSADAENSFKESMEKSSYSDWLINNSIAELVASTGLPVNISDAYQDPRFDAEADQISGFHIRSVLCVPIWNSNHQIIGVAQVLNRLDGKPFDDADQRLFEAFVIFCGLGINNTIMYDQVKKSWAKQSVALDVLSYHATCSKAEVDKFKAANIPLVSELAIDDIHFDDFSLDVDAMITAALRMFMELGMVQKFKIDYETLCRWLLTVRKNYRMVLYHNWRHAFNVCQLMFAMLTTAGFQDILTEVEILAVIVGCLCHDLDHRGTNNAFQAKSGSALAQLYGTSATLEHHHFNHAVMILQSEGHNIFANLSSKEYSDLMQLLKQSILATDLTLYFERRTEFFELVSKGEYDWNIKNHRDIFRSMLMTACDLGAVTKPWEISRQVAELVTSEFFEQGDRERLELKLTPSAIFDRNRKDELPRLQLEWIDSICMPLYQALVKVNVKLKPMLDSVATNRSKWEELHQKRLLASTASSSPASVMVAKEDRN

SEQ ID NO: 34064 - protein, 489 aa, Homo sapiens
MSPKCSADAENSFKESMEKSSYSDWLINNSIAELVASTGLPVNISDAYQDPRFDAEADQISGFHIRSVLCVPIWNSNHQIIGVAQVLNRLDGKPFDDADQRLFEAFVIFCGLGINNTIMYDQVKKSWAKQSVALDVLSYHATCSKAEVDKFKAANIPLVSELAIDDIHFDDFSLDVDAMITAALRMFMELGMVQKFKIDYETLCRWLLTVRKNYRMVLYHNWRHAFNVCQLMFAMLTTAGFQDILTEVEILAVIVGCLCHDLDHRGTNNAFQAKSGSALAQLYGTSATLEHHHFNHAVMILQSEGHNIFANLSSKEYSDLMQLLKQSILATDLTLYFERRTEFFELVSKGEYDWNIKNHRDIFRSMLMTACDLGAVTKPWEISRQVAELVTSEFFEQGDRERLELKLTPSAIFDRNRKDELPRLQLEWIDSICMPLYQALVKVNVKLKPMLDSVATNRSKWEELHQKRLLASTASSSPASVMVAKEDRN

SEQ ID NO: 34065 - protein, 231 aa, Homo sapiens
MSGEENPASKPTPVQDVQGDGRWMSLHHRFVADSKDKEPEVVFIGDSLVQLMHQCEIWRELFSPLHALNFGIGGDGTQHVLWRLENGELEHIRPKIVVVWVGTNNHGHTAEQVTGGIKAIVQLVNERQPQARVVVLGLLPRGQHPNPLREKNRQVNELVRAALAGHPRAHFLDADPGFVHSDGTISHHDMYDYLHLSRLGYTPVCRALHSLLLRLLAQDQGQGAPLLEPAP

SEQ ID NO: 34066 - protein, 477 aa, Homo sapiens
MVLMQDKGSSQQWPGLGGEGGGTGPLSMLRAALLLISLPWGAQGTASTSLSTAGGHTVPPTGGRYLSIGDGSVMEFEFPEDSEGIIVISSQYPGQANRTAPGPMLRVTSLDTEVLTIKNVSAITWGGGGGFVVSIHSGLAGLAPLHIQLVDAHEAPPTLIEERRDFCIKVSPAEDTPATLSADLAHFSENPILYLLLPLIFVNKCSFGCKVELEVLKGLMQSPQPMLLGLLGQFLVMPLYAFLMAKVFMLPKALALGLIITCSSPGGGGSYLFSLLLGGDVTLAISMTFLSTVAATGFLPLSSAIYSRLLSIHETLHVPISKILGTLLFIAIPIAVGVLIKSKLPKFSQLLLQVVKPFSFVLLLGGLFLAYRMGVFILAGIRLPIVLVGITVPLVGLLVGYCLATCLKLPVAQRRTVSIEVGVQNSLLALAMLQLSLRRLQADYASQAPFIVALSGTSEMLALVIGHFIYSSLFPVP

SEQ ID NO: 34067 - protein, 448 aa, Homo sapiens
MVLMQDKGSSQQWPGLGGEGGGTGPLSMLRAALLLISLPWGAQGTASTSLSTAGGHTVPPTGGRYLSIGDGSVMEFEFPEDSEGIIVISSQYPGQANRTAPGPMLRVTSLDTEVLTIKNLVDAHEAPPTLIEERRDFCIKVSPAEDTPATLSADLAHFSENPILYLLLPLIFVNKCSFGCKVELEVLKGLMQSPQPMLLGLLGQFLVMPLYAFLMAKVFMLPKALALGLIITCSSPGGGGSYLFSLLLGGDVTLAISMTFLSTVAATGFLPLSSAIYSRLLSIHETLHVPISKILGTLLFIAIPIAVGVLIKSKLPKFSQLLLQVVKPFSFVLLLGGLFLAYRMGVFILAGIRLPIVLVGITVPLVGLLVGYCLATCLKLPVAQRRTVSIEVGVQNSLLALAMLQLSLRRLQADYASQAPFIVALSGTSEMLALVIGHFIYSSLFPVP

SEQ ID NO: 34068 - protein, 135 aa, Homo sapiens
MRAFLRNQKYEDMHNIIHILQIRKLRHRLSNFPRLPGILAPETVLLPFCYKVFRKKEKVKRSQKATEFIDYSIEQSHHAILTPLQTHLTMKGSSMKCSSLSSEAILFTLTLQLTQTLGLECCLLYLSKTIHPQII

SEQ ID NO: 34069 - protein, 712 aa, Homo sapiens
MENLGVGEGAEACSRLSRSRGRHSMTRAPKHLWRQPRRPIRIQQRFYSDPDKSAGCRERDLSPRPELRKSRLSWPVSSCRRFDLENGLSCGRRALDPQSSPGLGRIMQAPVPHSQRRESFLYRSDSDYELSPKAMSRNSSVASDLHGEDMIVTPFAQVLASLRTVRSNVAALARQQCLGAAKQGPVGNPSSSNQLPPAEDTGQKLALETLDELDWCLDQLETLQTRHSVGEMASNKFKRILNRELTHLSETSRSGNQVSEYISRTFLDQQTEVELPKVTAEEAPQPMSRISGLHGLCHSASLSSATVPRFGVQTDQEEQLAKELEDTNKWGLDVFKVAELSGNRPLTAIIFSIFQERDLLKTFQIPADTLATYLLMLEGHYHANVAYHNSLHAADVAQSTHVLLATPALEAVFTDLEILAALFASAIHDVDHPGVSNQFLINTNSELALMYNDASVLENHHLAVGFKLLQAENCDIFQNLSAKQRLSLRRMVIDMVLATDMSKHMNLLADLKTMVETKKVTSLGVLLLDNYSDRIQVLQNLVHCADLSNPTKPLPLYRQWTDRIMAEFFQQGDRERESGLDISPMCDKHTASVEKSQVGFIDYIAHPLWETWADLVHPDAQDLLDTLEDNREWYQSKIPRSPSDLTNPERDGPDRFQFELTLEEAEEEDEEEEEEGEETALAKEALELPDTELLSPEAGPDPGDLPLDNQRT

SEQ ID NO: 34070 - protein, 606 aa, Homo sapiens
MQAPVPHSQRRESFLYRSDSDYELSPKAMSRNSSVASDLHGEDMIVTPFAQVLASLRTVRSNVAALARQQCLGAAKQGPVGNPSSSNQLPPAEDTGQKLALETLDELDWCLDQLETLQTRHSVGEMASNKFKRILNRELTHLSETSRSGNQVSEYISRTFLDQQTEVELPKVTAEEAPQPMSRISGLHGLCHSASLSSATVPRFGVQTDQEEQLAKELEDTNKWGLDVFKVAELSGNRPLTAIIFSIFQERDLLKTFQIPADTLATYLLMLEGHYHANVAYHNSLHAADVAQSTHVLLATPALEAVFTDLEILAALFASAIHDVDHPGVSNQFLINTNSELALMYNDASVLENHHLAVGFKLLQAENCDIFQNLSAKQRLSLRRMVIDMVLATDMSKHMNLLADLKTMVETKKVTSLGVLLLDNYSDRIQVLQNLVHCADLSNPTKPLPLYRQWTDRIMAEFFQQGDRERESGLDISPMCDKHTASVEKSQVGFIDYIAHPLWETWADLVHPDAQDLLDTLEDNREWYQSKIPRSPSDLTNPERDGPDRFQFELTLEEAEEEDEEEEEEGEETALAKEALELPDTELLSPEAGPDPGDLPLDNQRT

SEQ ID NO: 34071 - protein, 680 aa, Homo sapiens
MQGPPAPAPVPGPGSPRGSPRGSPGLFRKLLVNQSIRLQRRFTVAHPLCFDLENGLSCGRRALDPQSSPGLGRIMQAPVPHSQRRESFLYRSDSDYELSPKAMSRNSSVASDLHGEDMIVTPFAQVLASLRTVRSNVAALARQQCLGAAKQGPVGNPSSSNQLPPAEDTGQKLALETLDELDWCLDQLETLQTRHSVGEMASNKFKRILNRELTHLSETSRSGNQVSEYISRTFLDQQTEVELPKVTAEEAPQPMSRISGLHGLCHSASLSSATVPRFGVQTDQEEQLAKELEDTNKWGLDVFKVAELSGNRPLTAIIFSIFQERDLLKTFQIPADTLATYLLMLEGHYHANVAYHNSLHAADVAQSTHVLLATPALEAVFTDLEILAALFASAIHDVDHPGVSNQFLINTNSELALMYNDASVLENHHLAVGFKLLQAENCDIFQNLSAKQRLSLRRMVIDMVLATDMSKHMNLLADLKTMVETKKVTSLGVLLLDNYSDRIQVLQNLVHCADLSNPTKPLPLYRQWTDRIMAEFFQQGDRERESGLDISPMCDKHTASVEKSQVGFIDYIAHPLWETWADLVHPDAQDLLDTLEDNREWYQSKIPRSPSDLTNPERDGPDRFQFELTLEEAEEEDEEEEEEGEETALAKEALELPDTELLSPEAGPDPGDLPLDNQRT

SEQ ID NO: 34072 - protein, 1347 aa, Homo sapiens
MDLLSGTYIFAVLLACVVFHSGAQEKNYTIREEMPENVLIGDLLKDLNLSLIPNKSLTTAMQFKLVYKTGDVPLIRIEEDTGEIFTTGARIDREKLCAGIPRDEHCFYEVEVAILPDEIFRLVKIRFLIEDINDNAPLFPATVINISIPENSAINSKYTLPAAVDPDVGINGVQNYELIKSQNIFGLDVIETPEGDKMPQLIVQKELDREEKDTYVMKVKVEDGGFPQRSSTAILQVSVTDTNDNHPVFKETEIEVSIPENAPVGTSVTQLHATDADIGENAKIHFSFSNLVSNIARRLFHLNATTGLITIKEPLDREETPNHKLLVLASDGGLMPARAMVLVNVTDVNDNVPSIDIRYIVNPVNDTVVLSENIPLNTKIALITVTDKDADHNGRVTCFTDHEIPFRLRPVFSNQFLLETAAYLDYESTKEYAIKLLAADAGKPPLNQSAMLFIKVKDENDNAPVFTQSFVTVSIPENNSPGIQLTKVSAMDADSGPNAKINYLLGPDAPPEFSLDCRTGMLTVVKKLDREKEDKYLFTILAKDNGVPPLTSNVTVFVSIIDQNDNSPVFTHNEYNFYVPENLPRHGTVGLITVTDPDYGDNSAVTLSILDENDDFTIDSQTGVIRPNISFDREKQESYTFYVKAEDGGRVSRSSSAKVTINVVDVNDNKPVFIVPPSNCSYELVLPSTNPGTVVFQVIAVDNDTGMNAEVRYSIVGGNTRDLFAIDQETGNITLMEKCDVTDLGLHRVLVKANDLGQPDSLFSVVIVNLFVNESVTNATLINELVRKSTEAPVTPNTEIADVSSPTSDYVKILVAAVAGTITVVVVIFITAVVRCRQAPHLKAAQKNKQNSEWATPNPENRQMIMMKKKKKKKKHSPKNLLLNFVTIEETKADDVDSDGNRVTLDLPIDLEEQTMGKYNWVTTPTTFKPDSPDLARHYKSASPQPAFQIQPETPLNSKHHIIQELPLDNTFVACDSISKCSSSSSDPYSVSDCGYPVTTFEVPVSVHTRPPMKEVVRSCTPMKESTTMEIWIHPQPQRKSEGKVAGKSQRRVTFHLPEGSQESSSDGGLGDHDAGSLTSTSHGLPLGYPQEEYFDRATPSNRTEGDGNSDPESTFIPGLKKAAEITVQPTVEEASDNCTQECLIYGHSDACWMPASLDHSSSSQAQASALCHSPPLSQASTQHHSPRVTQTIALCHSPPVTQTIALCHSPPPIQVSALHHSPPLVQATALHHSPPSAQASALCYSPPLAQAAAISHSSPLPQVIALHRSQAQSSVSLQQGWVQGADGLCSVDQGVQGSATSQFYTMSERLHPSDDSIKVIPLTTFTPRQQARPSRGDSPIMEEHPL

SEQ ID NO: 34073 - protein, 1025 aa, Homo sapiens
MDLLSGTYIFAVLLACVVFHSGAQEKNYTIREEMPENVLIGDLLKDLNLSLIPNKSLTTAMQFKLVYKTGDVPLIRIEEDTGEIFTTGARIDREKLCAGIPRDEHCFYEVEVAILPDEIFRLVKIRFLIEDINDNAPLFPATVINISIPENSAINSKYTLPAAVDPDVGINGVQNYELIKSQNIFGLDVIETPEGDKMPQLIVQKELDREEKDTYVMKVKVEDGGFPQRSSTAILQVSVTDTNDNHPVFKETEIEVSIPENAPVGTSVTQLHATDADIGENAKIHFSFSNLVSNIARRLFHLNATTGLITIKEPLDREETPNHKLLVLASDGGLMPARAMVLVNVTDVNDNVPSIDIRYIVNPVNDTVVLSENIPLNTKIALITVTDKDADHNGRVTCFTDHEIPFRLRPVFSNQFLLETAAYLDYESTKEYAIKLLAADAGKPPLNQSAMLFIKVKDENDNAPVFTQSFVTVSIPENNSPGIQLTKVSAMDADSGPNAKINYLLGPDAPPEFSLDCRTGMLTVVKKLDREKEDKYLFTILAKDNGVPPLTSNVTVFVSIIDQNDNSPVFTHNEYNFYVPENLPRHGTVGLITVTDPDYGDNSAVTLSILDENDDFTIDSQTGVIRPNISFDREKQESYTFYVKAEDGGRVSRSSSAKVTINVVDVNDNKPVFIVPPSNCSYELVLPSTNPGTVVFQVIAVDNDTGMNAEVRYSIVGGNTRDLFAIDQETGNITLMEKCDVTDLGLHRVLVKANDLGQPDSLFSVVIVNLFVNESVTNATLINELVRKSTEAPVTPNTEIADVSSPTSDYVKILVAAVAGTITVVVVIFITAVVRCRQAPHLKAAQKNKQNSEWATPNPENRQMIMMKKKKKKKKHSPKNLLLNFVTIEETKADDVDSDGNRVTLDLPIDLEEQTMGKYNWVTTPTTFKPDSPDLARHYKSASPQPAFQIQPETPLNSKHHIIQELPLDNTFVACDSISKCSSSSSDPYSVSDCGYPVTTFEVPVSVHTRPTDSRTSTIEICSEI

SEQ ID NO: 34074 - protein, 1337 aa, Homo sapiens
MDLLSGTYIFAVLLACVVFHSGAQEKNYTIREEMPENVLIGDLLKDLNLSLIPNKSLTTAMQFKLVYKTGDVPLIRIEEDTGEIFTTGARIDREKLCAGIPRDEHCFYEVEVAILPDEIFRLVKIRFLIEDINDNAPLFPATVINISIPENSAINSKYTLPAAVDPDVGINGVQNYELIKSQNIFGLDVIETPEGDKMPQLIVQKELDREEKDTYVMKVKVEDGGFPQRSSTAILQVSVTDTNDNHPVFKETEIEVSIPENAPVGTSVTQLHATDADIGENAKIHFSFSNLVSNIARRLFHLNATTGLITIKEPLDREETPNHKLLVLASDGGLMPARAMVLVNVTDVNDNVPSIDIRYIVNPVNDTVVLSENIPLNTKIALITVTDKDADHNGRVTCFTDHEIPFRLRPVFSNQFLLETAAYLDYESTKEYAIKLLAADAGKPPLNQSAMLFIKVKDENDNAPVFTQSFVTVSIPENNSPGIQLTKVSAMDADSGPNAKINYLLGPDAPPEFSLDCRTGMLTVVKKLDREKEDKYLFTILAKDNGVPPLTSNVTVFVSIIDQNDNSPVFTHNEYNFYVPENLPRHGTVGLITVTDPDYGDNSAVTLSILDENDDFTIDSQTGVIRPNISFDREKQESYTFYVKAEDGGRVSRSSSAKVTINVVDVNDNKPVFIVPPSNCSYELVLPSTNPGTVVFQVIAVDNDTGMNAEVRYSIVGGNTRDLFAIDQETGNITLMEKCDVTDLGLHRVLVKANDLGQPDSLFSVVIVNLFVNESVTNATLINELVRKSTEAPVTPNTEIADVSSPTSDYVKILVAAVAGTITVVVVIFITAVVRCRQAPHLKAAQKNKQNSEWATPNPENRQMIMMKKKKKKKKHSPKNLLLNFVTIEETKADDVDSDGNRVTLDLPIDLEEQTMGKYNWVTTPTTFKPDSPDLARHYKSASPQPAFQIQPETPLNSKHHIIQELPLDNTFVACDSISKCSSSSSDPYSVSDCGYPVTTFEVPVSVHTRPPMKEVVRSCTPMKESTTMEIWIHPQPQSQRRVTFHLPEGSQESSSDGGLGDHDAGSLTSTSHGLPLGYPQEEYFDRATPSNRTEGDGNSDPESTFIPGLKKAAEITVQPTVEEASDNCTQECLIYGHSDACWMPASLDHSSSSQAQASALCHSPPLSQASTQHHSPRVTQTIALCHSPPVTQTIALCHSPPPIQVSALHHSPPLVQATALHHSPPSAQASALCYSPPLAQAAAISHSSPLPQVIALHRSQAQSSVSLQQGWVQGADGLCSVDQGVQGSATSQFYTMSERLHPSDDSIKVIPLTTFTPRQQARPSRGDSPIMEEHPL

SEQ ID NO: 34075 - protein, 1329 aa, Homo sapiens
MDLLSGTYIFAVLLACVVFHSGAQEKNYTIREEMPENVLIGDLLKDLNLSLIPNKSLTTAMQFKLVYKTGDVPLIRIEEDTGEIFTTGARIDREKLCAGIPRDEHCFYEVEVAILPDEIFRLVKIRFLIEDINDNAPLFPATVINISIPENSAINSKYTLPAAVDPDVGINGVQNYELIKSQNIFGLDVIETPEGDKMPQLIVQKELDREEKDTYVMKVKVEDGGFPQRSSTAILQVSVTDTNDNHPVFKETEIEVSIPENAPVGTSVTQLHATDADIGENAKIHFSFSNLVSNIARRLFHLNATTGLITIKEPLDREETPNHKLLVLASDGGLMPARAMVLVNVTDVNDNVPSIDIRYIVNPVNDTVVLSENIPLNTKIALITVTDKDADHNGRVTCFTDHEIPFRLRPVFSNQFLLETAAYLDYESTKEYAIKLLAADAGKPPLNQSAMLFIKVKDENDNAPVFTQSFVTVSIPENNSPGIQLTKVSAMDADSGPNAKINYLLGPDAPPEFSLDCRTGMLTVVKKLDREKEDKYLFTILAKDNGVPPLTSNVTVFVSIIDQNDNSPVFTHNEYNFYVPENLPRHGTVGLITVTDPDYGDNSAVTLSILDENDDFTIDSQTGVIRPNISFDREKQESYTFYVKAEDGGRVSRSSSAKVTINVVDVNDNKPVFIVPPSNCSYELVLPSTNPGTVVFQVIAVDNDTGMNAEVRYSIVGGNTRDLFAIDQETGNITLMEKCDVTDLGLHRVLVKANDLGQPDSLFSVVIVNLFVNESVTNATLINELVRKSTEAPVTPNTEIADVSSPTSDYVKILVAAVAGTITVVVVIFITAVVRCRQAPHLKAAQKNKQNSEWATPNPENRQMIMMKKKKKKKKHSPKNLLLNFVTIEETKADDVDSDGNRVTLDLPIDLEEQTMGKYNWVTTPTTFKPDSPDLARHYKSASPQPAFQIQPETPLNSKHHIIQELPLDNTFVACDSISKCSSSSSDPYSVSDCGYPVTTFEVPVSVHTRPPMKEVVRSCTPMKESTTMEIWIHPQPQSQRRVTFHLPEGSQESSSDGGLGDHDAGSLTSTSHGLPLGYPQEEYFDRATPSNRTEGDGNSDPESTAEITVQPTVEEASDNCTQECLIYGHSDACWMPASLDHSSSSQAQASALCHSPPLSQASTQHHSPRVTQTIALCHSPPVTQTIALCHSPPPIQVSALHHSPPLVQATALHHSPPSAQASALCYSPPLAQAAAISHSSPLPQVIALHRSQAQSSVSLQQGWVQGADGLCSVDQGVQGSATSQFYTMSERLHPSDDSIKVIPLTTFTPRQQARPSRGDSPIMEEHPL

SEQ ID NO: 34076 - protein, 1310 aa, Homo sapiens
MDLLSGTYIFAVLLACVVFHSGAQEKNYTIREEMPENVLIGDLLKDLNLSLIPNKSLTTAMQFKLVYKTGDVPLIRIEEDTGEIFTTGARIDREKLCAGIPRDEHCFYEVEVAILPDEIFRLVKIRFLIEDINDNAPLFPATVINISIPENSAINSKYTLPAAVDPDVGINGVQNYELIKSQNIFGLDVIETPEGDKMPQLIVQKELDREEKDTYVMKVKVEDGGFPQRSSTAILQVSVTDTNDNHPVFKETEIEVSIPENAPVGTSVTQLHATDADIGENAKIHFSFSNLVSNIARRLFHLNATTGLITIKEPLDREETPNHKLLVLASDGGLMPARAMVLVNVTDVNDNVPSIDIRYIVNPVNDTVVLSENIPLNTKIALITVTDKDADHNGRVTCFTDHEIPFRLRPVFSNQFLLETAAYLDYESTKEYAIKLLAADAGKPPLNQSAMLFIKVKDENDNAPVFTQSFVTVSIPENNSPGIQLTKVSAMDADSGPNAKINYLLGPDAPPEFSLDCRTGMLTVVKKLDREKEDKYLFTILAKDNGVPPLTSNVTVFVSIIDQNDNSPVFTHNEYNFYVPENLPRHGTVGLITVTDPDYGDNSAVTLSILDENDDFTIDSQTGVIRPNISFDREKQESYTFYVKAEDGGRVSRSSSAKVTINVVDVNDNKPVFIVPPSNCSYELVLPSTNPGTVVFQVIAVDNDTGMNAEVRYSIVGGNTRDLFAIDQETGNITLMEKCDVTDLGLHRVLVKANDLGQPDSLFSVVIVNLFVNESVTNATLINELVRKSTEAPVTPNTEIADVSSPTSDYVKILVAAVAGTITVVVVIFITAVVRCRQAPHLKAAQKNKQNSEWATPNPENRQMIMMKKKKKKKKHSPKNLLLNFVTIEETKADDVDSDGNRVTLDLPIDLEEQTMGKYNWVTTPTTFKPDSPDLARHYKSASPQPAFQIQPETPLNSKHHIIQELPLDNTFVACDSISKCSSSSSDPYSVSDCGYPVTTFEVPVSVHTRPSQRRVTFHLPEGSQESSSDGGLGDHDAGSLTSTSHGLPLGYPQEEYFDRATPSNRTEGDGNSDPESTFIPGLKKAAEITVQPTVEEASDNCTQECLIYGHSDACWMPASLDHSSSSQAQASALCHSPPLSQASTQHHSPRVTQTIALCHSPPVTQTIALCHSPPPIQVSALHHSPPLVQATALHHSPPSAQASALCYSPPLAQAAAISHSSPLPQVIALHRSQAQSSVSLQQGWVQGADGLCSVDQGVQGSATSQFYTMSERLHPSDDSIKVIPLTTFTPRQQARPSRGDSPIMEEHPL

SEQ ID NO: 34077 - protein, 1065 aa, Homo sapiens
MDLLSGTYIFAVLLACVVFHSGAQEKNYTIREEMPENVLIGDLLKDLNLSLIPNKSLTTAMQFKLVYKTGDVPLIRIEEDTGEIFTTGARIDREKLCAGIPRDEHCFYEVEVAILPDEIFRLVKIRFLIEDINDNAPLFPATVINISIPENSAINSKYTLPAAVDPDVGINGVQNYELIKSQNIFGLDVIETPEGDKMPQLIVQKELDREEKDTYVMKVKVEDGGFPQRSSTAILQVSVTDTNDNHPVFKETEIEVSIPENAPVGTSVTQLHATDADIGENAKIHFSFSNLVSNIARRLFHLNATTGLITIKEPLDREETPNHKLLVLASDGGLMPARAMVLVNVTDVNDNVPSIDIRYIVNPVNDTVVLSENIPLNTKIALITVTDKDADHNGRVTCFTDHEIPFRLRPVFSNQFLLETAAYLDYESTKEYAIKLLAADAGKPPLNQSAMLFIKVKDENDNAPVFTQSFVTVSIPENNSPGIQLTKVSAMDADSGPNAKINYLLGPDAPPEFSLDCRTGMLTVVKKLDREKEDKYLFTILAKDNGVPPLTSNVTVFVSIIDQNDNSPVFTHNEYNFYVPENLPRHGTVGLITVTDPDYGDNSAVTLSILDENDDFTIDSQTGVIRPNISFDREKQESYTFYVKAEDGGRVSRSSSAKVTINVVDVNDNKPVFIVPPSNCSYELVLPSTNPGTVVFQVIAVDNDTGMNAEVRYSIVGGNTRDLFAIDQETGNITLMEKCDVTDLGLHRVLVKANDLGQPDSLFSVVIVNLFVNESVTNATLINELVRKSTEAPVTPNTEIADVSSPTSDYVKILVAAVAGTITVVVVIFITAVVRCRQAPHLKAAQKNKQNSEWATPNPENRQMIMMKKKKKKKKHSPKNLLLNFVTIEETKADDVDSDGNRVTLDLPIDLEEQTMGKYNWVTTPTTFKPDSPDLARHYKSASPQPAFQIQPETPLNSKHHIIQELPLDNTFVACDSISKCSSSSSDPYSVSDCGYPVTTFEVPVSVHTRPPMKEVVRSCTPMKESTTMEIWIHPQPQRKSEGKVAGKTVLTSSSPSAMTLSYLD

SEQ ID NO: 34078 - protein, 1021 aa, Homo sapiens
MDLLSGTYIFAVLLACVVFHSGAQEKNYTIREEMPENVLIGDLLKDLNLSLIPNKSLTTAMQFKLVYKTGDVPLIRIEEDTGEIFTTGARIDREKLCAGIPRDEHCFYEVEVAILPDEIFRLVKIRFLIEDINDNAPLFPATVINISIPENSAINSKYTLPAAVDPDVGINGVQNYELIKSQNIFGLDVIETPEGDKMPQLIVQKELDREEKDTYVMKVKVEDGGFPQRSSTAILQVSVTDTNDNHPVFKETEIEVSIPENAPVGTSVTQLHATDADIGENAKIHFSFSNLVSNIARRLFHLNATTGLITIKEPLDREETPNHKLLVLASDGGLMPARAMVLVNVTDVNDNVPSIDIRYIVNPVNDTVVLSENIPLNTKIALITVTDKDADHNGRVTCFTDHEIPFRLRPVFSNQFLLETAAYLDYESTKEYAIKLLAADAGKPPLNQSAMLFIKVKDENDNAPVFTQSFVTVSIPENNSPGIQLTKVSAMDADSGPNAKINYLLGPDAPPEFSLDCRTGMLTVVKKLDREKEDKYLFTILAKDNGVPPLTSNVTVFVSIIDQNDNSPVFTHNEYNFYVPENLPRHGTVGLITVTDPDYGDNSAVTLSILDENDDFTIDSQTGVIRPNISFDREKQESYTFYVKAEDGGRVSRSSSAKVTINVVDVNDNKPVFIVPPSNCSYELVLPSTNPGTVVFQVIAVDNDTGMNAEVRYSIVGGNTRDLFAIDQETGNITLMEKCDVTDLGLHRVLVKANDLGQPDSLFSVVIVNLFVNESVTNATLINELVRKSTEAPVTPNTEIADVSSPTSDYVKILVAAVAGTITVVVVIFITAVVRCRQAPHLKAAQKNKQNSEWATPNPENRQMIMMKKKKKKKKHSPKNLLLNFVTIEETKADDVDSDGNRVTLDLPIDLEEQTMGKYNWVTTPTTFKPDSPDLARHYKSASPQPAFQIQPETPLNSKHHIIQELPLDNTFVACDSISKCSSSSSDPYSVSDCGYPVTTFEVPVSVHTRPVGIQVSNTTF

SEQ ID NO: 34079 - protein, 1339 aa, Homo sapiens
MDLLSGTYIFAVLLACVVFHSGAQEKNYTIREEMPENVLIGDLLKDLNLSLIPNKSLTTAMQFKLVYKTGDVPLIRIEEDTGEIFTTGARIDREKLCAGIPRDEHCFYEVEVAILPDEIFRLVKIRFLIEDINDNAPLFPATVINISIPENSAINSKYTLPAAVDPDVGINGVQNYELIKSQNIFGLDVIETPEGDKMPQLIVQKELDREEKDTYVMKVKVEDGGFPQRSSTAILQVSVTDTNDNHPVFKETEIEVSIPENAPVGTSVTQLHATDADIGENAKIHFSFSNLVSNIARRLFHLNATTGLITIKEPLDREETPNHKLLVLASDGGLMPARAMVLVNVTDVNDNVPSIDIRYIVNPVNDTVVLSENIPLNTKIALITVTDKDADHNGRVTCFTDHEIPFRLRPVFSNQFLLETAAYLDYESTKEYAIKLLAADAGKPPLNQSAMLFIKVKDENDNAPVFTQSFVTVSIPENNSPGIQLTKVSAMDADSGPNAKINYLLGPDAPPEFSLDCRTGMLTVVKKLDREKEDKYLFTILAKDNGVPPLTSNVTVFVSIIDQNDNSPVFTHNEYNFYVPENLPRHGTVGLITVTDPDYGDNSAVTLSILDENDDFTIDSQTGVIRPNISFDREKQESYTFYVKAEDGGRVSRSSSAKVTINVVDVNDNKPVFIVPPSNCSYELVLPSTNPGTVVFQVIAVDNDTGMNAEVRYSIVGGNTRDLFAIDQETGNITLMEKCDVTDLGLHRVLVKANDLGQPDSLFSVVIVNLFVNESVTNATLINELVRKSTEAPVTPNTEIADVSSPTSDYVKILVAAVAGTITVVVVIFITAVVRCRQAPHLKAAQKNKQNSEWATPNPENRQMIMMKKKKKKKKHSPKNLLLNFVTIEETKADDVDSDGNRVTLDLPIDLEEQTMGKYNWVTTPTTFKPDSPDLARHYKSASPQPAFQIQPETPLNSKHHIIQELPLDNTFVACDSISKCSSSSSDPYSVSDCGYPVTTFEVPVSVHTRPPMKEVVRSCTPMKESTTMEIWIHPQPQRKSEGKVAGKSQRRVTFHLPEGSQESSSDGGLGDHDAGSLTSTSHGLPLGYPQEEYFDRATPSNRTEGDGNSDPESTAEITVQPTVEEASDNCTQECLIYGHSDACWMPASLDHSSSSQAQASALCHSPPLSQASTQHHSPRVTQTIALCHSPPVTQTIALCHSPPPIQVSALHHSPPLVQATALHHSPPSAQASALCYSPPLAQAAAISHSSPLPQVIALHRSQAQSSVSLQQGWVQGADGLCSVDQGVQGSATSQFYTMSERLHPSDDSIKVIPLTTFTPRQQARPSRGDSPIMEEHPL

SEQ ID NO: 34080 - protein, 868 aa, Homo sapiens
MSLQASEGCPGLGTNVFVPQSPQTDEEGSRSGRSFSEFEDTQDLDTPGLPPFCPMAPWGSEEGLSPCHLLTVRVIRMKNVRQADMLSQTDCFVSLWLPTASQKKLRTRTISNCPNPEWNESFNFQIQSRVKNVLELSVCDEDTVTPDDHLLTVLYDLTKLCFRKKTHVKFPLNPQGMEELEVEFLLEESPSPPETLVTNGVLVSRQVSCLEVHAQSRRRRKREKMKDLLVMVNESFENTQRVRPCLEPCCPTSACFQTAACFHYPKYFQSQVHVEVPKSHWSCGLCCRSRKKGPISQPLDCLSDGQVMTLPVGESYELHMKSTPCPETLDVRLGFSLCPAELEFLQKRKVVVAKALKQVLQLEEDLQEDEVPLIAIMATGGGTRSMTSMYGHLLGLQKLNLLDCASYITGLSGATWTMATLYRDPDWSSKNLEPAIFEARRHVVKDKLPSLFPDQLRKFQEELRQRSQEGYRVTFTDFWGLLIETCLGDERNECKLSDQRAALSCGQNPLPIYLTINVKDDVSNQDFREWFEFSPYEVGLQKYGAFIPSELFGSEFFMGRLVKRIPESRICYMLGLWSSIFSLNLLDAWNLSHTSEEFFHRWTREKVQDIEDEPILPEIPKCDANILETTVVIPGSWLSNSFREILTHRSFVSEFHNFLSGLQLHTNYLQNGQFSRWKDTVLDGFPNQLTESANHLCLLDTAFFVNSSYPPLLRPERKADLIIHLNYCAGSQTKPLKQTCEYCTVQNIPFPKYELPDENENLKECYLMENPQEPDAPIVTFFPLINDTFRKYKAPGVERSPEELEQGQVDIYGPKTPYATKELTYTEATFDKLVKLSEYNILNNKDTLLQALRLAVEKKKRLKGQCPS

SEQ ID NO: 34081 - protein, 492 aa, Homo sapiens
MATGGGTRSMTSMYGHLLGLQKLNLLDCASYITGLSGATWTMATLYRDPDWSSKNLEPAIFEARRHVVKDKLPSLFPDQLRKFQEELRQRSQEGYRVTFTDFWGLLIETCLGDERNECKLSDQRAALSCGQNPLPIYLTINVKDDVSNQDFREWFEFSPYEVGLQKYGAFIPSELFGSEFFMGRLVKRIPESRICYMLGLWSSIFSLNLLDAWNLSHTSEEFFHRWTREKVQDIEDEPILPEIPKCDANILETTVVIPGSWLSNSFREILTHRSFVSEFHNFLSGLQLHTNYLQNGQFSRWKDTVLDGFPNQLTESANHLCLLDTAFFVNSSYPPLLRPERKADLIIHLNYCAGSQTKPLKQTCEYCTVQNIPFPKYELPDENENLKECYLMENPQEPDAPIVTFFPLINDTFRKYKAPGVERSPEELEQGQVDIYGPKTPYATKELTYTEATFDKLVKLSEYNILNNKDTLLQALRLAVEKKKRLKGQCPS

SEQ ID NO: 34082 - protein, 1689 aa, Homo sapiens
MGSKRRRATSPSSSVSGDFDDGHHSVSTPGPSRKRRRLSNLPTVDPIAVCHELYNTIRDYKDEQGRLLCELFIRAPKRRNQPDYYEVVSQPIDLMKIQQKLKMEEYDDVNLLTADFQLLFNNAKSYYKPDSPEYKAACKLWDLYLRTRNEFVQKGEADDEDDDEDGQDNQGTVTEGSSPAYLKEILEQLLEAIVVATNPSGRLISELFQKLPSKVQYPDYYAIIKEPIDLKTIAQRIQNGSYKSIHAMAKDIDLLAKNAKTYNEPGSQVFKDANSIKKIFYMKKAEIEHHEMAKSSLRMRTPSNLAAARLTGPSHSKGSLGEERNPTSKYYRNKRAVQGGRLSAITMALQYGSESEEDAALAAARYEEGESEAESITSFMDVSNPFYQLYDTVRSCRNNQGQLIAEPFYHLPSKKKYPDYYQQIKMPISLQQIRTKLKNQEYETLDHLECDLNLMFENAKRYNVPNSAIYKRVLKLQQVMQAKKKELARRDDIEDGDSMISSATSDTGSAKRKSKKNIRKQRMKILFNVVLEAREPGSGRRLCDLFMVKPSKKDYPDYYKIILEPMDLKIIEHNIRNDKYAGEEGMIEDMKLMFRNARHYNEEGSQVYNDAHILEKLLKEKRKELGPLPDDDDMASPKLKLSRKSGISPKKSKYMTPMQQKLNEVYEAVKNYTDKRGRRLSAIFLRLPSRSELPDYYLTIKKPMDMEKIRSHMMANKYQDIDSMVEDFVMMFNNACTYNEPESLIYKDALVLHKVLLETRRDLEGDEDSHVPNVTLLIQELIHNLFVSVMSHQDDEGRCYSDSLAEIPAVDPNFPNKPPLTFDIIRKNVENNRYRRLDLFQEHMFEVLERARRMNRTDSEIYEDAVELQQFFIKIRDELCKNGEILLSPALSYTTKHLHNDVEKERKEKLPKEIEEDKLKREEEKREAEKSEDSSGAAGLSGLHRTYSQDCSFKNSMYHVGDYVYVEPAEANLQPHIVCIERLWEDSAGEKWLYGCWFYRPNETFHLATRKFLEKEVFKSDYYNKVPVSKILGKCVVMFVKEYFKLCPENFRDEDVFVCESRYSAKTKSFKKIKLWTMPISSVRFVPRDVPLPVVRVASVFANADKGDDEKNTDNSEDSRAEDNFNLEKEKEDVPVEMSNGEPGCHYFEQLHYNDMWLKVGDCVFIKSHGLVRPRVGRIEKVWVRDGAAYFYGPIFIHPEETEHEPTKMFYKKEVFLSNLEETCPMTCILGKCAVLSFKDFLSCRPTEIPENDILLCESRYNESDKQMKKFKGLKRFSLSAKVVDDEIYYFRKPIVPQKEPSPLLEKKIQLLEAKFAELEGGDDDIEEMGEEDSEVIEPPSLPQLQTPLASELDLMPYTPPQSTPKSAKGSAKKEGSKRKINMSGYILFSSEMRAVIKAQHPDYSFGELSRLVGTEWRNLETAKKAEYEERAAKVAEQQERERAAQQQQPSASPRAGTPVGALMGVVPPPTPMGMLNQQLTPVAGMMGGYPPGLPPLQGPVDGLVSMGSMQPLHPGGPPPHHLPPGVPGLPGIPPPGVMNQGVAPMVGTPAPGGSPYGQQVGVLGPPGQQAPPPYPGPHPAGPPVIQQPTTPMFVAPPPKTQRLLHSEAYLKYIEGLSAESNSISKWDQTLAARRRDVHLSKEQESRLPSHWLKSKGAHTTMADALWRLRDLMLRDTLNIRQAYNLENV

SEQ ID NO: 34083 - protein, 1634 aa, Homo sapiens
MGSKRRRATSPSSSVSGDFDDGHHSVSTPGPSRKRRRLSNLPTVDPIAVCHELYNTIRDYKDEQGRLLCELFIRAPKRRNQPDYYEVVSQPIDLMKIQQKLKMEEYDDVNLLTADFQLLFNNAKSYYKPDSPEYKAACKLWDLYLRTRNEFVQKGEADDEDDDEDGQDNQGTVTEGSSPAYLKEILEQLLEAIVVATNPSGRLISELFQKLPSKVQYPDYYAIIKEPIDLKTIAQRIQNGSYKSIHAMAKDIDLLAKNAKTYNEPGSQVFKDANSIKKIFYMKKAEIEHHEMAKSSLRMRTPSNLAAARLTGPSHSKGSLGEERNPTSKYYRNKRAVQGGRLSAITMALQYGSESEEDAALAAARYEEGESEAESITSFMDVSNPFYQLYDTVRSCRNNQGQLIAEPFYHLPSKKKYPDYYQQIKMPISLQQIRTKLKNQEYETLDHLECDLNLMFENAKRYNVPNSAIYKRVLKLQQVMQAKKKELARRDDIEDGDSMISSATSDTGSAKRKSKKNIRKQRMKILFNVVLEAREPGSGRRLCDLFMVKPSKKDYPDYYKIILEPMDLKIIEHNIRNDKYAGEEGMIEDMKLMFRNARHYNEEGSQVYNDAHILEKLLKEKRKELGPLPDDDDMASPKLKLSRKSGISPKKSKYMTPMQQKLNEVYEAVKNYTDKRGRRLSAIFLRLPSRSELPDYYLTIKKPMDMEKIRSHMMANKYQDIDSMVEDFVMMFNNACTYNEPESLIYKDALVLHKVLLETRRDLEGDEDSHVPNVTLLIQELIHNLFVSVMSHQDDEGRCYSDSLAEIPAVDPNFPNKPPLTFDIIRKNVENNRYRRLDLFQEHMFEVLERARRMNRTDSEIYEDAVELQQFFIKIRDELCKNGEILLSPALSYTTKHLHNDVEKERKEKLPKEIEEDKLKREEEKREAEKSEDSSGAAGLSGLHRTYSQDCSFKNSMYHVGDYVYVEPAEANLQPHIVCIERLWEDSAGEKWLYGCWFYRPNETFHLATRKFLEKEVFKSDYYNKVPVSKILGKCVVMFVKEYFKLCPENFRDEDVFVCESRYSAKTKSFKKIKLWTMPISSVRFVPRDVPLPVVRVASVFANADKGDDEKNTDNSEDSRAEDNFNLEKEKEDVPVEMSNGEPGCHYFEQLHYNDMWLKVGDCVFIKSHGLVRPRVGRIEKVWVRDGAAYFYGPIFIHPEETEHEPTKMFYKKEVFLSNLEETCPMTCILGKCAVLSFKDFLSCRPTEIPENDILLCESRYNESDKQMKKFKGLKRFSLSAKVVDDEIYYFRKPIVPQKEPSPLLEKKIQLLEAKFAELEGGDDDIEEMGEEDSEVIEPPSLPQLQTPLASELDLMPYTPPQSTPKSAKGSAKKEGSKRKINMSGYILFSSEMRAVIKAQHPDYSFGELSRLVGTEWRNLETAKKAEYEGMMGGYPPGLPPLQGPVDGLVSMGSMQPLHPGGPPPHHLPPGVPGLPGIPPPGVMNQGVAPMVGTPAPGGSPYGQQVGVLGPPGQQAPPPYPGPHPAGPPVIQQPTTPMFVAPPPKTQRLLHSEAYLKYIEGLSAESNSISKWDQTLAARRRDVHLSKEQESRLPSHWLKSKGAHTTMADALWRLRDLMLRDTLNIRQAYNLENV

SEQ ID NO: 34084 - protein, 1602 aa, Homo sapiens
MGSKRRRATSPSSSVSGDFDDGHHSVSTPGPSRKRRRLSNLPTVDPIAVCHELYNTIRDYKDEQGRLLCELFIRAPKRRNQPDYYEVVSQPIDLMKIQQKLKMEEYDDVNLLTADFQLLFNNAKSYYKPDSPEYKAACKLWDLYLRTRNEFVQKGEADDEDDDEDGQDNQGTVTEGSSPAYLKEILEQLLEAIVVATNPSGRLISELFQKLPSKVQYPDYYAIIKEPIDLKTIAQRIQNGSYKSIHAMAKDIDLLAKNAKTYNEPGSQVFKDANSIKKIFYMKKAEIEHHEMAKSSLRMSNKRAVQGGRLSAITMALQYGSESEEDAALAAARYEEGESEAESITSFMDVSNPFYQLYDTVRSCRNNQGQLIAEPFYHLPSKKKYPDYYQQIKMPISLQQIRTKLKNQEYETLDHLECDLNLMFENAKRYNVPNSAIYKRVLKLQQVMQAKKKELARRDDIEDGDSMISSATSDTGSAKRKSKKNIRKQRMKILFNVVLEAREPGSGRRLCDLFMVKPSKKDYPDYYKIILEPMDLKIIEHNIRNDKYAGEEGMIEDMKLMFRNARHYNEEGSQVYNDAHILEKLLKEKRKELGPLPDDDDMASPKLKLSRKSGISPKKSKYMTPMQQKLNEVYEAVKNYTDKRGRRLSAIFLRLPSRSELPDYYLTIKKPMDMEKIRSHMMANKYQDIDSMVEDFVMMFNNACTYNEPESLIYKDALVLHKVLLETRRDLEGDEDSHVPNVTLLIQELIHNLFVSVMSHQDDEGRCYSDSLAEIPAVDPNFPNKPPLTFDIIRKNVENNRYRRLDLFQEHMFEVLERARRMNRTDSEIYEDAVELQQFFIKIRDELCKNGEILLSPALSYTTKHLHNDVEKERKEKLPKEIEEDKLKREEEKREAEKSEDSSGAAGLSGLHRTYSQDCSFKNSMYHVGDYVYVEPAEANLQPHIVCIERLWEDSAGEKWLYGCWFYRPNETFHLATRKFLEKEVFKSDYYNKVPVSKILGKCVVMFVKEYFKLCPENFRDEDVFVCESRYSAKTKSFKKIKLWTMPISSVRFVPRDVPLPVVRVASVFANADKGDDEKNTDNSEDSRAEDNFNLEKEKEDVPVEMSNGEPGCHYFEQLHYNDMWLKVGDCVFIKSHGLVRPRVGRIEKVWVRDGAAYFYGPIFIHPEETEHEPTKMFYKKEVFLSNLEETCPMTCILGKCAVLSFKDFLSCRPTEIPENDILLCESRYNESDKQMKKFKGLKRFSLSAKVVDDEIYYFRKPIVPQKEPSPLLEKKIQLLEAKFAELEGGDDDIEEMGEEDSEVIEPPSLPQLQTPLASELDLMPYTPPQSTPKSAKGSAKKEGSKRKINMSGYILFSSEMRAVIKAQHPDYSFGELSRLVGTEWRNLETAKKAEYEGMMGGYPPGLPPLQGPVDGLVSMGSMQPLHPGGPPPHHLPPGVPGLPGIPPPGVMNQGVAPMVGTPAPGGSPYGQQVGVLGPPGQQAPPPYPGPHPAGPPVIQQPTTPMFVAPPPKTQRLLHSEAYLKYIEGLSAESNSISKWDQTLAARRRDVHLSKEQESRLPSHWLKSKGAHTTMADALWRLRDLMLRDTLNIRQAYNLENV

SEQ ID NO: 34085 - protein, 1582 aa, Homo sapiens
MGSKRRRATSPSSSVSGDFDDGHHSVSTPGPSRKRRRLSNLPTVDPIAVCHELYNTIRDYKDEQGRLLCELFIRAPKRRNQPDYYEVVSQPIDLMKIQQKLKMEEYDDVNLLTADFQLLFNNAKSYYKPDSPEYKAACKLWDLYLRTRNEFVQKGEADDEDDDEDGQDNQGTVTEGSSPAYLKEILEQLLEAIVVATNPSGRLISELFQKLPSKVQYPDYYAIIKEPIDLKTIAQRIQNGSYKSIHAMAKDIDLLAKNAKTYNEPGSQVFKDANSIKKIFYMKKAEIEHHEMAKSSLRMRTPSNLAAARLTGPSHSKGSLGEERNPTSKYYRNKRAVQGGRLSAITMALQYGSESEEDAALAAARYEEGESEAESITSFMDVSNPFYQLYDTVRSCRNNQGQLIAEPFYHLPSKKKYPDYYQQIKMPISLQQIRTKLKNQEYETLDHLECDLNLMFENAKRYNVPNSAIYKRVLKLQQVMQAKKKELARRDDIEDGDSMISSATSDTGSAKRKSKKNIRKQRMKILFNVVLEAREPGSGRRLCDLFMVKPSKKDYPDYYKIILEPMDLKIIEHNIRNDKYAGEEGMIEDMKLMFRNARHYNEEGSQVYNDAHILEKLLKEKRKELGPLPDDDDMASPKLKLSRKSGISPKKSKYMTPMQQKLNEVYEAVKNYTDKRGRRLSAIFLRLPSRSELPDYYLTIKKPMDMEKIRSHMMANKYQDIDSMVEDFVMMFNNACTYNEPESLIYKDALVLHKVLLETRRDLEGDEDSHVPNVTLLIQELIHNLFVSVMSHQDDEGRCYSDSLAEIPAVDPNFPNKPPLTFDIIRKNVENNRYRRLDLFQEHMFEVLERARRMNRTDSEIYEDAVELQQFFIKIRDELCKNGEILLSPALSYTTKHLHNDVEKERKEKLPKEIEEDKLKREEEKREAEKSEDSSGAAGLSGLHRTYSQDCSFKNSMYHVGDYVYVEPAEANLQPHIVCIERLWEDSAEKEVFKSDYYNKVPVSKILGKCVVMFVKEYFKLCPENFRDEDVFVCESRYSAKTKSFKKIKLWTMPISSVRFVPRDVPLPVVRVASVFANADKGDDEKNTDNSEDSRAEDNFNLEKEKEDVPVEMSNGEPGCHYFEQLHYNDMWLKVGDCVFIKSHGLVRPRVGRIEKVWVRDGAAYFYGPIFIHPEETEHEPTKMFYKKEVFLSNLEETCPMTCILGKCAVLSFKDFLSCRPTEIPENDILLCESRYNESDKQMKKFKGLKRFSLSAKVVDDEIYYFRKPIVPQKEPSPLLEKKIQLLEAKFAELEGGDDDIEEMGEEDSESTPKSAKGSAKKEGSKRKINMSGYILFSSEMRAVIKAQHPDYSFGELSRLVGTEWRNLETAKKAEYEGMMGGYPPGLPPLQGPVDGLVSMGSMQPLHPGGPPPHHLPPGVPGLPGIPPPGVMNQGVAPMVGTPAPGGSPYGQQVGVLGPPGQQAPPPYPGPHPAGPPVIQQPTTPMFVAPPPKTQRLLHSEAYLKYIEGLSAESNSISKWDQTLAARRRDVHLSKEQESRLPSHWLKSKGAHTTMADALWRLRDLMLRDTLNIRQAYNLENV

SEQ ID NO: 34086 - protein, 1582 aa, Homo sapiens
MGSKRRRATSPSSSVSGDFDDGHHSVSTPGPSRKRRRLSNLPTVDPIAVCHELYNTIRDYKDEQGRLLCELFIRAPKRRNQPDYYEVVSQPIDLMKIQQKLKMEEYDDVNLLTADFQLLFNNAKSYYKPDSPEYKAACKLWDLYLRTRNEFVQKGEADDEDDDEDGQDNQGTVTEGSSPAYLKEILEQLLEAIVVATNPSGRLISELFQKLPSKVQYPDYYAIIKEPIDLKTIAQRIQNGSYKSIHAMAKDIDLLAKNAKTYNEPGSQVFKDANSIKKIFYMKKAEIEHHEMAKSSLRMRTPSNLAAARLTGPSHSKGSLGEERNPTSKYYRNKRAVQGGRLSAITMALQYGSESEEDAALAAARYEEGESEAESITSFMDVSNPFYQLYDTVRSCRNNQGQLIAEPFYHLPSKKKYPDYYQQIKMPISLQQIRTKLKNQEYETLDHLECDLNLMFENAKRYNVPNSAIYKRVLKLQQVMQAKKKELARRDDIEDGDSMISSATSDTGSAKRKSKKNIRKQRMKILFNVVLEAREPGSGRRLCDLFMVKPSKKDYPDYYKIILEPMDLKIIEHNIRNDKYAGEEGMIEDMKLMFRNARHYNEEGSQVYNDAHILEKLLKEKRKELGPLPDDDDMASPKLKLSRKSGISPKKSKYMTPMQQKLNEVYEAVKNYTDKRGRRLSAIFLRLPSRSELPDYYLTIKKPMDMEKIRSHMMANKYQDIDSMVEDFVMMFNNACTYNEPESLIYKDALVLHKVLLETRRDLEGDEDSHVPNVTLLIQELIHNLFVSVMSHQDDEGRCYSDSLAEIPAVDPNFPNKPPLTFDIIRKNVENNRYRRLDLFQEHMFEVLERARRMNRTDSEIYEDAVELQQFFIKIRDELCKNGEILLSPALSYTTKHLHNDVEKERKEKLPKEIEEDKLKREEEKREAEKSEDSSGAAGLSGLHRTYSQDCSFKNSMYHVGDYVYVEPAEANLQPHIVCIERLWEDSAGEKWLYGCWFYRPNETFHLATRKFLEKEVFKSDYYNKVPVSKILGKCVVMFVKEYFKLCPENFRDEDVFVCESRYSAKTKSFKKIKLWTMPISSVRFVPRDVPLPVVRVASVFANADKGDDEKNTDNSEDSRAEDNFNLEKEKEDVPVEMSNGEPGCHYFEQLHYNDMWLKVGDCVFIKSHGLVRPRVGRIEKVWVRDGAAYFYGPIFIHPEETEHEPTKMFYKKEVFLSNLEETCPMTCILGKCAVLSFKDFLSCRPTEIPENDILLCESRYNESDKQMKKFKGLKRFSLSAKVVDDEIYYFRKPIVPQKEPSPLLEKKIQLLEAKFAELEGGDDDIEEMGEEDSEVIEPPSLPQLQTPLASELDLMPYTPPQSTPKSAKGSAKKEGSKRKINMSGYILFSSEMRAVIKAQHPDYSFGELSRLVGTEWRNLETAKKAEYEGVMNQGVAPMVGTPAPGGSPYGQQVGVLGPPGQQAPPPYPGPHPAGPPVIQQPTTPMFVAPPPKTQRLLHSEAYLKYIEGLSAESNSISKWDQTLAARRRDVHLSKEQESRLPSHWLKSKGAHTTMADALWRLRDLMLRDTLNIRQAYNLENV

SEQ ID NO: 34087 - protein, 856 aa, Homo sapiens
MGSKRRRATSPSSSVSGDFDDGHHSVSTPGPSRKRRRLSNLPTVDPIAVCHELYNTIRDYKDEQGRLLCELFIRAPKRRNQPDYYEVVSQPIDLMKIQQKLKMEEYDDVNLLTADFQLLFNNAKSYYKPDSPEYKAACKLWDLYLRTRNEFVQKGEADDEDDDEDGQDNQGTVTEGSSPAYLKEILEQLLEAIVVATNPSGRLISELFQKLPSKVQYPDYYAIIKEPIDLKTIAQRIQNGSYKSIHAMAKDIDLLAKNAKTYNEPGSQVFKDANSIKKIFYMKKAEIEHHEMAKSSLRMRTPSNLAAARLTGPSHSKGSLGEERNPTSKYYRNKRAVQGGRLSAITMALQYGSESEEDAALAAARYEEGESEAESITSFMDVSNPFYQLYDTVRSCRNNQGQLIAEPFYHLPSKKKYPDYYQQIKMPISLQQIRTKLKNQEYETLDHLECDLNLMFENAKRYNVPNSAIYKRVLKLQQVMQAKKKELARRDDIEDGDSMISSATSDTGSAKRKSKKNIRKQRMKILFNVVLEAREPGSGRRLCDLFMVKPSKKDYPDYYKIILEPMDLKIIEHNIRNDKYAGEEGMIEDMKLMFRNARHYNEEGSQVYNDAHILEKLLKEKRKELGPLPDDDDMASPKLKLSRKSGISPKKSKYMTPMQQKLNEVYEAVKNYTDKRGRRLSAIFLRLPSRSELPDYYLTIKKPMDMEKIRSHMMANKYQDIDSMVEDFVMMFNNACTYNEPESLIYKDALVLHKVLLETRRDLEGDEDSHVPNVTLLIQELIHNLFVSVMSHQDDEGRCYSDSLAEIPAVDPNFPNKPPLTFDIIRKNVENNRYRRLDLFQEHMFEVLERARRMNR

SEQ ID NO: 34088 - protein, 1597 aa, Homo sapiens
MGSKRRRATSPSSSVSGDFDDGHHSVSTPGPSRKRRRLSNLPTVDPIAVCHELYNTIRDYKDEQGRLLCELFIRAPKRRNQPDYYEVVSQPIDLMKIQQKLKMEEYDDVNLLTADFQLLFNNAKSYYKPDSPEYKAACKLWDLYLRTRNEFVQKGEADDEDDDEDGQDNQGTVTEGSSPAYLKEILEQLLEAIVVATNPSGRLISELFQKLPSKVQYPDYYAIIKEPIDLKTIAQRIQNGSYKSIHAMAKDIDLLAKNAKTYNEPGSQVFKDANSIKKIFYMKKAEIEHHEMAKSSLRMRTPSNLAAARLTGPSHSKGSLGEERNPTSKYYRNKRAVQGGRLSAITMALQYGSESEEDAALAAARYEEGESEAESITSFMDVSNPFYQLYDTVRSCRNNQGQLIAEPFYHLPSKKKYPDYYQQIKMPISLQQIRTKLKNQEYETLDHLECDLNLMFENAKRYNVPNSAIYKRVLKLQQVMQAKKKELARRDDIEDGDSMISSATSDTGSAKRKRNTHDSEMLGLRRLSSKKNIRKQRMKILFNVVLEAREPGSGRRLCDLFMVKPSKKDYPDYYKIILEPMDLKIIEHNIRNDKYAGEEGMIEDMKLMFRNARHYNEEGSQVYNDAHILEKLLKEKRKELGPLPDDDDMASPKLKLSRKSGISPKKSKYMTPMQQKLNEVYEAVKNYTDKRGRRLSAIFLRLPSRSELPDYYLTIKKPMDMEKIRSHMMANKYQDIDSMVEDFVMMFNNACTYNEPESLIYKDALVLHKVLLETRRDLEGDEDSHVPNVTLLIQELIHNLFVSVMSHQDDEGRCYSDSLAEIPAVDPNFPNKPPLTFDIIRKNVENNRYRRLDLFQEHMFEVLERARRMNRTDSEIYEDAVELQQFFIKIRDELCKNGEILLSPALSYTTKHLHNDVEKERKEKLPKEIEEDKLKREEEKREAEKSEDSSGAAGLSGLHRTYSQDCSFKNSMYHVGDYVYVEPAEANLQPHIVCIERLWEDSAGEKWLYGCWFYRPNETFHLATRKFLEKEVFKSDYYNKVPVSKILGKCVVMFVKEYFKLCPENFRDEDVFVCESRYSAKTKSFKKIKLWTMPISSVRFVPRDVPLPVVRVASVFANADKGDDEKNTDNSEDSRAEDNFNLEKEKEDVPVEMSNGEPGCHYFEQLHYNDMWLKVGDCVFIKSHGLVRPRVGRIEKVWVRDGAAYFYGPIFIHPEETEHEPTKMFYKKEVFLSNLEETCPMTCILGKCAVLSFKDFLSCRPTEIPENDILLCESRYNESDKQMKKFKGLKRFSLSAKVVDDEIYYFRKPIVPQKEPSPLLEKKIQLLEAKFAELEGGDDDIEEMGEEDSEVIEPPSLPQLQTPLASELDLMPYTPPQSTPKSAKGSAKKEGSKRKINMSGYILFSSEMRAVIKAQHPDYSFGELSRLVGTEWRNLETAKKAEYEGVMNQGVAPMVGTPAPGGSPYGQQVGVLGPPGQQAPPPYPGPHPAGPPVIQQPTTPMFVAPPPKTQRLLHSEAYLKYIEGLSAESNSISKWDQTLAARRRDVHLSKEQESRLPSHWLKSKGAHTTMADALWRLRDLMLRDTLNIRQAYNLENV

SEQ ID NO: 34089 - protein, 1652 aa, Homo sapiens
MGSKRRRATSPSSSVSGDFDDGHHSVSTPGPSRKRRRLSNLPTVDPIAVCHELYNTIRDYKDEQGRLLCELFIRAPKRRNQPDYYEVVSQPIDLMKIQQKLKMEEYDDVNLLTADFQLLFNNAKSYYKPDSPEYKAACKLWDLYLRTRNEFVQKGEADDEDDDEDGQDNQGTVTEGSSPAYLKEILEQLLEAIVVATNPSGRLISELFQKLPSKVQYPDYYAIIKEPIDLKTIAQRIQNGSYKSIHAMAKDIDLLAKNAKTYNEPGSQVFKDANSIKKIFYMKKAEIEHHEMAKSSLRMRTPSNLAAARLTGPSHSKGSLGEERNPTSKYYRNKRAVQGGRLSAITMALQYGSESEEDAALAAARYEEGESEAESITSFMDVSNPFYQLYDTVRSCRNNQGQLIAEPFYHLPSKKKYPDYYQQIKMPISLQQIRTKLKNQEYETLDHLECDLNLMFENAKRYNVPNSAIYKRVLKLQQVMQAKKKELARRDDIEDGDSMISSATSDTGSAKRKRNTHDSEMLGLRRLSSKKNIRKQRMKILFNVVLEAREPGSGRRLCDLFMVKPSKKDYPDYYKIILEPMDLKIIEHNIRNDKYAGEEGMIEDMKLMFRNARHYNEEGSQVYNDAHILEKLLKEKRKELGPLPDDDDMASPKLKLSRKSGISPKKSKYMTPMQQKLNEVYEAVKNYTDKRGRRLSAIFLRLPSRSELPDYYLTIKKPMDMEKIRSHMMANKYQDIDSMVEDFVMMFNNACTYNEPESLIYKDALVLHKVLLETRRDLEGDEDSHVPNVTLLIQELIHNLFVSVMSHQDDEGRCYSDSLAEIPAVDPNFPNKPPLTFDIIRKNVENNRYRRLDLFQEHMFEVLERARRMNRTDSEIYEDAVELQQFFIKIRDELCKNGEILLSPALSYTTKHLHNDVEKERKEKLPKEIEEDKLKREEEKREAEKSEDSSGAAGLSGLHRTYSQDCSFKNSMYHVGDYVYVEPAEANLQPHIVCIERLWEDSAGEKWLYGCWFYRPNETFHLATRKFLEKEVFKSDYYNKVPVSKILGKCVVMFVKEYFKLCPENFRDEDVFVCESRYSAKTKSFKKIKLWTMPISSVRFVPRDVPLPVVRVASVFANADKGDDEKNTDNSEDSRAEDNFNLEKEKEDVPVEMSNGEPGCHYFEQLHYNDMWLKVGDCVFIKSHGLVRPRVGRIEKVWVRDGAAYFYGPIFIHPEETEHEPTKMFYKKEVFLSNLEETCPMTCILGKCAVLSFKDFLSCRPTEIPENDILLCESRYNESDKQMKKFKGLKRFSLSAKVVDDEIYYFRKPIVPQKEPSPLLEKKIQLLEAKFAELEGGDDDIEEMGEEDSEVIEPPSLPQLQTPLASELDLMPYTPPQSTPKSAKGSAKKEGSKRKINMSGYILFSSEMRAVIKAQHPDYSFGELSRLVGTEWRNLETAKKAEYEERAAKVAEQQERERAAQQQQPSASPRAGTPVGALMGVVPPPTPMGMLNQQLTPVAGVMNQGVAPMVGTPAPGGSPYGQQVGVLGPPGQQAPPPYPGPHPAGPPVIQQPTTPMFVAPPPKTQRLLHSEAYLKYIEGLSAESNSISKWDQTLAARRRDVHLSKEQESRLPSHWLKSKGAHTTMADALWRLRDLMLRDTLNIRQAYNLENV

SEQ ID NO: 34090 - protein, 1609 aa, Homo sapiens
MGSKRRRATSPSSSVSGDFDDGHHSVSTPGPSRKRRRLSNLPTVDPIAVCHELYNTIRDYKDEQGRLLCELFIRAPKRRNQPDYYEVVSQPIDLMKIQQKLKMEEYDDVNLLTADFQLLFNNAKSYYKPDSPEYKAACKLWDLYLRTRNEFVQKGEADDEDDDEDGQDNQGTVTEGSSPAYLKEILEQLLEAIVVATNPSGRLISELFQKLPSKVQYPDYYAIIKEPIDLKTIAQRIQNGSYKSIHAMAKDIDLLAKNAKTYNEPGSQVFKDANSIKKIFYMKKAEIEHHEMAKSSLRMRTPSNLAAARLTGPSHSKGSLGEERNPTSKYYRNKRAVQGGRLSAITMALQYGSESEEDAALAAARYEEGESEAESITSFMDVSNPFYQLYDTVRSCRNNQGQLIAEPFYHLPSKKKYPDYYQQIKMPISLQQIRTKLKNQEYETLDHLECDLNLMFENAKRYNVPNSAIYKRVLKLQQVMQAKKKELARRDDIEDGDSMISSATSDTGSAKRKSKKNIRKQRMKILFNVVLEAREPGSGRRLCDLFMVKPSKKDYPDYYKIILEPMDLKIIEHNIRNDKYAGEEGMIEDMKLMFRNARHYNEEGSQVYNDAHILEKLLKEKRKELGPLPDDDDMASPKLKLSRKSGISPKKSKYMTPMQQKLNEVYEAVKNYTDKRGRRLSAIFLRLPSRSELPDYYLTIKKPMDMEKIRSHMMANKYQDIDSMVEDFVMMFNNACTYNEPESLIYKDALVLHKVLLETRRDLEGDEDSHVPNVTLLIQELIHNLFVSVMSHQDDEGRCYSDSLAEIPAVDPNFPNKPPLTFDIIRKNVENNRYRRLDLFQEHMFEVLERARRMNRTDSEIYEDAVELQQFFIKIRDELCKNGEILLSPALSYTTKHLHNDVEKERKEKLPKEIEEDKLKREEEKREAEKSEDSSGAAGLSGLHRTYSQDCSFKNSMYHVGDYVYVEPAEANLQPHIVCIERLWEDSAEKEVFKSDYYNKVPVSKILGKCVVMFVKEYFKLCPENFRDEDVFVCESRYSAKTKSFKKIKLWTMPISSVRFVPRDVPLPVVRVASVFANADKGDDEKNTDNSEDSRAEDNFNLEKEKEDVPVEMSNGEPGCHYFEQLHYNDMWLKVGDCVFIKSHGLVRPRVGRIEKVWVRDGAAYFYGPIFIHPEETEHEPTKMFYKKEVFLSNLEETCPMTCILGKCAVLSFKDFLSCRPTEIPENDILLCESRYNESDKQMKKFKGLKRFSLSAKVVDDEIYYFRKPIVPQKEPSPLLEKKIQLLEAKFAELEGGDDDIEEMGEEDSEVIEPPSLPQLQTPLASELDLMPYTPPQSTPKSAKGSAKKEGSKRKINMSGYILFSSEMRAVIKAQHPDYSFGELSRLVGTEWRNLETAKKAEYEGMMGGYPPGLPPLQGPVDGLVSMGSMQPLHPGGPPPHHLPPGVPGLPGIPPPGVMNQGVAPMVGTPAPGGSPYGQQVGVLGPPGQQAPPPYPGPHPAGPPVIQQPTTPMFVAPPPKTQRLLHSEAYLKYIEGLSAESNSISKWDQTLAARRRDVHLSKEQESRLPSHWLKSKGAHTTMADALWRLRDLMLRDTLNIRQAYNLENV

SEQ ID NO: 34091 - protein, 379 aa, Homo sapiens
MEMAEAELHKERLQAIAEKRKRQTEIEGKRQQLDEQILLLQHSKSKVLREKWLLQGIPAGTAEEEEARRRQSEEDEFRVKQLEDNIQRLEQEIQTLESEESQISAKEQIILEKLKETEKSFKDFQKGFSSTDGAVYAMEINVEKDKQTGETKILSTSTIGPEGVHQKGVKVYDDGTKVVYEVRSGGTVVENGVHKLSTKDVEELIQKAGQSSLGGGHVSERTVIADGSLSHPKEHMLCKEAKLEMVHKSRKDHSSGNPGQQAQAPSAAGPEANLDQPVTMIFMGYQNIEDEEETKKVLGYDETIKAELVLIDEDDEKSLREKTVTDVSTIDGNAAELVSGRPVSDTTEPSSPEGKEESLATEPAPGTQKKKRCQCCVVM

SEQ ID NO: 34092 - protein, 411 aa, Homo sapiens
MAEAELHKERLQAIAEKRKRQTEIEGKRQQLDEQILLLQHSKSKVLREKWLLQGIPAGTAEEEEARRRQSEEDEFRVKQLEDNIQRLEQEIQTLESEESQISAKEQIILEKLKETEKSFKDFQKGFSSTDGDAVNYISSQLPDLPILCSRTAEPSPGQDGTSRAAAVYAMEINVEKDKQTGETKILSTSTIGPEGVHQKGVKVYDDGTKVVYEVRSGGTVVENGVHKLSTKDVEELIQKAGQSSLGGGHVSERTVIADGSLSHPKEHMLCKEAKLEMVHKSRKDHSSGNPGQQAQAPSAAGPEANLDQPVTMIFMGYQNIEDEEETKKVLGYDETIKAELVLIDEDDEKSLREKTVTDVSTIDGNAAELVSGRPVSDTTEPSSPEGKEESLATEPAPGTQKKKRCQCCVVM

SEQ ID NO: 34093 - protein, 461 aa, Homo sapiens
MYNTVWSMDRDDADWREVMMPYSTELIFYIEMDPPALPPKPPKPMTSAVPNGMKDSSVSLQDAEWYWGDISREEVNDKLRDMPDGTFLVRDASTKMQGDYTLTLRKGGNNKLIKIYHRDGKYGFSDPLTFNSVVELINHYHHESLAQYNPKLDVKLMYPVSRYQQDQLVKEDNIDAVGKKLQEYHSQYQEKSKEYDRLYEEYTRTSQEIQMKRTAIEAFNETIKIFEEQCHTQEQHSKEYIERFRREGNEKEIERIMMNYDKLKSRLGEIHDSKMRLEQDLKNQALDNREIDKKMNSIKPDLIQLRKIRDQHLVWLNHKGVRQKRLNVWLGIKNEDADENYFINEEDENLPHYDEKTWFVEDINRVQAEDLLYGKPDGAFLIRESSKKGCYACSVVADGEVKHCVIYSTARGYGFAEPYNLYSSLKELVLHYQQTSLVQHNDSLNVRLAYPVHAQMPSLCR

SEQ ID NO: 34094 - protein, 402 aa, Homo sapiens
MYNTVWSMDRDDADWREVMMPYSTELIFYIEMDPPALPPKPPKPMTSAVPNGMKDSSVSLQDAEWYWGDISREEVNDKLRDMPDGTFLVRDASTKMQGDYTLTLRKGGNNKLIKIYHRDGKYGFSDPLTFNSVVELINHYHHESLAQYNPKLDVKLMYPVSRYQQDQLVKEDNIDAVGKKLQEYHSQYQEKSKEYDRLYEEYTRTSQEIQMKRTAIEAFNETIKIFEEQCHTQEQHSKEYIERFRREGNEKEIERWLNHKGVRQKRLNVWLGIKNEDADENYFINEEDENLPHYDEKTWFVEDINRVQAEDLLYGKPDGAFLIRESSKKGCYACSVVADGEVKHCVIYSTARGYGFAEPYNLYSSLKELVLHYQQTSLVQHNDSLNVRLAYPVHAQMPSLCR

SEQ ID NO: 34095 - protein, 366 aa, Homo sapiens
MYNTVWSMDRDDADWREVMMPYSTELIFYIEMDPPREEVNDKLRDMPDGTFLVRDASTKMQGDYTLTLRKGGNNKLIKIYHRDGKYGFSDPLTFNSVVELINHYHHESLAQYNPKLDVKLMYPVSRYQQDQLVKEDNIDAVGKKLQEYHSQYQEKSKEYDRLYEEYTRTSQEIQMKRTAIEAFNETIKIFEEQCHTQEQHSKEYIERFRREGNEKEIERWLNHKGVRQKRLNVWLGIKNEDADENYFINEEDENLPHYDEKTWFVEDINRVQAEDLLYGKPDGAFLIRESSKKGCYACSVVADGEVKHCVIYSTARGYGFAEPYNLYSSLKELVLHYQQTSLVQHNDSLNVRLAYPVHAQMPSLCR

SEQ ID NO: 34096 - protein, 164 aa, Homo sapiens; identical to SEQ ID NO: 31952

SEQ ID NO: 34097 - protein, 223 aa, Homo sapiens
MAAGDGDVKLGTLGSGSESSNDGGSESPGDAGAAAEGGGWAAAALALLTGGGEMLLNVALVALVLLGAYRLWVRWGRRGLGAGAGAGEESPATSLPRMKKRDFSLEQLRQYDGSRNPRILLAVNGKVFDVTKGSKFYGPAGPYGIFAGRDASRGLATFCLDKDALRDEYDDLSDLNAVQMESVREWEMQFKEKYDYVGRLLKPGEEPSEYTDEEDTKDHNKQD

SEQ ID NO: 34098 - protein, 247 aa, Homo sapiens
MGGAGRGVGEGRGRGGGGRRWRAVMAAGDGDVKLGTLGSGSESSNDGGSESPGDAGAAAEGGGWAAAALALLTGGGEMLLNVALVALVLLGAYRLWVRWGRRGLGAGAGAGEESPATSLPRMKKRDFSLEQLRQYDGSRNPRILLAVNGKVFDVTKGSKFYGPAGPYGIFAGRDASRGLATFCLDKDALRDEYDDLSDLNAVQMESVREWEMQFKEKYDYVGRLLKPGEEPSEYTDEEDTKDHNKQD

SEQ ID NO: 34099 - protein, 933 aa, Homo sapiens
MRALAVLSVTLVMACTEAFFPFISRGKELLWGKPEESRVSSVLEESKRLVDTAMYATMQRNLKKRGILSPAQLLSFSKLPEPTSGVIARAAEIMETSIQAMKRKVNLKTQQSQHPTDALSEDLLSIIANMSGCLPYMLPPKCPNTCLANKYRPITGACNNRDHPRWGASNTALARWLPPVYEDGFSQPRGWNPGFLYNGFPLPPVREVTRHVIQVSNEVVTDDDRYSDLLMAWGQYIDHDIAFTPQSTSKAAFGGGADCQMTCENQNPCFPIQLPEEARPAAGTACLPFYRSSAACGTGDQGALFGNLSTANPRQQMNGLTSFLDASTVYGSSPALERQLRNWTSAEGLLRVHARLRDSGRAYLPFVPPRAPAACAPEPGIPGETRGPCFLAGDGRASEVPSLTALHTLWLREHNRLAAALKALNAHWSADAVYQEARKVVGALHQIITLRDYIPRILGPEAFQQYVGPYEGYDSTANPTVSNVFSTAAFRFGHATIHPLVRRLDASFQEHPDLPGLWLHQAFFSPWTLLRGGGLDPLIRGLLARPAKLQVQDQLMNEELTERLFVLSNSSTLDLASINLQRGRDHGLPGYNEWREFCGLPRLETPADLSTAIASRSVADKILDLYKHPDNIDVWLGGLAENFLPRARTGPLFACLIGKQMKALRDGDWFWWENSHVFTDAQRRELEKHSLSRVICDNTGLTRVPMDAFQVGKFPEDFESCDSITGMNLEAWRETFPQDDKCGFPESVENGDFVHCEESGRRVLVYSCRHGYELQGREQLTCTQEGWDFQPPLCKDVNECADGAHPPCHASARCRNTKGGFQCLCADPYELGDDGRTCVDSGRLPRVTWISMSLAALLIGGFAGLTSTVICRWTRTGTKSTLPISETGGGTPELRCGKHQAVGTSPQRAAAQDSEQESAGMEGRDTHRLPRAL

SEQ ID NO: 34100 - protein, 876 aa, Homo sapiens
MRALAVLSVTLVMACTEAFFPFISRGKELLWGKPEESRVSSVLEESKRLVDTAMYATMQRNLKKRGILSPAQLLSFSKLPEPTSGVIARAAEIMETSIQAMKRKVNLKTQQSQHPTDALSEDLLSIIANMSGCLPYMLPPKCPNTCLANKYRPITGACNNRDHPRWGASNTALARWLPPVYEDGFSQPRGWNPGFLYNGFPLPPVREVTRHVIQVSNEVVTDDDRYSDLLMAWGQYIDHDIAFTPQSTSKAAFGGGADCQMTCENQNPCFPIQLPEEARPAAGTACLPFYRSSAACGTGDQGALFGNLSTANPRQQMNGLTSFLDASTVYGSSPALERQLRNWTSAEGLLRVHARLRDSGRAYLPFVPPRAPAACAPEPGIPGETRGPCFLAGDGRASEVPSLTALHTLWLREHNRLAAALKALNAHWSADAVYQEARKVVGALHQIITLRDYIPRILGPEAFQQYVGPYEGYDSTANPTVSNVFSTAAFRFGHATIHPLVRRLDASFQEHPDLPGLWLHQAFFSPWTLLRGGYNEWREFCGLPRLETPADLSTAIASRSVADKILDLYKHPDNIDVWLGGLAENFLPRARTGPLFACLIGKQMKALRDGDWFWWENSHVFTDAQRRELEKHSLSRVICDNTGLTRVPMDAFQVGKFPEDFESCDSITGMNLEAWRETFPQDDKCGFPESVENGDFVHCEESGRRVLVYSCRHGYELQGREQLTCTQEGWDFQPPLCKDVNECADGAHPPCHASARCRNTKGGFQCLCADPYELGDDGRTCVDSGRLPRVTWISMSLAALLIGGFAGLTSTVICRWTRTGTKSTLPISETGGGTPELRCGKHQAVGTSPQRAAAQDSEQESAGMEGRDTHRLPRAL

SEQ ID NO: 34101 - protein, 929 aa, Homo sapiens
MRALAVLSVTLVMACTEAFFPFISRGKELLWGKPEESRVSSVLEESKRLVDTAMYATMQRNLKKRGILSPAQLLSFSKLPEPTSGVIARAAEIMETSIQAMKRKVNLKTQQSQHPTDALSEDLLSIIANMSGCLPYMLPPKCPNTCLANKYRPITGACNNRDHPRWGASNTALARWLPPVYEDGFSQPRGWNPGFLYNGFPLPPVREVTRHVIQVSNEVVTDDDRYSDLLMAWGQYIDHDIAFTPQSTSKAAFGGGADCQMTCENQNPCFPIQLPEEARPAAGTACLPFYRSSAACGTGDQGALFGNLSTANPRQQMNGLTSFLDASTVYGSSPALERQLRNWTSAEGLLRVHARLRDSGRAYLPFVPPRAPAACAPEPGIPGETRGPCFLAGDGRASEVPSLTALHTLWLREHNRLAAALKALNAHWSADAVYQEARKVVGALHQIITLRDYIPRILGPEAFQQYVGPYEGYDSTANPTVSNVFSTAAFRFGHATIHPLVRRLDASFQEHPDLPGLWLHQAFFSPWTLLRGGGLDPLIRGLLARPAKLQVQDQLMNEELTERLFVLSNSSTLDLASINLQRGRDHGLPGYNEWREFCGLPRLETPADLSTAIASRSVADKILDLYKHPDNIDVWLGGLAENFLPRARTGPLFACLIGKQMKALRDGDWFWWENSHVFTDAQRRELEKHSLSRVICDNTGLTRVPMDAFQVGKFPEDFESCDSITGMNLEAWRETFPQDDKCGFPESVENGDFVHCEESGRRVLVYSCRHGYELQGREQLTCTQEGWDFQPPLCKDVNECADGAHPPCHASARCRNTKGGFQCLCADPYELGDDGRTCVDSGRLPRVTWISMSLAALLIGGFAGLTSTVICRWRVLGWKAGILTGCREPSEGKVAGHCRTASCSQNHRTTLFQTQANRKSAGRLFSQHG

SEQ ID NO: 34102 - protein, 889 aa, Homo sapiens
MRALAVLSVTLVMACTEAFFPFISRGKELLWGKPEESRVSSVLEESKRLVDTAMYATMQRNLKKRGILSPAQLLSFSKLPEPTSGVIARAAEIMETSIQAMKRKVNLKTQQSQHPTDALSEDLLSIIANMSGCLPYMLPPKCPNTCLANKYRPITGACNNRDHPRWGASNTALARWLPPVYEDGFSQPRGWNPGFLYNGFPLPPVREVTRHVIQVSNEVVTDDDRYSDLLMAWGQYIDHDIAFTPQSTSKAAFGGGADCQMTCENQNPCFPIQLPEEARPAAGTACLPFYRSSAACGTGDQGALFGNLSTANPRQQMNGLTSFLDASTVYGSSPALERQLRNWTSAEGLLRVHARLRDSGRAYLPFVPPRAPAACAPEPGIPGETRGPCFLAGDGRASEVPSLTALHTLWLREHNRLAAALKALNAHWSADAVYQEARKVVGALHQIITLRDYIPRILGPEAFQQYVGPYEGYDSTANPTVSNVFSTAAFRFGHATIHPLVRRLDASFQEHPDLPGLWLHQAFFSPWTLLRGGGLDPLIRGLLARPAKLQVQDQLMNEELTERLFVLSNSSTLDLASINLQRGRDHGLPGYNEWREFCGLPRLETPADLSTAIASRSVADKILDLYKHPDNIDVWLGGLAENFLPRARTGPLFACLIGKQMKALRDGDWFWWENSHVFTDAQRRELEKHSLSRVICDNTGLTRVPMDAFQVGKFPEDFESCDSITGMNLEAWRETFPQDDKCGFPESVENGDFVHCEESGRRVLVYSCRHGYELQGREQLTCTQEGWDFQPPLCKDSGRLPRVTWISMSLAALLIGGFAGLTSTVICRWTRTGTKSTLPISETGGGTPELRCGKHQAVGTSPQRAAAQDSEQESAGMEGRDTHRLPRAL

SEQ ID NO: 34103 - protein, 760 aa, Homo sapiens
MRALAVLSVTLVMACTEAFFPFISRGKELLWGKPEESRVSSVLEESKRLVDTAMYATMQRNLKKRGILSPAQLLSFSKLPEPTSGVIARAAEIMETSIQAMKRKVNLKTQQSQHPTDALSEDLLSIIANMSGCLPYMLPPKCPNTCLANKYRPITGACNNRDHPRWGASNTALARWLPPVYEDGFSQPRGWNPGFLYNGFPLPPVREVTRHVIQVSNEVVTDDDRYSDLLMAWGQYIDHDIAFTPQSTSKAAFGGGADCQMTCENQNPCFPIQIITLRDYIPRILGPEAFQQYVGPYEGYDSTANPTVSNVFSTAAFRFGHATIHPLVRRLDASFQEHPDLPGLWLHQAFFSPWTLLRGGGLDPLIRGLLARPAKLQVQDQLMNEELTERLFVLSNSSTLDLASINLQRGRDHGLPGYNEWREFCGLPRLETPADLSTAIASRSVADKILDLYKHPDNIDVWLGGLAENFLPRARTGPLFACLIGKQMKALRDGDWFWWENSHVFTDAQRRELEKHSLSRVICDNTGLTRVPMDAFQVGKFPEDFESCDSITGMNLEAWRETFPQDDKCGFPESVENGDFVHCEESGRRVLVYSCRHGYELQGREQLTCTQEGWDFQPPLCKDVNECADGAHPPCHASARCRNTKGGFQCLCADPYELGDDGRTCVDSGRLPRVTWISMSLAALLIGGFAGLTSTVICRWTRTGTKSTLPISETGGGTPELRCGKHQAVGTSPQRAAAQDSEQESAGMEGRDTHRLPRAL

SEQ ID NO: 34104 - protein, 611 aa, Homo sapiens
MRALAVLSVTLVMACTEAFFPFISRGKELLWGKPEESRVSSVLEESKRLVDTAMYATMQRNLKKRGILSPAQLLSFSKLPEPTSGVIARAAEIMETSIQAMKRKVNLKTQQSQHPTDALSEDLLSIIANMSGCLPYMLPPKCPNTCLANKYRPITGACNNRDHPRWGASNTALARWLPPVYEDGFSQPRGWNPGFLYNGFPLPPVREVTRHVIQVSNEVVTDDDRYSDLLMAWGQYIDHDIAFTPQSTSKAAFGGGADCQMTCENQNPCFPIQLPEEARPAAGTACLPFYRSSAACGTGDQGALFGNLSTANPRQQMNGLTSFLDASTVYGSSPALERQLRNWTSAEGLLRVHARLRDSGRAYLPFVPPRAPAACAPEPGIPGETRGPCFLAGDGRASEVPSLTALHTLWLREHNRLAAALKALNAHWSADAVYQEARKVVGALHQIITLRDYIPRILGPEAFQQYVGPYEGYDSTANPTVSNVFSTAAFRFGHATIHPLVRRLDASFQEHPDLPGLWLHQAFFSPWTLLRGGYNEWREFCGLPRLETPADLSTAIASRSVADKILDLYKHPDNIDVWLGGLAENFLPRARTGPLFACLIGKQMKALRDGD

SEQ ID NO: 34105 - protein, 872 aa, Homo sapiens
MRALAVLSVTLVMACTEAFFPFISRGKELLWGKPEESRVSSVLEESKRLVDTAMYATMQRNLKKRGILSPAQLLSFSKLPEPTSGVIARAAEIMETSIQAMKRKVNLKTQQSQHPTDALSEDLLSIIANMSGCLPYMLPPKCPNTCLANKYRPITGACNNRDHPRWGASNTALARWLPPVYEDGFSQPRGWNPGFLYNGFPLPPVREVTRHVIQVSNEVVTDDDRYSDLLMAWGQYIDHDIAFTPQSTSKAAFGGGADCQMTCENQNPCFPIQLPEEARPAAGTACLPFYRSSAACGTGDQGALFGNLSTANPRQQMNGLTSFLDASTVYGSSPALERQLRNWTSAEGLLRVHARLRDSGRAYLPFVPPRAPAACAPEPGIPGETRGPCFLAGDGRASEVPSLTALHTLWLREHNRLAAALKALNAHWSADAVYQEARKVVGALHQIITLRDYIPRILGPEAFQQYVGPYEGYDSTANPTVSNVFSTAAFRFGHATIHPLVRRLDASFQEHPDLPGLWLHQAFFSPWTLLRGGYNEWREFCGLPRLETPADLSTAIASRSVADKILDLYKHPDNIDVWLGGLAENFLPRARTGPLFACLIGKQMKALRDGDWFWWENSHVFTDAQRRELEKHSLSRVICDNTGLTRVPMDAFQVGKFPEDFESCDSITGMNLEAWRETFPQDDKCGFPESVENGDFVHCEESGRRVLVYSCRHGYELQGREQLTCTQEGWDFQPPLCKDVNECADGAHPPCHASARCRNTKGGFQCLCADPYELGDDGRTCVDSGRLPRVTWISMSLAALLIGGFAGLTSTVICRWRVLGWKAGILTGCREPSEGKVAGHCRTASCSQNHRTTLFQTQANRKSAGRLFSQHG

SEQ ID NO: 34106 - protein, 832 aa, Homo sapiens
MRALAVLSVTLVMACTEAFFPFISRGKELLWGKPEESRVSSVLEESKRLVDTAMYATMQRNLKKRGILSPAQLLSFSKLPEPTSGVIARAAEIMETSIQAMKRKVNLKTQQSQHPTDALSEDLLSIIANMSGCLPYMLPPKCPNTCLANKYRPITGACNNRDHPRWGASNTALARWLPPVYEDGFSQPRGWNPGFLYNGFPLPPVREVTRHVIQVSNEVVTDDDRYSDLLMAWGQYIDHDIAFTPQSTSKAAFGGGADCQMTCENQNPCFPIQLPEEARPAAGTACLPFYRSSAACGTGDQGALFGNLSTANPRQQMNGLTSFLDASTVYGSSPALERQLRNWTSAEGLLRVHARLRDSGRAYLPFVPPRAPAACAPEPGIPGETRGPCFLAGDGRASEVPSLTALHTLWLREHNRLAAALKALNAHWSADAVYQEARKVVGALHQIITLRDYIPRILGPEAFQQYVGPYEGYDSTANPTVSNVFSTAAFRFGHATIHPLVRRLDASFQEHPDLPGLWLHQAFFSPWTLLRGGYNEWREFCGLPRLETPADLSTAIASRSVADKILDLYKHPDNIDVWLGGLAENFLPRARTGPLFACLIGKQMKALRDGDWFWWENSHVFTDAQRRELEKHSLSRVICDNTGLTRVPMDAFQVGKFPEDFESCDSITGMNLEAWRETFPQDDKCGFPESVENGDFVHCEESGRRVLVYSCRHGYELQGREQLTCTQEGWDFQPPLCKDSGRLPRVTWISMSLAALLIGGFAGLTSTVICRWTRTGTKSTLPISETGGGTPELRCGKHQAVGTSPQRAAAQDSEQESAGMEGRDTHRLPRAL

SEQ ID NO: 34107 - protein, 195 aa, Homo sapiens
MAAEDVVATGADPSDLESGGLLHEIFTSPLNLLLLGLCIFLLYKIVRGDQPAASGDSDDDEPPPLPRLKRRDFTPAELRRFDGVQDPRILMAINGKVFDVTKGRKFYGPEGPYGVFAGRDASRGLATFCLDKEALKDEYDDLSDLTAAQQETLSDWESQFTFKYHHVGKLLKEGEEPTVYSDEEEPKDESARKND

SEQ ID NO: 34108 - protein, 143 aa, Homo sapiens
MAAEDVVATGADPSDLESGGLLHEIFTSPLNLLLLGLCIFLLYKIVRGDQPAASGDSDDDEPPPLPRLKRRDFTPAELRRFDGVQDPRILMAINGKVFDVTKGRKFYGPVKYHHVGKLLKEGEEPTVYSDEEEPKDESARKND

SEQ ID NO: 34109 - protein, 498 aa, Homo sapiens
MAAAAGPGAALSPRPCDSDPATPGAQSPKDDNEDNSNDGTQPSKRRRMGSGDSSRSCETSSQDLGFSYYPAENLIEYKWPPDETGEYYMLQEQVSEYLGVTSFKRKYPDLERRDLSHKEKLYLRELNVITETQCTLGLTALRSDEVIDLMIKEYPAKHAEYSVILQEKERQRITDHYKEYSQMQQQNTQKVEASKVPEYIKKAAKKAAEFNSNLNRERMEERRAYFDLQTHVIQVPQGKYKVLPTERTKVSSYPVALIPGQFQEYYKRYSPDELRYLPLNTALYEPPLDPELPALDSDGDSDDGEDGRGDEKRKNKGTSDSSSGNVSEGESPPDSQEDSFQGRQKSKDKAATPRKDGPKRSVLSKSVPGYKPKVIPNAICGICLKGKESNKKGKAESLIHCSQCENSGHPSCLDMTMELVSMIKTYPWQCMECKTCIICGQPHHEEEMMFCDMCDRGYHTFCVGLGAIPSGRWICDCCQRAPPTPRKVGRRGKNSKEG

SEQ ID NO: 34110 - protein, 496 aa, Homo sapiens
MAAAAGPGAALSPRPCDSDPATPGAQSPKDDNEDNSNDGTQPSKRRRMGSGDSSRSCETSSQDLGFSYYPAENLIEYKWPPDETGEYYMLQEQVSEYLGVTSFKRKYPERRDLSHKEKLYLRELNVITETQCTLGLTALRSDEVIDLMIKEYPAKHAEYSVILQEKERQRITDHYKEYSQMQQQNTQKVEASKVPEYIKKAAKKAAEFNSNLNRERMEERRAYFDLQTHVIQVPQGKYKVLPTERTKVSSYPVALIPGQFQEYYKRYSPDELRYLPLNTALYEPPLDPELPALDSDGDSDDGEDGRGDEKRKNKGTSDSSSGNVSEGESPPDSQEDSFQGRQKSKDKAATPRKDGPKRSVLSKSVPGYKPKVIPNAICGICLKGKESNKKGKAESLIHCSQCENSGHPSCLDMTMELVSMIKTYPWQCMECKTCIICGQPHHEEEMMFCDMCDRGYHTFCVGLGAIPSGRWICDCCQRAPPTPRKVGRRGKNSKEG

SEQ ID NO: 34111 - protein, 451 aa, Homo sapiens
MGSGDSSRSCETSSQDLGFSYYPAENLIEYKWPPDETGEYYMLQEQVSEYLGVTSFKRKYPDLERRDLSHKEKLYLRELNVITETQCTLGLTALRSDEVIDLMIKEYPAKHAEYSVILQEKERQRITDHYKEYSQMQQQNTQKVEASKVPEYIKKAAKKAAEFNSNLNRERMEERRAYFDLQTHVIQVPQGKYKVLPTERTKVSSYPVALIPGQFQEYYKRYSPDELRYLPLNTALYEPPLDPELPALDSDGDSDDGEDGRGDEKRKNKGTSDSSSGNVSEGESPPDSQEDSFQGRQKSKDKAATPRKDGPKRSVLSKSVPGYKPKVIPNAICGICLKGKESNKKGKAESLIHCSQCENSGHPSCLDMTMELVSMIKTYPWQCMECKTCIICGQPHHEEEMMFCDMCDRGYHTFCVGLGAIPSGRWICDCCQRAPPTPRKVGRRGKNSKEG

SEQ ID NO: 34112 - protein, 452 aa, Homo sapiens
MSTAVLENPGLGRKLSDFGQETSYIEDNCNQNGAISLIFSLKEEVGALAKVLRLFEENDVNLTHIESRPSRLKKDEYEFFTHLDKRSLPALTNIIKILRHDIGATVHELSRDKKKDTVPWFPRTIQELDRFANQILSYGAELDADHPGFKDPVYRARRKQFADIAYNYRHGQPIPRVEYMEEEKKTWGTVFKTLKSLYKTHACYEYNHIFPLLEKYCGFHEDNIPQLEDVSQFLQTCTGFRLRPVAGLLSSRDFLGGLAFRVFHCTQYIRHGSKPMYTPEPDICHELLGHVPLFSDRSFAQFSQEIGLASLGAPDEYIEKLATIYWFTVEFGLCKQGDSIKAYGAGLLSSFGELQYCLSEKPKLLPLELEKTAIQNYTVTEFQPLYYVAESFNDAKEKVRNFAATIPRPFSVRYDPYTQRIEVLDNTQQLKILADSINSEIGILCSALQKIK

SEQ ID NO: 34113 - protein, 567 aa, Homo sapiens
MADLANEEKPAIAPPVFVFQKDKGQKSPAEQKNLSDSGEEPRGEAEAPHHGTGHPESAGEHALEPPAPAGASASTPPPPAPEAQLPPFPRELAGRSAGGSSPEGGEDSDREDGNYCPPVKRERTSSLTQFPPSQSEERSSGFRLKPPTLIHGQAPSAGLPSQKPKEQQRSVLRPAVLQAPQPKALSQTVPSSGTNGVSLPADCTGAVPAASPDTAAWRSPSEAADEVCALEEKEPQKNESSNASEEEACEKKDPATQQAFVFGQNLRDRVKLINESVDEADMENAGHPSADTPTATNYFLQYISSSLENSTNSADASSNKFVFGQNMSERVLSPPKLNEVSSDANRENAAAESGSESSSQEATPEKESLAESAAAYTKATARKCLLEKVEVITGEEAESNVLQMQCKLFVFDKTSQSWVERGRGLLRLNDMASTDDGTLQSRLVMRTQGSLRLILNTKLWAQMQIDKASEKSIRITAMDTEDQGVKVFLISASSKDTGQLYAALHHRILALRSRVEQEQEAKMPAPEPGAAPSNEEDDSDDDDVLAPSGATAAGAGDEGDGQTTGST

SEQ ID NO: 34114 - protein, 562 aa, Homo sapiens
MADLANEEKPAIAPPVFVFQKDKGQKSPAEQKNLSDSGEEPRGEAEAPHHGTGHPESAGEHALEPPAPAGASASTPPPPAPEAQLPPFPRELAGRSAGGSSPEGGEDSDREDGNYCPPVKRERTSSLTQFPPSQSEERSSGFRLKPPTLIHGQAPSAGLPSQKPKEQQRSVLRPAVLQAPQPKALSQTVPSSGTNGVSLPADCTGAVPAASPDTAAWRSPSEAADEEKEPQKNESSNASEEEACEKKDPATQQAFVFGQNLRDRVKLINESVDEADMENAGHPSADTPTATNYFLQYISSSLENSTNSADASSNKFVFGQNMSERVLSPPKLNEVSSDANRENAAAESGSESSSQEATPEKESLAESAAAYTKATARKCLLEKVEVITGEEAESNVLQMQCKLFVFDKTSQSWVERGRGLLRLNDMASTDDGTLQSRLVMRTQGSLRLILNTKLWAQMQIDKASEKSIRITAMDTEDQGVKVFLISASSKDTGQLYAALHHRILALRSRVEQEQEAKMPAPEPGAAPSNEEDDSDDDDVLAPSGATAAGAGDEGDGQTTGST

SEQ ID NO: 34115 - protein, 499 aa, Homo sapiens
MADLANEEKPAIAPPVFVFQKDKGQKRSAGGSSPEGGEDSDREDGNYCPPVKRERTSSLTQFPPSQSEERSSGFRLKPPTLIHGQAPSAGLPSQKPKEQQRSVLRPAVLQAPQPKALSQTVPSSGTNGVSLPADCTGAVPAASPDTAAWRSPSEAADEVCALEEKEPQKNESSNASEEEACEKKDPATQQAFVFGQNLRDRVKLINESVDEADMENAGHPSADTPTATNYFLQYISSSLENSTNSADASSNKFVFGQNMSERVLSPPKLNEVSSDANRENAAAESGSESSSQEATPEKESLAESAAAYTKATARKCLLEKVEVITGEEAESNVLQMQCKLFVFDKTSQSWVERGRGLLRLNDMASTDDGTLQSRLVMRTQGSLRLILNTKLWAQMQIDKASEKSIRITAMDTEDQGVKVFLISASSKDTGQLYAALHHRILALRSRVEQEQEAKMPAPEPGAAPSNEEDDSDDDDVLAPSGATAAGAGDEGDGQTTGST

SEQ ID NO: 34116 - protein, 105 aa, Homo sapiens; identical to SEQ ID NO: 1686

SEQ ID NO: 34117 - protein, 343 aa, Homo sapiens
MWAAAGGLWRSRAGLRALFRSRDAALFPGCERGLHCSAVSCKNWLKKFASKTKKKVWYESPSLGSHSTYKPSKLEFLMRSTSKKTRKEDHARLRALNGLLYKALTDLLCTPEVSQELYDLNVELSKVSLTPDFSACRAYWKTTLSAEQNAHMEAVLQRSAAHMRHLLMSQQTLRNVPPIVFVQDKGNAALAELDQLLAVADFGPRDERDNFVQNDFRDPDAPQPCGTTEPTTSSSLCGIDHEALNKQIMEYKRRKDKGLGGLVWQGQVAELTTQMKKGRKRAKPRLEQDSSLKSYLSGEEVEDDLDLVGAPEYECYAPDTEELEAERGGGRTEDGHSCGASRE

SEQ ID NO: 34118 - protein, 242 aa, Homo sapiens
MWAAAGGLWRSRAGLRALFRSRDAALFPGCERGLHCSAVSCKNWLKKFASKTKKKVWYESPSLGSHSTYKPSKLEFLMRSTSKKTRKEDHARLRALNGLLYKALTDLLCTPEVSQELYDLNVELSKVSLTPDFSACRAYWKTTLSAEQNAHMEAVLQRSAAHMSLISYWQSQTLDPGMKETTLYKMISGTLMPHNPAAPQSRPQAPVCVGSIMRRSTSRLWSTKGGKIKGSGAWCGRGRWLS

SEQ ID NO: 34119 - protein, 729 aa, Homo sapiens
MSGQPPPPPPQQQQQQQQLSPPPPAALAPVSGVVLPAPPAVSAGSSPAGSPGGGAGGEGLGAAAAALLLHPPPPPPPATAAPPPPPPPPPPPASAAAPASGPPAPPGLAAGPGPAGGAPTPALVAGSSAAAPFPHGDSALNEQEKELQRRLKRLYPAVDEQETPLPRSWSPKDKFSYIGLSQNNLRVHYKGHGKTPKDAASVRATHPIPAACGIYYFEVKIVSKGRDGYMGIGLSAQGVNMNRLPGWDKHSYGYHGDDGHSFCSSGTGQPYGPTFTTGDVIGCCVNLINNTCFYTKNGHSLGIAFTDLPPNLYPTVGLQTPGEVVDANFGQHPFVFDIEDYMREWRTKIQAQIDRFPIGDREGEWQTMIQKMVSSYLVHHGYCATAEAFARSTDQTVLEELASIKNRQRIQKLVLAGRMGEAIETTQQLYPSLLERNPNLLFTLKVRQFIEMVNGTDSEVRCLGGRSPKSQDSYPVSPRPFSSPSMSPSHGMNIHNLASGKGSTAHFSGFESCSNGVISNKAHQSYCHSNKHQSSNLNVPELNSINMSRSQQVNNFTSNDVDMETDHYSNGVGETSSNGFLNGSSKHDHEMEDCDTEMEVDSSQLRRQLCGGSQAAIERMIHFGRELQAMSEQLRRDCGKNTANKKMLKDAFSLLAYSDPWNSPVGNQLDPIQREPVCSALNSAILETHNLPKQPPLALAMGQATQCLGLMARSGIGSCAFATVEDYLH

SEQ ID NO: 34120 - protein, 388 aa, Homo sapiens
MREWRTKIQAQIDRFPIGDREGEWQTMIQKMVSSYLVHHGYCATAEAFARSTDQTVLEELASIKNRQRIQKLVLAGRMGEAIETTQQLYPSLLERNPNLLFTLKVRQFIEMVNGTDSEVRCLGGRSPKSQDSYPVSPRPFSSPSMSPSHGMNIHNLASGKGSTAHFSGFESCSNGVISNKAHQSYCHSNKHQSSNLNVPELNSINMSRSQQVNNFTSNDVDMETDHYSNGVGETSSNGFLNGSSKHDHEMEDCDTEMEVDSSQLRRQLCGGSQAAIERMIHFGRELQAMSEQLRRDCGKNTANKKMLKDAFSLLAYSDPWNSPVGNQLDPIQREPVCSALNSAILETHNLPKQPPLALAMGQATQCLGLMARSGIGSCAFATVEDYLH

SEQ ID NO: 34121 - protein, 500 aa, Homo sapiens
MGIGLSAQGVNMNRLPGWDKHSYGYHGDDGHSFCSSGTGQPYGPTFTTGDVIGCCVNLINNTCFYTKNGHSLGIAFTDLPPNLYPTVGLQTPGEVVDANFGQHPFVFDIEDYMREWRTKIQAQIDRFPIGDREGEWQTMIQKMVSSYLVHHGYCATAEAFARSTDQTVLEELASIKNRQRIQKLVLAGRMGEAIETTQQLYPSLLERNPNLLFTLKVRQFIEMVNGTDSEVRCLGGRSPKSQDSYPVSPRPFSSPSMSPSHGMNIHNLASGKGSTAHFSGFESCSNGVISNKAHQSYCHSNKHQSSNLNVPELNSINMSRSQQVNNFTSNDVDMETDHYSNGVGETSSNGFLNGSSKHDHEMEDCDTEMEVDSSQLRRQLCGGSQAAIERMIHFGRELQAMSEQLRRDCGKNTANKKMLKDAFSLLAYSDPWNSPVGNQLDPIQREPVCSALNSAILETHNLPKQPPLALAMGQATQCLGLMARSGIGSCAFATVEDYLH

SEQ ID NO: 34122 - protein, 547 aa, Homo sapiens
MFYYPNVLQRHTGCFATIWLAATRGSRLVKREYLRVNVVKTCEEILNYVLVRVQPPQPGLPRPRFSLYLSAQLQIGVIRVYSQQCQYLVEDIQHILERLHRAQLQIRIDMETELPSLLLPNHLAMMETLEDAPDPFFGMMSVDPRLPSPFDIPQIRHLLEAAIPERVEEIPPEVPTEPREPERIPVTVLPPEAITILEAEPIRMLEIEGERELPEVSRRELDLLIAEEEEAILLEIPRLPPPAPAEVEGIGEALGPEELRLTGWEPGALLMEVTPPEELRLPAPPSPERRPPVPPPPRRRRRRRLLFWDKETQISPEKFQEQLQTRAHCWECPMVQPPERTIRGPAELFRTPTLSGWLPPELLGLWTHCAQPPPKALRRELPEEAAAEEERRKIEVPSEIEVPREALEPSVPLMVSLEISLEAAEEEKSRISLIPPEERWAWPEVEAPEAPALPVVPELPEVPMEMPLVLPPELELLSLEAVHRAVALELQANREPDFSSLVSPLSPRRMAARVFYLLLVLSAQQILHVKQEKPYGRLLIQPGPRFH

SEQ ID NO: 34123 - protein, 530 aa, Homo sapiens
MFYYPNVLQRHTGCFATIWLAATRGSRLVKREYLRVNVVKTCEEILNYVLVRVQPPQPGLPRPRFSLYLSAQLQIGVIRVYSQQCQYLVEDIQHILERLHRAQLQIRIDMETELPSLLLPNHLAMMETLEDAPDPFFGMMSVDPRLPSPFDIPQIRHLLEAAIPERVEEIPPEVPTEPREPERIPVTVLPPEAITILEAEPIRMLEIEGERELPEVSRRELDLLIAEEEEAILLEIPRLPPPAPAEVEGIGEALGPEELRLTGWEPGALLMRRPPVPPPPRRRRRRRLLFWDKETQISPEKFQEQLQTRAHCWECPMVQPPERTIRGPAELFRTPTLSGWLPPELLGLWTHCAQPPPKALRRELPEEAAAEEERRKIEVPSEIEVPREALEPSVPLMVSLEISLEAAEEEKSRISLIPPEERWAWPEVEAPEAPALPVVPELPEVPMEMPLVLPPELELLSLEAVHRAVALELQANREPDFSSLVSPLSPRRMAARVFYLLLVLSAQQILHVKQEKPYGRLLIQPGPRFH

SEQ ID NO: 34124 - protein, 1075 aa, Homo sapiens
MFYGTHFIMSPPTKSKLKRQSQLLSSMLSRTLSYKYRDLDSTFSSLGASDDPAELSTQLSAPGVLKVFGDSVCTGTHYKSVLATGTSSARELVKEALERYALDPRQAGQYVLCDVVGQAGDAGQRWQARCFRVFGDSEKPLLIQELWKPREGLSRRFELRKRSDVEELAAKEVDTITAGINAQARRLQRSRAKGTPTPALGDARSSPPPRLRRTVSETSLSPVNALPAAAQGPEEPGPDAMRYSLYQSPHLLLLQGYSQQHDSLVYVLNRDRHTVGQRTPSSKPSISLSAPDILPLHCTIRRQPLPDSGQAAGRLVLEPIPGAHISVNFSEVGHRTVVLHHGDLLSLGLYYLLLFKDPAQAQPLPARALARLRAVPQSCRLCGAALGARGAASPTQAALPRRQQLLLEFEPHLEDTLLQRIMTLIEPGGDDHKLTPAFLLCLCIQHSATHFQPGTFGQLLLKIARLIRETVWEKTKELAEKQAQLQEPISLASCAMADLVPDLQPILFWMSNSIELLYFIQQKCPLYMQSMEEQLDITGSKESLFSCTLTASEEAMAVLEEVVLYAFQQCVYYVSKSLYICLPALLECPPFQTERRESWSSAPELPEELRRVVSVYQAALDLLRQLQVHPEVASQMLAYLFFFSGTLLLNQLLDRGPSLSCFHWPRGVQACARLQQLLEWMRSAGFGAAGEHFFQKLSCTLNLLATPRAQLIQMSWTALRAAFPALSPAQLHRLLTHYQLASAMGPMSTWEPGAQDSPEAFRSEDVLESYENPPPIVLPSDGFQVDLEANCLDDSIYQHLLYVRHFLWGLRSRASPGSPGRPGSGASQPVCPEGMHHVVLDGHLEAPSCPLAPRDPGPAAREVAPERTLPLRGAPWAQAPPGRQPSRGGSQAGPPHTDSSCLLTPPSTPLGPEPGDPDWPESGGPCGKALPERQRNGLSGLRGAAPEGDSAALAEESPPAPSSRSSSTEDFCYVFTVELERGPSGLGMGLIDGMHTHLGAPGLYIQTLLPGSPAAADGRLSLGDRILEVNGSSLLGLGYLRAVDLIRHGGKKMRFLVAKSDVETAKKIHFRTPPL

SEQ ID NO: 34125 - protein, 580 aa, Homo sapiens
MADLVPDLQPILFWMSNSIELLYFIQQKCPLYMQSMEEQLDITGSKESLFSCTLTASEEAMAVLEEVVLYAFQQCVYYVSKSLYICLPALLECPPFQTERRESWSSAPELPEELRRVVSVYQAALDLLRQLQVHPEVASQMLAYLFFFSGTLLLNQLLDRGPSLSCFHWPRGVQACARLQQLLEWMRSAGFGAAGEHFFQKLSCTLNLLATPRAQLIQMSWTALRAAFPALSPAQLHRLLTHYQLASAMGPMSTWEPGAQDSPEAFRSEDVLESYENPPPIVLPSDGFQVDLEANCLDDSIYQHLLYVRHFLWGLRSRASPGSPGRPGSGASQPVCPEGMHHVVLDGHLEAPSCPLAPRDPGPAAREVAPERTLPLRGAPWAQAPPGRQPSRGGSQAGPPHTDSSCLLTPPSTPLGPEPGDPDWPESGGPCGKALPERQRNGLSGLRGAAPEGDSAALAEESPPAPSSRSSSTEDFCYVFTVELERGPSGLGMGLIDGMHTHLGAPGLYIQTLLPGSPAAADGRLSLGDRILEVNGSSLLGLGYLRAVDLIRHGGKKMRFLVAKSDVETAKKIHFRTPPL

SEQ ID NO: 34126 - protein, 371 aa, Homo sapiens
MSPRVGPVTVARIPASCVHRAGDSGLNLLAPGFPHRWAGRPGEGGSFSCGHYGHPLSPAEDVLESYENPPPIVLPSDGFQVDLEANCLDDSIYQHLLYVRHFLWGLRSRASPGSPGRPGSGASQPVCPEGMHHVVLDGHLEAPSCPLAPRDPGPAAREVAPERTLPLRGAPWAQAPPGRQPSRGGSQAGPPHTDSSCLLTPPSTPLGPEPGDPDWPESGGPCGKALPERQRNGLSGLRGAAPEGDSAALAEESPPAPSSRSSSTEDFCYVFTVELERGPSGLGMGLIDGMHTHLGAPGLYIQTLLPGSPAAADGRLSLGDRILEVNGSSLLGLGYLRAVDLIRHGGKKMRFLVAKSDVETAKKIHFRTPPL

SEQ ID NO: 34127 - protein, 1073 aa, Homo sapiens
MFYGTHFIMSPPTKSKLKRQSQLLSSMLSRTLSYKYRDLDSTFSSLGASDDPAELSTQLSAPGVLKVFGDSVCTGTHYKSVLATGTSSARELVKEALERYALDPRQAGQYVLCDVVGQAGDAGQRWQARCFRVFGDSEKPLLIQELWKPREGLSRRFELRKRSDVEELAAKEVDTITAGINAQARRLQRSRAKGTPTPALGDARSSPPPRLRRTVSETSLSPVNALPAAAQGPEEPGPDAMRYSLYQSPHLLLLQGYSQQHPGVCAQPGPAHGGPADPSSKPSISLSAPDILPLHCTIRRQPLPDSGQAAGRLVLEPIPGAHISVNFSEVGHRTVVLHHGDLLSLGLYYLLLFKDPAQAQPLPARALARLRAVPQSCRLCGAALGARGAASPTQAALPRRQQLLLEFEPHLEDTLLQRIMTLIEPGGDDHKLTPAFLLCLCIQHSATHFQPGTFGQLLLKIARLIRETVWEKTKELAEKQAQLQEPISLASCAMADLVPDLQPILFWMSNSIELLYFIQQKCPLYMQSMEEQLDITGSKESLFSCTLTASEEAMAVLEEVVLYAFQQCVYYVSKSLYICLPALLECPPFQTERRESWSSAPELPEELRRVVSVYQAALDLLRQLQVHPEVASQMLAYLFFFSGTLLLNQLLDRGPSLSCFHWPRGVQACARLQQLLEWMRSAGFGAAGEHFFQKLSCTLNLLATPRAQLIQMSWTALRAAFPALSPAQLHRLLTHYQLASAMGPMSTWEPGAQDSPEAFRSEDVLESYENPPPIVLPSDGFQVDLEANCLDDSIYQHLLYVRHFLWGLRSRASPGSPGRPGSGASQPVCPEGMHHVVLDGHLEAPSCPLAPRDPGPAAREVAPERTLPLRGAPWAQAPPGRQPSRGGSQAGPPHTDSSCLLTPPSTPLGPEPGDPDWPESGGPCGKALPERQRNGLSGLRGAAPEGDSAALAEESPPAPSSRSSSTEDFCYVFTVELERGPSGLGMGLIDGMHTHLGAPGLYIQTLLPGSPAAADGRLSLGDRILEVNGSSLLGLGYLRAVDLIRHGGKKMRFLVAKSDVETAKKIHFRTPPL

SEQ ID NO: 34128 - protein, 201 aa, Homo sapiens
MAAAKDTHEDHDTSTENTDESNHDPQFEPIVSLPEQEIKTLEEDEEELFKMRAKLFRFASENDLPEWKERGTGDVKLLKHKEKGAIRLLMRRDKTLKICANHYITPMMELKPNAGSDRAWVWNTHADFADECPKPELLAIRFLNAENAQKFKTKFEECRKEIEEREKKAGSGKNDHAEKVAEKLEALSVKEETKEDAEEKQ

SEQ ID NO: 34129 - protein, 200 aa, Homo sapiens
MAAAKDTHEDHDTSTENTDESNHDPQFEPIVSLPEQEIKTLEEDEEELFKMRAKLFRFASENDLPEWKERGTGDVKLLKHKEKGAIRLLMRRDKTLKICANHYITPMMELKPNAGSDRAWVWNTHADFADECPKPELLAIRFLNAENAQKFKTKFEECRKEIEEREKKGSGKNDHAEKVAEKLEALSVKEETKEDAEEKQ

SEQ ID NO: 34130 - protein, 870 aa, Homo sapiens
MVKEKKKADKKGEKSARSPSSLSDNLDFSKQDGNTTRQEMSPAGVPLLGMQLNEVKPKKDRQNVQQNEDATQYEESILTKLIVESYEGEKVRGLYEGEGFAAFQGGCTYRGMFSEGLMHGQGTYIWADGLKYEGDFVKNVPMNHGVYTWPDGSMYEGEVVNGMRNGFGMFKCSTQPVSYIGHWCNGKRHGKGSIYYNQEGTCWYEGDWVQNIKKGWGIRCYKSGNIYEGQWEDNMRHGEGRMRWLTTNEEYTGRWERGIQNGFGTHTWFLKRIRSSQYPLRNEYIGEFVNGYRHGRGKFYYASGAMYDGEWVSNKKHGMGRLTFKNGRVYEGAFSNDHIAGFPDLEVEFISCLDLSSGVAPRLSRSAELIRKLDGSESHSVLGSSIELDLNLLLDMYPETVQPEEKKQVEYAVLRNITELRRIYSFYSSLGCGHSLDNTFLMTKLHFWRFLKDCKFHHHKLTLADMDRILSANNDIPVEEIHSPFTTILLRTFLNYLLHLAYHIYHEEFQKRSPSLFLCFTKLMTENIRPNAFQIKGNLFREQQRTLYSMSYMNKCWEIYLAYCRPSAAPPHEPTMKMRHFLWMLKDFKMINKELTAATFMEVIAEDNRFIYDGIDSNFEPELVFLEFFEALLSFAFICVTDQMTKSYTNVPADDVSGNKHETIYTILNQDAQNKSPSAVMSHESDAAHSDSARSSSSKLELSPDVNKIRKSEPKIKKSVSHERVSKMNFKLTGKGITFFSSESKKYERPKDDREEEFNTWVNNMYVFFVNTLFHAYKREEAIKEKIRADRLRSTAQAQQRKMEDDELEARLNIFILREEEAKRHDYEVDITVLKEPADVSSSHLILDPPKEDVTVSPSSKTITSKKKKK

SEQ ID NO: 34131 - protein, 105 aa, Homo sapiens; identical to SEQ ID NO: 1686

SEQ ID NO: 34132 - protein, 583 aa, Homo sapiens
MPKPINVRVTTMDAELEFAIQPNTTGKQLFDQVVKTVGLREVWFFGLQYVDSKGYSTWLKLNKKVTQQDVKKENPLQFKFRAKFFPEDVSEELIQEITQRLFFLQVKEAILNDEIYCPPETAVLLASYAVQAKYGDYNKEIHKPGYLANDRLLPQRVLEQHKLTKEQWEERIQNWHEEHRGMLREDSMMEYLKIAQDLEMYGVNYFEIKNKKGTELWLGVDALGLNIYEHDDKLTPKIGFPWSEIRNISFNDKKFVIKPIDKKAPDFVFYAPRLRINKRILALCMGNHELYMRRRKPDTIEVQQMKAQAREEKHQKQLERAQLENEKKKREIAEKEKERIEREKEELMERLKQIEEQTIKAQKELEEQTRKALELDQERKRAKEEAERLEKERRAAEEAKSAIAKQAADQMKNQEQLAAELAEFTAKIALLEEAKKKKEEEATEWQHKAFAAQEDLEKTKEELKTVMSAPPPPPPPPVIPPTENEHDEHDENNAEASAELSNEGVMNHRSEEERVTETQKNERVKKQLQALSSELAQARDETKKTQNDVLHAENVKAGRDKYKTLRQIRQGNTKQRIDEFEAM

SEQ ID NO: 34133 - protein, 257 aa, Homo sapiens
MERLKQIEEQTIKAQKELEEQTRKALELDQERKRAKEEAERLEKERRAAEEAKSAIAKQAADQMKNQEQLAAELAEFTAKIALLEEAKKKKEEEATEWQHKAFAAQEDLEKTKEELKTVMSAPPPPPPPPVIPPTENEHDEHDENNAEASAELSNEGVMNHRSEEERVTETQKNERVKKQLQALSSELAQARDETKKTQNDVLHAENVKAGRDKYKTLRQIRQGNTKQRIDEFEAMWGPKLYALFQMRSCQSSIKQM

SEQ ID NO: 34134 - protein, 200 aa, Homo sapiens
MPKPINVRVTTMDAELEFAIQPNTTGKQLFDQVTQQDVKKENPLQFKFRAKFFPEDVSEELIQEITQRLFFLQVKEAILNDEIYCPPETAVLLASYAVQAKYGDYNKEIHKPGYLANDRLLPQRVLEQHKLTKEQDETKKTQNDVLHAENVKAGRDKYKTLRQIRQGNTKQRIDEFEAMWGPKLYALFQMRSCQSSIKQM

SEQ ID NO: 34135 - protein, 447 aa, Homo sapiens
MLSWNLPFSPIQLANNFLTSVLEQHKLTKEQWEERIQNWHEEHRGMLREDSMMEYLKIAQDLEMYGVNYFEIKNKKGTELWLGVDALGLNIYEHDDKLTPKIGFPWSEIRNISFNDKKFVIKPIDKKAPDFVFYAPRLRINKRILALCMGNHELYMRRRKPDTIEVQQMKAQAREEKHQKQLERAQLENEKKKREIAEKEKERIEREKEELMERLKQIEEQTIKAQKELEEQTRKALELDQERKRAKEEAERLEKERRAAEEAKSAIAKQAADQMKNQEQLAAELAEFTAKIALLEEAKKKKEEEATEWQHKAFAAQEDLEKTKEELKTVMSAPPPPPPPPVIPPTENEHDEHDENNAEASAELSNEGVMNHRSEEERVTETQKNERVKKQLQALSSELAQARDETKKTQNDVLHAENVKAGRDKYKTLRQIRQGNTKQRIDEFEAM

SEQ ID NO: 34136 - protein, 604 aa, Homo sapiens
MPKPINVRVTTMDAELEFAIQPNTTGKQLFDQVVKTVGLREVWFFGLQYVDSKGYSTWLKLNKKVTQQDVKKENPLQFKFRAKFFPEDVSEELIQEITQRLFFLQVKEAILNDEIYCPPETAVLLASYAVQAKYGDYNKEIHKPGYLANDRLLPQRVLEQHKLTKEQWEERIQNWHEEHRGMLREDSMMEYLKIAQDLEMYGVNYFEIKNKKGTELWLGVDALGLNIYEHDDKLTPKIGFPWSEIRNISFNDKKFVIKPIDKKAPDFVFYAPRLRINKRILALCMGNHELYMRRRKPDTIEVQQMKAQAREEKHQKQLERAQLENEKKKREIAEKEKERIEREKEELMERLKQIEEQTIKAQKELEEQTRKALELDQERKRAKEEAERLEKERRAAEEAKSAIAKQAADQMKNQEQLAAELAEFTAKIALLEEAKKKKEEEATEWQHKAFAAQEDLEKTKEELKTVMSAPPPPPPPPVIPPTENEHDEHDENNAEASAELSNEGVMNHRSEEERVTETQKNERVKKQLQALSSELAQARDETKKTQNDVLHAENVKAGRDKYKTLRQIRQGNTKQRIDEFEAMWGPKLYALFQMRSCQSSIKQM

SEQ ID NO: 34137 - protein, 870 aa, Homo sapiens
MVKEKKKADKKGEKSARSPSSLSDNLDFSKQDGNTTRQEMSPAGVPLLGMQLNEVKPKKDRQNVQQNEDASQYEESILTKLIVESYEGEKVRGLYEGEGFAAFQGGCTYRGMFSEGLMHGQGTYIWADGLKYEGDFVKNVPMNHGVYTWPDGSMYEGEVVNGMRNGFGMFKCSTQPVSYIGHWCNGKRHGKGSIYYNQEGTCWYEGDWVQNIKKGWGIRCYKSGNIYEGQWEDNMRHGEGRMRWLTTNEEYTGRWERGIQNGFGTHTWFLKRIRSSQYPLRNEYIGEFVNGYRHGRGKFYYASGAMYDGEWVSNKKHGMGRLTFKNGRVYEGAFSNDHIAGFPDLEVEFISCLDLSSGVAPRLSRSAELIRKLDGSESHSVLGSSIELDLNLLLDMYPETVQPEEKKQVEYAVLRNITELRRIYSFYSSLGCGHSLDNTFLMTKLHFWRFLKDCKFHHHKLTLADMDRILSANNDIPVEEIHSPFTTILLRTFLNYLLHLAYHIYHEEFQKRSPSLFLCFTKLMTENIRPNACQIKGNLFREQQRTLYSMSYMNKCWEIYLAYCRPSAAPPHEPTMKMRHFLWMLKDFKMINKELTAATFMEVIAEDNRFIYDGIDSNFEPELVFLEFFEALLSFAFICVTDQMTKSYTNVPADDVSGNKHETIYTILNQDAQNKSPSAVMSHESDAAHSDSARSSSSKLELSPDVNKIRKSEPKIKKSVSHERVSKMNFKLTGKGITFFSSESKKYERPKDDREEEFNTWVNNTYVFFVNTLFHAYKREEAIKEKIRADRLRSTAQAQQRKMEDDELEARLNIFILREEEAKRHDYEVDITVLKEPADVSSSHLILDPPKEDVTVSPSSKTITSKKKKK

SEQ ID NO: 34138 - protein, 280 aa, Homo sapiens
MRHGEGRMRWLTTNEEYTGRWERGIQNGFGTHTWFLKRIRSSQYPLRNEYIGEFVNGYRHGRGKFYYASGAMYDGEWVSNKKHGMGRLTFKNGRVYEGAFSNDHIAGFPDLEVEFISCLDLSSGVAPRLSRSAELIRKLDGSESHSVLGSSIELDLNLLLDMYPETVQPEEKKQVEYAVLRNITELRRIYSFYSSLGCGHSLDNTFLMTKLHFWRFLKDCKFHHHKLTLADMDRILSANNDIPVEEIHSPFTTILLRTFLNYLLHLAYHIYHEEFQQFIP

SEQ ID NO: 34139 - protein, 343 aa, Homo sapiens
MAEQLSPGKAVDQVCTFLFKKPGRKGAAGRRKRPACDPEPGESGSSSDEGCTVVRPEKKRVTHNPMIQKTRDSGKQKAAYGDLSSEEEEENEPESLGVVYKSTRSAKPVGPEDMGATAVYELDTEKERDAQAIFERSQKIQEELRGKEDDKIYRGINNYQKYMKPKDTSMGNASSGMVRKGPIRAPEHLRATVRWDYQPDICKDYKETGFCGFGDSCKFLHDRSDYKHGWQIERELDEGRYGVYEDENYEVGSDDEEIPFKCFICRQSFQNPVVTKCRHYFCESCALQHFRTTPRCYVCDQQTNGVFNPAKELIAKLEKHRATGEGGASDLPEDPDEDAIPIT

SEQ ID NO: 34140 - protein, 322 aa, Homo sapiens
MAAPPSPGRTADQADQVCTFLFKKPGRKGAAGLRKRPACDPEHGESSSSGDEGDTVAQPPRVAPRPRGLHSWQKAAHGDRRGEEAAPESLDVVYRSTRSAKPVGPEDMGATADFEQDTEKEHHTPTILKCSQRVQEALRGREHDHIYRGIHSYLRYLKPKDTSMGNSSSGMARKGPIRAPGHLRATVRWDYQPDICKDYKETGFCGFGDSCKFLHDRSDYKLGWEIERELEEGRYCICEDENHEVGSEEEEIPFRCFICRQAFQNPVVTKCRHYFCESCALEHFRATPRCYICDQPTGGIFNPAKELMAKLQKLQAAEGKKR

SEQ ID NO: 34141 - protein, 422 aa, Homo sapiens
MLDLEVVPERSLGNEQWEFTLGMPLAQAVAILQKHCRIIKNVQVLYSEQSPLSHDLILNLTQDGIKLMFDAFNQRLKVIEVCDLTKVKLKYCGVHFNSQAIAPTIEQIDQSFGATHPGVYNSAEQLFHLNFRGLSFSFQLDSWTEAPKYEPNFAHGLASLQIPHGATVKRMYIYSGNSLQDTKAPMMPLSCFLGNVYAESVDVLRDGTGPAGLRLRLLAAGCGPGLLADAKMRVFERSVYFGDSCQDVLSMLGSPHKVFYKSEDKMKIHSPSPHKQVPSKCNDYFFNYFTLGVDILFDANTHKVKKFVLHTNYPGHYNFNIYHRCEFKIPLAIKKENADGQTETCTTYSKWDNIQELLGHPVEKPVVLHRSSSPNNTNPFGSTFCFGLQRMIFEVMQNNHIASVTLYGPPRPGSHLRTAELP

SEQ ID NO: 34142 - protein, 258 aa, Homo sapiens
MPLAQAVAILQKHCRIIKNVQVLYSEQSPLSHDLILNLTQDGIKLMFDAFNQRLKVIEVCDLTKVKLKYCGVHFNSQAIAPTIEQIDQSFGATHPGGKPSPSDSSGHQWQFIAINLPGSAIPPHFLESGSHRIVGLVLGCEGNILPLVFNLVGQFRNKPQGRCCQSLLPARLVYVSHFRCQSTMLFSSPPPPTVYNSAEQLFHLNFRGLSFSFQLDSWTEAPKYEPNFAHGLASLQIPHGATVKRMYIYSGNSLQDTK

SEQ ID NO: 34143 - protein, 523 aa, Homo sapiens
MANVGLQFQASAGDSDPQSRPLLLLGQLHHLHRVPWSHVRGKLQPRVTEELWQAALSTLNPNPTDSCPLYLNYATVAALPCRVSRHNSPSAAHFITRLVRTCLPPGAHRCIVMVCEQPEVFASACALARAFPLFTHRSGASRRLEKKTVTVEFFLVGQDNGPVEVSTLQCLANATDGVRLAARIVDTPCNEMNTDTFLEEINKVGKELGIIPTIIRDEELKTRGFGGIYGVGKAALHPPALAVLSHTPDGATQTIAWVGKGIVYDTGGLSIKGKTTMPGMKRDCGGAAAVLGAFRAAIKQGFKDNLHAVFCLAENSVGPNATRPDDIHLLYSGKTVEINNTDAEGRLVLADGVSYACKDLGADIILDMATLTGAQGIATGKYHAAVLTNSAEWEAACVKAGRKCGDLVHPLVYCPELHFSEFTSAVADMKNSVADRDNSPSSCAGLFIASHIGFDWPGVWVHLDIAAPVHAGERATGFGVALLLALFGRASEDPLLNLVSPLGCEVDVEEGDLGRDSKRRRLV

SEQ ID NO: 34144 - protein, 412 aa, Homo sapiens
MANVGLQFQASAGDSDPQSRPLLLLGQLHHLHRVPWSHVRGKLQPRVTEELWQAALSTLNPNPTDSCPLYLNYATVAALPCRVSRHNSPSAAHFITRLVRTCLPPGAHRCIVMVCEQPEVFASACALARAFPLFTHRSGASRRLEKKTVTVEFFLVGQDNGPVEVSTLQCLANATDGVRLAARIVDTPCNEMNTDTFLEEINKVGKELGIIPTIIRDEELKTRGFGGIYGVGKAALHPPALAVLSHTPDGATQTIAWVGKGIVYDTGGLSIKGKTTMPGMKRDCGGAAAVLGAFRAAIKQGFKDNLHAVFCLAENSVGPNATRPDDIHLLYSGKTVEINNTDAEGRLVLADGVSYACKDLGADIILDMATLTGAQVSAPWIHPLAVVPGNPTPLLTSRWGRQRVGAAVRKFS

SEQ ID NO: 34145 - protein, 393 aa, Homo sapiens
MANVGLQFQASAGDSDPQSRPLLLLGQLHHLHRVPWSHVRGKLQPRVTEELWQAALSTLNPNPTDSCPLYLNYATVAALPCRVSRHNSPSAAHFITRLVRTCLPPGAHRCIVMVCEQPEVFASACALARAFPLFTHRSGASRRLEKKTVTVEFFLVGQDNGPVEVSTLQCLANATDGVRLAARIVDTPCNEMNTDTFLEEINKVGKELGIIPTIIRDEELKTRGFGGIYGVGKAALHPPALAVLSHTPDGATQTIAWVGKGIVYDTGGLSIKGKTTMPGMKRDCGGAAAVLGAFRAAIKQGFKDNLHAVFCLAENSVGPNATRPDDIHLLYSGKYVWPSHSFLPTVGTRDPSRPAMPAHSRHIGRALSVGVPWAAGSLLPGGLGSFGSRRTSR

SEQ ID NO: 34146 - protein, 495 aa, Homo sapiens
MELHGGNRGGYQPKALEQSGCWLWQAALSTLNPNPTDSCPLYLNYATVAALPCRVSRHNSPSAAHFITRLVRTCLPPGAHRCIVMVCEQPEVFASACALARAFPLFTHRSGASRRLEKKTVTVEFFLVGQDNGPVEVSTLQCLANATDGVRLAARIVDTPCNEMNTDTFLEEINKVGKELGIIPTIIRDEELKTRGFGGIYGVGKAALHPPALAVLSHTPDGATQTIAWVGKGIVYDTGGLSIKGKTTMPGMKRDCGGAAAVLGAFRAAIKQGFKDNLHAVFCLAENSVGPNATRPDDIHLLYSGKTVEINNTDAEGRLVLADGVSYACKDLGADIILDMATLTGAQGIATGKYHAAVLTNSAEWEAACVKAGRKCGDLVHPLVYCPELHFSEFTSAVADMKNSVADRDNSPSSCAGLFIASHIGFDWPGVWVHLDIAAPVHAGERATGFGVALLLALFGRASEDPLLNLVSPLGCEVDVEEGDLGRDSKRRRLV

SEQ ID NO: 34147 - protein, 475 aa, Homo sapiens
MELWQAALSTLNPNPTDSCPLYLNYATVAALPCRVSRHNSPSAAHFITRLVRTCLPPGAHRCIVMVCEQPEVFASACALARAFPLFTHRSGASRRLEKKTVTVEFFLVGQDNGPVEVSTLQCLANATDGVRLAARIVDTPCNEMNTDTFLEEINKVGKELGIIPTIIRDEELKTRGFGGIYGVGKAALHPPALAVLSHTPDGATQTIAWVGKGIVYDTGGLSIKGKTTMPGMKRDCGGAAAVLGAFRAAIKQGFKDNLHAVFCLAENSVGPNATRPDDIHLLYSGKTVEINNTDAEGRLVLADGVSYACKDLGADIILDMATLTGAQGIATGKYHAAVLTNSAEWEAACVKAGRKCGDLVHPLVYCPELHFSEFTSAVADMKNSVADRDNSPSSCAGLFIASHIGFDWPGVWVHLDIAAPVHAGERATGFGVALLLALFGRASEDPLLNLVSPLGCEVDVEEGDLGRDSKRRRLV

SEQ ID NO: 34148 - protein, 656 aa, Homo sapiens
MADNLPTEFDVVIIGTGLPESILAAACSRSGQRVLHIDSRSYYGGNWASFSFSGLLSWLKEYQQNNDIGEESTVVWQDLIHETEEAITLRKKDETIQHTEAFCYASQDMEDNVEEIGALQKNPSLGVSNTFTEVLDSALPEESQLSYFNSDEMPAKHTQKSDTEISLEVTDVEESVEKEKYCGDKTCMHTVSDKDGDKDESKSTVEDKADEPIRNRITYSQIVKEGRRFNIDLVSKLLYSQGLLIDLLIKSDVSRYVEFKNVTRILAFREGKVEQVPCSRADVFNSKELTMVEKRMLMKFLTFCLEYEQHPDEYQAFRQCSFSEYLKTKKLTPNLQHFVLHSIAMTSESSCTTIDGLNATKNFLQCLGRFGNTPFLFPLYGQGEIPQGFCRMCAVFGGIYCLRHKVQCFVVDKESGRCKAIIDHFGQRINAKYFIVEDSYLSEETCSNVQYKQISRAVLITDQSILKTDLDQQTSILIVPPAEPGACAVRVTELCSSTMTCMKDTYLVHLTCSSSKTAREDLESVVKKLFTPYTETEINEEELTKPRLLWALYFNMRDSSGISRSSYNGLPSNVYVCSGPDCGLGNEHAVKQAETLFQEIFPTEEFCPPPPNPEDIIFDGDDKQPEAPGTNNVVMAKLESSEESKNLESPEKHLQN

SEQ ID NO: 34149 - protein, 702 aa, Homo sapiens
MEDPFEEADQPTTEPGMVLDSVEAGDTTPPTKRKSKFSGFGKIFKPWKWRKKKSSDKFKETSEVLERKISMRKPREELVKRGVLLEDPEQGGEDPGKPSDAMLKNGHTTPIGNARSSSPVQVEEEPVRLASLRKAIPEEDLKKRLGSTGSQPNSEAESVPENVPKPPLLPPKRPLSSSHEASEGQAKDATSSGGTARFIISTSITTAPAATTAATSLAKTVNLSVTPSPAPRTLPAAPASTNTTATPSLTHMVPAKQPPIPPPKPAHRNSNPVIAELSQAINSGTLLSKPSPPLPPKRGIPSTSVPTLESAAAITTKTPSDEREKSTCSMGSELLPMISPRSPSPPLPTHIPPEPPRTPPFPAKTFQVVPEIEFPPSLDLHQEIPQQEDQKKEVPKRILDQNFGEPHIPSRLPPLPLHIRIQQALTSPLPMTPILEGSHRAHSLLFENSDSFSEDSSTLGRTRSLPITIEMLKVPDDEEEEEQTCPSTFSEEMTPTSVIPKLPQCLREEEEKESDSDSEGPIQYRDEEDEDESYQSALANKVKRKDTLAMKLNHRPSEPELNLNSWPCKSKEEWNEIRHQIGNTLIRRLSQRPTPEELEQRNILQPKNEADRQAEKREIKRRLTRKLSQRPTVAELLARKILRFNEYVEVTDAQDYDRRADKPWTKLTPADKAAIRKELNEFKSSEMEVHEESKHFTRYHRP

SEQ ID NO: 34150 - protein, 712 aa, Homo sapiens
MGQADVSRPVNPDAVEEADQPTTEPGMVLDSVEAGDTTPPTKRKSKFSGFGKIFKPWKWRKKKSSDKFKETSEVLERKISMRKPREELVKRGVLLEDPEQGGEDPGKPSDAMLKNGHTTPIGNARSSSPVQVEEEPVRLASLRKAIPEEDLKKRLGSTGSQPNSEAESVPENVPKPPLLPPKRPLSSSHEASEGQAKDATSSGGTARFIISTSITTAPAATTAATSLAKTVNLSVTPSPAPRTLPAAPASTNTTATPSLTHMVPAKQPPIPPPKPAHRNSNPVIAELSQAINSGTLLSKPSPPLPPKRGIPSTSVPTLESAAAITTKTPSDEREKSTCSMGSELLPMISPRSPSPPLPTHIPPEPPRTPPFPAKTFQVVPEIEFPPSLDLHQEIPQQEDQKKEVPKRILDQNFGEPHIPSRLPPLPLHIRIQQALTSPLPMTPILEGSHRAHSLLFENSDSFSEDSSTLGRTRSLPITIEMLKVPDDEEEEEQTCPSTFSEEMTPTSVIPKLPQCLREEEEKESDSDSEGPIQYRDEEDEDESYQSALANKVKRKDTLAMKLNHRPSEPELNLNSWPCKSKEEWNEIRHQIGNTLIRRLSQRPTPEELEQRNILQPKNEADRQAEKREIKRRLTRKLSQRPTVAELLARKILRFNEYVEVTDAQDYDRRADKPWTKLTPADKAAIRKELNEFKSSEMEVHEESKHFTRYHRP

SEQ ID NO: 34151 - protein, 686 aa, Homo sapiens
MVLDSVEAGDTTPPTKRKSKFSGFGKIFKPWKWRKKKSSDKFKETSEVLERKISMRKPREELVKRGVLLEDPEQGGEDPGKPSDAMLKNGHTTPIGNARSSSPVQVEEEPVRLASLRKAIPEEDLKKRLGSTGSQPNSEAESVPENVPKPPLLPPKRPLSSSHEASEGQAKDATSSGGTARFIISTSITTAPAATTAATSLAKTVNLSVTPSPAPRTLPAAPASTNTTATPSLTHMVPAKQPPIPPPKPAHRNSNPVIAELSQAINSGTLLSKPSPPLPPKRGIPSTSVPTLESAAAITTKTPSDEREKSTCSMGSELLPMISPRSPSPPLPTHIPPEPPRTPPFPAKTFQVVPEIEFPPSLDLHQEIPQQEDQKKEVPKRILDQNFGEPHIPSRLPPLPLHIRIQQALTSPLPMTPILEGSHRAHSLLFENSDSFSEDSSTLGRTRSLPITIEMLKVPDDEEEEEQTCPSTFSEEMTPTSVIPKLPQCLREEEEKESDSDSEGPIQYRDEEDEDESYQSALANKVKRKDTLAMKLNHRPSEPELNLNSWPCKSKEEWNEIRHQIGNTLIRRLSQRPTPEELEQRNILQPKNEADRQAEKREIKRRLTRKLSQRPTVAELLARKILRFNEYVEVTDAQDYDRRADKPWTKLTPADKAAIRKELNEFKSSEMEVHEESKHFTRYHRP

SEQ ID NO: 34152 - protein, 63 aa, Homo sapiens
MEDPFDFSREPWNSRGSRPAHYRARHGPGQCGSRRHNTSYQKEEQVLRLWQDLQALEMEEKKK

SEQ ID NO: 34153 - protein, 1106 aa, Homo sapiens
MRLPGAMPALALKGELLLLSLLLLLEPQISQGLVVTPPGPELVLNVSSTFVLTCSGSAPVVWERMSQEPPQEMAKAQDGTFSSVLTLTNLTGLDTGEYFCTHNDSRGLETDERKRLYIFVPDPTVGFLPNDAEELFIFLTEITEITIPCRVTDPQLVVTLHEKKGDVALPVPYDHQRGFSGIFEDRSYICKTTIGDREVDSDAYYVYRLQVSSINVSVNAVQTVVRQGENITLMCIVIGNEVVNFEWTYPRKESGRLVEPVTDFLLDMPYHIRSILHIPSAELEDSGTYTCNVTESVNDHQDEKAINITVVESGYVRLLGEVGTLQFAELHRSRTLQVVFEAYPPPTVLWFKDNRTLGDSSAGEIALSTRNVSETRYVSELTLVRVKVAEAGHYTMRAFHEDAEVQLSFQLQINVPVRVLELSESHPDSGEQTVRCRGRGMPQPNIIWSACRDLKRCPRELPPTLLGNSSEEESQLETNVTYWEEEQEFEVVSTLRLQHVDRPLSVRCTLRNAVGQDTQEVIVVPHSLPFKVVVISAILALVVLTIISLIILIMLWQKKPRYEIRWKVIESVSSDGHEYIYVDPMQLPYDSTWELPRDQLVLGRTLGSGAFGQVVEATAHGLSHSQATMKVAVKMLKSTARSSEKQALMSELKIMSHLGPHLNVVNLLGACTKGGPIYIITEYCRYGDLVDYLHRNKHTFLQHHSDKRRPPSAELYSNALPVGLPLPSHVSLTGESDGGYMDMSKDESVDYVPMLDMKGDVKYADIESSNYMAPYDNYVPSAPERTCRATLINESPVLSYMDLVGFSYQVANGMEFLASKNCVHRDLAARNVLICEGKLVKICDFGLARDIMRDSNYISKGSTFLPLKWMAPESIFNSLYTTLSDVWSFGILLWEIFTLGGTPYPELPMNEQFYNAIKRGYRMAQPAHASDEIYEIMQKCWEEKFEIRPPFSQLVLLLERLLGEGYKKKYQQVDEEFLRSDHPAILRSQARLPGFHGLRSPLDTSSVLYTAVQPNEGDNDYIIPLPDPKPEVADEGPLEGSPSLASSTLNEVNTSSTISCDSPLEPQDEPEPEPQLELQVEPEPELEQLPDSGCPAPRAEAEDSFL

SEQ ID NO: 34154 - protein, 336 aa, Homo sapiens
MRLPGAMPALALKGELLLLSLLLLLEPQISQGLVVTPPGPELVLNVSSTFVLTCSGSAPVVWERMSQEPPQEMAKAQDGTFSSVLTLTNLTGLDTGEYFCTHNDSRGLETDERKRLYIFVPDPTVGFLPNDAEELFIFLTEITEITIPCRVTDPQLVVTLHEKKGDVALPVPYDHQRGFSGIFEDRSYICKTTIGDREVDSDAYYVYRLQVSSINVSVNAVQTVVRQGENITLMCIVIGNEVVNFEWTYPRKESGRLVEPVTDFLLDMPYHIRSILHIPSAELEDSGTYTCNVTESVNDHQDEKAINITVRAATCGSWERWAHYNLLSCIGAGHCR

SEQ ID NO: 34155 - protein, 272 aa, Homo sapiens
MAAKVFESIGKFGLALAVAGGVVNSALYNVDAGHRAVIFDRFRGVQDIVVGEGTHFLIPWVQKPIIFDCRSRPRNVPVITGSKDLQNVNITLRILFRPVASQLPRIFTSIGEDYDERVLPSITTEILKSVVARFDAGELITQRELVSRQVSDDLTERAATFGLILDDVSLTHLTFGKEFTEAVEAKQVAQQEAERARFVVEKAEQQKKAAIISAEGDSKAAELIANSLATAGDGLIELRKLEAAEDIAYQLSRSRNITYLPAGQSVLLQLPQ

SEQ ID NO: 34156 - protein, 155 aa, Homo sapiens
MAAKVFESIGKFGLALAVAGGVVNSALYNVDAGHRAVIFDRFRGVQDIVVGEGTHFLIPWVQKPIIFDCRSRPRNVPVITGSKDLQNVNITLRILFRPVASQLPRIFTSIGEDYDERVLPSITTEILKSVVARFDAGELITYLPAGQSVLLQLPQ

SEQ ID NO: 34157 - protein, 1004 aa, Homo sapiens
METESEQNSNSTNGSSSSGGSSRPQIAQMSLYERQAVQALQALQRQPNAAQYFHQFMLQQQLSNAQLHSLAAVQQATIAASRQASSPNTSTTQQQTTTTQASINLATTSAAQLISRSQSVSSPSATTLTQSVLLGNTTSPPLNQSQAQMYLRPQLGNLLQVNRTLGRNVPLASQLILMPNGAVAAVQQEVPSAQSPGVHADADQVQNLAVRNQQASAQGPQMQGSTQKAIPPGASPVSSLSQASSQALAVAQASSGATNQSLNLSQAGGGSGNSIPGSMGPGGGGQAHGGLGQLPSSGMGGGSCPRKGTGVVQPLPAAQTVTVSQGSQTEAESAAAKKAEADGSGQQNVGMNLTRTATPAPSQTLISSATYTQIQPHSLIQQQQQIHLQQKQVVIQQQIAIHHQQQFQHRQSQLLHTATHLQLAQQQQQQQQQQQQQQQPQATTLTAPQPPQVPPTQQVPPSQSQQQAQTLVVQPMLQSSPLSLPPDAAPKPPIPIQSKPPVAPIKPPQLGAAKMSAAQQPPPHIPVQVVGTRQPGTAQAQALGLAQLAAAVPTSRGMPGTVQSGQAHLASSPPSSQAPGALQECPPTLAPGMTLAPVQGTAHVVKGGATTSSPVVAQVPAAFYMQSVHLPGKPQTLAVKRKADSEEERDDVSTLGSMLPAKASPVAESPKVMDEKSSLGEKAESVANVNANTPSSELVALTPAPSVPPPTLAMVSRQMGDSKPPQAIVKPQILTHIIEGFVIQEGAEPFPVGCSQLLKESEKPLQTGLPTGLTENQSGGPLGVDSPSAELDKKANLLKCEYCGKYAPAEQFRGSKRFCSMTCAKRYNVSCSHQFRLKRKKMKEFQEANYARVRRRGPRRSSSDIARAKIQGKCHRGQEDSSRGSDNSSYDEALSPTSPGPLSVRAGHGERDLGNPNTAPPTPELHGINPVFLSSNPSRWSVEEVYEFIASLQGCQEIAEEFRSQEIDGQALLLLKEEHLMSAMNIKLGPALKICAKINVLKET

SEQ ID NO: 34158 - protein, 655 aa, Homo sapiens
MTECFLPPTSSPSEHRRVEHGSGLTRTPSSEEISPTKFPGLYRTGEPSPPHDILHEPPDVVSDDEKDHGKKKGKFKKKEKRTEGYAAFQEDSSGDEAESPSKMKRSKGIHVFKKPSFSKKKEKDFKIKEKPKEEKHKEEKHKEEKHKEKKSKDLTAADVVKQWKEKKKKKKPIQEPEVPQIDVPNLKPIFGIPLADAVERTMMYDGIRLPAVFRECIDYVEKYGMKCEGIYRVSGIKSKVDELKAAYDREESTNLEDYEPNTVASLLKQYLRDLPENLLTKELMPRFEEACGRTTETEKVQEFQRLLKELPECNYLLISWLIVHMDHVIAKELETKMNIQNISIVLSPTVQISNRVLYVFFTHVQELFGNVVLKQVMKPLRWSNMATMPTLPETQAGIKEEIRRQEFLLNCLHRDLQGGIKDLSKEERLWEVQRILTALKRKLREAKRQECETKIAQEIASLSKEDVSKEEMNENEEVINILLAQENEILTEQEELLAMEQFLRRQIASEKEEIERLRAEIAEIQSRQQHGRSETEEYSSESESESEDEEELQIILEDLQRQNEELEIKNNHLNQAIHEEREAIIELRVQLRLLQMQRAKAEQQAQEDEEPEWRGGAVQPPRDGVLEPKAAKEQPKAGKEPAKPSPSRDRKETSI

SEQ ID NO: 34159 - protein, 804 aa, Homo sapiens
MAKSSSLNVRVVEGRALPAKDVSGSSDPYCLVKVDDEVVARTATVWRSLGPFWGEEYTVHLPLDFHQLAFYVLDEDTVGHDDIIGKISLSREAITADPRGIDSWINLSRVDPDAEVQGEICLSVQMLEDGQGRCLRCHVLQARDLAPRDISGTSDPFARVFWGSQSLETSTIKKTRFPHWDEVLELREMPGAPSPLRVELWDWDMVGKNDFLGMVEFSPKTLQQKPPKGWFRLLPFPRAEEDSGGNLGALRVKVRLIEDRVLPSQCYQPLMELLMESVQGPAEEDTASPLALLEELTLGDCRQDLATKLVKLFLGRGLAGRFLDYLTRREVARTMDPNTLFRSNSLASKSMEQFMKLVGMPYLHEVLKPVISRVFEEKKYMELDPCKMDLGRTRRISFKGALSEEQMRETSLGLLTGYLGPIVDAIVGSVGRCPPAMRLAFKQLHRRVEERFPQAEHQDVKYLAISGFLFLRFFAPAILTPKLFDLRDQHADPQTSRSLLLLAKAVQSIGNLGQQLGQGKELWMAPLHPFLLQCVSRVRDFLDRLVDVDGDEAGVPARALFPPSAIVREGYLLKRKEEPAGLATRFAFKKRYVWLSGETLSFSKSPEWQMCHSIPVSHIRAVERVDEGAFQLPHVMQVVTQDGTGALHTTYLQCKNVNELNQWLSALRKASAPNPNKLAACHPGAFRSARWTCCLQAERSAAGCSRTHSAVTLGDWSDPLDPDAEAQTVYRQLLLGRDQLRLKLLEDSNMDTTLEADTGACPEVLARQRAATARLLEVLADLDRAHEEFQQQERGKAALGPLGP

SEQ ID NO: 34160 - protein, 776 aa, Homo sapiens
MAKSSSLNVRVVEGRALPAKDVSGSSDPYCLVKVDDEVVARTATVWRSLGPFWGEEYTVHLPLDFHQLAFYVLDEDTVGHDDIIGKISLSREAITADPRGIDSWINLSRVDPDAEVQGEICLSVQMLEDGQGRCLRCHVLQARDLAPRDISGTSDPFARVFWGSQSLETSTIKKTRFPHWDEVLELREMPGAPSPLRVELWDWDMVGKNDFLGMVEFSPKTLQQKPPKGWFRLLPFPRAEEDSGGNLGALRVKVRLIEDRVLPSQCYQPLMELLMESVQGPAEEDTASPLALLEELTLGDCRQDLATKLVKLFLGRGLAGRFLDYLTRREVARTMDPNTLFRSNSLASKSMEQFMKLVGMPYLHEVLKPVISRVFEEKKYMELDPCKMDLGRTRRISFKGALSEEQMRETSLGLLTGYLGPIVDAIVGSVGRCPPAMRLAFKQLHRRVEERFPQAEHQDVKYLAISGFLFLRFFAPAILTPKLFDLRDQHADPQTSRSLLLLAKAVQSIGNLGQQLGQGKELWMAPLHPFLLQCVSRVRDFLDRLVDVDGDEAGVPARALFPPSAIVREGYLLKRKEEPAGLATRFAFKKRYVWLSGETLSFSKSPEWQVVTQDGTGALHTTYLQCKNVNELNQWLSALRKASAPNPNKLAACHPGAFRSARWTCCLQAERSAAGCSRTHSAVTLGDWSDPLDPDAEAQTVYRQLLLGRDQLRLKLLEDSNMDTTLEADTGACPEVLARQRAATARLLEVLADLDRAHEEFQQQERGKAALGPLGP

SEQ ID NO: 34161 - protein, 806 aa, Homo sapiens
MAKSSSLNVRVVEGRALPAKDVSGSSDPYCLVKVDDEVVARTATVWRSLGPFWGEEYTVHLPLDFHQLAFYVLDEDTVGHDDIIGKISLSREAITADPRGIDSWINLSRVDPDAEVQGEICLSVQMLEDGQGRCLRCHVLQARDLAPRDISGTSDPFARVFWGSQSLETSTIKKTRFPHWDEVLELREMPGAPSPLRVELWDWDMVGKNDFLGMVEFSPKTLQQKPPKGWFRLLPFPRAEEDSGGNLGALRVKVRLIEDRVLPSQCYQPLMELLMESVQGPAEEDTASPLALLEELTLGDCRQDLATKLVKLFLGRGLAGRFLDYLTRREVARTMDPNTLFRSNSLASKSMEQFMKLVGMPYLHEVLKPVISRVFEEKKYMELDPCKMDLGRTRRISFKGALSEEQMRETSLGLLTGYLGPIVDAIVGSVGRCPPAMRLAFKQLHRRVEERFPQAEHQQDVKYLAISGFLFLRFFAPAILTPKLFDLRDQHADPQTSRSLLLLAKAVQSIGNLGQQLGQGKELWMAPLHPFLLQCVSRVRDFLDRLVDVDGDEEAGVPARALFPPSAIVREGYLLKRKEEPAGLATRFAFKKRYVWLSGETLSFSKSPEWQMCHSIPVSHIRAVERVDEGAFQLPHVMQVVTQDGTGALHTTYLQCKNVNELNQWLSALRKASAPNPNKLAACHPGAFRSARWTCCLQAERSAAGCSRTHSAVTLGDWSDPLDPDAEAQTVYRQLLLGRDQLRLKLLEDSNMDTTLEADTGACPEVLARQRAATARLLEVLADLDRAHEEFQQQERGKAALGPLGP

SEQ ID NO: 34162 - protein, 805 aa, Homo sapiens
MAKSSSLNVRVVEGRALPAKDVSGSSDPYCLVKVDDEVVARTATVWRSLGPFWGEEYTVHLPLDFHQLAFYVLDEDTVGHDDIIGKISLSREAITADPRGIDSWINLSRVDPDAEVQGEICLSVQMLEDGQGRCLRCHVLQARDLAPRDISGTSDPFARVFWGSQSLETSTIKKTRFPHWDEVLELREMPGAPSPLRVELWDWDMVGKNDFLGMVEFSPKTLQQKPPKGWFRLLPFPRAEEDSGGNLGALRVKVRLIEDRVLPSQCYQPLMELLMESVQGPAEEDTASPLALLEELTLGDCRQDLATKLVKLFLGRGLAGRFLDYLTRREVARTMDPNTLFRSNSLASKSMEQFMKLVGMPYLHEVLKPVISRVFEEKKYMELDPCKMDLGRTRRISFKGALSEEQMRETSLGLLTGYLGPIVDAIVGSVGRCPPAMRLAFKQLHRRVEERFPQAEHQDVKYLAISGFLFLRFFAPAILTPKLFDLRDQHADPQTSRSLLLLAKAVQSIGNLGQQLGQGKELWMAPLHPFLLQCVSRVRDFLDRLVDVDGDEEAGVPARALFPPSAIVREGYLLKRKEEPAGLATRFAFKKRYVWLSGETLSFSKSPEWQMCHSIPVSHIRAVERVDEGAFQLPHVMQVVTQDGTGALHTTYLQCKNVNELNQWLSALRKASAPNPNKLAACHPGAFRSARWTCCLQAERSAAGCSRTHSAVTLGDWSDPLDPDAEAQTVYRQLLLGRDQLRLKLLEDSNMDTTLEADTGACPEVLARQRAATARLLEVLADLDRAHEEFQQQERGKAALGPLGP

SEQ ID NO: 34163 - protein, 890 aa, Homo sapiens
MKRQSERDSSPSGRGSSSSAKRPREREREAEAGGRRAAHKASGGAKHPVPARARDKPRGSGSGGGGHRDGRGTGDANHRASSGRSSGSGAGGGGRGGKASGDPGASGMSPRASPLPPPPPPPGAEPACPGSSAAAPEYKTLLISSLSPALPAEHLEDRLFHQFKRFGEISLRLSHTPELGRVAYVNFRHPQDAREARQHALARQLLLYDRPLKVEPVYLRGGGGSSRRSSSSSAAASTPPPGPPAPADPLGYLPLHGGYQYKQRSLSPVAAPPLREPRARHAAAAFALDAAAAAAVGLSRERALDYYGLYDDRGRPYGYPAVCEEDLMPEDDQRATRNLFIGNLDHSVSEVELRRAFEKYGIIEEVVIKRPARGQGGAYAFLKFQNLDMAHRAKVAMSGRVIGRNPIKIGYGKANPTTRLWVGGLGPNTSLAALAREFDRFGSIRTIDHVKGDSFAYIQYESLDAAQAACAKMRGFPLGGPDRRLRVDFAKAEETRYPQQYQPSPLPVHYELLTDGYTRHRNLDADLVRDRTPPHLLYSDRDRTFLEGDWTSPSKSSDRRNSLEGYSRSVRSRSGERWGADGDRGLPKPWEERRKRRSLSSDRGRTTHSPYEERSRTKGSGQQSERGSDRTPERSRKENHSSEGTKESSSNSLSNSRHGAEERGHHHHHHEAADSSHGKKARDSERNHRTTEAEPKPLEEPKHETKKLKNLSEYAQTLQLGWNGLLVLKNSCFPTSMHILEGDQGVISSLLKDHTSGSKLTQLKIAQRLRLDQPKLDEVTRRIKQGSPNGYAVLLATQATPSGLGTEGMPTVEPGLQRRLLRNLVSYLKQKQAAGVISLPVGGSKGRDGTGMLYAFPPCDFSQQYLQSALRTLGKLEEEHMVIVIVRDTA

SEQ ID NO: 34164 - protein, 563 aa, Homo sapiens
MPEDDQRATRNLFIGNLDHSVSEVELRRAFEKYGIIEEVVIKRPARGQGGAYAFLKFQNLDMAHRAKVAMSGRVIGRNPIKIGYGKANPTTRLWVGGLGPNTSLAALAREFDRFGSIRTIDHVKGDSFAYIQYESLDAAQAACAKMRGFPLGGPDRRLRVDFAKAEETRYPQQYQPSPLPVHYELLTDGYTRHRNLDADLVRDRTPPHLLYSDRDRTFLEGDWTSPSKSSDRRNSLEGYSRSVRSRSGERWGADGDRGLPKPWEERRKRRSLSSDRGRTTHSPYEERSRTKGSGQQSERGSDRTPERSRKENHSSEGTKESSSNSLSNSRHGAEERGHHHHHHEAADSSHGKKARDSERNHRTTEAEPKPLEEPKHETKKLKNLSEYAQTLQLGWNGLLVLKNSCFPTSMHILEGDQGVISSLLKDHTSGSKLTQLKIAQRLRLDQPKLDEVTRRIKQGSPNGYAVLLATQATPSGLGTEGMPTVEPGLQRRLLRNLVSYLKQKQAAGVISLPVGGSKGRDGTGMLYAFPPCDFSQQYLQSALRTLGKLEEEHMVIVIVRDTA

SEQ ID NO: 34165 - protein, 156 aa, Homo sapiens
MMVLDKEDGVPMLSVQPKGKQKGCAGCNRKIKDRYLLKALDKYWHEDCLKCACCDCRLGEVGSTLYTKANLILCRRDYLRLFGTTGNCAACSKLIPAFEMVMRARDNVYHLDCFACQLCNQRFCVGDKFFLKNNMILCQMDYEEGQLNGTFESQVQ

SEQ ID NO: 34166 - protein, 155 aa, Homo sapiens
MVLDQEDGVPMLSVQPKGKQKGCAGCNRKIKDRYLLKALDKYWHEDCLKCACCDCRLGEVGSTLYTKANLILCRRDYLRLFGTTGNCAACSKLIPAFEMVMRARDNVYHLDCFACQLCNQRFCVGDKFFLKNNMILCQMDYEEGQLNGTFESQVQ

SEQ ID NO: 34167 - protein, 130 aa, Homo sapiens
MAEYGTLLQDLTNNITLEDLEQLKSACKEDIPSEKSEEITTGSAWFSFLESHNKLDKDNLSYIEHIFEISRRPDLLTMVVDYRTRVLKISEEDELDTKLTRIPSAKKYKDIIRQPSEEEIIKLAPPPKKA

SEQ ID NO: 34168 - protein, 151 aa, Homo sapiens
MEDEGNKLCQAPPWPGQTSPVMAEYGTLLQDLTNNITLEDLEQLKSACKEDIPSEKSEEITTGSAWFSFLESHNKLDKDNLSYIEHIFEISRRPDLLTMVVDYRTRVLKISEEDELDTKLTRIPSAKKYKDIIRQPSEEEIIKLAPPPKKA

SEQ ID NO: 34169 - protein, 569 aa, Homo sapiens
MAAAAPVAADDDERRRRPGAALEDSRSQEGANGEAESGELSRLRAELAGALAEMETMKAVAEVSESTKAEAVAAVQRQCQEEVASLQAILKDSISSYEAQITALKQERQQQQQDCEEKERELGRLKQLLSRAYPLDSLEKQMEKAHEDSEKLREIVLPMEKEIEELKAKLLRAEELIQEIQRRPRHAPSLHGSTELLPLSRDPSPPLEPLEELSGDGGPAAEAFAHNCDDSASISSFSLGGGVGSSSSLPQSRQGLSPEQEETASLVSTGTLVPEGIYLPPPGYQLVPDTQWEQLQTEGRQLQKDLESVSRERDELQEGLRRSNEDCAKQMQVLLAQVQNSEQLLRTLQGTVSQAQERVQLQMAELVTTHKCLHHEVKRLNEENQGLRAEQLPSSAPQGSQQEQGEEESLPSSVPELQQLLCCTRQEARARLQAQEHGAERLRIEIVTLREALEEETVARASLEGQLRVQREETEVLEASLCSLRTEMERVQQEQSKAQLPDLLSEQRAKVLRLQAELETSEQVQRDFVRLSQALQVRLERIRQAETLEQVRSIMDEAPLTDVRDIKDT

SEQ ID NO: 34170 - protein, 533 aa, Homo sapiens
MAAAAPVAADDDERRRRPGAALEDSRSQEGANGEAESGELSRLRAELAGALAEMETMKAVAEVSESTKAEAVAAVQRQCQEEVASLQAILKDSISSYEAQITALKQERQQQQQDCEEKERELGRLKQLLSRAYPLDSLEKQMEKAHEDSEKLREIVLPMEKEIEELKAKLLRAEELIQEIQRRPRHAPSLHGSTELLPLSRDPSPPLEPLEELSGDGGPAAEAFAHNCDDSASISSFSLGGGVGSSSSLPQSRQGLSPEQEETASLVSTGTLVPEGIYLPPPGYQLVPDTQWEQLQTEMQVLLAQVQNSEQLLRTLQGTVSQAQERVQLQMAELVTTHKCLHHEVKRLNEENQGLRAEQLPSSAPQGSQQEQGEEESLPSSVPELQQLLCCTRQEARARLQAQEHGAERLRIEIVTLREALEEETVARASLEGQLRVQREETASLCSLRTEMERVQQEQSKAQLPDLLSEQRAKVLRLQAELETSEQVQRDFVRLSQALQVRLERIRQAETLEQVRSIMDEAPLTDVRDIKDT

SEQ ID NO: 34171 - protein, 1234 aa, Homo sapiens
MAGAQPGVHALQLEPPTVVETLRRGSKFIKWDEETSSRNLVTLRVDPNGFFLYWTGPNMEVDTLDISSIRDTRTGRYARLPKDPKIREVLGFGGPDARLEEKLMTVVSGPDPVNTVFLNFMAVQDDTAKVWSEELFKLAMNILAQNASRNTFLRKAYTKLKLQVNQDGRIPVKNILKMFSADKKRVETALESCGLKFNRSESIRPDEFSLEIFERFLNKLCLRPDIDKILLEIGAKGKPYLTLEQLMDFINQKQRDPRLNEVLYPPLRPSQARLLIEKYEPNQQFLERDQMSMEGFSRYLGGEENGILPLEALDLSTDMTQPLSAYFINSSHNTYLTAGQLAGTSSVEMYRQALLWGCRCVELDVWKGRPPEEEPFITHGFTMTTEVPLRDVLEAIAETAFKTSPYPVILSFENHVDSAKQQAKMAEYCRSIFGDALLIEPLDKYPLAPGVPLPSPQDLMGRILVKNKKRHRPSAGGPDSAGRKRPLEQSNSALSESSAATEPSSPQLGSPSSDSCPGLSNGEEVGLEKPSLEPQKSLGDEGLNRGPYVLGPADREDEEEDEEEEEQTDPKKPTTDEGTASSEVNATEEMSTLVNYIEPVKFKSFEAARKRNKCFEMSSFVETKAMEQLTKSPMEFVEYNKQQLSRIYPKGTRVDSSNYMPQLFWNVGCQLVALNFQTLDVAMQLNAGVFEYNGRSGYLLKPEFMRRPDKSFDPFTEVIVDGIVANALRVKVISGQFLSDRKVGIYVEVDMFGLPVDTRRKYRTRTSQGNSFNPVWDEEPFDFPKVVLPTLASLRIAAFEEGGKFVGHRILPVSAIRSGYHYVCLRNEANQPLCLPALLIYTEASDYIPDDHQDYAEALINPIKHVSLMDQRARQLAALIGESEAQAGQETCQDTQSQQLGSQPSSNPTPSPLDASPRRPPGPTTSPASTSLSSPGQRDDLIASILSEVAPTPLDELRGHKALVKLRSRQERDLRELRKKHQRKAVTLTRRLLDGLAQAQAEGRCRLRPGALGGAADVEDTKEGEDEAKRYQEFQNRQVQSLLELREAQVDAEAQRRLEHLRQALQRLREVVLDANTTQFKRLKEMNEREKKELQKILDRKRHNSISEAKMRDKHKKEAELTEINRRHITESVNSIRRLEEAQKQRHDRLVAGQQQVLQQLAEEEPKLLAQLAQECQEQRARLPQEIRRSLLGEMPEGLGDGPLVACASNGHAPGSSGHLSGADSESQEENTQL

SEQ ID NO: 34172 - protein, 1167 aa, Homo sapiens
MAGAQPGVHALQLEPPTVVETLRRGSKFIKWDEEKLMTVVSGPDPVNTVFLNFMAVQDDTAKVWSEELFKLAMNILAQNASRNTFLRKAYTKLKLQVNQDGRIPVKNILKMFSADKKRVETALESCGLKFNRSESIRPDEFSLEIFERFLNKLCLRPDIDKILLEIGAKGKPYLTLEQLMDFINQKQRDPRLNEVLYPPLRPSQARLLIEKYEPNQQFLERDQMSMEGFSRYLGGEENGILPLEALDLSTDMTQPLSAYFINSSHNTYLTAGQLAGTSSVEMYRQALLWGCRCVELDVWKGRPPEEEPFITHGFTMTTEVPLRDVLEAIAETAFKTSPYPVILSFENHVDSAKQQAKMAEYCRSIFGDALLIEPLDKYPLAPGVPLPSPQDLMGRILVKNKKRHRPSAGGPDSAGRKRPLEQSNSALSESSAATEPSSPQLGSPSSDSCPGLSNGEEVGLEKPSLEPQKSLGDEGLNRGPYVLGPADREDEEEDEEEEEQTDPKKPTTDEGTASSEVNATEEMSTLVNYIEPVKFKSFEAARKRNKCFEMSSFVETKAMEQLTKSPMEFVEYNKQQLSRIYPKGTRVDSSNYMPQLFWNVGCQLVALNFQTLDVAMQLNAGVFEYNGRSGYLLKPEFMRRPDKSFDPFTEVIVDGIVANALRVKVISGQFLSDRKVGIYVEVDMFGLPVDTRRKYRTRTSQGNSFNPVWDEEPFDFPKVVLPTLASLRIAAFEEGGKFVGHRILPVSAIRSGYHYVCLRNEANQPLCLPALLIYTEASDYIPDDHQDYAEALINPIKHVSLMDQRARQLAALIGESEAQAGQETCQDTQSQQLGSQPSSNPTPSPLDASPRRPPGPTTSPASTSLSSPGQRDDLIASILSEVAPTPLDELRGHKALVKLRSRQERDLRELRKKHQRKAVTLTRRLLDGLAQAQAEGRCRLRPGALGGAADVEDTKEGEDEAKRYQEFQNRQVQSLLELREAQVDAEAQRRLEHLRQALQRLREVVLDANTTQFKRLKEMNEREKKELQKILDRKRHNSISEAKMRDKHKKEAELTEINRRHITESVNSIRRLEEAQKQRHDRLVAGQQQVLQQLAEEEPKLLAQLAQECQEQRARLPQEIRRSLLGEMPEGLGDGPLVACASNGHAPGSSGHLSGADSESQEENTQL

SEQ ID NO: 34173 - protein, 271 aa, Homo sapiens
MVLIKEFRVVLPCSVQEYQVGQLYSVAEASKNETGGGEGIEVLKNEPYEKDGEKGQYTHKIYHLKSKVPAFVRMIAPEGSLVFHEKAWNAYPYCRTIVTNEYMKDDFFIKIETWHKPDLGTLENVHGLDPNTWKTVEIVHIDIADRSQVEPADYKADEDPALFQSVKTKRGPLGPNWKKELANSPDCPQMCAYKLVTIKFKWWGLQSKVENFIQKQEKRIFTNFHRQLFCWIDKWIDLTMEDIRRMEDETQKELETMRKRGSVRGTSAADV

SEQ ID NO: 34174 - protein, 272 aa, Homo sapiens
MVLIKEFRVVLPCSVQEYQVGQLYSVAEASKNETGGGEGIEVLKNEPYEKDGEKGQYTHKIYHLKSKVPAFVRMIAPEGSLVFHEKAWNAYPYCRTIVTNEYMKDDFFIKIETWHKPDLGTLENVHGLDPNTWKTVEIVHIDIADRSQVEPADYKADEDPALFQSVKTKRGPLGPNWKKELANSPDCPQMCAYKLVTIKFKWWGLQSKVENFIQKQEKRIFTNFHRQLFCWIDKWIDLTMEDIRRMEDETQKELETLRNQGQVRGTSAASDE

SEQ ID NO: 34175 - protein, 273 aa, Homo sapiens
MGDLLMEKCRVVLPCSVQEYQVGQLYSVAEASKNETGGGEGIEVLKNEPYEKDGEKGQYTHKIYHLKSKVPAFVRMIAPEGSLVFHEKAWNAYPYCRTIVTNEYMKDDFFIKIETWHKPDLGTLENVHGLDPNTWKTVEIVHIDIADRSQVEPADYKADEDPALFQSVKTKRGPLGPNWKKELANSPDCPQMCAYKLVTIKFKWWGLQSKVENFIQKQEKRIFTNFHRQLFCWIDKWIDLTMEDIRRMEDETQKELETMRKRGSVRGTSAADV

SEQ ID NO: 34176 - protein, 207 aa, Homo sapiens
MAVFHDMLLQPLGMFLCLSLQLSSATFIRYSSTCFTFDEYYTITLDIKASSHIYESNAVYSVFVPVNDSVYAVVMKTLDENSDSAGLWQRADKNCYSNSTYYVKDQYMTVLEAQWQAPEPENITEVEIQAFTVQIRALPILSTLKLREKLSTLALAAKIPQSSAFKPFFMITPKSIRLEGLANQVFSSPITEAIYILLAFLTSTLLF

SEQ ID NO: 34177 - protein, 364 aa, Homo sapiens [sequence omitted]

SEQ ID NO: 34178 - protein, 287 aa, Homo sapiens
MHRLMGVNSTAAAAAGQPNVSCTCNCKRSLFQSMEITELEFVQIIIIVVVMMVMVVVITCLLSHYKLSARSFISRHSQGRRREDALSSEGCLWPSESTVSGNGIPEPQVYAPPRPTDRLAVPPFAQRERFHRFQPTYPYLQHEIDLPPTISLSDGEEPPPYQGPCTLQLRDPEQQLELNRESVRAPPNRTIFDSDLMDSARLGGPCPPSSNSGISATCYGSGGRMEGPPPTYSEVIGHYPGSSFQHQQSSGPPSLLEGTRLHHTHIAPLESAAIWSKEKDKQKGHPL

SEQ ID NO: 34179 - protein, 252 aa, Homo sapiens
MAELEFVQIIIIVVVMMVMVVVITCLLSHYKLSARSFISRHSQGRRREDALSSEGCLWPSESTVSGNGIPEPQVYAPPRPTDRLAVPPFAQRERFHRFQPTYPYLQHEIDLPPTISLSDGEEPPPYQGPCTLQLRDPEQQLELNRESVRAPPNRTIFDSDLMDSARLGGPCPPSSNSGISATCYGSGGRMEGPPPTYSEVIGHYPGSSFQHQQSSGPPSLLEGTRLHHTHIAPLESAAIWSKEKDKQKGHPL

SEQ ID NO: 34180 - protein, 237 aa, Homo sapiens
MMVMVVVITCLLSHYKLSARSFISRHSQGRRREDALSSEGCLWPSESTVSGNGIPEPQVYAPPRPTDRLAVPPFAQRERFHRFQPTYPYLQHEIDLPPTISLSDGEEPPPYQGPCTLQLRDPEQQLELNRESVRAPPNRTIFDSDLMDSARLGGPCPPSSNSGISATCYGSGGRMEGPPPTYSEVIGHYPGSSFQHQQSSGPPSLLEGTRLHHTHIAPLESAAIWSKEKDKQKGHPL

SEQ ID NO: 34181 - protein, 1357 aa, Homo sapiens
MQTLGSFFGSLPGFSSARNLVANAHSSARARPAADPTGAPAAEAAQPQAQVAAHPEQTAPWTEKELQPSEKQMVSGAKDLVCSKMSRAKDAVSSGVASVVDVAKGVVQGGLDTTRSALTGTKEVVSSGVTGAMDMAKGAVQGGLDTSKAVLTGTKDTVSTGLTGAVNVAKGTVQAGVDTTKTVLTGTKDTVTTGVMGAVNLAKGTVQTGVETSKAVLTGTKDAVSTGLTGAVNVARGSIQTGVDTSKTVLTGTKDTVCSGVTGAMNVAKGTIQTGVDTSKTVLTGTKDTVCSGVTGAMNVAKGTIQTGVDTSKTVLTGTKDTVCSGVTGAMNVAKGTIQTGVDTTKTVLTGTKNTVCSGVTGAVNLAKEAIQGGLDTTKSMVMGTKDTMSTGLTGAANVAKGAMQTGLNTTQNIATGTKDTVCSGVTGAMNLARGTIQTGVDTTKIVLTGTKDTVCSGVTGAANVAKGAVQGGLDTTKSVLTGTKDAVSTGLTGAVNVAKGTVQTGVDTTKTVLTGTKDTVCSGVTSAVNVAKGAVQGGLDTTKSVVIGTKDTMSTGLTGAANVAKGAVQTGVDTAKTVLTGTKDTVTTGLVGAVNVAKGTVQTGMDTTKTVLTGTKDTIYSGVTSAVNVAKGAVQTGLKTTQNIATGTKNTFGSGVTSAVNVAKGAAQTGVDTAKTVLTGTKDTVTTGLMGAVNVAKGTVQTSVDTTKTVLTGTKDTVCSGVTGAANVAKGAIQGGLDTTKSVLTGTKDAVSTGLTGAVKLAKGTVQTGMDTTKTVLTGTKDAVCSGVTGAANVAKGAVQMGVDTAKTVLTGTKDTVCSGVTGAANVAKGAVQTGLKTTQNIATGTKNTLGSGVTGAAKVAKGAVQGGLDTTKSVLTGTKDAVSTGLTGAVNLAKGTVQTGVDTSKTVLTGTKDTVCSGVTGAVNVAKGTVQTGVDTAKTVLSGAKDAVTTGVTGAVNVAKGTVQTGVDASKAVLMGTKDTVFSGVTGAMSMAKGAVQGGLDTTKTVLTGTKDAVSAGLMGSGNVATGATHTGLSTFQNWLPSTPATSWGGLTSSRTTDNGGEQTALSPQEAPFSGISTPPDVLSVGPEPAWEAAATTKGLATDVATFTQGAAPGREDTGLLATTHGPEEAPRLAMLQNELEGLGDIFHPMNAEEQAQLAASQPGPKVLSAEQGSYFVRLGDLGPSFRQRAFEHAVSHLQHGQFQARDTLAQLQDCFRLIEKAQQAPEGQPRLDQGSGASAEDAAVQEERDAGVLSRVCGLLRQLHTAYSGLVSSLQGLPAELQQPVGRARHSLCELYGIVASAGSVEELPAERLVQSREGVHQAWQGLEQLLEGLQHNPPLSWLVGPFALPAGGQ

SEQ ID NO: 34182 - protein, 1423 aa, Homo sapiens
MQTLGSFFGSLPGFSSARNLVANAHSSARARPAADPTGAPAAEAAQPQAQVAAHPEQTAPWTEKELQPSEKQMVSGAKDLVCSKMSRAKDAVSSGVASVVDVAKGVVQGGLDTTRSALTGTKEVVSSGVTGAMDMAKGAVQGGLDTSKAVLTGTKDTVSTGLTGAVNVAKGTVQAGVDTTKTVLTGTKDTVTTGVMGAVNLAKGTVQTGVETSKAVLTGTKDAVSTGLTGAVNVARGSIQTGVDTSKTVLTGTKDTVCSGVTGAMNVAKGTIQTGVDTSKTVLTGTKDTVCSGVTGAMNVAKGTIQTGVDTSKTVLTGTKDTVCSGVTGAMNVAKGTIQTGVDTTKTVLTGTKNTVCSGVTGAVNLAKEAIQGGLDTTKSMVMGTKDTMSTGLTGAANVAKGAMQTGLNTTQNIATGTKDTVCSGVTGAMNLARGTIQTGVDTTKIVLTGTKDTVCSGVTGAANVAKGAVQGGLDTTKSVLTGTKDAVSTGLTGAVNVAKGTVQTGVDTTKTVLTGTKDTVCSGVTSAVNVAKGAVQGGLDTTKSVVIGTKDTMSTGLTGAANVAKGAVQTGVDTAKTVLTGTKDTVTTGLVGAVNVAKGTVQTGMDTTKTVLTGTKDTIYSGVTSAVNVAKGAVQTGLKTTQNIATGTKNTFGSGVTSAVNVAKGAAQTGVDTAKTVLTGTKDTVTTGLMGAVNVAKGTVQTSVDTTKTVLTGTKDTVCSGVTGAANVAKGAVQTGVDTAKTVLTGTKDTVCSGVTGAVNVAKGAVQTGLKTTQNIATGTKNTLGSGVTGAANVAKGAIQGGLDTTKSVLTGTKDAVSTGLTGAVKLAKGTVQTGMDTTKTVLTGTKDAVCSGVTGAANVAKGAVQMGVDTAKTVLTGTKDTVCSGVTGAANVAKGAVQTGLKTTQNIATGTKNTLGSGVTGAAKVAKGAVQGGLDTTKSVLTGTKDAVSTGLTGAVNLAKGTVQTGVDTSKTVLTGTKDTVCSGVTGAVNVAKGTVQTGVDTAKTVLSGAKDAVTTGVTGAVNVAKGTVQTGVDASKAVLMGTKDTVFSGVTGAMSMAKGAVQGGLDTTKTVLTGTKDAVSAGLMGSGNVATGATHTGLSTFQNWLPSTPATSWGGLTSSRTTDNGGEQTALSPQEAPFSGISTPPDVLSVGPEPAWEAAATTKGLATDVATFTQGAAPGREDTGLLATTHGPEEAPRLAMLQNELEGLGDIFHPMNAEEQAQLAASQPGPKVLSAEQGSYFVRLGDLGPSFRQRAFEHAVSHLQHGQFQARDTLAQLQDCFRLIEKAQQAPEGQPRLDQGSGASAEDAAVQEERDAGVLSRVCGLLRQLHTAYSGLVSSLQGLPAELQQPVGRARHSLCELYGIVASAGSVEELPAERLVQSREGVHQAWQGLEQLLEGLQHNPPLSWLVGPFALPAGGQ

SEQ ID NO: 34183 - protein, 801 aa, Homo sapiens
MHHRMNEMNLSPVGMEQLTSSSVSNALPVSGSHLGLAASPTHSAIPAPGLPVAIPNLGPSLSSLPSALSLMLPMGIGDRGVMCGLPERNYTLPPPPYPHLESSYFRTILPGILSYLADRPPPQYIHPNSINVDGNTALSITNNPSALDPYQSNGNVGLEPGIVSIDSRSVNTHGAQSLHPSDGHEVALDTAITMENVSRVTSPISTDGMAEELTMDGVAGEHSQIPNGSRSHEPLSVDSVSNNLAADAVGHGGVIPMHGNGLELPVVMETDHIASRVNGMSDSALSDSIHTVAMSTNSVSVALSTSHNLASLESVSLHEVGLSLEPVAVSSITQEVAMGTGHVDVSSDSLSFVSPSLQMEDSNSNKENMATLFTIWCTLCDRAYPSDCPEHGPVTFVPDTPIESRARLSLPKQLVLRQSIVGAEVGVWTGETIPVRTCFGPLIGQQSHSMEVAEWTDKAVNHIWKIYHNGVLEFCIITTDENECNWMMFVRKARNREEQNLVAYPHDGKIFFCTSQDIPPENELLFYYSRDYAQQIGVPEHPDVHLCNCGKECNSYTEFKAHLTSHIHNHLPTQGHSGSHGPSHSKERKWKCSMCPQAFISPSKLHVHFMGHMGMKPHKCDFCSKAFSDPSNLRTHLKIHTGQKNYRCTLCDKSFTQKAHLESHMVIHTGEKNLKCDYCDKLFMRRQDLKQHVLIHTQERQIKCPKCDKLFLRTNHLKKHLNSHEGKRDYVCEKCTKAYLTKYHLTRHLKTCKGPTSSSSAPEEEEEDDSEEEDLADSVGTEDCRINSAVYSADESLSAHK

SEQ ID NO: 34184 - protein, 403 aa, Homo sapiens
MEEERGSALAAESALEKNVAELTVMDVYDIASLVGHEFERVIDQHGCEAIARLMPKVVRVLEILEVLVSRHHVAPELDELRLELDRLRLERMDRIEKERKHQKELELVEDVWRGEAQDLLSQIAQLQEENKQLMTNLSHKDVNFSEEEFQKHEGMSERERQVMKKLKEVVDKQRDEIRAKDRELGLKNEDVEALQQQQTRLMKINHDLRHRVTVVEAQGKALIEQKVELEADLQTKEQEMGSLRAELGKLRERLQGEHSQNGEEEPETEPVGEESISDAEKVAMDLKDPNRPRFTLQELRDVLHERNELKSKVFLLQEELAYYKSEEMEEENRIPQPPPIAHPRTSPQPESGIKRLFSFFSRDKKRLANTQRNVHIQESFGQWANTHRDDGYTEQGQEALQHL

SEQ ID NO: 34185 - protein, 362 aa, Homo sapiens
MDVYDIASLVGHEFERVIDQHGCEAIARLMPKVVRVLEILEVLVSRHHVAPELDELRLELDRLRLERMDRIEKERKHQKELELVEDVWRGEAQDLLSQIAQLQEENKQLMTNLSHKDVNFSEEEFQKHEGMSERERQVMKKLKEVVDKQRDEIRAKDRELGLKNEDVEALQQQQTRLMKINHDLRHRVTVVEAQGKALIEQKVELEADLQTKEQEMGSLRAELGKLRERLQGEHSQNGEEEPETEPVGEESISDAEKVAMDLKDPNRPRFTLQELRDVLHERNELKSKVFLLQEELAYYKSEEMEEENRIPQPPPIAHPRTSPQPESGIKRLIFTAIMPMVAAGLIIDDPTLQPVRRLVSLV

SEQ ID NO: 34186 - protein, 252 aa, Homo sapiens
MTGMSERERQVMKKLKEVVDKQRDEIRAKDRELGLKNEDVEALQQQQTRLMKINHDLRHRVTVVEAQGKALIEQKVELEADLQTKEQEMGSLRAELGKLRERLQGEHSQNGEEEPETEPVGEESISDAEKVAMDLKDPNRPRFTLQELRDVLHERNELKSKVFLLQEELAYYKSEEMEEENRIPQPPPIAHPRTSPQPESGIKRLFSFFSRDKKRLANTQRNVHIQESFGQWANTHRDDGYTEQGQEALQHL

SEQ ID NO: 34187 - protein, 834 aa, Homo sapiens
MKHTLALLAPLLGLGLGLALSQLAAGATDCKFLGPAEHLTFTPAARARWLAPRVRAPGLLDSLYGTVRRFLSVVQLNPFPSELVKALLNELASVKVNEVVRYEAGYVVCAVIAGLYLLLVPTAGLCFCCCRCHRRCGGRVKTEHKALACERAALMVFLLLTTLLLLIGVVCAFVTNQRTHEQMGPSIEAMPETLLSLWGLVSDVPQELQAVAQQFSLPQEQVSEELDGVGVSIGSAIHTQLRSSVYPLLAAVGSLGQVLQVSVHHLQTLNATVVELQAGQQDLEPAIREHRDRLLELLQEARCQGDCAGALSWARTLELGADFSQVPSVDHVLHQLKGVPEANFSSMVQEENSTFNALPALAAMQTSSVVQELKKAVAQQPEGVRTLAEGFPGLEAASRWAQALQEVEESSRPYLQEVQRYETYRWIVGCVLCSVVLFVVLCNLLGLNLGIWGLSARDDPSHPEAKGEAGARFLMAGVGLSFLFAAPLILLVFATFLVGGNVQTLVCQSWENGELFEFADTPGNLPPSMNLSQLLGLRKNISIHQAYQQCKEGAALWTVLQLNDSYDLEEHLDINQYTNKLRQELQSLKVDTQSLDLLSSAARRDLEALQSSGLQRIHYPDFLVQIQRPVVKTSMEQLAQELQGLAQAQDNSVLGQRLQEEAQGLRNLHQEKVVPQQSLVAKLNLSVRALESSAPNLQLETSDVLANVTYLKGELPAWAARILRNVSECFLAREMGYFSQYVAWVREEVTQRIATCQPLSGALDNSRVILCDMMADPWNAFWFCLAWCTFFLIPSIIFAVKTSKYFRPIRKRLSSTSSEETQLFHIPRVTSLKL

SEQ ID NO: 34188 - protein, 785 aa, Homo sapiens
MKHTLALLAPLLGLGLGLALSQLAAGATDCKFLGPAEHLTFTPAARARWLAPRVRAPGLLDSLYGTVRRFLSVVQLNPFPSELVKALLNELASVKVNEVVRYEAGYVVCAVIAGLYLLLVPTAGLCFCCCRCHRRCGGRVKTEHKALACERAALMVFLLLTTLLLLIGVVCAFVTNQRTHEQMGPSIEAMPETLLSLWGLVSDVPQELQAVAQQFSLPQEQVSEELDGVGVSIGSAIHTQLRSSVYPLLAAVGSLGQVLQVSVHHLQTLNATVVELQAGQQDLEPAIREHRDRLLELLQEARCQGDCAGALSWARTLELGADFSQVPSVDHVLHQLKGVPEANFSSMVQEENSTFNALPALAAMQTSSVVQELKKAVAQQPEGVRTLAEGFPGLEAASRWAQALQEVEESSRPYLQEVQRYETYRWIVGCVLCSVVLFVVLCNLLGLNLGIWGLSARDDPSHPEAKGEAGARFLMAGVGLSFLFAAPLILLVFATFLVGGNVQTLVCQSWENGELFEFADTPGNLPPSMNLSQLLGLRKNISIHQAYQQCKEGAALWTVLQLNDSYDLEEHLDINQIQRPVVKTSMEQLAQELQGLAQAQDNSVLGQRLQEEAQGLRNLHQEKVVPQQSLVAKLNLSVRALESSAPNLQLETSDVLANVTYLKGELPAWAARILRNVSECFLAREMGYFSQYVAWVREEVTQRIATCQPLSGALDNSRVILCDMMADPWNAFWFCLAWCTFFLIPSIIFAVKTSKYFRPIRKRLSSTSSEETQLFHIPRVTSLKL

SEQ ID NO: 34189 - protein, 360 aa, Homo sapiens
MAGVGLSFLFAAPLILLVFATFLVGGNVQTLVCQSWENGELFEFADTPGNLPPSMNLSQLLGLRKNISIHQAYQQCKEGAALWTVLQLNDSYDLEEHLDINQYTNKLRQELQSLKVDTQSLDLLSSAARRDLEALQSSGLQRIHYPDFLVQIQRPVVKTSMEQLAQELQGLAQAQDNSVLGQRLQEEAQGLRNLHQEKVVPQQSLVAKLNLSVRALESSAPNLQLETSDVLANVTYLKGELPAWAARILRNVSECFLAREMGYFSQYVAWVREEVTQRIATCQPLSGALDNSRVILCDMMADPWNAFWFCLAWCTFFLIPSIIFAVKTSKYFRPIRKRLSSTSSEETQLFHIPRVTSLKL

SEQ ID NO: 34190 - protein, 148 aa, Homo sapiens
MWNPNAGQPGPNPYPPNIGCPGGSNPAHPPPINPPFPPGPCPPPPGAPHGNPAFPPGGPPHPVPQPGYPGCQPLGPYPPPYPPPAPGIPPVNPLAPGMVGPAVIVDKKMQKKMKKAHKKMHKHQKHHKYHKHGKHSSSSSSSSSSDSD

SEQ ID NO: 34191 - protein, 98 aa, Homo sapiens
MWNPNAGGPPHPVPQPGYPGCQPLGPYPPPYPPPAPGIPPVNPLAPGMVGPAVIVDKKMQKKMKKAHKKMHKHQKHHKYHKHGKHSSSSSSSSSSDSD

SEQ ID NO: 34192 - protein, 129 aa, Homo sapiens
MSHLQSLLLDTLLGTKHVDSAALIKIQERSLCVASPGFNVTPSDVRTLVNGFAKNPLQARREGLYFKGKDYRCVRADEYSLYAKNENTGVVVVKTHLYLLVATYTEGMYPSICVEATESLGDYLRKKGS

SEQ ID NO: 34193 - protein, 265 aa, Homo sapiens
MPLPVALQTRLAKRGILKHLEPEPEEEIIAEDYDDDPVDYEATRLEGLPPSWYKVFDPSCGLPYYWNADTDLVSWLSPHDPNSVVTKSAKKLRSSNADAEEKLDRSHDKSDRGHDKSDRSHEKLDRGHDKSDRGHDKSDRDRERGYDKVDRERERDRERDRDRGYDKADREEGKERRHHRREELAPYPKSKKAVSRKDEELDPMDPSSYSDAPRGTWSTGLPKRNEAKTGADTTAAGPLFQQRPYPSPGAVLRANAEASRTKQQD

SEQ ID NO: 34194 - protein, 264 aa, Homo sapiens
MPLPVALQTRLAKRGILKHLEPEPEEEIIAEDYDDDPVDYEATRLEGLPPSWYKVFDPSCGLPYYWNADTDLVSWLSPHDPNSVVTKSAKKLRSSNADAEEKLDRSHDKSDRGHDKSDRSHEKLDRGHDKSDRGHDKSDRDRERGYDKVDRERERDRERDRDRGYDKADREEGKERRHHRREELAPYPKSKKVSRKDEELDPMDPSSYSDAPRGTWSTGLPKRNEAKTGADTTAAGPLFQQRPYPSPGAVLRANAEASRTKQQD

SEQ ID NO: 34195 - protein, 224 aa, Homo sapiens
MPLPVALQTRLAKRGILKHLEPEPEEEIIAEDYDDDPVDYEATRLEGLPPSWYKVFDPSCGLPYYWNADTDLVSWLSPHDPNSVVTKSAKKLRSSNADAEEKLDRSHDKSDRGHDKSDRSHEKLDRGHDKSDRGHDKSDRDRERGYDKVDRERERDRERDRDRGYDKADREEGKERRHHRREELAPYPKSKKGKLGRMGLGETNKVQGALREEAFPQKDAWTWG

SEQ ID NO: 34196 - protein, 170 aa, Homo sapiens
MPLPVALQTRLAKRGILKHLEPEPEEEIIAEDYDDDPVDYEATRLEGLPPSWYKVFDPSCGLPYYWNADTDLVSWLSPHDPNSVVTKSAKKLRSSNAAVSRKDEELDPMDPSSYSDAPRGTWSTGLPKRNEAKTGADTTAAGPLFQQRPYPSPGAVLRANAEASRTKQQD

SEQ ID NO: 34197 - protein, 165 aa, Homo sapiens
MPLPVALQTRLAKRGILKHLEPEPEEEIIAEDYDDDPVDYEATRLEGLPPSWYKVFDPSCGLPYYWNADREEGKERRHHRREELAPYPKSKKAVSRKDEELDPMDPSSYSDAPRGTWSTGLPKRNEAKTGADTTAAGPLFQQRPYPSPGAVLRANAEASRTKQQD

SEQ ID NO: 34198 - protein, 149 aa, Homo sapiens
MPLPVALQTRLAKRGILKHLEPEPEEEIIAEDYDDDPVDYEATRLEGLPPSWYKVFDPSCGLPYYWNADTDLVSWLSPHDPNSVVTKSAKKLRSSNADAEEKLDRSHDKSDRGHDKSDRSHEKLDRGHDKSDRGHDKSDRDRERGYDKQ

SEQ ID NO: 34199 - protein, 128 aa, Homo sapiens
MPLPVALQTRLAKRGILKHLEPEPEEEIIAEDYDDDPVDYEATRLEGLPPSWYKVFDPSCGLPYYWNADTDLVSWLSPHDPNSVVTKSAKKLRSSNADLCPQMLKKSWTGAMTSRTGAMTSRTAAMRN

SEQ ID NO: 34200 - protein, 73 aa, Homo sapiens
MPLPVALQTRLAKRGILKHLEPEPEEEIIAEDYDDDPVDYEATRLEGLPPSWYKRAPLLLECRHRPCILALPT

SEQ ID NO: 34201 - protein, 67 aa, Homo sapiens
MPLPVALQTRLAKRGILKHLEPEPEEEIIAEDYDDDPVDYEATRLEGLPPSWYKVFDPSCPGWSAMV

SEQ ID NO: 34202 - protein, 60 aa, Homo sapiens
MPLPVALQTRLAKRGILKHLEPEPEEEIIAEDYDDDPVDYEATRLEGLPPSWYKVFDPSW

SEQ ID NO: 34203 - protein, 386 aa, Homo sapiens
MRAAPLLLARAASLSLGFLFLLFFWLDRSVLAKELKFVTLVFRHGDRSPIDTFPTDPIKESSWPQGFGQLTQLGMEQHYELGEYIRKRYRKFLNESYKHEQVYIRSTDVDRTLMSAMTNLAALFPPEGVSIWNPILLWQPIPVHTVPLSEDQLLYLPFRNCPRFQELESETLKSEEFQKRLHPYKDFIATLGKLSGLHGQDLFGIWSKVYDPLYCESVHNFTLPSWATEDTMTKLRELSELSLLSLYGIHKQKEKSRLQGGVLVNEILNHMKRATQIPSYKKLIMYSAHDTTVSGLQMALDVYNGLLPPYASCHLTELYFEKGEYFVEMYYRNETQHEPYPLMLPGCSPSCPLERFAELVGPVIPQDWSTECMTTNSHQGTEDSTD

SEQ ID NO: 34204 - protein, 418 aa, Homo sapiens
MRAAPLLLARAASLSLGFLFLLFFWLDRSVLAKELKFVTLVFRHGDRSPIDTFPTDPIKESSWPQGFGQLTQLGMEQHYELGEYIRKRYRKFLNESYKHEQVYIRSTDVDRTLMSAMTNLAALFPPEGVSIWNPILLWQPIPVHTVPLSEDQLLYLPFRNCPRFQELESETLKSEEFQKRLHPYKDFIATLGKLSGLHGQDLFGIWSKVYDPLYCESVHNFTLPSWATEDTMTKLRELSELSLLSLYGIHKQKEKSRLQGGVLVNEILNHMKRATQIPSYKKLIMYSAHDTTVSGLQMALDVYNGLLPPYASCHLTELYFEKGEYFVEMYYRNETQHEPYPLMLPGCSPSCPLERFAELVGPVIPQDWSTECMTTNSHQVLKVIFAVAFCLISAVLMVLLFIHIRRGLCWQRESYGNI

SEQ ID NO: 34205 - protein, 353 aa, Homo sapiens
MRAAPLLLARAASLSLGFLFLLFFWLDRSVLAKELKFVTLVFRHGDRSPIDTFPTDPIKESSWPQGFGQLTQLGMEQHYELGEYIRKRYRKFLNESYKHEQVYIRSTDVDRTLMSAMTNLAALFPPEGVSIWNPILLWQPIPVHTVPLSEDQDFIATLGKLSGLHGQDLFGIWSKVYDPLYCESVHNFTLPSWATEDTMTKLRELSELSLLSLYGIHKQKEKSRLQGGVLVNEILNHMKRATQIPSYKKLIMYSAHDTTVSGLQMALDVYNGLLPPYASCHLTELYFEKGEYFVEMYYRNETQHEPYPLMLPGCSPSCPLERFAELVGPVIPQDWSTECMTTNSHQGTEDSTD

SEQ ID NO: 34206 - protein, 325 aa, Homo sapiens
MDMWTALLILQALLLPSLADGATPALRFVAVGDWGGVPNAPFHTAREMANAKEIARTVQILGADFILSLGDNFYFTGVQDINDKRFQETFEDVFSDRSLRKVPWYVLAGNHDHLGNVSAQIAYSKISKRWNFPSPFYRLHFKIPQTNVSVAIFMLDTVTLCGNSDDFLSQQPERPRDVKLARTQLSWLKKQLAAAREDYVLVAGHYPVWSIAEHGPTHCLVKQLRPLLATYGVTAYLCGHDHNLQYLQDENGVGYVLSGAGNFMDPSKRHQRKVPNGYLRFHYGTEDSLGGFAYVEISSKEMTVTYIEASGKSLFKTRLPRRARP

SEQ ID NO: 34207 - protein, 288 aa, Homo sapiens
MAATFFGEVVKAPCRAGTEDEEEEEEGRRETPEDREVRLQLARKREVRLLRRQTKTSLEVSLLEKYPCSKFIIAIGNNAVAFLSSFVMNSGVWEEVGCAKLWNEWCRTTDTTHLSSTEAFCVFYHLKSNPSVFLCQCSCYVAEDQQYQWLEKVFGSCPRKNMQITILTCRHVTDYKTSESTGSLPSPFLRALKTQNFKDSACCPLLEQPNIVHDLPAAVLSYCQVWKIPAILYLCYTDVMKLDLITVEAFKPILSTRSLKGLVKNIPQSTEILKKLMTTNEIQSNIYT

SEQ ID NO: 34208 - protein, 267 aa, Homo sapiens
MAATFFGEVVKAPCRAGTEDEEEEEEGRRETPEDREVRLQLARKREVRLLRRQTKTSLEVSLLEKYPCSKFIIAIGNNAVAFLSSFVMNSGVWEEVGCAKLWNEWCRTTDTTHLSSTEAFCVFYHLKSNPSVFGSCPRKNMQITILTCRHVTDYKTSESTGSLPSPFLRALKTQNFKDSACCPLLEQPNIVHDLPAAVLSYCQVWKIPAILYLCYTDVMKLDLITVEAFKPILSTRSLKGLVKNIPQSTEILKKLMTTNEIQSNIYT

SEQ ID NO: 34209 - protein, 435 aa, Homo sapiens
MGPLSAPPCTQHITWKGLLLTASLLNFWNLPTTAQVIIEAKPPKVSEGKDVLLLVHNLPQNLTGYIWYKGQMTDLYHYITSYVVHGQIIYGPAYSGRETVYSNASLLIQNVTQEDAGSYTLHIIKRGDGTGGVTGYFTVTLYSETPKPSISSSNLNPREVMEAVRLICDPETPDASYLWLLNGQNLPMTHRLQLSKTNRTLYLFGVTKYIAGPYECEIRNPVSASRSDPVTLNLLPKLPMPYITINNLNPREKKDVLAFTCEPKSRNYTYIWWLNGQSLPVSPRVKRPIENRILILPSVTRNETGPYQCEIRDRYGGIRSNPVTLNVLYGPDLPRIYPSFTYYRSGENLDLSCFADSNPPAEYSWTINGKFQLSGQKLFIPQITTNHSGLYACSVRNSATGKEISKSMIVKVSETASPQVTYAGPNTWFQEILLL

SEQ ID NO: 34210 - protein, 424 aa, Homo sapiens
MGPLSAPPCTQHITWKGLLLTASLLNFWNLPTTAQVIIEAKPPKVSEGKDVLLLVHNLPQNLTGYIWYKGQMTDLYHYITSYVVHGQIIYGPAYSGRETVYSNASLLIQNVTQEDAGSYTLHIIKRGDGTGGVTGYFTVTLYSETPKPSISSSNLNPREVMEAVRLICDPETPDASYLWLLNGQNLPMTHRLQLSKTNRTLYLFGVTKYIAGPYECEIRNPVSASRSDPVTLNLLPKLPMPYITINNLNPREKKDVLAFTCEPKSRNYTYIWWLNGQSLPVSPRVKRPIENRILILPSVTRNETGPYQCEIRDRYGGIRSNPVTLNVLYGPDLPRIYPSFTYYRSGENLDLSCFADSNPPAEYSWTINGKFQLSGQKLFIPQITTNHSGLYACSVRNSATGKEISKSMIVKVSGPCHGNQTESH

SEQ ID NO: 34211 - protein, 467 aa, Homo sapiens
MTELPAPLSYFQNAQMSEDNHLSNTVRSQNDNRERQEHNDRRSLGHPEPLSNGRPQGNSRQVVEQDEEEDEELTLKYGAKHVIMLFVPVTLCMVVVVATIKSVSFYTRKDGQLIYTPFTEDTETVGQRALHSILNAAIMISVIVVMTILLVVLYKYRCYKVIHAWLIISSLLLLFFFSFIYLGEVFKTYNVAVDYITVALLIWNFGVVGMISIHWKGPLRLQQAYLIMISALMALVFIKYLPEWTAWLILAVISVYDLVAVLCPKGPLRMLVETAQERNETLFPALIYSSTMVWLVNMAEGDPEAQRRVSKNSKYNAESTERESQDTVAENDDGGFSEEWEAQRDSHLGPHRSTPESRAAVQELSSSILAGEDPEERGVKLGLGDFIFYSVLVGKASATASGDWNTTIACFVAILIGLCLTLLLLAIFKKALPALPISITFGLVFYFATDYLVQPFMDQLAFHQFYI

SEQ ID NO: 34212 - protein, 463 aa, Homo sapiens
MTELPAPLSYFQNAQMSEDNHLSNTNDNRERQEHNDRRSLGHPEPLSNGRPQGNSRQVVEQDEEEDEELTLKYGAKHVIMLFVPVTLCMVVVVATIKSVSFYTRKDGQLIYTPFTEDTETVGQRALHSILNAAIMISVIVVMTILLVVLYKYRCYKVIHAWLIISSLLLLFFFSFIYLGEVFKTYNVAVDYITVALLIWNFGVVGMISIHWKGPLRLQQAYLIMISALMALVFIKYLPEWTAWLILAVISVYDLVAVLCPKGPLRMLVETAQERNETLFPALIYSSTMVWLVNMAEGDPEAQRRVSKNSKYNAESTERESQDTVAENDDGGFSEEWEAQRDSHLGPHRSTPESRAAVQELSSSILAGEDPEERGVKLGLGDFIFYSVLVGKASATASGDWNTTIACFVAILIGLCLTLLLLAIFKKALPALPISITFGLVFYFATDYLVQPFMDQLAFHQFYI

SEQ ID NO: 34213 - protein, 374 aa, Homo sapiens
MTELPAPLSYFQNAQMSEDNHLSNTNDNRERQEHNDRRSLGHPEPLSNGRPQGNSRQVVEQDEEEDEELTLKYGAKHVIMLFVPVTLCMVVVVATIKSVSFYTRKDGQLIYTPFTEDTETVGQRALHSILNAAIMISVIVVMTILLVVLYKYRCYKVIHAWLIISSLLLLFFFSFIYLGEVFKTYNVAVDYITVALLIWNFGVVGMISIHWKGPLRLQQAYLIMISALMALVFIKYLPEWTAWLILAVISVYDLVAVLCPKGPLRMLVETAQERNETLFPALIYSSTMVWLVNMAEGDPEAQRRVSKNSKYNAERACLPPAAINLLSIAPMAPRLFMPKGACRPTAQKGSHKTLLQRMMMAGSVRNGKPRGTVI

SEQ ID NO: 34214 - protein, 184 aa, Homo sapiens
MTELPAPLSYFQNAQMSEDNHLSNTVRSQNDNRERQEHNDRRSLGHPEPLSNGRPQGNSRQVVEQDEEEDEELTLKYGAKHVIMLFVPVTLCMVVVVATIKSVSFYTRKDGQLIYTPFTEDTETVGQRALHSILNAAIMISVIVVMTILLVVLYKYRCYKVSMRHRSLLSTLFFLWLGILVTVT

SEQ ID NO: 34215 - protein, 378 aa, Homo sapiens
MTELPAPLSYFQNAQMSEDNHLSNTVRSQNDNRERQEHNDRRSLGHPEPLSNGRPQGNSRQVVEQDEEEDEELTLKYGAKHVIMLFVPVTLCMVVVVATIKSVSFYTRKDGQLIYTPFTEDTETVGQRALHSILNAAIMISVIVVMTILLVVLYKYRCYKVIHAWLIISSLLLLFFFSFIYLGEVFKTYNVAVDYITVALLIWNFGVVGMISIHWKGPLRLQQAYLIMISALMALVFIKYLPEWTAWLILAVISVYDLVAVLCPKGPLRMLVETAQERNETLFPALIYSSTMVWLVNMAEGDPEAQRRVSKNSKYNAERACLPPAAINLLSIAPMAPRLFMPKGACRPTAQKGSHKTLLQRMMMAGSVRNGKPRGTVI

SEQ ID NO: 34216 - protein, 409 aa, Homo sapiens
MTELPAPLSYFQNAQMSEDNHLSNTVRSQNDNRERQEHNDRRSLGHPEPLSNGRPQGNSRQVVEQDEEEDEELTLKYGAKHVIMLFVPVTLCMVVVVATIKSVSFYTRKDGQLIYTPFTEDTETVGQRALHSILNAAIMISVIVVMTILLVVLYKYRCYKVIHAWLIISSLLLLFFFSFIYLGEVFKTYNVAVDYITVALLIWNFGVVGMISIHWKGPLRLQQAYLIMISALMALVFIKYLPEWTAWLILAVISVYDLVAVLCPKGPLRMLVETAQERNETLFPALIYSSTMVWLVNMAEGDPEAQRRVSKNSKYNAERGVKLGLGDFIFYSVLVGKASATASGDWNTTIACFVAILIGLCLTLLLLAIFKKALPALPISITFGLVFYFATDYLVQPFMDQLAFHQFYI

SEQ ID NO: 34217 - protein, 434 aa, Homo sapiens
MTELPAPLSYFQNAQMSEDNHLSNTVRSQNDNRERQEHNDRRSLGHPEPLSNGRPQGNSRQVVEQDEEEDEELTLKYGAKHVIMLFVPVTLCMVVVVATIKSVSFYTRKDGQLIYTPFTEDTETVGQRALHSILNAAIMISVIVVMTILLVVLYKYRCYKVIHAWLIISSLLLLFFFSFIYLGEVFKTYNVAVDYITVALLIWNFGVVGMISIHWKGPLRLQQAYLIMISALMALVFIKYLPEWTAWLILAVISVYSTMVWLVNMAEGDPEAQRRVSKNSKYNAESTERESQDTVAENDDGGFSEEWEAQRDSHLGPHRSTPESRAAVQELSSSILAGEDPEERGVKLGLGDFIFYSVLVGKASATASGDWNTTIACFVAILIGLCLTLLLLAIFKKALPALPISITFGLVFYFATDYLVQPFMDQLAFHQFYI

SEQ ID NO: 34218 - protein, 102 aa, Homo sapiens
MSEKSVEAAAELSAKDLKEKKEKVEEKASRKERKKEVVEEEENGAEEEEEETAEDGEEEDEGEEEDEEEEEEDDEGPALKRAAEEEDEADPKRQKTENGASA

SEQ ID NO: 34219 - protein, 312 aa, Homo sapiens
MADGDSGSERGGGGGPCGFQPASRGGGEQETQELASKRLDIQNKRFYLDVKQNAKGRFLKIAEVGAGGSKSRLTLSMAVAAEFRDSLGDFIEHYAQLGPSSPEQLAAGAEEGGGPRRALKSEFLVRENRKYYLDLKENQRGRFLRIRQTVNRGGGGFGAGPGPGGLQSGQTIALPAQGLIEFRDALAKLIDDYGGEDDELAGGPGGGAGGPGGGLYGELPEGTSITVDSKRFFFDVGCNKYGVFLRVSEVKPSYRNAITVPFKAWGKFGGAFCRYADEMKEIQERQRDKLYERRGGGSGGGEESEGEEVDED

SEQ ID NO: 34220 - protein, 82 aa, Homo sapiens
MGREFGNLTRMRHVISYSLSPFEQRAYPHVFTKGIPNVLRRIRESFFRVVPQFVVFYLIYTWGTEEFERSKRKNPAAYENDK

SEQ ID NO: 34221 - protein, 306 aa, Homo sapiens
MSLKLQASNVTNKNDPKSINSRVFIGNLNTALVKKSDVETIFSKYGRVAGCSVHKGYAFVQYSNERHARAAVLGENGRVLAGQTLDINMAGEPKPDRPKGLKRAASAIYSGYIFDYDYYRDDFYDRLFDYRGRLSPVPVPRAVPVKRPRVTVPLVRRVKTNVPVKLFARSTAVTTSSAKIKLKSSELQAIKTELTQIKSNIDALLSRLEQIAAEQKANPDGKKKGDGGGAGGGGGGGGSGGGGSGGGGGGGSSRPPAPQENTTSEAGLPQGEARTRDDGDEEGLLTHSEEELEHSQDTDADDGALQ

SEQ ID NO: 34222 - protein, 290 aa, Homo sapiens
MSLKLQASNVTNKNDPKSINSRVFIGNLNTALVKKSDVETIFSKYGRVAGCSVHKGYAFVQYSNERHARAAVLGENGRVLAGQTLDINMAGEPKPDRPKGLKRAASAIYRLFDYRGRLSPVPVPRAVPVKRPRVTVPLVRRVKTNVPVKLFARSTAVTTSSAKIKLKSSELQAIKTELTQIKSNIDALLSRLEQIAAEQKANPDGKKKGDGGGAGGGGGGGGSGGGGSGGGGGGGSSRPPAPQENTTSEAGLPQGEARTRDDGDEEGLLTHSEEELEHSQDTDADDGALQ

SEQ ID NO: 34223 - protein, 200 aa, Homo sapiens
MGNSKSGALSKEILEELQLNTKFSEEELCSWYQSFLKDCPTGRITQQQFQSIYAKFFPDTDPKAYAQHVFRSFDSNLDGTLDFKEYVIALHMTTAGKTNQKLEWAFSLYDVDGNGTISKNEVLEIVMAIFKMITPEDVKLLPDDENTPEKRAEKIWKYFGKNDDDKLTEKEFIEGTLANKEILRLIQFEPQKVKEKMKNA

SEQ ID NO: 34224 - protein, 111 aa, Homo sapiens
MLTPRKAFRTCSKESGLAETESCGQTHTWPRALAVLMGLWWPRDQKAGEEDLRFRERRPGLQATATGSGEHGAFPVHSQGVWASTHWQGTAVCPLQTPPPDAFIRNNKVLS

SEQ ID NO: 34225 - protein, 328 aa, Homo sapiens
MMWRPSVLLLLLLLRHGAQGKPSPDAGPHGQGRVHQAAPLSDAPHDDAHGNFQYDHEAFLGREVAKEFDQLTPEESQARLGRIVDRMDRAGDGDGWVSLAELRAWIAHTQQRHIRDSVSAAWDTYDTDRDGRVGWEELRNATYGHYAPGEEFHDVEDAETYKKMLARDERRFRVADQDGDSMATREELTAFLHPEEFPHMRDIVIAETLEDLDRNKDGYVQVEEYIADLYSAEPGEEEPAWVQTERQQFRDFRDLNKDGHLDGSEVGHWVLPPAQDQPLVEANHLLHESDTDKDGRLSKAEILGNWNMFVGSQATNYGEDLTRHHDEL

SEQ ID NO: 34226 - protein, 174 aa, Homo sapiens
MADVLDLHEAGGEDFAMDEDGDESIHKLKEKAKKRKGRGFGSEEGSRARMREDYDSVEQDGDEPGPQRSVEGWILFVTGVHEEATEEDIHDKFAEYGEIKNIHLNLDRRTGYLKGYTLVEYETYKEAQAAMEGLNGQDLMGQPISVDWCFVRGPPKGKRRGGRRRSRSPDRRRR

SEQ ID NO: 34227 - protein, 173 aa, Homo sapiens
MADVLDLHEAGGEDFAMDEDGDESIHKLKEKAKKRKGRGFGSEGSRARMREDYDSVEQDGDEPGPQRSVEGWILFVTGVHEEATEEDIHDKFAEYGEIKNIHLNLDRRTGYLKGYTLVEYETYKEAQAAMEGLNGQDLMGQPISVDWCFVRGPPKGKRRGGRRRSRSPDRRRR

SEQ ID NO: 34228 - protein, 208 aa, Homo sapiens [sequence omitted]

SEQ ID NO: 34229 - protein, 132 aa, Homo sapiens
MREQYMRTGDGFLIVYSVTDKASFEHVDRFHQLILRVKDRESFPMILVANKVDLMHLRKITREQGKEMATKHNIPYIETSAKDPPLNVDKAFHDLVRVIRQQIPEKSQKKKKKTKWRGDRATGTHKLQCVIL

SEQ ID NO: 34230 - protein, 237 aa, Homo sapiens
MAQPILGHGSLQPASAAGLASLELDSSLDQYVQIRIFKIIVIGDSNVGKTCLTFRFCGGTFPDKTEATIGVDFREKTVEIEGEKIKVQVWDTAGQERFRKSMVEHYYRNVHAVVFVYDVTKMTSFTNLKMWIQECNGHAVPPLVPKVLVGNKCDLREQIQVPSNLALKFADAHNMLLFETSAKDPKESQNVESIFMCLACRLKAQKSLLYRDAERQQGKVQKLEFPQEANSKTSCPC

SEQ ID NO: 34231 - protein, 1068 aa, Homo sapiens
MFEDKPHAEGAAVVAAAGEALQALCQELNLDEGSAAEALDDFTAIRGNYSLEGEVTHWLACSLYVACRKSIIPTVGKGIMEGNCVSLTRILRSAKLSLIQFFSKMKKWMDMSNLPQEFRERIERLERNFEVSTVIFKKYEPIFLDIFQNPYEEPPKLPRSRKQRRIPCSVKDLFNFCWTLFVYTKGNFRMIGDDLVNSYHLLLCCLDLIFANAIMCPNRQDLLNPSFKGLPSDFHTADFTASEEPPCIIAVLCELHDGLLVEAKGIKEHYFKPYISKLFDRKILKGECLLDLSSFTDNSKAVNKEYEEYVLTVGDFDERIFLGADAEEEIGTPRKFTRDTPLGKLTAQANVEYNLQQHFEKKRSFAPSTPLTGRRYLREKEAVITPVASATQSVSRLQSIVAGLKNAPSDQLINIFESCVRNPVENIMKILKGIGETFCQHYTQSTDEQPGSHIDFAVNRLKLAEILYYKILETVMVQETRRLHGMDMSVLLEQDIFHRSLMACCLEIVLFAYSSPRTFPWIIEVLNLQPFYFYKVIEVVIRSEEGLSRDMVKHLNSIEEQILESLAWSHDSALWEALQVSANKVPTCEEVIFPNNFETGNGGNVQGHLPLMPMSPLMHPRVKEVRTDSGSLRRDMQPLSPISVHERYSSPTAGSAKRRLFGEDPPKEMLMDKIITEGTKLKIAPSSSITAENVSILPGQTLLTMATAPVTGTTGHKVTIPLHGVANDAGEITLIPLSMNTNQESKVKSPVSLTAHSLIGASPKQTNLTKAQEVHSTGINRPKRTGSLALFYRKVYHLASVRLRDLCLKLDVSNELRRKIWTCFEFTLVHCPDLMKDRHLDQLLLCAFYIMAKVTKEERTFQEIMKSYRNQPQANSHVYRSVLLKSIPREVVAYNKNINDDFEMIDCDLEDATKTPDCSSGPVKEERGDLIKFYNTIYVGRVKSFALKYDLANQDHMMDAPPLSPFPHIKQQPGSPRRISQQHSIYISPHKNGSGLTPRSALLYKFNGSPSKSLKDINNMIRQGEQRTKKRVIAIDSDAESPAKRVCQENDDVLLKRLQDVVSERANH

SEQ ID NO: 34232 - protein, 1014 aa, Homo sapiens
MFEDKPHAEGAAVVAAAGEALQALCQELNLDEGSAAEALDDFTAIRGNYSLEGEVTHWLACSLYVACRKSIIPTVGKGIMEGNCVSLTRILRSAKLSLIQFFSKMKKWMDMSNLPQEFRERIERLERNFEVSTVIFKKYEPIFLDIFQNPYEEPPKLPRSRKQRRIPCSVKDLFNFCWTLFVYTKGNFRMIGDDLVNSYHLLLCCLDLIFANAIMCPNRQDLLNPSFKGLPSDFHTADFTASEEPPCIIAVLCELHDGLLVEAKGIKEHYFKPYISKLFDRKILKGECLLDLSSFTDNSKAVNKEYEEYVLTVGDFDERIFLGADAEEEIGTPRKFTRDTPLGKLTAQANVEYNLQQHFEKKRSFAPSTPLTGRRYLREKEAVITPVASATQSVSRLQSIVAGLKNAPSDQLINIFESCVRNPVENIMKILKGIGETFCQHYTQSTDEQPGSHIDFAVNRLKLAEILYYKILETVMVQETRRLHGMDMSVLLEQDIFHRSLMACCLEIVLFAYSSPRTFPWIIEVLNLQPFYFYKVIEVVIRSEEGLSRDMVKHLNSIEEQILESLAWSHDSALWEALQVSANKVPTCEEVIFPNNFETGNGGNVQGHLPLMPMSPLMHPRVKEVRTDSGSLRRDMQPLSPISVHERYSSPTAGSAKRRLFGEDPPKEMLMDKIITEGTKLKIAPSSSITAENVSILPGQTLLTMATAPVTGTTGHKVTIPLHGVANDAGEITLIPLSMNTNQESKVKSPVSLTAHSLIGASPKQTNLTKAQEVHSTGINRPKRTGSLALFYRKVYHLASVRLRDLCLKLDVSNELRRKIWTCFEFTLVHCPDLMKDRHLDQLLLCAFYIMAKVTKEERTFQEIMKSYRNQPQANSHVYRSVLLKSIPREVVAYNKNINDDFEMIDCDLEDATKTPDCSSGPVKEERGDLIKFYNTIYVGRVKSFALKYDLANQDHMMDAPPLSPFPHIKQQPGSPRRISQQHSIYISPHKNGSGLTPRSALLYKFNGSPSKVR

SEQ ID NO: 34233 - protein, 218 aa, Homo sapiens
MSQTAMSETYDFLFKFLVIGNAGTGKSCLLHQFIEKKFKDDSNHTIGVEFGSKIINVGGKYVKLQIWDTAGQERFRSVTRSYYRGAAGALLVYDITSRETYNALTNWLTDARMLASQNIVIILCGNKKDLDADREVTFLEASRFAQENELMFLETSALTGENVEEAFVQCARKILNKIESGELDPERMGSGIQYGDAALRQLRSPRRAQAPNAQECGC

SEQ ID NO: 34234 - protein, 203 aa, Homo sapiens
MSMEDYDFLFKIVLIGNAGVGKTCLVRRFTQGLFPPGQGATIGVDFMIKTVEINGEKVKLQIWDTAGQERFRSITQSYYRSANALILTYDITCEESFRCLPEWLREIEQYASNKVITVLVGNKIDLAERREVSQQRAEEFSEAQDMYYLETSAKESDNVEKLFLDLACRLISEARQNTLVNNVSSPLPGEGKSISYLTCCNFN

SEQ ID NO: 34235 - protein, 164 aa, Homo sapiens
MSMEDYDFLFKIVLIGNAGVGKTCLVRRFTQGLFPPGQGATIGVDFMIKTVEINGEKVKLQIWDTAGQERFRSITQSYYRSANALILTYDITCEESFRCLPEWLREIEQYASNKVITVLATRLTWLKGERFPSSELKNSQKLRTCIIWRPQPRNLIMWRNSSLT

SEQ ID NO: 34236 - protein, 409 aa, Homo sapiens
MRFTFPLMAIVLEIAMIVLFGLFVEYETDQTVLEQLNITKPTDMGIFFELYPLFQDVHVMIFVGFGFLMTFLKKYGFSSVGINLLVAALGLQWGTIVQGILQSQGQKFNIGIKNMINADFSAATVLISFGAVLGKTSPTQMLIMTILEIVFFAHNEYLVSEIFKASDIGASMTIHAFGAYFGLAVAGILYRSGLRKGHENEESAYYSDLFAMIGTLFLWMFWPSFNSAIAEPGDKQCRAIVNTYFSLAACVLTAFAFSSLVEHRGKLNMVHIQNATLAGGVAVGTCADMAIHPFGSMIIGSIAGMVSVLGYKFLTPLFTTKLRIHDTCGVHNLHGLPGVVGGLAGIVAVAMGASNTSMAMQAAALGSSIGTAVVGGLMTGLILKLPLWGQPSDQNCYDDSVYWKVPKTR

SEQ ID NO: 34237 - protein, 351 aa, Homo sapiens
MRFTFPLMAIVLEIAMIVLFGLFVEYETDQTVLEQLNITKPTDMGIFFELYPLFQDVHVMIFVGFGFLMTFLKKYGFSSVGINLLVAALGLQWGTIVQGILQSQGQKFNIGIKNMINADFSAATVLISFGAVLGKTSPTQMLIMTILEIVFFAHNEYLVSEIFKASDIGASMTIHAFGAYFGLAVAGILYRSGLRKGHENEESAYYSDLFAMIGTLFLWMFWPSFNSAIAEPGDKQCRAIVNTYFSLAACVLTAFAFSSLVEHRGKLNMVHIQNATLAGGVAVGTCADMAIHPFGSMIIGSIAGMVSVLGYKFLTVYGHAGSCTGFLYRNSSCWRSDDRFNSKVASLGTAI

SEQ ID NO: 34238 - protein, 115 aa, Homo sapiens
MNAPPAFESFLLFEGEKITINKDTKVPKACLFTINKEDHTLGNIIKSQLLKDPQVLFAGYKVPHPLEHKIIIRVQTTPDYSPQEAFTNAITDLISELSLLEERFRTCLLPLRLLP

SEQ ID NO: 34239 - protein, 116 aa, Homo sapiens
MNAPPAFESFLLFEGEKITINKDTKVPKACLFTINKEDHTLGNIIKSRACFPFAFCRDCQFPEASPATLPVQPAELCPRAHQLCAPALKRHLGGEAHPVHLHAGAASRPVQQPQHL

SEQ ID NO: 34240 - protein, 1499 aa, Homo sapiens
MMMARKQDVRIPTYNISVVGLSGTEKEKGQCGIGKSCLCNRFVRPSADEFHLDHTSVLSTSDFGGRVVNNDHFLYWGEVSRSLEDCVECKMHIVEQTEFIDDQTFQPHRSTALQPYIKRAAATKLASAEKLMYFCTDQLGLEQDFEQKQMPDGKLLVDGFLLGIDVSRGMNRNFDDQLKFVSNLYNQLAKTKKPIVVVLTKCDEGVERYIRDAHTFALSKKNLQVVETSARSNVNVDLAFSTLVQLIDKSRGKTKIIPYFEALKQQSQQIATAKDKYEWLVSRIVKNHNENWLSVSRKMQASPEYQDYVYLEGTQKAKKLFLQHIHRLKHEHIERRRKLYLAALPLAFEALIPNLDEIDHLSCIKAKKLLETKPEFLKWFVVLEETPWDATSHIDNMENERIPFDLMDTVPAEQLYEAHLEKLRNERKRVEMRRAFKENLETSPFITPGKPWEEARSFIMNEDFYQWLEESVYMDIYGKHQKQIIDKAKEEFQELLLEYSELFYELELDAKPSKEKMGVIQDVLGEEQRFKALQKLQAERDALILKHIHFVYHPTKETCPSCPACVDAKIEHLISSRFIRPSDRNQKNSLSDPNIDRINLVILGKDGLARELANEIRALCTNDDKYVIDGKMYELSLRPIEGNVRLPVNSFQTPTFQPHGCLCLYNSKESLSYVVESIEKSRESTLGRRDNHLVHLPLTLILVNKRGDTSGETLHSLIQQGQQIASKLQCVFLDPASAGIGYGRNINEKQISQVLKGLLDSKRNLNLVSSTASIKDLADVDLRIVMCLMCGDPFSADDILFPVLQSQTCKSSHCGSNNSVLLELPIGLHKKRIELSVLSYHSSFSIRKSRLVHGYIVFYSAKRKASLAMLRAFLCEVQDIIPIQLVALTDGAVDVLDNDLSREQLTEGEEIAQEIDGRFTSIPCSQPQHKLEIFHPFFKDVVEKKNIIEATHMYDNAAEACSTTEEVFNSPRAGSPLCNSNLQDSEEDIEPSYSLFREDTSLPSLSKDHSKLSMELEGNDGLSFIMSNFESKLNNKVPPPVKPKPPVHFEITKGDLSYLDQGHRDGQRKSVSSSPWLPQDGFDPSDYAEPMDAVVKPRNEEENIYSVPHDSTQGKIITIRNINKAQSNGSGNGSDSEMDTSSLERGRKVSIVSKPVLYRTRCTRLGRFASYRTSFSVGSDDELGPIRKKEEDQASQGYKGDNAVIPYETDEDPRRRNILRSLRRNTKKPKPKPRPSITKATWESNYFGVPLTTVVTPEKPIPIFIERCIEYIEATGLSTEGIYRVSGNKSEMESLQRQFDQDHNLDLAEKDFTVNTVAGAMKSFFSELPDPLVPYNMQIDLVEAHKINDREQKLHALKEVLKKFPKENHEVFKYVISHLNKVSHNNKVNLMTSENLSICFWPTLMRPDFSTMDALTATRTYQTIIELFIQQCPFFFYNRPITEPPGARPSSPSAVASTVPFLTSTPVTSQPSPPQSPPPTPQSPMQPLLPSQLQAEHTL

SEQ ID NO: 34241 - protein, 1639 aa, Homo sapiens
MAKDSPSPLGASPKKPGCSSPAAAVLENQRRELEKLRAELEAERAGWRAERRRFAARERQLREEAERERRQLADRLRSKWEAQRSRELRQLQEEMQREREAEIRQLLRWKEAEQRQLQQLLHRERDGVVRQARELQRQLAEELVNRGHCSRPGASEVSAAQCRCRLQEVLAQLRWQTDGEQAARIRYLQAALEVERQLFLKYILAHFRGHPALSGSPDPQAVHSLEEPLPQTSSGSCHAPKPACQLGSLDSLSAEVGVRSRSLGLVSSACSSSPDGLLSTHASSLDCFAPACSRSLDSTRSLPKASKSEERPSSPDTSTPGSRRLSPPPSPLPPPPPPSAHRKLSNPRGGEGSESQPCEVLTPSPPGLGHHELIKLNWLLAKALWVLARRCYTLQEENKQLRRAGCPYQADEKVKRLKVKRAELTGLARRLADRARELQETNLRAVSAPIPGESCAGLELCQVFARQRARDLSEQASAPLAKDKQIEELRQECHLLQARVASGPCSDLHTGRGGPCTQWLNVRDLDRLQRESQREVLRLQRQLMLQQGNGGAWPEAGGQSATCEEVRRQMLALERELDQRRRECQELGTQAAPARRRGEEAETQLQAALLKNAWLAEENGRLQAKTDWVRKVEAENSEVRGHLGRACQERDASGLIAEQLLQQAARGQDRQQQLQRDPQKALCDLHPSWKEIQALQCRPGHPPEQPWETSQMPESQVKGSRRPKFHARPEDYAVSQPNRDIQEKREASLEESPVALGESASVPQVSETVPASQPLSKKTSSQSNSSSEGSMWATVPSSPTLDRDTASEVDDLEPDSVSLALEMGGSAAPAAPKLKIFMAQYNYNPFEGPNDHPEGELPLTAGDYIYIFGDMDEDGFYEGELDDGRRGLVPSNFVEQIPDSYIPGCLPAKSPDLGPSQLPAGQDEALEEDSLLSGKAQGMVDRGLCQMVRVGSKTEVATEILDTKTEACQLGLLQSMGKQGLSRPLLGTKGVLRMAPMQLHLQNVTATSANITWVYSSHRHPHVVYLDDREHALTPAGVSCYTFQGLCPGTHYRVRVEVRLPWDLLQVYWGTMSSTVTFDTLLAGPPYPPLEVLVERHASPGVLVVSWLPVTIDSAGSSNGVQVTGYAVYADGLKVCEVADATAGSTVLEFSQLQVPLTWQKVSVRTMSLCGESLDSVPAQIPEDFFMCHRWPETPPFSYTCGDPSTYRVTFPVCPQKLSLAPPSAKASPHNPGSCGEPQAKFLEAFFEEPPRRQSPVSNLGSEGECPSSGAGSQAQELAEAWEGCRKDLLFQKSPQNHRPPSVSDQPGEKENCYQHMGTSKSPAPGFIHLRTECGPRKEPCQEKAALERVLRQKQDAQGFTPPQLGASQQYASDFHNVLKEEQEALCLDLRGTERREERREPEPHSRQGQALGVKRGCQLHEPSSALCPAPSAKVIKMPRGGPQQLGTGANTPARVFVALSDYNPLVMSANLKAAEEELVFQKRQLLRVWGSQDTHDFYLSECNRQVGNIPGRLVAEMEVGTEQTDRRWRSPAQGHLPSVAHLEDFQGLTIPQGSSLVLQGNSKRLPLWTPKIMIAALDYDPGDGQMGGQGKGRLALRAGDVVMVYGPMDDQGFYYGELGGHRGLVPAHLLDHMSLHGH

SEQ ID NO: 34242 - protein, 184 aa, Homo sapiens
MARSLVHDTVFYCLSVYQVKISPTPQLGAASSAEGHVGQGAPGLMGNMNPEGGVNHENGMNRDGGMIPEGGGGNQEPRQQPQPPPEEPAQAAMEGPQPENMQPRTRRTKFTLLQVEELESVFRHTQYPDVPTRRELAENLGVTEDKVRVWFKNKRARCRRHQRELMLANELRADPDDCVYIVVD

SEQ ID NO: 34243 - protein, 686 aa, Homo sapiens
MTDALLPAAPQPLEKENDGYFRKGCNPLAQTGRSKLQNQRAALNQQILKAVRMRTGAENLLKVATNSKVREQVRLELSFVNSDLQMLKEELEGLNISVGVYQNTEEAFTIPLIPLGLKETKDVDFAVVLKDFILEHYSEDGYLYEDEIADLMDLRQACRTPSRDEAGVELLMTYFIQLGFVESRFFPPTRQMGLLFTWYDSLTGVPVSQQNLLLEKASVLFNTGALYTQIGTRCDRQTQAGLESAIDAFQRAAGVLNYLKDTFTHTPSYDMSPAMLSVLVKMMLAQAQESVFEKISLPGIRNEFFMLVKVAQEAAKVGEVYQQLHAAMSQAPVKENIPYSWASLACVKAHHYAALAHYFTAILLIDHQVKPGTDLDHQEKCLSQLYDHMPEGLTPLATLKNDQQRRQLGKSHLRRAMAHHEESVREASLCKKLRSIEVLQKVLCAAQERSRLTYAQHQEEDDLLNLIDAPSVVAKTEQEVDIILPQFSKLTVTDFFQKLGPLSVFSANKRWTPPRSIRFTAEEGDLGFTLRGNAPVQVHFLDPYCSASVAGAREGDYIVSIQLVDCKWLTLSEVMKLLKSFGEDEIEMKVVSLLDSTSSMHNKSATYSVGMQKTYSMICLAIDDDDKTDKTKKISKKLSFLSWGTNKNRQKSASTLCLPSVGAARPQVKKKLPSPFSLLNSDSSWY

SEQ ID NO: 34244 - protein, 535 aa, Homo sapiens
MDLRQACRTPSRDEAGVELLMTYFIQLGFVESRFFPPTRQMGLLFTWYDSLTGVPVSQQNLLLEKASVLFNTGALYTQIGTRCDRQTQAGLESAIDAFQRAAGVLNYLKDTFTHTPSYDMSPAMLSVLVKMMLAQAQESVFEKISLPGIRNEFFMLVKVAQEAAKVGEVYQQLHAAMSQAPVKENIPYSWASLACVKAHHYAALAHYFTAILLIDHQVKPGTDLDHQEKCLSQLYDHMPEGLTPLATLKNDQQRRQLGKSHLRRAMAHHEESVREASLCKKLRSIEVLQKVLCAAQERSRLTYAQHQEEDDLLNLIDAPSVVAKTEQEVDIILPQFSKLTVTDFFQKLGPLSVFSANKRWTPPRSIRFTAEEGDLGFTLRGNAPVQVHFLDPYCSASVAGAREGDYIVSIQLVDCKWLTLSEVMKLLKSFGEDEIEMKVVSLLDSTSSMHNKSATYSVGMQKTYSMICLAIDDDDKTDKTKKISKKLSFLSWGTNKNRQKSASTLCLPSVGAARPQVKKKLPSPFSLLNSDSSWY

SEQ ID NO: 34245 - protein, 1023 aa, Homo sapiens
MWDQRLVRLALLQHLRAFYGIKVKGVRGQCDRRRHETAATEIGGKIFGVPFNALPHSAVPEYGHIPSFLVDACTSLEDHIHTEGLFRKSGSVIRLKALKNKVDHGEGCLSSAPPCDIAGLLKQFFRELPEPILPADLHEALLKAQQLGTEEKNKATLLLSCLLADHTVHVLRYFFNFLRNVSLRSSENKMDSSNLAVIFAPNLLQTSEGHEKMSSNTEKKLRLQAAVVQTLIDYASDIGRVPDFILEKIPAMLGIDGLCATPSLEGFEEGEYETPGEYKRKRRQSVGDFVSGALNKFKPNRTPSITPQEERIAQLSESPVILTPNAKRTLPVDSSHGFSSKKRKSIKHNFNFELLPSNLFNSSSTPVSVHIDTSSEGSSQSSLSPVLIGGNHLITAGVPRRSKRIAGKKVCRVESGKAGCFSPKISHKEKVRRSLRLKFNLGKNGREVNGCSGVNRYESVGWRLANQQSLKNRIESVKTGLLFSPDVDEKLPKKGSEKISKSEETLLTPERLVGTNYRMSWTGPNNSSFQEVDANEASSMVENLEVENSLEPDIMVEKSPATSCELTPSNLNNKHNSNITSSPLSGDENNMTKETLVKVQKAFSESGSNLHALMNQRQSSVTNVGKVKLTEPSYLEDSPEENLFETNDLTIVESKEKYEHHTGKGEKCFSERDFSPLQTQTFNRETTIKCYSTQMKMEHEKDIHSNMPKDYLSKQEFSSDEEIKKQQSPKDKLNNKLKENENMMEGNLPKCAAHSKDEARSSFSQQSTCVVTNLSKPRPMRIAKQQSLETCEKTVSESSQMTEHRKVSDHIQWFNKLSLNEPNRIKVKSPLKFQRTPVRQSVRRINSLLEYSRQPTGHKLASLGDTASPLVKSVSCDGALSSCIESASKDSSVSCIKSGPKEQKSMSCEESNIGAISKSSMELPSKSFLKMRKHPDSVNASLRSTTVYKQKILSDGQVKVPLDDLTNHDIVKPVVNNNMGISSGINNRVLRRPSERGRAWYKGSPKHPIGKTQLLPTSKPVDL

SEQ ID NO: 34246 - protein, 501 aa, Homo sapiens
MWDQRLVRLALLQHLRAFYGIKVKGVRGQCDRRRHETAATEIGGKIFGVPFNALPHSAVPEYGHIPSFLVDACTSLEDHIHTEGLFRKSGSVIRLKALKNKVDHGEGCLSSAPPCDIAGLLKQFFRELPEPILPADLHEALLKAQQLGTEEKNKATLLLSCLLADHTVHVLRYFFNFLRNVSLRSSENKMDSSNLAVIFAPNLLQTSEGHEKMSSNTEKKLRLQAAVVQTLIDYASDIGRVPDFILEKIPAMLGIDGLCATPSLEGFEEGEYETPGEYKRKRRQSVGDFVSGALNKFKPNRTPSITPQEERIAQLSESPVILTPNAKRTLPVDSSHGFSSKKRKSIKHNFNFELLPSNLFNSSSTPVSVHIDTSSEGSSQSSLSPVLIGGNHLITAGVPRRSKRIAGKKVCRVESGKAGCFSPKISHKEKVRRSLRLKFNLGKNGREVNGCSGVNRYESVGWRLANQQSLKNRIESVKTGLLFSPDVDEKLPKKGTFTYYC

SEQ ID NO: 34247 - protein, 834 aa, Homo sapiens
MDSSNLAVIFAPNLLQTSEGHEKMSSNTEKKLRLQAAVVQTLIDYASDIGRVPDFILEKIPAMLGIDGLCATPSLEGFEEGEYETPGEYKRKRRQSVGDFVSGALNKFKPNRTPSITPQEERIAQLSESPVILTPNAKRTLPVDSSHGFSSKKRKSIKHNFNFELLPSNLFNSSSTPVSVHIDTSSEGSSQSSLSPVLIGGNHLITAGVPRRSKRIAGKKVCRVESGKAGCFSPKISHKEKVRRSLRLKFNLGKNGREVNGCSGVNRYESVGWRLANQQSLKNRIESVKTGLLFSPDVDEKLPKKGSEKISKSEETLLTPERLVGTNYRMSWTGPNNSSFQEVDANEASSMVENLEVENSLEPDIMVEKSPATSCELTPSNLNNKHNSNITSSPLSGDENNMTKETLVKVQKAFSESGSNLHALMNQRQSSVTNVGKVKLTEPSYLEDSPEENLFETNDLTIVESKEKYEHHTGKGEKCFSERDFSPLQTQTFNRETTIKCYSTQMKMEHEKDIHSNMPKDYLSKQEFSSDEEIKKQQSPKDKLNNKLKENENMMEGNLPKCAAHSKDEARSSFSQQSTCVVTNLSKPRPMRIAKQQSLETCEKTVSESSQMTEHRKVSDHIQWFNKLSLNEPNRIKVKSPLKFQRTPVRQSVRRINSLLEYSRQPTGHKLASLGDTASPLVKSVSCDGALSSCIESASKDSSVSCIKSGPKEQKSMSCEESNIGAISKSSMELPSKSFLKMRKHPDSVNASLRSTTVYKQKILSDGQVKVPLDDLTNHDIVKPVVNNNMGISSGINNRVLRRPSERGRAWYKGSPKHPIGKTQLLPTSKPVDL

SEQ ID NO: 34248 - protein, 154 aa, Homo sapiens
MAPARAGCCPLLLLLLGLWVAEVLVRAKPKDMTSSQWFKTQHVQPSPQACNSAMSIINKYTERCKDLNTFLHEPFSSVAITCQTPNIACKNSCKNCHQSHGPMSLTMGELTSGKYPNCRYKEKHLNTPYIVACDPPQQGDPGYPLVPVHLDKVV

SEQ ID NO: 34249 - protein, 735 aa, Homo sapiens
MHCGLLEEPDMDSTESWIERCLNESENKRYSSHTSLGNVSNDENEEKENNRASKPHSTPATLQWLEENYEIAEGVCIPRSALYMHYLDFCEKNDTQPVNAASFGKIIRQQFPQLTTRRLGTRGQSKYHYYGIAVKESSQYYDVMYSKKGAAWVSETGKKEVSKQTVAYSPRSKLGTLLPEFPNVKDLNLPASLPEEKVSTFIMMYRTHCQRILDTVIRANFDEVQSFLLHFWQGMPPHMLPVLGSSTVVNIVGVCDSILYKAISGVLMPTVLQALPDSLTQVIRKFAKQLDEWLKVALHDLPENLRNIKFELSRRFSQILRRQTSLNHLCQASRTVIHSADITFQMLEDWRNVDLNSITKQTLYTMEDSRDEHRKLITQLYQEFDHLLEEQSPIESYIEWLDTMVDRCVVKVAAKRQGSLKKVAQQFLLMWSCFGTRVIRDMTLHSAPSFGSFHLIHLMFDDYVLYLLESLHCQERANELMRAMKGEGSTAEVREEIILTEAAAPTPSPVPSFSPAKSATSVEVPPPSSPVSNPSPEYTGLSTTGAMQSYTWSLTYTVTTAAGSPAENSQQLPCMRNTHVPSSSVTHRIPVYPHREEHGYTGSYNYGSYGNQHPHPMQSQYPALPHDTAISGPLHYAPYHRSSAQYPFNSPTSRMEPCLMSSTPRLHPTPVTPRWPEVPSANTCYTSPSVHSARYGNSSDMYTPLTTRRNSEYEHMQHFPGFAYINGEASTGWAK

SEQ ID NO: 34250 - protein, 744 aa, Homo sapiens
MIKRRAHPGAGGDRTRPRRRRSTESWIERCLNESENKRYSSHTSLGNVSNDENEEKENNRASKPHSTPATLQWLEENYEIAEGVCIPRSALYMHYLDFCEKNDTQPVNAASFGKIIRQQFPQLTTRRLGTRGQSKYHYYGIAVKESSQYYDVMYSKKGAAWVSETGKKEVSKQTVAYSPRSKLGTLLPEFPNVKDLNLPASLPEEKVSTFIMMYRTHCQRILDTVIRANFDEVQSFLLHFWQGMPPHMLPVLGSSTVVNIVGVCDSILYKAISGVLMPTVLQALPDSLTQVIRKFAKQLDEWLKVALHDLPENLRNIKFELSRRFSQILRRQTSLNHLCQASRTVIHSADITFQMLEDWRNVDLNSITKQTLYTMEDSRDEHRKLITQLYQEFDHLLEEQSPIESYIEWLDTMVDRCVVKVAAKRQGSLKKVAQQFLLMWSCFGTRVIRDMTLHSAPSFGSFHLIHLMFDDYVLYLLESLHCQERANELMRAMKGEGSTAEVREEIILTEAAAPTPSPVPSFSPAKSATSVEVPPPSSPVSNPSPEYTGLSTTGAMQSYTWSLTYTVTTAAGSPAENSQQLPCMRNTHVPSSSVTHRIPVYPHREEHGYTGSYNYGSYGNQHPHPMQSQYPALPHDTAISGPLHYAPYHRSSAQYPFNSPTSRMEPCLMSSTPRLHPTPVTPRWPEVPSANTCYTSPSVHSARYGNSSDMYTPLTTRRNSEYEHMQHFPGFAYINGEASTGWAK

SEQ ID NO: 34251 - protein, 641 aa, Homo sapiens
MNWAAFGGSEFFIPEGIQIDSRCPLSRNITEWYHYYGIAVKESSQYYDVMYSKKGAAWVSETGKKEVSKQTVAYSPRSKLGTLLPEFPNVKDLNLPASLPEEKVSTFIMMYRTHCQRILDTVIRANFDEVQSFLLHFWQGMPPHMLPVLGSSTVVNIVGVCDSILYKAISGVLMPTVLQALPDSLTQVIRKFAKQLDEWLKVALHDLPENLRNIKFELSRRFSQILRRQTSLNHLCQASRTVIHSADITFQMLEDWRNVDLNSITKQTLYTMEDSRDEHRKLITQLYQEFDHLLEEQSPIESYIEWLDTMVDRCVVKVAAKRQGSLKKVAQQFLLMWSCFGTRVIRDMTLHSAPSFGSFHLIHLMFDDYVLYLLESLHCQERANELMRAMKGEGSTAEVREEIILTEAAAPTPSPVPSFSPAKSATSVEVPPPSSPVSNPSPEYTGLSTTGAMQSYTWSLTYTVTTAAGSPAENSQQLPCMRNTHVPSSSVTHRIPVYPHREEHGYTGSYNYGSYGNQHPHPMQSQYPALPHDTAISGPLHYAPYHRSSAQYPFNSPTSRMEPCLMSSTPRLHPTPVTPRWPEVPSANTCYTSPSVHSARYGNSSDMYTPLTTRRNSEYEHMQHFPGFAYINGEASTGWAK

SEQ ID NO: 34252 - protein, 563 aa, Homo sapiens
MIKRRAHPGAGGDRTRPRRRRSTESWIERCLNESENKRYSSHTSLGNVSNDENEEKENNRASKPHSTPATLQWLEENYEIAEGVCIPRSALYMHYLDFCEKNDTQPVNAASFGKIIRQQFPQLTTRRLGTRGQSKYHYYGIAVKESSQYYDVMYSKKGAAWVSETGKKEVSKQTVAYSPRSKLGTLLPEFPNVKDLNLPASLPEEKVSTFIMMYRTHCQRILDTVIRANFDEVQSFLLHFWQGMPPHMLPVLGSSTVVNIVGVCDSILYKAISGVLMPTVLQALPDSLTQVIRKFAKQLDEWLKVALHDLPENLRNIKFELSRRFSQILRRQTSLNHLCQASRTVIHSADITFQMLEDWRNVDLNSITKQTLYTMEDSRDEHRKLITQLYQEFDHLLEEQSPIESYIEWLDTMVDRCVVKVAAKRQGSLKKVAQQFLLMWSCFGTRVIRDMTLHSAPSFGSFHLIHLMFDDYVLYLLESLHCQERANELMRAMKGEGSTAEVREEIILTEAAAPTPSPVPSFSPAKSATSVEVPPPSSPVSNPSPEYTGLSTTGNGKSFKNFG

SEQ ID NO: 34253 - protein, 526 aa, Homo sapiens
MRMQAALVGWACTTLCLASCSSAFSHGASTVACDDMQPKHIQAQPQHQDSHHITIHTHRTSYAPGDKIPVTVRSSRDFMGFLLQARRVSDHQIAGTFVLIPPHSKLMTCFQEADAVTHSDKSLKRNLSFVWKAPAQPVGDIKFLLSVVQSYFVYWARIESSVVSQQTHSSAHSDDRMEPRLLMPNLHQRLGDVEGAAPAPRTPITLPQQHTHVFAVALPGAAEEDNLDPVPASIWVTKFPGDAETLSQPSSHTATEGSINQQPSGDSNPTLEPSLEVHRLERLVALKRVSSESFASSLSTHHRTQDDPSFDSLETCLSSDGGEQDKTKASNRTVTQPPLSTVQLTYPQCLWSSETFTGNGVRASNPIPVLQTSGTSGLPAAGDQSEASRASASFLPQSKHKELRAGKGNGEGGVGYPRQTNPRPDIGLEGAQAPLGIQLRTPQLGILLCLSATLGMALAAGLRYLHTQYCHQQTEVSFSEPASDAVARSNSGETVHVRKIGENSFVLVQAEYNWITPSVGSKKTVL

SEQ ID NO: 34254 - protein, 208 aa, Homo sapiens
MDFSIIQYSKFMTLLAMSLQNLKTLHMSLEESIKWLGEVMAEIGPTHSQKSEDWNIFDVKQANAIIDYLKISLFQHYKLYEFMFYSAREEIVIGTEQVIEVVKSACGPFPNPLEEGISFDIYSTFIEPPTILDTEMKRLDQEQGPEESQPETDTSDMDPLVGFTIEDVKSVLDQVTDDILIGIQTEINEKLQIQEEAFNARIEKLKKA

SEQ ID NO: 34255 - protein, 707 aa, Homo sapiens
MVDPVPEEEKAGAEPGDSGGDEAVASVPPDSQGAQEPAASSASASASAAVPRKAEVPCAAAEGGRREQSPLLHLDLFNFDCPEAEGSRYVLTSPRSLEACARCAVKPVELLPRALADLVREAPGRSMRVATGLYEAYEAERRAKLQQCRAERERIMREEKRRLFTPLSPAAAAAAAAAAASAPSAGSSSSCSSASLPASPAPRAARKASPSPSSARTQPPPAGSRTGRKSHSLDSLSRRREGALSSESGASSSSYSGESLRELRWPPRASARNSCPAGSASSTTNAPGRPSALTLVPITGRSFSLGDLSHSPQTAQHVERIVRQVRAERGLRGVPERDRKIAALMLARHQEELLLLEQRAAAHGQWELQRVHAKQRREREEREKQRALEQGRRAWAAQVEERRGRRGREEREAARRRQRQYERSEERRRELAERQGLLRRERAERAAREDRLRKLQQEQNLKQREEGLQEGRERAEQIRRERAQRAARAKQRQEGQLQREKRELSRAERARHEALLQGRTRQQRQEREGLRSSLEASLGRAQENYEHLVEQRTRELRERARREELQGRRAKEAAERKEREHQAHLEALARAGERRLQHATQVAEEAVQQKARRVGQSRLEKERAQRANKEKVERDEDCRRRELLQAIGRKLERSEQLTRERRSALESARSTARASFHVREKVREETNTRSFDRMVREAQLHASLDRK

SEQ ID NO: 34256 - protein, 304 aa, Homo sapiens
MNIVFSRDSQVRVMENTVANTEKYFGQFCSLLAAYTRKTARLRDKADQLVKQLIDFANSENPELRATMRGFAEDLAKVQDYRQAQVERLETKVVNPLKLYGAQIKQTRAEIKKFKHVQNHEIKQLEKLEKLRQKSPSDQQMIGQAETRVQRAAVDSSRTTLQLEETVDGFQRQKLKDLQKFFCDFVTIEMVFHAKAVEVYSSAFQTLEKYDLERDLLDFRAKMQGVYGHYDTRLLANTSPPPSVLQSLASQGTLQVQLSRANEDPEHPHANHGRFSLCEWVVKGQPAHCVCGQGGHLMLPGHSL

SEQ ID NO: 34257 - protein, 147 aa, Homo sapiens
MTAIRLREFIERRPVIPPSIFIAHQGRDVQGYYPGQLARLHFDHSAKRAPRPLIDLTIPPKTKYHYQPQLDQQTLIRYICLRRHSKPAEPWYKETTYRRDYSLPFYEIDWNQKLATVSLNPRPLNSLPELYCCEERSSFERNAFKLK

SEQ ID NO: 34258 - protein, 115 aa, Homo sapiens
MTAIRLREFIERRPVIPPSIFIAHQGRDVQGYYPGQLARLHFDHSAKRAPRHSKPAEPWYKETTYRRDYSLPFYEIDWNQKLATVSLNPRPLNSLPELYCCEERSSFERNAFKLK

SEQ ID NO: 34259 - protein, 96 aa, Homo sapiens
MGIEKRFNVLKIKVTQLQCHMGRRPGCECSWELRAPVTVASFLWSPTDSGHLPLLQDTSGPPEGTHRTFTPGRELVLGPKPTVPGKPFLASALLNV

SEQ ID NO: 34260 - protein, 295 aa, Homo sapiens
MERELEALAARLARPAEPPFQALVEAAGGRGQVLLVGELWEREQSRALLRDFARAVFPPEPGAAKPGGAAAEGAGPGAARGAQRAARAAGAAGAAAAAARAIRSPLVFVLCRASSLAAREPRRRLREMLRDVRGRRRAGAALVGVLVAEAGPEDAVAPGLRLLEALLRAVFGRQAGGPVQAAAYCPGLPASCLAVQAAACRALQAAGAGQPVEGAWERPGLPGLLACFSWGPWSRRKNQDVAACRSSAQEDFQEPEEELPLTAIFPNGDCDDLGRGSKACDGVVHTPAEPTGDSR

SEQ ID NO: 34261 - protein, 222 aa, Homo sapiens
MSQTKMLKVRVTLFCILAGIVLAMTAVVTDHWAVLSPHMEHHNTTCEAAHFGLWRICTKRIPMDDSKTCGPITLPGEKNCSYFRHFNPGESSEIFEFTTQKEYSISAAAIAIFSLGFIILGSLCVLLSLGKKRDYLLRPASMFYAFAGLCILVSVEVMRQSVKRMIDSEDTVWIEYYYSWSFACACAAFILLFLGGLALLLFSLPRMPRNPWESCMDAEPEH

SEQ ID NO: 34262 - protein, 251 aa, Homo sapiens
MTRLTVLALLAGLLASSRAGSSPLLDIVGGRKARPRQFPFLASIQNQGRHFCGGALIHARFVMTAASCFQSQNPGVSTVVLGAYDLRRRERQSRQTFSISSMSENGYDPQQNLNDLMLLQLDREANLTSSVTILPLPLQNATVEAGTRCQVAGWGSQRSGGRLSRFPRFVNVTVTPEDQCRPNNVCTGVLTRRGGICNGDGGTPLVCEGLAHGVASFSLGPCGRGPDFFTRVALFRDWIDGVLNNPGPGPA

SEQ ID NO: 34263 - protein, 1040 aa, Homo sapiens
MLEDISEEDIWEYKSKRKPKRVDPNNGSKNILKSVEKATDGKYQSKRSRNRKRAAEAKEVKDHEVPLGNAGCQTSVASSQNSSCGDGIQQTQDKETTPGKLCRTQKSQHVSPKIRPVYDGYCPNCQMPFSSLIGQTPRWHVFECLDSPPRSETECPDGLLCTSTIPFHYKRYTHFLLAQSRAGDHPFSSPSPASGGSFSETKSGVLCSLEERWSSYQNQTDNSVSNDPLLMTQYFKKSPSLTEASEKISTHIQTSQQALQFTDFVENDKLVGVALRLANNSEHINLPLPENDFSDCEISYSPLQSDEDTHDIDEKPDDSQEQLFFTESSKDGSLEEDDDSCGFFKKRHGPLLKDQDESCPKVNSFLTRDKYDEGLYRFNSLNDLSQPISQNNESTLPYDLACTGGDFVLFPPALAGKLAASVHQATKAKPDEPEFHSAQSNKQKQVIEESSVYNQVSLPLVKSLMLKPFESQVEGYLSSQPTQNTIRKLSSENLNAKNNTNSACFCRKALEGVPVGKATILNTENLSSTPAPKYLKILPSGLKYNARHPSTKVMKQMDIGVYFGLPPKRKEEKLLGESALEGINLNPVPSPNQKRSSQCKRKAEKSLSDLEFDASTLHESQLSVELSSERSQRQKKRCRKSNSLQEGACQKRSDHLINTESEAVNLSKVKVFTKSAHGGLQRGNKKIPESSNVGGSRKKTCPFYKKIPGTGFTVDAFQYGVVEGCTAYFLTHFHSDHYAGLSKHFTFPVYCSEITGNLLKNKLHVQEQYIHPLPLDTECIVNGVKVVLLDANHCPGAVMILFYLPNGTVILHTGDFRADPSMERSLLADQKVHMLYLDTTYCSPEYTFPSQQEVIRFAINTAFEAVTLNPHALVVCGTYSIGKEKVFLAIADVLGSKVGMSQEKYKTLQCLNIPEINSLITTDMCSSLVHLLPMMQINFKGLQSHLKKCGGKYNQILAFRPTGWTHSNKFTRIADVIPQTKGNISIYGIPYSEHSSYLEMKRFVQWLKPQKIIPTVNVGTWKSRSTMEKYFREWKLEAGY

SEQ ID NO: 34264 - protein, 540 aa, Homo sapiens
MALTRPVRLFSLVTRLLLAPRRGLTVRSPDEPLPVVRIPVALQRQLEQRQSRRRNLPRPVLVRPGPLLVSARRPELNQPARLTLGRWERAPLASQGWKSRRARRDHFSIERAQQEAPAVRKLSSKGSFADLGLEPRVLHALQEAAPEVVQPTTVQSSTIPSLLRGRHVVCAAETGSGKTLSYLLPLLQRLLGQPSLDSLPIPAPRGLVLVPSRELAQQVRAVAQPLGRSLGLLVRDLEGGHGMRRIRLQLSRQPSADVLVATPGALWKALKSRLISLEQLSFLVLDEADTLLDESFLELVDYILEKSHIAEGPADLEDPFNPKAQLVLVGATFPEGVGQLLNKVASPDAVTTITSSKLHCIMPHVKQTFLRLKGADKVAELVHILKHRDRAERTGPSGTVLVFCNSSSTVNWLGYILDDHKIQHLRLQGQMPALMRVGIFQSFQKSSRDILLCTDIASRGLDSTGVELVVNYDFPPTLQDYIHRAGRVGRVGSEVPGTVISFVTHPWDVSLVQKIELAARRRRSLPGLASSVKEPLPQAT

SEQ ID NO: 34265 - protein, 423 aa, Homo sapiens
MKLCSLAVLVPIVLFCEQHVFAFQSGQVLAALPRTSRQVQVLQNLTTTYEIVLWQPVTADLIVKKKQVHFFVNASDVDNVKAHLNVSGIPCSVLLADVEDLIQQQISNDTVSPRASASYYEQYHSLNEIYSWIEFITERHPDMLTKIHIGSSFEKYPLYVLKVSGKEQAAKNAIWIDCGIHAREWISPAFCLWFIGHITQFYGIIGQYTNLLRLVDFYVMPVVNVDGYDYSWKKNRMWRKNRSFYANNHCIGTDLNRNFASKHWCEEGASSSSCSETYCGLYPESEPEVKAVASFLRRNINQIKAYISMHSYSQHIVFPYSYTRSKSKDHEELSLVASEAVRAIEKISKNTRYTHGHGSETLYLAPGGGDDWIYDLGIKYSFTIELRDTGTYGFLLPERYIKPTCREAFAAVSKIAWHVIRNV

SEQ ID NO: 34266 - protein, 360 aa, Homo sapiens
MKLCSLAVLVPIVLFCEQHVFAFQSGQVLAALPRTSRQVQVLQNLTTTYEIVLWQPVTADLIVKKKQVHFFVNASDVDNVKAHLNVSGIPCSVLLADVEDLIQQQISNDTVSPRASASYYEQYHSLNEIYSWIEFITERHPDMLTKIHIGSSFEKYPLYVLKVSGKEQAAKNAIWIDCGIHAREWISPAFCLWFIGHNRMWRKNRSFYANNHCIGTDLNRNFASKHWCEEGASSSSCSETYCGLYPESEPEVKAVASFLRRNINQIKAYISMHSYSQHIVFPYSYTRSKSKDHEELSLVASEAVRAIEKISKNTRYTHGHGSETLYLAPGGGDDWIYDLGIKYSFTSNPPVEKLLPLSLK

SEQ ID NO: 34267 - protein, 417 aa, Homo sapiens
MLALLVLVTVALASAHHGGEHFEGEKVFRVNVEDENHINIIRELASTTQIDFWKPDSVTQIKPHSTVDFRVKAEDTVTVENVLKQNELQYKVLISNLRNVVEAQFDSRVRATGHSYEKYNKWETIEAWTQQVATENPALISRSVIGTTFEGRAIYLLKVGKAGQNKPAIFMDCGFHAREWISPAFCQWFVREAVRTYGREIQVTELLDKLDFYVLPVLNIDGYIYTWTKSRFWRKTRSTHTGSSCIGTDPNRNFDAGWCEIGASRNPCDETYCGPAAESEKETKALADFIRNKLSSIKAYLTIHSYSQMMIYPYSYAYKLGENNAELNALAKATVKELASLHGTKYTYGPGATTIYPAAGGSDDWAYDQGIRYSFTFELRDTGRYGFLLPESQIRATCEETFLAIKYVASYVLEHLY

SEQ ID NO: 34268 - protein, 692 aa, Homo sapiens
MSSFEGQMAEYPTISIDRFDRENLRARAYFLSHCHKDHMKGLRAPTLKRRLECSLKVYLYCSPVTKELLLTSPKYRFWKKRIISIEIETPTQISLVDEASGEKEEIVVTLLPAGHCPGSVMFLFQGNNGTVLYTGDFRLAQGEAARMELLHSGGRVKDIQSVYLDTTFCDPRFYQIPSREECLSGVLELVRSWITRSPYHVVWLNCKAAYGYEYLFTNLSEELGVQVHVNKLDMFRNMPEILHHLTTDRNTQIHACRHPKAEEYFQWSKLPCGITSRNRIPLHIISIKPSTMWFGERSRKTNVIVRTGESSYRACFSFHSSYSEIKDFLSYLCPVNAYPNVIPVGTTMDKVVEILKPLCRSSQSTEPKYKPLGKLKRARTVHRDSEEEDDYLFDDPLPIPLRHKVPYPETFHPEVFSMTAVSEKQPEKLRQTPGCCRAECMQSSRFTNFVDCEESNSESEEEVGIPASLQGDLGSVLHLQKADGDVPQWEVFFKRNDEITDESLENFPSSTVAGGSQSPKLFSDSDGESTHISSQNSSQSTHITEQGSQGWDSQSDTVLLSSQERNSGDITSLDKADYRPTIKENIPASLMEQNVICPKDTYSDLKSRDKDVTIVPSTGEPTTLSSETHIPEEKSLLNLSTNADSQSSSDFEVPSTPEAELPKREHLQYLYEKLATGESIAVKKRKCSLLDT

SEQ ID NO: 34269 - protein, 572 aa, Homo sapiens
MFLFQGNNGTVLYTGDFRLAQGEAARMELLHSGGRVKDIQSVYLDTTFCDPRFYQIPSREECLSGVLELVRSWITRSPYHVVWLNCKAAYGYEYLFTNLSEELGVQVHVNKLDMFRNMPEILHHLTTDRNTQIHACRHPKAEEYFQWSKLPCGITSRNRIPLHIISIKPSTMWFGERSRKTNVIVRTGESSYRACFSFHSSYSEIKDFLSYLCPVNAYPNVIPVGTTMDKVVEILKPLCRSSQSTEPKYKPLGKLKRARTVHRDSEEEDDYLFDDPLPIPLRHKVPYPETFHPEVFSMTAVSEKQPEKLRQTPGCCRAECMQSSRFTNFVDCEESNSESEEEVGIPASLQGDLGSVLHLQKADGDVPQWEVFFKRNDEITDESLENFPSSTVAGGSQSPKLFSDSDGESTHISSQNSSQSTHITEQGSQGWDSQSDTVLLSSQERNSGDITSLDKADYRPTIKENIPASLMEQNVICPKDTYSDLKSRDKDVTIVPSTGEPTTLSSETHIPEEKSLLNLSTNADSQSSSDFEVPSTPEAELPKREHLQYLYEKLATGESIAVKKRKCSLLDT

SEQ ID NO: 34270 - protein, 577 aa, Homo sapiens
MKHQERFLFQGNNGTVLYTGDFRLAQGEAARMELLHSGGRVKDIQSVYLDTTFCDPRFYQIPSREECLSGVLELVRSWITRSPYHVVWLNCKAAYGYEYLFTNLSEELGVQVHVNKLDMFRNMPEILHHLTTDRNTQIHACRHPKAEEYFQWSKLPCGITSRNRIPLHIISIKPSTMWFGERSRKTNVIVRTGESSYRACFSFHSSYSEIKDFLSYLCPVNAYPNVIPVGTTMDKVVEILKPLCRSSQSTEPKYKPLGKLKRARTVHRDSEEEDDYLFDDPLPIPLRHKVPYPETFHPEVFSMTAVSEKQPEKLRQTPGCCRAECMQSSRFTNFVDCEESNSESEEEVGIPASLQGDLGSVLHLQKADGDVPQWEVFFKRNDEITDESLENFPSSTVAGGSQSPKLFSDSDGESTHISSQNSSQSTHITEQGSQGWDSQSDTVLLSSQERNSGDITSLDKADYRPTIKENIPASLMEQNVICPKDTYSDLKSRDKDVTIVPSTGEPTTLSSETHIPEEKSLLNLSTNADSQSSSDFEVPSTPEAELPKREHLQYLYEKLATGESIAVKKRKCSLLDT

SEQ ID NO: 34271 - protein, 434 aa, Homo sapiens
MSSFEGQMAEYPTISIDRFDRENLRARAYFLSHCHKDHMKGLRAPTLKRRLECSLKVYLYCSPVTKELLLTSPKYRFWKKRIISIEIETPTQISLVDEASGEKEEIVVTLLPAGHCPGSVMFLFQGNNGTVLYTGDFRLAQGEAARMELLHSGGRVKDIQSVYLDTTFCDPRFYQIPSREECLSGVLELVRSWITRSPYHVVWLNCKAAYGYEYLFTNLSEELGVQVHVNKLDMFRNMPEILHHLTTDRNTQIHACRHPKAEEYFQWSKLPCGITSRNRIPLHIISIKPSTMWFGERSRKTNVIVRTGESSYRACFSFHSSYSEIKDFLSYLCPVNAYPNVIPVGTTMDKVVEILKPLCRSSQSTEPKYKPLGKLKRARTVHRDSGSHSVTQARMRWCHHDSLYPLTPGIKRSSCLSLLTSWITGAYRHAQLMI

SEQ ID NO: 34272 - protein, 956 aa, Homo sapiens
MLEELECGAPGARGAATAMDCKDRPAFPVKKLIQARLPFKRLNLVPKGKADDMSDDQGTSVQSKSPDLEASLDTLENNCHVGSDIDFRPKLVNGKGPLDNFLRNRIETSIGQSTVIIDLTEDSNEQPDSLVDHNKLNSEASPSREAINGQREDTGDQQGLLKAIQNDKLAFPGETLSDIPCKTEEEGVGCGGAGRRGDSQECSPRSCPELTSGPRMCPRKEQDSWSEAGGILFKGKVPMVVLQDILAVRPPQIKSLPATPQGKNMTPESEVLESFPEEDSVLSHSSLSSPSSTSSPEGPPAPPKQHSSTSPFPTSTPLRRITKKFVKGSTEKNKLRLQRDQERLGKQLKLRAEREEKEKLKEEAKRAKEEAKKKKEEEKELKEKERREKREKDEKEKAEKQRLKEERRKERQEALEAKLEEKRKKEEEKRLREEEKRIKAEKAEITRFFQKPKTPQAPKTLAGSCGKFAPFEIKEHMVLAPRRRTAFHPDLCSQLDQLLQQQSGEFSFLKDLKGRQPLRSGPTHVSTRNADIFNSDVVIVERGKGDGVPERRKFGRMKLLQFCENHRPAYWGTWNKKTALIRARDPWAQDTKLLDYEVDSDEEWEEEEPGESLSHSEGDDDDDMGEDEDEDDGFFVPHGYLSEDEGVTEECADPENHKVRQKLKAKEWDEFLAKGKRFRVLQPVKIGCVWAADRDCAGDDLKVLQQFAACFLETLPAQEEQTPKASKRERRDEQILAQLLPLLHGNVNGSKVIIREFQEHCRRGLLSNHTGSPRSPSTTYLHTPTPSEDAAIPSKSRLKRLISENSVYEKRPDFRMCWYVHPQVLQSFQQEHLPVPCQWSYVTSVPSAPKEDSGSVPSTGPSQGTPISLKRKSAGSMCITQFMKKRRHDGQIGAEDMDGFQADTEEEEEEEGDCMIVDVPDAAEVQAPCGAASGAGGGVGVDTGKATLTASPLGAS

SEQ ID NO: 34273 - protein, 749 aa, Homo sapiens
MLEELECGAPGARGAATAMDCKDRPAFPVKKLIQARLPFKRLNLVPKGKADDMSDDQGTSVQSKSPDLEASLDTLENNCHVGSDIDFRPKLVNGKGPLDNFLRNRIETSIGQSTVIIDLTEDSNEQPDSLVDHNKLNSEASPSREAINGQREDTGDQQGLLKAIQNDKLAFPGETLSDIPCKTEEEGVGCGGAGRRGDSQECSPRSCPELTSGPRMCPRKEQDSWSEAGGILFKGKVPMVVLQDILAVRPPQIKSLPATPQGKNMTPESEVLESFPEEDSVLSHSSLSSPSSTSSPEGPPAPPKQHSSTSPFPTSTPLRRITKKFVKGSTEKNKLRLQRDQERLGKQLKLRAEREEKEKLKEEAKRAKEEAKKKKEEEKELKEKERREKREKDEKEKAEKQRLKEERRKERQEALEAKLEEKRKKEEEKRLREEEKRIKAEKAEITRFFQKPKTPQAPKTLAGSCGKFAPFEIKEHMVLAPRRRTAFHPDLCSQLDQLLQQQSGEFSFLKDLKGRQPLRSGPTHVSTRNADIFNSDVVIVERGKGDGVPERRKFGRMKLLQFCENHRPAYWGTWNKKTALIRARDPWAQDTKLLDYEVDSDEEWEEEEPGESLSHSEGDDDDDMGEDEDEDDGFFVPHGYLSEDEGVTEECADPENHKVRQKLKAKEWDEFLAKGKRFRVLQPVKIGCVWAADRDCAGDDLKVLQQFAAHWVHPESRGDVCRTLRVSSPQSRYLNRLNSCVKSTLSCFT

SEQ ID NO: 34274 - protein, 783 aa, Homo sapiens
MLEELECGAPGARGAATAMDCKDRPAFPVKKLIQARLPFKRLNLVPKGKADDMSDDQGTSVQSKSPDLEASLDTLENNCHVGSDIDFRPKLVNGKGPLDNFLRNRIETSIGQSTVIIDLTEDSNEQPDSLVDHNKLNSEASPSREAINGQREDTGDQQGLLKAIQNDKLAFPGETLSDIPCKTEEEGVGCGGAGRRGDSQECSPRSCPELTSGPRMCPRKEQDSWSEAGGILFKGKVPMVVLQDILAVRPPQIKSLPATPQGKNMTPESEVLESFPEEDSVLSHSSLSSPSSTSSPEGPPAPPKQHSSTSPFPTSTPLRRITKKFVKGSTEKNKLRLQRDQERLGKQLKLRAEREEKEKLKEEAKRAKEEAKKKKEEEKELKEKERREKREKDEKEKAEKQRLKEERRKERQEALEAKLEEKRKKEEEKRLREEEKRIKAEKAEITRFFQKPKTPQAPKTLAGSCGKFAPFEIKEHMVLAPRRRTAFHPDLCSQLDQLLQQQSGEFSFLKDLKGRQPLRSGPTHVSTRNADIFNSDVVIVERGKGDGVPERRKFGRMKLLQFCENHRPAYWGTWNKKTALIRARDPWAQDTKLLDYEVDSDEEWEEEEPGESLSHSEGDDDDDMGEDEDEDDGFFVPHGYLSEDEGVTEECADPENHKVRQKLKAKEWDEFLAKGKRFRVLQPVKIGCVWAADRDCAGDDLKVLQQFAACFLETLPAQEEQTPKASKRERRDEQILAQLLPLLHGNVNGSKVIIREFQEHCRRGLLSNHTGKATLTASPLGAS

SEQ ID NO: 34275 - protein, 96 aa, Homo sapiens
MCCTKSLLLAALMSVLLLHLCGESEAASNFDCCLGYTDRILHPKFIVGFTRQLANEGCDINAIIFHTKKKLSVCANPKQTWVKYIVRLLSKKVKNM

SEQ ID NO: 34276 - protein, 95 aa, Homo sapiens
MCCTKSLLLAALMSVLLLHLCGESEASNFDCCLGYTDRILHPKFIVGFTRQLANEGCDINAIIFHTKKKLSVCANPKQTWVKYIVRLLSKKVKNM

SEQ ID NO: 34277 - protein, 495 aa, Homo sapiens
MNKSRWQSRRRHGRRSHQQNPWFRLRDSEDRSDSRAAQPAHDSGHGDDESPSTSSGTAGTSSVPELPGFYFDPEKKRYFRLLPGHNNCNPLTKESIRQKEMESKRLRLLQEEDRRKKIARMGFNASSMLRKSQLGFLNVTNYCHLAHELRLSCMERKKVQIRSMDPSALASDRFNLILADTNSDRLFTVNDVKVGGSKYGIINLQSLKTPTLKVFMHENLYFTNRKVNSVCWASLNHLDSHILLCLMGLAETPGCATLLPASLFVNSHPGIDRPGMLCSFRIPGAWSCAWSLNIQANNCFSTGLSRRVLLTNVVTGHRQSFGTNSDVLAQQFALMAPLLFNGCRSGEIFAIDLRCGNQGKGWKATRLFHDSAVTSVRILQDEQYLMASDMAGKIKLWDLRTTKCVRQYEGHVNEYAYLPLHVHEEEGILVAVGQDCYTRIWSLHDARLLRTIPSPYPASKADIPSVAFSSRLGGSRGAPGLLMAVGQDLYCYSYS

SEQ ID NO: 34278 - protein, 433 aa, Homo sapiens
MNKSRWQSRRRHGRRSHQQNPWFRLRDSEDRSDSRAAQPAHDSGHGDDESPSTSSGTAGTSSVPELPGFYFDPEKKRYFRLLPGHNNCNPLTKESIRQKEMESKRLRLLQEEDRRKKIARMGFNASSMLRKSQLGFLNVTNYCHLAHELRLSCMERKKVQIRSMDPSALASDRFNLILADTNSDRLFTVNDVKVGGSKYGIINLQSLKTPTLKVFMHENLYFTNRKVNSVCWASLNHLDSHILLCLMGLAETPGCATLLPASLFVNSHPGIDRPGMLCSFRIPGAWSCAWSLNIQANNCFSTGLSRRVLLTNVVTGHRQSFGTNSDVLAQQFALMAPLLFNGCRSGEIFAIDLRCGNQGKGWKATRLFHDSAVTSVRILQDEQYLMASDMAGKIKLWDLRTTKCVRQYEGHVNEYAYLPLHVHEEEGILVAGT

SEQ ID NO: 34279 - protein, 435 aa, Homo sapiens
MNKSRWQSRRRHGRRSHQQNPWFRLRDSEDRSDSRAAQPAHDSGHGDDESPSTSSGTAGTSSVPELPGFYFDPEKKRYFRLLPGHNNCNPLTKESIRQKEMESKRLRLLQEEDRRKKADTNSDRLFTVNDVKVGGSKYGIINLQSLKTPTLKVFMHENLYFTNRKVNSVCWASLNHLDSHILLCLMGLAETPGCATLLPASLFVNSHPAGIDRPGMLCSFRIPGAWSCAWSLNIQANNCFSTGLSRRVLLTNVVTGHRQSFGTNSDVLAQQFALMAPLLFNGCRSGEIFAIDLRCGNQGKGWKATRLFHDSAVTSVRILQDEQYLMASDMAGKIKLWDLRTTKCVRQYEGHVNEYAYLPLHVHEEEGILVAVGQDCYTRIWSLHDARLLRTIPSPYPASKADIPSVAFSSRLGGSRGAPGLLMAVGQDLYCYSYS

SEQ ID NO: 34280 - protein, 395 aa, Homo sapiens
MESKRLRLLQEEDRRKKIARMGFNASSMLRKSQLGFLNVTNYCHLAHELRLSCMERKKVQIRSMDPSALASDRFNLILADTNSDRLFTVNDVKVGGSKYGIINLQSLKTPTLKVFMHENLYFTNRKVNSVCWASLNHLDSHILLCLMGLAETPGCATLLPASLFVNSHPGIDRPGMLCSFRIPGAWSCAWSLNIQANNCFSTGLSRRVLLTNVVTGHRQSFGTNSDVLAQQFALMAPLLFNGCRSGEIFAIDLRCGNQGKGWKATRLFHDSAVTSVRILQDEQYLMASDMAGKIKLWDLRTTKCVRQYEGHVNEYAYLPLHVHEEEGILVAVGQDCYTRIWSLHDARLLRTIPSPYPASKADIPSVAFSSRLGGSRGAPGLLMAVGQDLYCYSYS

SEQ ID NO: 34281 - protein, 489 aa, Homo sapiens
MNKSRWQSRRRHGRRSHQQNPWFRLRDSEDRSDSRAAQPAHDSGHGDDESPSTSSGTAGTSSVPELPGFYFDPEKKRYFRLLPGHNNCNPLTKESIRQKEMESKRLRLLQEEDRRKKIARMGFNASSMLRKSQLGFLNVTNYCHLAHELRLSCMERKKVQIRSMDPSALASDRFNLILADTNSDRLFTVNDVKVGGSKYGIINLQSLKTPTLKVFMHENLYFTNRKVNSVCWASLNHLDSHILLCLMGLAETPGCATLLPASLFVNSHPAGIDRPGMLCSFRIPGAWSCAWSLNIQANNCFSTGLSRRVLLTNVVTGHRQSFGTNSDVLAPLLFNGCRSGEIFAIDLRCGNQGKGWKATRLFHDSAVTSVRILQDEQYLMASDMAGKIKLWDLRTTKCVRQYEGHVNEYAYLPLHVHEEEGILVAVGQDCYTRIWSLHDARLLRTIPSPYPASKADIPSVAFSSRLGGSRGAPGLLMAVGQDLYCYSYS

SEQ ID NO: 34282 - protein, 476 aa, Homo sapiens
MAGRGGSALLALCGALAACGWLLGAEAQEPGAPAAGMRRRRRLQQEDGISFEYHRYPELREALVSVWLQCTAISRIYTVGRSFEGRELLVIELSDNPGVHEPGEPEFKYIGNMHGNEAVGRELLIFLAQYLCNEYQKGNETIVNLIHSTRIHIMPSLNPDGFEKAASQPGELKDWFVGRSNAQGIDLNRNFPDLDRIVYVNEKEGGPNNHLLKNMKKIVDQNTKLAPETKAVIHWIMDIPFVLSANLHGGDLVANYPYDETRSGSAHEYSSSPDDAIFQSLARAYSSFNPAMSDPNRPPCRKNDDDSSFVDGTTNGGAWYSVPGGMQDFNYLSSNCFEITVELSCEKFPPEETLKTYWEDNKNSLISYLEQIHRGVKGFVRDLQGNPIANATISVEGIDHDVTSAKDGDYWRLLIPGNYKLTASAPGYLAITKKVAVPYSPAAGVDFELESFSERKEEEKEELMEWWKMMSETLNF

SEQ ID NO: 34283 - protein, 440 aa, Homo sapiens
MRRRRRLQQEDGISFEYHRYPELREALVSVWLQCTAISRIYTVGRSFEGRELLVIELSDNPGVHEPGEPEFKYIGNMHGNEAVGRELLIFLAQYLCNEYQKGNETIVNLIHSTRIHIMPSLNPDGFEKAASQPGELKDWFVGRSNAQGIDLNRNFPDLDRIVYVNEKEGGPNNHLLKNMKKIVDQNTKLAPETKAVIHWIMDIPFVLSANLHGGDLVANYPYDETRSGSAHEYSSSPDDAIFQSLARAYSSFNPAMSDPNRPPCRKNDDDSSFVDGTTNGGAWYSVPGGMQDFNYLSSNCFEITVELSCEKFPPEETLKTYWEDNKNSLISYLEQIHRGVKGFVRDLQGNPIANATISVEGIDHDVTSAKDGDYWRLLIPGNYKLTASAPGYLAITKKVAVPYSPAAGVDFELESFSERKEEEKEELMEWWKMMSETLNF

SEQ ID NO: 34284 - protein, 134 aa, Homo sapiens
MAQSLALSLLILVLAFGIPRTQGSDGGAQDCCLKYSQRKIPAKVVRSYRKQEPSLGCSIPAILFLPRKRSQAELCADPKELWVQQLMQHLDKTPSPQKPAQGCRKDRGASKTGKKGKGSKGCKRTERSQTPKGP

SEQ ID NO: 34285 - protein, 559 aa, Homo sapiens
MKVITCEIAWHNKEPVYSLDFQHGTAGRIHRLASAGVDTNVRIWKVEKGPDGKAIVEFLSNLARHTKAVNVVRFSPTGEILASGGDDAVILLWKVNDNKEPEQIAFQDEDEAQLNKENWTVVKTLRGHLEDVYDICWATDGNLMASASVDNTAIIWDVSKGQKISIFNEHKSYVQGVTWDPLGQYVATLSCDRVLRVYSIQKKRVAFNVSKMLSGIGAEGEARSYRMFHDDSMKSFFRRLSFTPDGSLLLTPAGCVESGENVMNTTYVFSRKNLKRPIAHLPCPGKATLAVRCCPVYFELRPVVETGVELMSLPYRLVFAVASEDSVLLYDTQQSFPFGYVSNIHYHTLSDISWSSDGAFLAISSTDGYCSFVTFEKDELGIPLKEKPVLNMRTPDTAKKTKSQTHRGSSPGPRPVEGTPASRTQDPSSPGTTPPQARQAPAPTVIRDPPSITPAVKSPLPGPSEEKTLQPSSQNTKAHPSRRVTLNTLQAWSKTTPRRINLTPLKTDTPPSSVPTSVISTPSTEEIQSETPGDAQGSPPELKRPRLDENKGGTESLDP

SEQ ID NO: 34286 - protein, 93 aa, Homo sapiens
MDRLQTALLVVLVLLAVALQATEAGPYGANMEDSVCCRDYVRYRLPLRVVKHFYWTSDSCPRPGVVLLTFRDKEICADPRVPWVKMILNKLSQ

SEQ ID NO: 34287 - protein, 193 aa, Homo sapiens
MLGVLELLLLGAAWLAGPARGQNETEPIVLEGKCLVVCDSNPTSDPTGTALGISVRSGSAKVAFSAIRSTNHEPSEMSNRTMIIYFDQVLVNIGNNFDSERSTFIAPRKGIYSFNFHVVKVYNRQTIQVSLMLNGWPVISAFAGDQDVTREAASNGVLIQMEKGDRAYLKLERGNLMGGWKYSTFSGFLVFPL

SEQ ID NO: 34288 - protein, 92 aa, Homo sapiens
MQVSTAALAVLLCTMALCNQFSASLAADTPTACCFSYTSRQIPQNFIADYFETSSQCSKPGVIFLTKRSRQVCADPSEEWVQKYVSDLELSA

SEQ ID NO: 34289 - protein, 536 aa, Homo sapiens
MSDYENDDECWSVLEGFRVTLTSVIDPSRITPYLRQCKVLNPDDEEQVLSDPNLVIRKRKVGVLLDILQRTGHKGYVAFLESLELYYPQLYKKVTGKEPARVFSMIIDASGESGLTQLLMTEVMKLQKKVQDLTALLSSKDDFIKELRVKDSLLRKHQERVQRLKEECEAGSRELKRCKEENYDLAMRLAHQSEEKGAALMRNRDLQLEIDQLKHSLMKAEDDCKVERKHTLKLRHAMEQRPSQELLWELQQEKALLQARVQELEASVQEGKLDRSSPYIQVLEEDWRQALRDHQEQANTIFSLRKDLRQGEARRLRCMEEKEMFELQCLALRKDSKMYKDRIEAILLQMEEVAIERDQAIATREELHAQHARGLQEKDALRKQVRELGEKADELQLQVFQCEAQLLAVEGRLRRQQLETLVLSSDLEDGSPRRSQELSLPQDLEDTQLSDKGCLAGGGSPKQPFAALHQEQVLRNPHDAGLSSGEPPEKERRRLKESFENYRRKRALRKMQKGWRQGEEDRENTTGSDNTDTEGS

SEQ ID NO: 34290 - protein, 492 aa, Homo sapiens
MSDYENDDECWSVLEGFRVTLTSVIDPSRITPYLRQCKVLNPDDEEQVLSDPNLVIRKRKVGVLLDILQRTGHKGYVAFLESLELYYPQLYKKVTGKEPARVFSMIIDASGESGLTQLLMTEVMKLQKKVQDLTALLSSKDDFIKELRVKDSLLRKHQERVQRLKEECEAGSRELKRCKEENYDLAMRLAHQSEEKGAALMRNRDLQLEIDQLKHSLMKAEDDCKVERKHTLKLRHAMEQRPSQELLWELQQEKALLQARVQELEASVQEGKLDRSSPYIQVLEEDWRQALRDHQEQANTIFSLRKDLRQGEARRLRCMEEKEMFELQCLALRKDSKMYKDRIEAILLQMEEVAIERDQAIATREELHAQHARGLQEKDALRKQVRELGEKADELQLQVFQCEAQLLAVEGRLRRQQLETLVLSSDLEDGSPRRSQELSLPQDLEDTQLSDKGCLAGGGSPKQPFAALHQEQVLRNPHDAGPAGLPGIGAVC

SEQ ID NO: 34291 - protein, 366 aa, Homo sapiens
MSDYENDDECWSVLEGFRVTLTSVIDPSRITPYLRQCKVLNPDDEEQVLSDPNLVIRKRKVGVLLDILQRTGHKGYVAFLESLELYYPQLYKKVTGKEPARVFSMIIDASGESGLTQLLMTEVMKLQKKVQDLTALLSSKDDFIKELRVKDSLLRKHQERVQRLKEECEAGSRELKRCKEENYDLAMRLAHQSEEKGAALMRNRDLQLEIDQLKHSLMKAEDDCKVERKHTLKLRHAMEQRPSQELLWELQQEKALLQARVQELEASVQEGKLDRSSPYIQVLEEDWRQALRDHQEQANTIFSLRKDLRQGEARRLRCMEEKEMFELQCLALRKDSKMYKDRIEAILLQMEEVAIERDQSTQMEGL

SEQ ID NO: 34292 - protein, 472 aa, Homo sapiens
MKFLIFAFFGGVHLLSLCSGKAICKNGISKRTFEEIKEEIASCGDVAKAIINLAVYGKAQNRSYERLALLVDTVGPRLSGSKNLEKAIQIMYQNLQQDGLEKVHLEPVRIPHWERGEESAVMLEPRIHKIAILGLGSSIGTPPEGITAEVLVVTSFDELQRRASEARGKIVVYNQPYINYSRTVQYRTQGAVEAAKVGALASLIRSVASFSIYSPHTGIQEYQDGVPKIPTACITVEDAEMMSRMASHGIKIVIQLKMGAKTYPDTDSFNTVAEITGSKYPEQVVLVSGHLDSWDVGQGAMDDGGGAFISWEALSLIKDLGLRPKRTLRLVLWTAEEQGGVGAFQYYQLHKVNISNYSLVMESDAGTFLPTGLQFTGSEKARAIMEEVMSLLQPLNITQVLSHGEGTDINFWIQAGVPGASLLDDLYKYFFFHHSHGDTMTVMDPKQMNVAAAVWAVVSYVVADMEEMLPRS

SEQ ID NO: 34293 - protein, 906 aa, Homo sapiens
MAGNVKKSSGAGGGSGSGGSGSGGLIGLMKDAFQPHHHHHHHLSPHPPGTVDKKMVEKCWKLMDKVVRLCQNPKLALKNSPPYILDLLPDTYQHLRTILSRYEGKMETLGENEYFRVFMENLMKKTKQTISLFKEGKERMYEENSQPRRNLTKLSLIFSHMLAELKGIFPSGLFQGDTFRITKADAAEFWRKAFGEKTIVPWKSFRQALHEVHPISSGLEAMALKSTIDLTCNDYISVFEFDIFTRLFQPWSSLLRNWNSLAVTHPGYMAFLTYDEVKARLQKFIHKPGSYIFRLSCTRLGQWAIGYVTADGNILQTIPHNKPLFQALIDGFREGFYLFPDGRNQNPDLTGLCEPTPQDHIKVTQEQYELYCEMGSTFQLCKICAENDKDVKIEPCGHLMCTSCLTSWQESEGQGCPFCRCEIKGTEPIVVDPFDPRGSGSLLRQGAEGAPSPNYDDDDDERADDTLFMMKELAGAKVERPPSPFSMAPQASLPPVPPRLDLLPQRVCVPSSASALGTASKAASGSLHKDKPLPVPPTLRDLPPPPPPDRPYSVGAESRPQRRPLPCTPGDCPSRDKLPPVPSSRLGDSWLPRPIPKVPVSAPSSSDPWTGRELTNRHSLPFSLPSQMEPRPDVPRLGSTFSLDTSMSMNSSPLVGPECDHPKIKPSSSANAIYSLAARPLPVPKLPPGEQCEGEEDTEYMTPSSRPLRPLDTSQSSRACDCDQQIDSCTYEAMYNIQSQAPSITESSTFGEGNLAAAHANTGPEESENEDDGYDVPKPPVPAVLARRTLSDISNASSSFGWLSLDGDPTTNVTEGSQVPERPPKPFPRRINSERKAGSCQQGSGPAASAATASPQLSSEIENLMSQGYSYQDIQKALVIAQNNIEMAKNILREFVSISSPAHVAT

SEQ ID NO: 34294 - protein, 361 aa, Homo sapiens
MTGKKSSREKRRKRSSQEAAAALAAPDIVPALASGSSGSTSGCGSAGGCGSVSCCGNANFSGSVTGGGSGGSCWGGSSVERSERRKRRSTDSSSVSGSLQQETKYILPTLEKELFLAEHSDLEEGGLDLTVSLKPVSFYISDKKEMLQQCFCIIGEKKLQKMLPDVLKNCSIEEIKKLCQEQLELLSEKKILKILEGDNGMDSDMEEEADDGSKMGSDLVSQQDICIDSASSVRENKQPEGLELKQGKGEDSDVLSINADAYDSDIEGPCNEEAAAPEAPENTVQSEAGQIDDLEKDIEKSVNEILGLAESSPNEPKAATLAVPPPEDVQPSAQQLELLELEMRARAIKALMKAGDIKKPA

SEQ ID NO: 34295 - protein, 216 aa, Homo sapiens
MLQQCFCIIGEKKLQKMLPDVLKNCSIEEIKKLCQEQLELLSEKKILKILEGDNGMDSDMEEEADDGSKMGSDLVSQQDICIDSASSVRENKQPEGLELKQGKGEDSDVLSINADAYDSDIEGPCNEEAAAPEAPENTVQSEAGQIDDLEKDIEKSVNEILGLAESSPNEPKAATLAVPPPEDVQPSAQQLELLELEMRARAIKALMKAGDIKKPA

SEQ ID NO: 34296 - protein, 2220 aa, Homo sapiens
MIRIAALNASSTIEDDHEGSFKSHKTQTKEAQEAEAFALYHKALDLQKHDRFEESAKAYHELLEASLLREAVSSGDEKEGLKHPGLILKYSTYKNLAQLAAQREDLETAMEFYLEAVMLDSTDVNLWYKIGHVALRLIRIPLARHAFEEGLRCNPDHWPCLDNLITVLYTLSDYTTCLYFICKALEKDCRYSKGLVLKEKIFEEQPCLRKDSLRMFLKCDMSIHDVSVSAAETQAIVDEALGLRKKRQALIVREKEPDLKLVQPIPFFTWKCLGESLLAMYNHLTTCEPPRPSLGKRIDLSDYQDPSQPLESSMVVTPVNVIQPSTVSTNPAVAVAEPVVSYTSVATTSFPLHSPGLLETGAPVGDISGGDKSKKGVKRKKISEESGETAKRRSARVRNTKCKKEEKVDFQELLMKFLPSRLRKLDPEEEDDSFNNYEVQSEAKLESFPSIGPQRLSFDSATFMESEKQDVHEFLLENLTNGGILELMMRYLKAMGHKFLVRWPPGLAEVVLSVYHSWRRHSTSLPNPLLRDCSNKHIKDMMLMSLSCMELQLDQWLLTKGRSSAVSPRNCPAGMVNGRFGPDFPGTHCLGDLLQLSFASSQRDLFEDGWLEFVVRVYWLKARFLALQGDMEQALENYDICTEMLQSSTAIQVEAGAERRDIVIRLPNLHNDSVVSLEEIDKNLKSLERCQSLEEIQRLYEAGDYKAVVHLLRPTLCTSGFDRAKHLEFMTSIPERPAQLLLLQDSLLRLKDYRQCFECSDVALNEAVQQMVNSGEAAAKEEWVATVTQLLMGIEQALSADSSGSILKVSSSTTGLVRLTNNLIQVIDCSMAVQEEAKEPHVSSVLPWIILHRIIWQEEDTFHSLCHQQQLQNPAEEGMSETPMLPSSLMLLNTAHEYLGRRSWCCNSDGALLRFYVRVLQKELAASTSEDTHPYKEELETALEQCFYCLYSFPSKKSKARYLEEHSAQQVDLIWEDALFMFEYFKPKTLPEFDSYKTSTVSADLANLLKRIATIVPRTERPALSLDKVSAYIEGTSTEVPCLPEGADPSPPVVNELYYLLADYHFKNKEQSKAIKFYMHDICICPNRFDSWAGMALARASRIQDKLNSNELKSDGPIWKHATPVLNCFRRALEIDSSNLSLWIEYGTMSYALHSFASRQLKQWRGELPPELVQQMEGRRDSMLETAKHCFTSAARCEGDGDEEEWLIHYMLGKVAEKQQQPPTVYLLHYRQAGHYLHEEAARYPKKIHYHNPPELAMEALEVYFRLHASILKLLGKPDSGVGAEVLVNFMKEAAEGPFARGEEKNTPKASEKEKACLVDEDSHSSAGTLPGPGASLPSSSGPGLTSPPYTATPIDHDYVKCKKPHQQATPDDRSQDSTAVALSDSSSTQDFFNEPTSLLEGSRKSYTEKRLPILSSQAGATGKDLQGATEERGKNEESLESTEGFRAAEQGVQKPAAETPASACIPGKPSASTPTLWDGKKRGDLPGEPVAFPQGLPAGAEEQRQFLTEQCIASFRLCLSRFPQHYKSLYRLAFLYTYSKTHRNLQWARDVLLGSSIPWQQLQHMPAQGLFCERNKTNFFNGIWRIPVDEIDRPGSFAWHMNRSIVLLLKVLAQLRDHSTLLKVSSMLQRTPDQGKKYLRDADRQVLAQRAFILTVKVLEDTLSELAEGSERPGPKVCGLPGARMTTDVSHKASPEDGQEGLPQPKKPPLADGSGPGPEPGGKVGLLNHRPVAMDAGDSADQSGERKDKESPRAGPTEPMDTSEATVCHSDLERTPPLLPGRPARDRGPESRPTELSLEELSISARQQPTPLTPAQPAPAPAPATTTGTRAGGHPEEPLSRLSRKRKLLEDTESGKTLLLDAYRVWQQGQKGVAYDLGRVERIMSETYMLIKQVDEEAALEQAVKFCQVHLGAAAQRQASGDTPTTPKHPKDSRENFFPVTVVPTAPDPVPADSVQRPSDAHTKPRPALAAATTIITCPPSASASTLDQSKDPGPPRPHRPEATPSMASLGPEGEELARVAEGTSFPPQEPRHSPQVKMAPTSSPAEPHCWPAEAALGTGAEPTCSQEGKLRPEPRRDGEAQEAASETQPLSSPPTAASSKAPSSGSAQPPEGHPGKPEPSRAKSRPLPNMPKLVIPSAATKFPPEITVTPPTPTLLSPKGSISEETKQKLKSAILSAQSAANVRKESLCQPALEVLETSSQESSLESETDEDDDYMDI

SEQ ID NO: 34297 - protein, 2141 aa, Homo sapiens
MIRIAALNASSTIEDDHEGSFKSHKTQTKEAQEAEAFALYHKALDLQKHDRFEESAKAYHELLEASLLREAVSSGDEKEGLKHPGLILKYSTYKNLAQLAAQREDLETAMEFYLEAVMLDSTDVNLWYKIGHVALRLIRIPLARHAFEEGLRCNPDHWPCLDNLITVLYTLSDYTTCLYFICKALEKDCRYSKGLVLKEKIFEEQPCLRKDSLRMFLKCWKCLGESLLAMYNHLTTCEPPRPSLGKRIDLSDYQDPSQPLESSMVVTPVNVIQPSTVSTNPAVAVAEPVVSYTSVATTSFPLHSPGLLETGAPVGDISGGDKSKKGVKRKKISEESGETAKRRSARVRNTKCKKEEKVDFQELLMKFLPSRLRKLDPEEEDDSFNNYEVQSEAKLESFPSIGPQRLSFDSATFMESEKQDVHEFLLENLTNGGILELMMRYLKAMGHKFLVRWPPGLAEVVLSVYHSWRRHSTSLPNPLLRDCSNKHIKDMMLMSLSCMELQLDQWLLTKGRSSAVSPRNCPAGMVNGRFGPDFPGTHCLGDLLQLSFASSQRDLFEDGWLEFVVRVYWLKARFLALQGDMEQALENYDICTEMLQSSTAIQVEAGAERRDIVIRLPNLHNDSVVSLEEIDKNLKSLERCQSLEEIQRLYEAGDYKAVVHLLRPTLCTSGFDRAKHLEFMTSIPERPAQLLLLQDSLLRLKDYRQCFECSDVALNEAVQQMVNSGEAAAKEEWVATVTQLLMGIEQALSADSSGSILKVSSSTTGLVRLTNNLIQVIDCSMAVQEEAKEPHVSSVLPWIILHRIIWQEEDTFHSLCHQQQLQNPAEEGMSETPMLPSSLMLLNTAHEYLGRRSWCCNSDGALLRFYVRVLQKELAASTSEDTHPYKEELETALEQCFYCLYSFPSKKSKARYLEEHSAQQVDLIWEDALFMFEYFKPKTLPEFDSYKTSTVSADLANLLKRIATIVPRTERPALSLDKVSAYIEGTSTEVPCLPEGADPSPPVVNELYYLLADYHFKNKEQSKAIKFYMHDICICPNRFDSWAGMALARASRIQDKLNSNELKSDGPIWKHATPVLNCFRRALEIDSSNLSLWIEYGTMSYALHSFASRQLKQWRGELPPELVQQMEGRRDSMLETAKHCFTSAARCEGDGDEEEWLIHYMLGKVAEKQQQPPTVYLLHYRQAGHYLHEEAARYPKKIHYHNPPELAMEALEVYFRLHASILKLLGKPDSGVGAEVLVNFMKEAAEGPFARGEEKNTPKASEKEKACLVDEDSHSSAGTLPGPGASLPSSSGPDRSQDSTAVALSDSSSTQDFFNEPTSLLEGSRKSYTEKRLPILSSQAGATGKDLQGATEERGKNEESLESTEGFRAAEQGVQKPAAETPASACIPGKPSASTPTLWDGKKRGDLPGEPVAFPQGLPAGAEEQRQFLTEQCIASFRLCLSRFPQHYKSLYRLAFLYTYSKTHRNLQWARDVLLGSSIPWQQLQHMPAQGLFCERNKTNFFNGIWRIPVDEIDRPGSFAWHMNRSIVLLLKVLAQLRDHSTLLKVSSMLQRTPDQGKKYLRDADRQVLAQRAFILTVKVLEDTLSELAEGSERPGPKVCGLPGARMTTDVSHKASPEDGQEGLPQPKKPPLADGSGPGPEPGGKVGLLNHRPVAMDAGDSADQSGERKDKESPRAGPTEPMDTSEATVCHSDLERTPPLLPGRPARDRGPESRPTELSLEELSISARQQPTPLTPAQPAPAPAPATTTGTRAGGHPEEPLSRLSRKRKLLEDTESGKTLLLDAYRVWQQGQKGVAYDLGRVERIMSETYMLIKQVDEEAALEQAVKFCQVHLGAAAQRQASGDTPTTPKHPKDSRENFFPVTVVPTAPDPVPADSVQRPSDAHTKPRPALAAATTIITCPPSASASTLDQSKDPGPPRPHRPEATPSMASLGPEGEELARVAEGTSFPPQEPRHSPQVKMAPTSSPAEPHCWPAEAALGTGAEPTCSQEGKLRPEPRRDGEAQEAASETQPLSSPPTAASSKAPSSGSAQPPEGHPGKPEPSRAKSRPLPNMPKLVIPSAATKFPPEITVTPPTPTLLSPKGSISEETKQKLKSAILSAQSAANVRKESLCQPALEVLETSSQESSLESETDEDDDYMDI

SEQ ID NO: 34298 - protein, 1437 aa, Homo sapiens
MKKSQREDIFKKMSEEMDNITAEEIIDKHLQKDLDAEENQNVAKTLRGKVREKLKISKINKGEKSSTEQLIDSEIHQRSKLSPQTEVSLDESLSFFILSGEEGSALGKSSEQRPVNRSYPKCFSLGVNLQNVAESEEEEFMKEFILTDILKVKAADYEDDQEQIKKQKANIFVPSSSPVVNQRKLPKDMMPRILEDEGFYIQRKPEIYKKTCNKMENRLLKLEEGKCWFGESGEIMSLPTPIKQSWNFRLNVRKEPLNPLLKTIYRKAVKYDLGSSFMNKMEGSREIYQLDLNIVGLQFSHHHLFNQEQVLCARLLQLYECFQDRQQQNVSQLLYEKLKALTDATKLSNENSEINQLTRKSLQDYYWQISNTKQMYDLERGKDLSLLHSILRTWKQIKSLRHGQGFTSTPIKLQVQRIKMNKCDEQEQISEMSETEKKNEGKELKNGKKLESLSYLASDETEIERIKPITLRPQLSFTAELTSLSKCSLHEQKRRAKIQKLKYFIKIFYNNKQVSCTSVSPLQFDFKVMFQQIFNIQLMYWPEVICLEVYEKSKRTSLLAKLYIPLPNYTELKGKTALQYVEFSSDKLVMPADGEVGSNVPFLLEGNGTEELCLLTSGKLSYSLSWSLDENGLPLIPMPQSLRSSYCSMLRNVDARSVPGIPWLMNEQKLFEWANEVRIDPNNPEYSDLMESVTYMRLKGQDIPKYFRLEQLQDEFNFVSEEEMAKSKRFQLLQLRNAGQLDNFLLQQMPLHDTEIPDLVFQEYESQKEKEVSVSDVNSITAQRINSANFLKKVRRLIMKRIVKISKCNLSDIVNDYEEIVSTSQLTDAVCKFVEPRRKLKPQRKERKKVTAQAISDGDIKILVRIVRAYNIPTRKTTINGSLDMPTCLKSSISCLRHRETIKSVASDETLHEDTVHPFVEVSFQHTVYKTNTASGSHPCWNEEIKVDFVSPGHDYSFSSLSKIKDNIYINIFDEMMTEKHEDHCLKSCSGHSYIRKNWLGCIVFPFSALLQQSEISGTFQVTIPPVLLGYTWSNTYVFPKEDSNEQNLKECTFLNIFATIEPQISYVTCNPTLDKFLDQTEVLQRAQIFKKNCKAMFPNRRIVTTVFNDEGIQFLVTRYIKALNPPQQLLDIFLHNSNATFDLIARFVSLIPFVPNTPDENDGSDIWMTSEHCISLAIGNKEEHAILLCNFFLYFGKKALVLLGTSVLEGHVAYVVTQETNEYLLWNPSTGQCYKQFDPFCPLKSVDCLFDDRNVWFNIQQNNTPMAVFFDYSKESFWKQLLPKNVQGTKIQSIQPEEIIYFETDKSMVEDLRNRIERTLKSKVMEWRPKHPTHWNRQCTFILRQILPKLEFGIGSFVSSEGDNEFERILQFYWVTGFPIQMPYIDVQSIIDAVYQTGIHSAEFPQTEFALAVYIHPYPNNILSVWVYLASLVQHQ

SEQ ID NO: 34299 - protein, 322 aa, Homo sapiens
MMTEKHEDHCLKSCSGHSYIRKNWLGCIVFPFSALLQQSEFLDQTEVLQRAQIFKKNCKAMFPNRRIVTTVFNDEGIQFLVTRYIKALNPPQQLLDIFLHNSNATFDLIARFVSLIPFVPNTPDENDGSDIWMTSEHCISLAIGNKEEHAILLCNFFLYFGKKALVLLGTSVLEGHVAYVVTQETNEYLLWNPSTGQCYKQFDPFCPLKSVDCLFDDRNVWFNIQQNNTPMAVFFDYSKESFWKQLLPKNVQGTKIQSIQVTGFPIQMPYIDVQSIIDAVYQTGIHSAEFPQTEFALAVYIHPYPNNILSVWVYLASLVQHQ

SEQ ID NO: 34300 - protein, 401 aa, Homo sapiens
MMTEKHEDHCLKSCSGHSYIRKNWLGCIVFPFSALLQQSEFLDQTEVLQRAQIFKKNCKAMFPNRRIVTTVFNDEGIQFLVTRYIKALNPPQQLLDIFLHNSNATFDLIARFVSLIPFVPNTPDENDGSDIWMTSEHCISLAIGNKEEHAILLCNFFLYFGKKALVLLGTSVLEGHVAYVVTQETNEYLLWNPSTGQCYKQFDPFCPLKSVDCLFDDRNVWFNIQQNNTPMAVFFDYSKESFWKQLLPKNVQGTKIQSIQPEEIIYFETDKSMVEDLRNRIERTLKSKVMEWRPKHPTHWNRQCTFILRQILPKLEFGIGSFVSSEGDNEFERILQFYWVTGFPIQMPYIDVQSIIDAVYQTGIHSAEFPQTEFALAVYIHPYPNNILSVWVYLASLVQHQ

SEQ ID NO: 34301 - protein, 176 aa, Homo sapiens
MGVQMSEEMDNITAEEIIDKHLQKDLDAEENQNVAKTLRGKVREKLKISKINKGEKSSTEQLIDSEIHQRSKLSPQTEVSLDESLSFFILSGEEGSALGKSSEQRPVNRSYPKCFSLGVNLQNVAESEEEEFMKEFILTDILKVKAADYEDDQEQIKKQKANIFVPSSSPGNILSQ

SEQ ID NO: 34302 - protein, 353 aa, Homo sapiens
MWLLEKAGYKVGAAEPAARWAPSGLFSKRRAPGPPTSACPNVLTPDRIPQFFIPPRLPDPGGAVPAARRHVAGRGLPATCSLPHLAGREGWAFLPESPHTRRRESLFHGPPPAPAGGLPAAQSRLHVSAPDLRLCRAPDSDTASSPDSSPFGSPRPGLGRRRVSRPHSLSPEKASSADTSPHSPRRAGPPTPPLFHLDFLCCQLRPTRESVLRLGPRGGQLRLSTEYQAGPGRLRLRLVSAEGLPRPRSRPGSGGGGCCVVLRLRPRVRPREQQSRVVKCSANPIFNEDFFFDGLGPPDLAARSLRAKVLDRGAGLRRDVLLGECETPLIALLPPLGGGLGPGSSLAPTHLSL

SEQ ID NO: 34303 - protein, 551 aa, Homo sapiens
MPSETPQAEVGPTGCPHRSGPHSAKGSLEKGSPEDKEAKEPLWIRPDAPSRCTWQLGRPASESPHHHTAPAKSPKILPDILKKIGDTPMVRINKIGKKFGLKCELLAKCEFFNAGGSVKDRISLRMIEDAERDGTLKPGDTIIEPTSGNTGIGLALAAAVRGYRCIIVMPEKMSSEKVDVLRALGAEIVRTPTNARFDSPESHVGVAWRLKNEIPNSHILDQYRNASNPLAHYDTTADEILQQCDGKLDMLVASVGTGGTITGIARKLKEKCPGCRIIGVDPEGSILAEPEELNQTEQTTYEVEGIGYDFIPTVLDRTVVDKWFKSNDEEAFTFARMLIAQEGLLCGGSAGSTVAVAVKAAQELQEGQRCVVILPDSVRNYMTKFLSDRWMLQKGFLKEEDLTEKKPWWWHLRVQELGLSAPLTVLPTITCGHTIEILREKGFDQAPVVDEAGVILGMVTLGNMLSSLLAGKVQPSDQVGKVIYKQFKQIRLTDTLGRLSHILEMDHFALVVHEQIQYHSTGKSSQRQMVFGVVTAIDLLNFVAAQERDQK

SEQ ID NO: 34304 - protein, 565 aa, Homo sapiens
MPSETPQAEVGPTGCPHRSGPHSAKGSLEKGSPEDKEAKEPLWIRPDAPSRCTWQLGRPASESPHHHTAPAKSPKILPDILKKIGDTPMVRINKIGKKFGLKCELLAKCEFFNAGGSVKDRISLRMIEDAERDGTLKPGDTIIEPTSGNTGIGLALAAAVRGYRCIIVMPEKMSSEKVDVLRALGAEIVRTPTNARFDSPESHVGVAWRLKNEIPNSHILDQYRNASNPLAHYDTTADEILQQCDGKLDMLVASVGTGGTITGIARKLKEKCPGCRIIGVDPEGSILAEPEELNQTEQTTYEVEGIGYDFIPTVLDRTVVDKWFKSNDEEAFTFARMLIAQEGLLCGGSAGSTVAVAVKAAQELQEGQRCVVILPDSVRNYMTKFLSDRWMLQKGFLKEEDLTEKKPWWWHLRVQELGLSAPLTVLPTITCGHTIEILREKGFDQAPVVDEAGVILGMVTLGNMLSSLLAGKVQPSDQVGKVIYKQFKQIRLTDTLGRLSHILEMDHFALVVHEQIQSQDQAWAGVVGGPADHSTGKSSQRQMVFGVVTAIDLLNFVAAQERDQK

SEQ ID NO: 34305 - protein, 166 aa, Homo sapiens
MEATTAGVGRLEEEALRRKERLKALREKTGRKDKEDGEPKTKHLREEEEEGEKHRELRLRNYVPEDEDLKKRRVPQAKPVAVEEKVKEQLEAAKPEPVIEEVDLANLAPRKPDWDLKRDVAKKLEKLKKRTQRAIAELIRERLKGQEDSLASAVDAATEQKTCDSD

SEQ ID NO: 34306 - protein, 395 aa, Homo sapiens
MLPAVGSADEEEDPAEEDCPELVPMETTQSEEEEKSGLGAKIPVTIITGYLGAGKTTLLNYILTEQHSKRVAVILNEFGEGSALEKSLAVSQGGELYEEWLELRNGCLCCSVKDNGLRAIENLMQKKGKFDYILLETTGLADPGAVASMFWVDAELGSDIYLDGIITIVDSKYGLKHLAEEKPDGLINEATRQVALADAILINKTDLVPEEDVKKLRATIRSINGLGQILETQRSRVDLSNVLDLHAFDSLSGISLQKKLQHVPGTQPHLDQSIVTITFEVPGNAKEEHLNMFIQNLLWEKNVRNKDNHCMEVIRLKGLVSIKDKSQQVIVQGVHELYDLEETPVSWKDDTERTNRLVLLGRNLDKDILKQLFIATVTETEKQWTTHFKEDQVCT

SEQ ID NO: 34307 - protein, 146 aa, Homo sapiens
MPYTDVVIHEIQRLVDIVPMGVPHNIIQDTQFRGYLLPKGTDVFPLLGSVLKDPKYFRYPDAFYPQHFLDEQGRFKKNEAFVPFSSGKRICLGEAMARMELFLYFTSTLQNFSLCSLVPLVDIDITPKLSGFGNITPTYELCLVAR

SEQ ID NO: 34308 - protein, 109 aa, Homo sapiens
MERLCLQPGLLPTAVYLPHWERSSRDREEKEAPFFRLLSRRLMFCVHARQRTQNVPINKYQRLVVKMKEEEALREKLNMQNITHKENQNAGSLEMIDNMLKQEERRELK

SEQ ID NO: 34309 - protein, 312 aa, Homo sapiens
MRMLLALLALSAARPSASAESHWCYEVQAESSNYPCLVPVKWGGNCQKDRQSPINIVTTKAKVDKKLGRFFFSGYDKKQTWTVQNNGHSVMMLLENKASISGGGLPAPYQAKQLHLHWSDLPYKGSEHSLDGEHFAMEMHIVHEKEKGTSRNVKEAQDPEDEIAVLAFLVEAGTQVNEGFQPLVEALSNIPKPEMSTTMAESSLLDLLPKEEKLRHYFRYLGSLTTPTCDEKVVWTVFREPIQLHREQILAFSQKLYYDKEQTVSMKDNVRPLQQLGQRTVIKSGAPGRPLPWALPALLGPMLACLLAGFLR

SEQ ID NO: 34310 - protein, 106 aa, Homo sapiens
MRMLLALLALSAARPSASAESHWCYEVQAESSNYPCLVPVKWGGNCQKDRQSPINIVTTKAKVDKKLGRFFFSGYDKKQTWTVQNNGHSGWNPGERGLPATGGGTV

SEQ ID NO: 34311 - protein, 162 aa, Homo sapiens
MNSRTASARGWFSSRPPTSESDLEPATDGPASETTTLSPEATTFNDTRIPDAAGGTAGVGTMLLSFGIITVIGLAVALVLYIRKKKRLEKLRHQLMPMYNFDPTEEQDELEQELLEHGRDAASVQAATSVQAMQGKTTLPSQGPLQRPSRLVFTDVANAIHA

SEQ ID NO: 34312 - protein, 142 aa, Homo sapiens
MNSRTASARGWFSSRPPTSESDLEPATDGPASETTTLSPEATTFNDTRIPDAAGGTAGVLYIRKKKRLEKLRHQLMPMYNFDPTEEQDELEQELLEHGRDAASVQAATSVQAMQGKTTLPSQGPLQRPSRLVFTDVANAIHA

SEQ ID NO: 34313 - protein, 317 aa, Homo sapiens
MVVMNSLRVILQASPGKLLWRKFQIPRFMPARPCSLYTCTYKTRNRALHPLWESVDLVPGGDRQSPINIRWRDSVYDPGLKPLTISYDPATCLHVWNNGYSFLVEFEDSTDKSVIKGGPLEHNYRLKQFHFHWGAIDAWGSEHTVDSKCFPAELHLVHWNAVRFENFEDAALEENGLAVIGVFLKLGKHHKELQKLVDTLPSIKHKDALVEFGSFDPSCLMPTCPDYWTYSGSLTTPPLSESVTWIIKKQPVEVDHDQLEQFRTLLFTSEGEKEKRMVDNFRPLQPLMNRTVRSSFRHDYVLNVQAKPKPATSQATP

SEQ ID NO: 34314 - protein, 273 aa, Homo sapiens
MSDNKERKSQGFPKEDNQDTSSLADAVEKVAKQQQSQASEIEKNKKVLFNLKNELHELEKEIAAISAETKETERQIYQQDSAIENTKLHCDSLETQIKSLHSENVKLKFDIETAQEDFEEHMIKYNAYYAKIKAHKNSLGEVESKWSFMTELHEKRDFVKKLKTMKEELMQDLQNPGGNRITQVQEDITNLKDKIITVKESIIEKTCFLEEEKKTHEKLRKEIEVQHKRYDAILKRLHCQVNKLQSNRRQWQWNIQQLEKTAAELRKCIGMQE

SEQ ID NO: 34315 - protein, 284 aa, Homo sapiens
MSDNKERKSQGFPKEDNQDTSSLADAVEKVAKQQQSQASEIEKNKKVLFNLKNELHELEKEIAAISAETKETERQIYQQDSAIENTKLHCDSLETQIKSLHSENVKLKFDIETAQEDFEEHMIKYNAYYAKIKAHKNSLGEVESKWSFMTELHEKRDFVKKLKTMKEELMQDLQNPGGNRITQVQEDITNLKDKIITVKESIIEKTCFLEEEKKTHEKLRKEIEGLAPSPRLECSSAISAHCKLCLPGSRHSPASASGVAGTTGACHHTQLIFCIFSRDGVSPC

SEQ ID NO: 34316 - protein, 260 aa, Homo sapiens
MSHHWGYGKHNGPEHWHKDFPIAKGERQSPVDIDTHTAKYDPSLKPLSVSYDQATSLRILNNGHAFNVEFDDSQDKAVLKGGPLDGTYRLIQFHFHWGSLDGQGSEHTVDKKKYAAELHLVHWNTKYGDFGKAVQQPDGLAVLGIFLKVGSAKPGLQKVVDVLDSIKTKGKSADFTNFDPRGLLPESLDYWTYPGSLTTPPLLECVTWIVLKEPISVSSEQVLKFRKLNFNGEGEPEELMVDNWRPAQPLKNRQIKASFK

SEQ ID NO: 34317 - protein, 292 aa, Homo sapiens
MAQPQLYLPEPFKIAYRKVGQCRRFQQLKKKNGSFKRKGIERWHRAVSTNLLKQNVLVPKEESSSDSDMGFHESQQNQKSNLKTKVKTAFGRMLSYKYRSKPACASQEGSTDHKEALLSNTQSLLPRIVKEFSSPKLFTAKMRKLSENATIQLDVVEAETEEITQGNTLLRARRTTKRLSVTSLPSGLQKGPYSPKKRPHFPALKKKKRGMENILRKSDLTVGKLQMQVDDLIETVTDKSMKLLAQRHAELQQCEFLGDEILQSSKQFQRISKRTMRKYKLKNMTTKGPGDS

SEQ ID NO: 34318 - protein, 242 aa, Homo sapiens
MGTGASEKQAEQKVRRAFEASEEAHGTLAASTPWVAMGSAYGSCTCLGAQPVTDLALWPVIYSCMGFSPQAYPAFWAYPWVLYGGYLWMGYPPPAALVPSVWLYWRGASSFDPLIGSPYLAALAPNLFPFPMKFPPTYSLASPTLGGATSSHCPQVGCWTPASSAPRAAVEGPSRGAPYLKTCKAPPSEWASRFGIWAPLPCCSSELRPLPPSPIEDSQLDPGCSRSSSRSPCRARRRLFEC

SEQ ID NO: 34319 - protein, 894 aa, Homo sapiens
MATSMAAASGRFESAKSIEERKEQTRNARAEVLRQAKANFEKEERRKELKRLRGEDTWMLPDVNERIEQFSQEHSVKKKKKKDKHSKKAKKEKKKKSKKQKYEKNNESSDSSSSSEDEWVEAVPSQTPDKEKAWKVKDEKSGKDDTQIIKRDEWMTVDFMSVKTVSSSSLKAEKETMRKIEQEKNQALEQSKLMERELNPYWKDGGTGLPPEDCSVSSITKVSVVEDGGLSWLRKSYLRMKEQAEKQSRNFEDIVAERYGSMEIFQSKLEDAEKAASTKEDYRRERWRKPTYSDKAQNCQESRESDLVKYGNSSRDRYATTDTAKNSNNEKFIGDEKDKRPGSLETCRRESNPRQNQEFSFGNLRAKFLRPSDDEELSFHSKGRKFEPLSSSSALVAQGSLCSGFRKPTKNSEERLTSWSRSDGRGDKKHSNQKPSETSTDEHQHVPEDPREKSQDEVLRDDPPKKEHLRDTKSTFAGSPERESIHILSVDEKNKLGAKIIKAEMMGNMELAEQLKVQLEKANKFKETITQIPKKSGVENEDQQEVILVRTDQSGRVWPVNTPGKSLESQGGRRKRQMVSTHEERERVRYFHDDDNLSLNDLVKNEKMGTAENQNKLFMRMASKFMGKTDGDYYTLDDMFVSKAAERERLGEEEENQRKKAIAEHRSLAAQMEKCLYCFDSSQFPKHLIVAIGVKVYLCLPNVRSLTEGHCLIVPLQHHRAATLLDEDIWEEIQMFRKSLVKMFEDKGLDCIFLETNMSMKKQYHMVYECIPLPKEVGDMAPIYFKKAIMESDEEWSMNKKLIDLSSKDIRKSVPRGLPYFSVDFGLHGGFAHVIEDQHKFPHYFGKEIIGGMLDIEPRLWRKGIRESFEDQRKKALQFAQWWKPYDFTKSKNY

SEQ ID NO: 34320 - protein, 742 aa, Homo sapiens
MATSMAAASGRFESAKSIEERKEQTRNARAEVLRQAKANFEKEERRKELKRLRGEDTWMLPDVNERIEQFSQEHSVKKKKKKDKHSKKAKKEKKKKSKKQKYEKNNESSDSSSSSEDEWVEAVPSQTPDKEKAWKVKDEKSGKDDTQIIKRDEWMTVDFMSVKTVSSSSLKAEKETMRKIEQEKNQALEQSKLMERELNPYWKDGGTGLPPEDCSVSSITKVSVVEDGGLSWLRKSYLRMKEQAEKQSRNFEDIVAERYGSMEIFQSKLEDAEKAASTKEDYRRERWRKPTYSDKAQNCQESRESDLVKYGNSSRDRYATTDTAKNSNNEKFIGDEKDKRPGSLETCRRESNPRQNQEFSFGNLRAKFLRPSDDEELSFHSKGRKFEPLSSSSALVAQGSLCSGFRKPTKNSEERLTSWSRSDGRGDKKHSNQKPSETSTDEHQHVPEDPREKSQDEVLRDDPPKKEHLRDTKSTFAGSPERESIHILSVDEKNKLGAKIIKAEMMGNMELAEQLKVQLEKANKFKETITQIPKKSGVENEDQQEVILVRTDQSGRVWPVNTPGKSLESQGGRRKRQMVSTHEERERVRYFHDDDNLSLNDLVKNEKMGTAENQNKLFMRMASKFMGKTDGDYYTLDDMFVSKAAERERLGEEEENQRKKAIAEHRSLAAQMEKCLYCFDSSQFPKHLIVAIGVKVYLCLPNVRSLTEGHCLIVPLQHHRAATLLDEDIWEEIQIKSRTVIQ

SEQ ID NO: 34321 - protein, 672 aa, Homo sapiens
MATSMAAASGRFESAKSIEERKEQTRNARAEVLRQAKANFEKEERRKELKRLRGEDTWMLPDVNERIEQFSQEHSVKKKKKKDKHSKKAKKEKKKKSKKQKYEKNNESSDSSSSSEDEWVEAVPSQTPDKEKAWKVKDEKSGKDDTQIIKRDEWMTVDFMSVKTVSSSSLKAEKETMRKIEQEKNQALEQSKLMERELNPYWKDGGTGLPPEDCSVSSITKVSVVEDGGLSWLRKSYLRMKEQAEKQSRNFEDIVAERYGSMEIFQSKLEDAEKAASTKEDYRRERWRKPTYSDKAQNCQESRESDLVKYGNSSRDRYATTDTAKNSNNEKFIGDEKDKRPGSLETCRRESNPRQNQEFSFGNLRAKFLRPSDDEELSFHSKGRKFEPLSSSSALVAQGSLCSGFRKPTKNSEERLTSWSRSDGRGDKKHSNQKPSETSTDEHQHVPEDPREKSQDEVLRDDPPKKEHLRDTKSTFAGSPERESIHILSVDEKNKLGAKIIKAEMMGNMELAEQLKVQLEKANKFKETITQIPKKSGVENEDQQEVILVRTDQSGRVWPVNTPGKSLESQGGRRKRQMVSTHEERERVRYFHDDDNLSLNDLVKNEKMGTAENQNKLFMRMASKQLRENVLVKRKRTKGKKLLLSIGVLLHKWKNVCIVLTALNFPSILLLQ

SEQ ID NO: 34322 - protein, 369 aa, Homo sapiens
MWCLERLRLGPECLRRSGDWLLPGRARGAKSRTTAACANVLTPDRIPEFCIPPRLMPRLALAALRNSWVEEAGMDEGAGRTDWDPRSQAALSLPHLPRVRTAYGFCALLESPHTRRKESLLLGGPPAPRPRAHTYGGGGGPDALLGTLRVPRAPGPATPAAPGCPRPPQDALARRPRGCRLLRVPDGLLSRALRAGRSRRLTRVRSVSSGNEDKERRAGSQSPARAPSTSPPSSRVPFPERLEAEGTVALGRAGDALRLAAEYCPGTGRLRLRLLRAESPAGGAPGPRAVSCRLSLVLRPPGTALRQCSTVVGRSRKASFDQDFCFDGLSEDEVRRLAVRVKARDEGRGRERGRLLGQGELSLGALLLL

SEQ ID NO: 34323 - protein, 174 aa, Homo sapiens
MATVAELKAVLKDTLEKKGVLGHLKARIRAEVFNALDDDREPRPSLSHENLLINELIREYLEFNKYKYTASVLIAESGQPVVPLDRQFLIHELNAFEESKDNTIPLLYGILAHFLRGTKDGIQNAFLKGPSLQPSDPSLGRQPSRRKPMDDHLRKEEQKSTNIEDLHVSQAVNR

SEQ ID NO: 34324 - protein, 100 aa, Homo sapiens
MATVAELKAVLKDTLEKKGVLGHLKARIRAEVFNALDDDREPRPSLSHENLLINELIREYLEFNKYKYTASVLIADDHLRKEEQKSTNIEDLHVSQAVNR

SEQ ID NO: 34325 - protein, 346 aa, Homo sapiens
MDQYCILGRIGEGAHGIVFKAKHVETGEIVALKKVALRRLEDGFPNQALREIKALQEMEDNQYVVQLKAVFPHGGGFVLAFEFMLSDLAEVVRHAQRPLAQAQVKSYLQMLLKGVAFCHANNIVHRDLKPANLLISASGQLKIADFGLARVFSPDGSRLYTHQVATRWYRAPELLYGARQYDQGVDLWSVGCIMGELLNGSPLFPGKNDIEQLCYVLRILGTPNPQVWPELTELPDYNKISFKEQVPMPLEEVLPDVSPQALDLLGQFLLYPPHQRIAASKALLHQYFFTAPLPAHPSELPIPQRLGGPAPKAHPGPPHIHDFHVDRPLEESLLNPELIRPFILEG

SEQ ID NO: 34326 - protein, 243 aa, Homo sapiens
MDQYCILGRIGEGAHGIVFKAKHVETGEIVALKKVALRRLEDGFPNQALREIKALQEMEDNQYVVQLKAVFPHGGGFVLAFEFMLSDLAEVVRHAQRPLAQAQVKSYLQMLLKGVAFCHANNIVHRDLKPANLLISASGQLKIADFGLARVFSPDGSRLYTHQVATRSSLSCRTTTRSPLRSRCPCPWRRCCLTSLPRHWICWVNSFSTLLTSASQLPRLSSISTSSQLPCLPIHLSCRFLSV

SEQ ID NO: 34327 - protein, 275 aa, Homo sapiens
MDQYCILGRIGEGAHGIVFKAKHVETGEIVALKKVALRRLEDGFPNQALREIKALQEMEDNQYVVQLKAVFPHGGGFVLAFEFMLSDLAEVVRHAQRPLAQAQVKSYLQMLLKGVAFCHANNIVHRDLKPANLLISASGQLKIADFGLARVFSPDGSRLYTHQVATRSVGCIMGELLNGSPLFPGKNDIEQLCYVLRILGTPNPQVWPELTELPDYNKISFKEQVPMPLEEVLPDVSPQALDLLGQFLLYPPHQRIAASKLPCLPIHLSCRFLSV

SEQ ID NO: 34328 - protein, 338 aa, Homo sapiens
MDQYCILGRIGEGAHGIVFKAKHVEPRVGWQCLPSILQTGEIVALKKVALRRLEDGFPNQALREIKALQEMEDNQYVVQLKAVFPHGGGFVLAFEFMLSDLAEVVRHAQRPLAQAQVKSYLQMLLKGVAFCHANNIVHRDLKPANLLISASGQLKIADFGLARVFSPDGSRLYTHQVATRSVGCIMGELLNGSPLFPGKNDIEQLCYVLRILGTPNPQVWPELTELPDYNKISFKEQVPMPLEEVLPDVSPQALDLLGQFLLYPPHQRIAASKALLHQYFFTAPLPAHPSELPIPQRLGGPAPKAHPGPPHIHDFHVDRPLEESLLNPELIRPFILEG

SEQ ID NO: 34329 - protein, 325 aa, Homo sapiens
MDQYCILGRIGEGAHGIVFKAKHVETGEIVALKKVALRRLEDGFPNQALREIKALQEMEDNQYVVQLKAVFPHGGGFVLAFEFMLSDLAEVVRHAQRPLAQAQVKSYLQMLLKGVAFCHANNIVHRDLKPANLLISASGQLKIADFGLARVFSPDGSRLYTHQVATRSVGCIMGELLNGSPLFPGKNDIEQLCYVLRILGTPNPQVWPELTELPDYNKISFKEQVPMPLEEVLPDVSPQALDLLGQFLLYPPHQRIAASKALLHQYFFTAPLPAHPSELPIPQRLGGPAPKAHPGPPHIHDFHVDRPLEESLLNPELIRPFILEG

SEQ ID NO: 34330 - protein, 466 aa, Homo sapiens
MVRSVAWAGFMVLLMIPWGSAAKLVCYFTNWAQYRQGEARFLPKDLDPSLCTHLIYAFAGMTNHQLSTTEWNDETLYQEFNGLKKMNPKLKTLLAIGGWNFGTQKFTDMVATANNRQTFVNSAIRFLRKYSFDGLDLDWEYPGSQGSPAVDKERFTTLVQDLANAFQQEAQTSGKERLLLSAAVPAGQTYVDAGYEVDKIAQNLDFVNLMAYDFHGSWEKVTGHNSPLYKRQEESGAAASLNVDAAVQQWLQKGTPASKLILGMPTYGRSFTLASSSDTRVGAPATGSGTPGPFTKEGGMLAYYEVCSWKGATKQRIQDQKVPYIFRDNQWVGFDDVESFKTKVSYLKQKGLGGAMVWALDLDDFAGFSCNQGRYPLIQTLRQELSLPYLPSGTPELEVPKPGQPSEPEHGPSPGQDTFCQGKADGLYPNPRERSSFYSCAAGRLFQQSCPTGLVFSNSCKCCTWN

SEQ ID NO: 34331 - protein, 387 aa, Homo sapiens
MVRSVAWAGFMVLLMIPWGSAAKLVCYFTNWAQYRQGEARFLPKDLDPSLCTHLIYAFAGMTNHQLSTTEWNDETLYQEFNGLKKMNPKLKTLLAIGGWNFGTQKFTDMVATANNRQTFVNSAIRFLRKYSFDGLDLDWEYPGSQGSPAVDKERFTTLVQDLANAFQQEAQTSGKERLLLSAAVPAGQTYVDAGYEVDKIAQNLDFVNLMAYDFHGSWEKVTGHNSPLYKRQEESGAAASLNVDAAVQQWLQKGTPASKLILGMPTYGRSFTLASSSDTRVGAPATGSGTPGPFTKEGGMLAYYEVCSWKGATKQRIQDQKVPYIFRDNQWVGFDDVESFKTKVSYLKQKGLGGAMVWALDLDDFAGFSCNQGRYPLIQTLRQELNG

SEQ ID NO: 34332 - protein, 437 aa, Homo sapiens
MVRSVAWAGFMVLLMIPWGSAAKLVCYFTNWAQYRQGEARFLPKDLDPSLCTHLIYAFAGMTNHQLSTTEWNDETLYQEFNGLKKMNPKLKTLLAIGGWNFGTQKFTDMVATANNRQTFVNSAIRFLRKYSFDGLDLDWEYPGSQGSPAVDKERFTTLVQDLANAFQQEAQTSGKERLLLSAAVPAGQTYVDAGYEVDKIAQNLDFVNLMAYDFHGSWEKVTGHNSPLYKRQEESGAAASLNVDAAVQQWLQKGTPASKLILGMPTYGRSFTLASSSDTRVGAPATGSGTPGPFTKEGGMLAYYEVCSWKGATKQRIQDQKVPYIFRDNQWVGFDDVESFKTKGRYPLIQTLRQELSLPYLPSGTPELEVPKPGQPSEPEHGPSPGQDTFCQGKADGLYPNPRERSSFYSCAAGRLFQQSCPTGLVFSNSCKCCTWN

SEQ ID NO: 34333 - protein, 447 aa, Homo sapiens
MVRSVAWAGFMVLLMIPWGSAAKLVCYFTNWAQYRQGEARFLPKDLDPSLCTHLIYAFAGMTNHQLSTTEWNDETLYQEFNGLKKMFTDMVATANNRQTFVNSAIRFLRKYSFDGLDLDWEYPGSQGSPAVDKERFTTLVQDLANAFQQEAQTSGKERLLLSAAVPAGQTYVDAGYEVDKIAQNLDFVNLMAYDFHGSWEKVTGHNSPLYKRQEESGAAASLNVDAAVQQWLQKGTPASKLILGMPTYGRSFTLASSSDTRVGAPATGSGTPGPFTKEGGMLAYYEVCSWKGATKQRIQDQKVPYIFRDNQWVGFDDVESFKTKVSYLKQKGLGGAMVWALDLDDFAGFSCNQGRYPLIQTLRQELSLPYLPSGTPELEVPKPGQPSEPEHGPSPGQDTFCQGKADGLYPNPRERSSFYSCAAGRLFQQSCPTGLVFSNSCKCCTWN

SEQ ID NO: 34334 - protein, 404 aa, Homo sapiens
MSDSKEPRLQQLGLLEEEQLRGLGFRQTRGYKSLAGCLGHGPLVLQLLSFTLLAGLLVQVSKVPSSISQEQSRQDAIYQNLTQLKAAVGELSEKSKLQEIYQELTQLKAAVGELPEKSKLQEIYQELTRLKAAVGELPEKSKLQEIYQELTWLKAAVGELPEKSKMQEIYQELTRLKAAVGELPEKSKQQEIYQELTRLKAAVGELPEKSKQQEIYQELTRLKAAVGELPEKSKQQEIYQELTQLKAAVERLCHPCPWEWTFFQGNCYFMSNSQRNWHDSITACKEVGAQLVVIKSAEEQNFLQLQSSRSNRFTWMGLSDLNQEGTWQWVDGSPLLPSFKQYWNRGEPNNVGEEDCAEFSGNGWNDDKCNLAKFWICKKSAASCSRDEEQFLSPAPATPNPPPA

SEQ ID NO: 34335 - protein, 398 aa, Homo sapiens
MSDSKEPRLQQLGLLEEEQLRGLGFRQTRGYKSLAGCLGHGPLVLQLLSFTLLAGLLVQVSKVPSSISQEQSRQDAIYQNLTQLKAAVGELSEKSKLQEIYQELTQLKAAVGELPEKSKLQEIYQELTRLKAAVGELPEKSKLQEIYQELTWLKAAVGELPEKSKMQEIYQELTRLKAAVGELPEKSKQQEIYQELTRLKAAVGELPEKSKQQEIYQELTRLKAAVGELPEKSKQQEIYQELTQLKAAVERLCHPCPWEWTFFQGNCYFMSNSQRNWHDSITACKEVGAQLVVIKSAEEQSSRSNRFTWMGLSDLNQEGTWQWVDGSPLLPSFKQYWNRGEPNNVGEEDCAEFSGNGWNDDKCNLAKFWICKKSAASCSRDEEQFLSPAPATPNPPPA

SEQ ID NO: 34336 - protein, 312 aa, Homo sapiens
MSDSKEPRLQQLGLLEEEQLRGLGFRQTRGYKSLAGCLGHGPLVLQLLSFTLLAGLLVQVSKVPSSISQEQSRQDAIYQNLTQLKAAVGELSEKSKLQEIYQELTQLKAAVGELPEKSKLQEIYQELTRLKAAVGELPEKSKLQEIYQELTWLKAAVERLCHPCPWEWTFFQGNCYFMSNSQRNWHDSITACKEVGAQLVVIKSAEEQNFLQLQSSRSNRFTWMGLSDLNQEGTWQWVDGSPLLPSFKQYWNRGEPNNVGEEDCAEFSGNGWNDDKCNLAKFWICKKSAASCSRDEEQFLSPAPATPNPPPA

SEQ ID NO: 34337 - protein, 168 aa, Homo sapiens
MSDSKEPRLQQLGLLEEEQLRGLGFRQTRGYKSLAGCLGHGPLVLQLLSFTLLAGLLVQVSKVPSSISQEQSRSNRFTWMGLSDLNQEGTWQWVDGSPLLPSFKQYWNRGEPNNVGEEDCAEFSGNGWNDDKCNLAKFWICKKSAASCSRDEEQFLSPAPATPNPPPA

SEQ ID NO: 34338 - protein, 404 aa, Homo sapiens
MASACPGSDFTSIHSEEEQLRGLGFRQTRGYKSLAGCLGHGPLVLQLLSFTLLAGLLVQVSKVPSSISQEQSRQDAIYQNLTQLKAAVGELSEKSKLQEIYQELTQLKAAVGELPEKSKLQEIYQELTRLKAAVGELPEKSKLQEIYQELTWLKAAVGELPEKSKMQEIYQELTRLKAAVGELPEKSKQQEIYQELTRLKAAVGELPEKSKQQEIYQELTRLKAAVGELPEKSKQQEIYQELTQLKAAVERLCHPCPWEWTFFQGNCYFMSNSQRNWHDSITACKEVGAQLVVIKSAEEQNFLQLQSSRSNRFTWMGLSDLNQEGTWQWVDGSPLLPSFKQYWNRGEPNNVGEEDCAEFSGNGWNDDKCNLAKFWICKKSAASCSRDEEQFLSPAPATPNPPPA

SEQ ID NO: 34339 - protein, 380 aa, Homo sapiens
MSDSKEPRLQQLGLLEEEQLRGLGFRQTRGYKSLAVSKVPSSISQEQSRQDAIYQNLTQLKAAVGELSEKSKLQEIYQELTQLKAAVGELPEKSKLQEIYQELTRLKAAVGELPEKSKLQEIYQELTWLKAAVGELPEKSKMQEIYQELTRLKAAVGELPEKSKQQEIYQELTRLKAAVGELPEKSKQQEIYQELTRLKAAVGELPEKSKQQEIYQELTQLKAAVERLCHPCPWEWTFFQGNCYFMSNSQRNWHDSITACKEVGAQLVVIKSAEEQNFLQLQSSRSNRFTWMGLSDLNQEGTWQWVDGSPLLPSFKQYWNRGEPNNVGEEDCAEFSGNGWNDDKCNLAKFWICKKSAASCSRDEEQFLSPAPATPNPPPA

SEQ ID NO: 34340 - protein, 360 aa, Homo sapiens
MSDSKEPRLQQLGLLVSKVPSSISQEQSRQDAIYQNLTQLKAAVGELSEKSKLQEIYQELTQLKAAVGELPEKSKLQEIYQELTRLKAAVGELPEKSKLQEIYQELTWLKAAVGELPEKSKMQEIYQELTRLKAAVGELPEKSKQQEIYQELTRLKAAVGELPEKSKQQEIYQELTRLKAAVGELPEKSKQQEIYQELTQLKAAVERLCHPCPWEWTFFQGNCYFMSNSQRNWHDSITACKEVGAQLVVIKSAEEQNFLQLQSSRSNRFTWMGLSDLNQEGTWQWVDGSPLLPSFKQYWNRGEPNNVGEEDCAEFSGNGWNDDKCNLAKFWICKKSAASCSRDEEQFLSPAPATPNPPPA

SEQ ID NO: 34341 - protein, 268 aa, Homo sapiens
MSDSKEPRLQQLGLLVSKVPSSISQEQSRQDAIYQNLTQLKAAVGELSEKSKLQEIYQELTQLKAAVGELPEKSKLQEIYQELTRLKAAVGELPEKSKQQEIYQELTQLKAAVERLCHPCPWEWTFFQGNCYFMSNSQRNWHDSITACKEVGAQLVVIKSAEEQNFLQLQSSRSNRFTWMGLSDLNQEGTWQWVDGSPLLPSFKQYWNRGEPNNVGEEDCAEFSGNGWNDDKCNLAKFWICKKSAASCSRDEEQFLSPAPATPNPPPA

SEQ ID NO: 34342 - protein, 34 aa, Homo sapiens
MSDSKEPRLQQLGLLEEEQLRGLGFRQTRRNQKC

SEQ ID NO: 34343 - protein, 380 aa, Homo sapiens
MASACPGSDFTSIHSEEEQLRGLGFRQTRGYKSLAVSKVPSSISQEQSRQDAIYQNLTQLKAAVGELSEKSKLQEIYQELTQLKAAVGELPEKSKLQEIYQELTRLKAAVGELPEKSKLQEIYQELTWLKAAVGELPEKSKMQEIYQELTRLKAAVGELPEKSKQQEIYQELTRLKAAVGELPEKSKQQEIYQELTRLKAAVGELPEKSKQQEIYQELTQLKAAVERLCHPCPWEWTFFQGNCYFMSNSQRNWHDSITACKEVGAQLVVIKSAEEQNFLQLQSSRSNRFTWMGLSDLNQEGTWQWVDGSPLLPSFKQYWNRGEPNNVGEEDCAEFSGNGWNDDKCNLAKFWICKKSAASCSRDEEQFLSPAPATPNPPPA

SEQ ID NO: 34344 - protein, 334 aa, Homo sapiens
MASACPGSDFTSIHSEEEQLRGLGFRQTRGYKSLAVSKVPSSISQEQSRQDAIYQNLTQLKAAVGELSEKSKLQEIYQELTQLKAAVGELPEKSKLQEIYQELTRLKAAVGELPEKSKLQEIYQELTWLKAAVGELPEKSKMQEIYQELTRLKAAVGELPEKSKQQEIYQELTQLKAAVERLCHPCPWEWTFFQGNCYFMSNSQRNWHDSITACKEVGAQLVVIKSAEEQNFLQLQSSRSNRFTWMGLSDLNQEGTWQWVDGSPLLPSFKQYWNRGEPNNVGEEDCAEFSGNGWNDDKCNLAKFWICKKSAASCSRDEEQFLSPAPATPNPPPA

SEQ ID NO: 34345 - protein, 297 aa, Homo sapiens
MASACPGSDFTSIHSEEEQLRGLGFRQTRGYKSLAVSKVPSSISQEQSRQDAIYQNLTQLKAAVGELSEKSKLQEIYQELTQLKAAVGELPEKSKLQEIYQELTRLKAAVGELPEKSKLQEIYQELTWLKAAVGELPEKSKMQEIYQELTRLKAAVGELPEKSKQQEIYQELTRLKAAVGELPEKSKQQEIYQELTRLKAAVGELPEKSKQQEIYQELTQLKAAVERLCHPCPWEWTFFQGNCYFMSNSQRNWHDSITACKEVGAQLVVIKSAEEQLQAVLEQRRAQQRWGGRLRGI

SEQ ID NO: 34346 - protein, 341 aa, Homo sapiens
MRKVVLITGASSGIGLALCKRLLAEDDELHLCLACRNMSKAEAVCAALLASHPTAEVTIVQVDVSNLQSVFRASKELKQRFQRLDCIYLNAGIMPNPQLNIKALFFGLFSRKVIHMFSTAEGLLTQGDKITADGLQEVFETNVFGHFILIRELEPLLCHSDNPSQLIWTSSRSARKSNFSLEDFQHSKGKEPYSSSKYATDLLSVALNRNFNQQGLYSNVACPGTALTNLTYGILPPFIWTLLMPAILLLRFFANAFTLTPYNGTEALVWLFHQKPESLNPLIKYLSATTGFGRNYIMTQKMDLDEDTAEKFYQKLLELEKHIRVTIQKTDNQARLSGSCL

SEQ ID NO: 34347 - protein, 333 aa, Homo sapiens
MRKVVLITGASSGIGLALCKRLLAEDDELHLCLACRNMSKAEAVCAALLASHPTAEVTIVQVDVSNLQSVFRASKELKQRFQRLDCIYLNAGIMPNPQLNIKALFFGLFSRAEGLLTQGDKITADGLQEVFETNVFGHFILIRELEPLLCHSDNPSQLIWTSSRSARKSNFSLEDFQHSKGKEPYSSSKYATDLLSVALNRNFNQQGLYSNVACPGTALTNLTYGILPPFIWTLLMPAILLLRFFANAFTLTPYNGTEALVWLFHQKPESLNPLIKYLSATTGFGRNYIMTQKMDLDEDTAEKFYQKLLELEKHIRVTIQKTDNQARLSGSCL

SEQ ID NO: 34348 - protein, 306 aa, Homo sapiens
MRKVVLITGASSGIGLALCKRLLAEDDELHLCLACRNMSKAEAVCAALLASHPTAEVTIVQVDVSNLQSVFRASKELKQRFQRLDCIYLNAGIMPNPQLNIKALFFGLFSRKVIHMFSTAEGLLTQGDKITADGLQEVFETNVFGHFILIRELEPLLCHSDNPSQLIWTSSRSARKSNFSLEDFQHSKGKEPYSSSKYATDLLSVALNRNFNQQLRFFANAFTLTPYNGTEALVWLFHQKPESLNPLIKYLSATTGFGRNYIMTQKMDLDEDTAEKFYQKLLELEKHIRVTIQKTDNQARLSGSCL

SEQ ID NO: 34349 - protein, 220 aa, Homo sapiens
MLRLLLALNLFPSIQVTGNKILVKQSPMLVAYDNAVNLSCKYSYNLFSREFRASLHKGLDSAVEVCVVYGNYSQQLQVYSKTGFNCDGKLGNESVTFYLQNLYVNQTDIYFCKIEVMYPPPYLDNEKSNGTIIHVKGKHLCPSPLFPGPSKPFWVLVVVGGVLACYSLLVTVAFIIFWVRSKRSRLLHSDYMNMTPRRPGPTRKHYQPYAPPRDFAAYRS

SEQ ID NO: 34350 - protein, 101 aa, Homo sapiens
MLRLLLALNLFPSIQVTGKHLCPSPLFPGPSKPFWVLVVVGGVLACYSLLVTVAFIIFWVRSKRSRLLHSDYMNMTPRRPGPTRKHYQPYAPPRDFAAYRS

SEQ ID NO: 34351 - protein, 136 aa, Homo sapiens
MLRLLLALNLFPSIQVTGNKILVKQSPMLVAYDNAVNLSYNEKSNGTIIHVKGKHLCPSPLFPGPSKPFWVLVVVGGVLACYSLLVTVAFIIFWVRSKRSRLLHSDYMNMTPRRPGPTRKHYQPYAPPRDFAAYRS

SEQ ID NO: 34352 - protein, 123 aa, Homo sapiens
MLRLLLALNLFPSIQVTGNKILVKQSPMLVAYDNAVNLSWKHLCPSPLFPGPSKPFWVLVVVGGVLACYSLLVTVAFIIFWVRSKRSRLLHSDYMNMTPRRPGPTRKHYQPYAPPRDFAAYRS

SEQ ID NO: 34353 - protein, 55 aa, Homo sapiens
MLRLLLALNLFPSIQVTGNKILVKQSPMLVAYDNAVNLSYNEKSNGTIIHVKGEE

SEQ ID NO: 34354 - protein, 80 aa, Homo sapiens
MLRLLLALNLFPSIQVTGNKILVKQSPMLVAYDNAVNLSYNEKSNGTIIHVKGKHLCPSPLFPGPSKPYAPPRDFAAYRS

SEQ ID NO: 34355 - protein, 234 aa, Homo sapiens
MPCGLSALIMCPKGMVAVVVAVDDGDSQALAGNKILVKQSPMLVAYDNAVNLSCKYSYNLFSREFRASLHKGLDSAVEVCVVYGNYSQQLQVYSKTGFNCDGKLGNESVTFYLQNLYVNQTDIYFCKIEVMYPPPYLDNEKSNGTIIHVKGKHLCPSPLFPGPSKPFWVLVVVGGVLACYSLLVTVAFIIFWVRSKRSRLLHSDYMNMTPRRPGPTRKHYQPYAPPRDFAAYRS

SEQ ID NO: 34356 - protein, 200 aa, Homo sapiens
MEQTEVLKPRTLADLIRILHQLFAGDEVNVEEVQAIMEAYESDPTEWAMYAKFDQYRYTRNLVDQGNGKFNLMILCWGEGHGSSIHDHTNSHCFLKMLQGNLKETLFAWPDKKSNEMVKKSERVLRENQCAYINDSIGLHRVENISHTEPAVSLHLYSPPFDTCHAFDQRTGHKNKVTMTFHSKFGIRTPNATSGSLENN

SEQ ID NO: 34357 - protein, 347 aa, Homo sapiens
MDLAANEISIYDKLSETVDLVRQTGHQCGMSEKAIEKFIRQLLEKNEPQRPPPQYPLLIVVYKVLATLGLILLTAYFVIQPFSPLAPEPVLSGAHTWRSLIHHIRLMSLPIAKKYMSENKGVPLHGGDEDRPFPDFDPWWTNDCEQNESEPIPANCTGCAQKHLKVMLLEDAPRKFERLHPLVIKTGKPLLEEEIQHFLCQYPEATEGFSEGFFAKWWRCFPERWFPFPYPWRRPLNRSQMLRELFPVFTHLPFPKDASLNKCSFLHPEPVVGSKMHKMPDLFIIGSGEAMLQLIPPFQCRRHCQSVAMPIEPGDIGYVDTTHWKVYVIARGVQPLVICDGTAFSEL

SEQ ID NO: 34358 - protein, 354 aa, Homo sapiens
MDFILEDMDLAANEISIYDKLSETVDLVRQTGHQCGMSEKAIEKFIRQLLEKNEPQRPPPQYPLLIVVYKVLATLGLILLTAYFVIQPFSPLAPEPVLSGAHTWRSLIHHIRLMSLPIAKKYMSENKGVPLHGGDEDRPFPDFDPWWTNDCEQNESEPIPANCTGCAQKHLKVMLLEDAPRKFERLHPLVIKTGKPLLEEEIQHFLCQYPEATEGFSEGFFAKWWRCFPERWFPFPYPWRRPLNRSQMLRELFPVFTHLPFPKDASLNKCSFLHPEPVVGSKMHKMPDLFIIGSGEAMLQLIPPFQCRRHCQSVAMPIEPGDIGYVDTTHWKVYVIARGVQPLVICDGTAFSEL

SEQ ID NO: 34359 - protein, 241 aa, Homo sapiens
MSLPIAKKYMSENKGVPLHGGDEDRPFPDFDPWWTNDCEQNESEPIPANCTGCAQKHLKVMLLEDAPRKFERLHPLVIKTGKPLLEEEIQHFLCQYPEATEGFSEGFFAKWWRCFPERWFPFPYPWRRPLNRSQMLRELFPVFTHLPFPKDASLNKCSFLHPEPVVGSKMHKMPDLFIIGSGEAMLQLIPPFQCRRHCQSVAMPIEPGDIGYVDTTHWKVYVIARGVQPLVICDGTAFSEL

SEQ ID NO: 34360 - protein, 206 aa, Homo sapiens
MVVVMKFFRWVRRAWQRIISWVFFWRQKIKPTISGHPDSKKHSLKKMEKTLQVVETLRLVELPKEAKPKLGESPELADPCVLAKTTEETEVELGQQGQSLLQLPRTAVKSVSTLMVSALQSGWQMCSWKSSVSSASVSSQVRTQSPLKTPEAELLWEVYLVLWAVRKHLRRLYRRQERHRRHHVRCHAAPRPNPAQSLKLDAQSPL

SEQ ID NO: 34361 - protein, 540 aa, Homo sapiens
MASQEFEVEAIVDKRQDKNGNTQYLVRWKGYDKQDDTWEPEQHLMNCEKCVHDFNRRQTEKQKKLTWTTTSRIFSNNARRRTSRSTKANYSKNSPKTPVTDKHHRSKNRKLFAASKNVRRKAASILSDTKNMEIINSTIETLAPDSPFDHKTVSGFQKLEKLDPIAADQQDTVVFKVTEGKLLRDPLSRPGAEQTGIQNKTQIHPLMSQMSGSVTASMATGSATRKGIVVLIDPLAANGTTDMHTSVPRVKGGQRNITDDSRDQPFIKKMHFTIRLTESASTYRDIVVKKEDGFTQIVLSTRSTEKNALNTEVIKEIVNALNSAAADDSKLVLFSAAGSVFCCGLDFGYFVKHLRNNRNTASLEMVDTIKNFVNTFIQFKKPIVVSVNGPAIGLGASILPLCDLVWANEKAWFQTPYTTFGQSPDGCSSITFPKMMGKASANEMLIAGRKLTAREACAKGLVSQVFLTGTFTQEVMIQIKELASYNPIVLEECKALVRCNIKLELEQANERECEVLRKIWSSAQGIESMLKYVENKIDEF

SEQ ID NO: 34362 - protein, 554 aa, Homo sapiens
MASQEFEVEAIVDKRQDKNGNTQYLVRWKGYDKQDDTWEPEQHLMNCEKCVHDFNRRQTEKQKKLTWTTTSRIFSNNARRRTSRSTKANYSKNSPKTPVTDKHHRSKNRKLFAASKNVRRKAASILSDTKNMEIINSTIETLAPDSPFDHKTVSGFQKLEKLDPIAADQQDTVVFKVTEGKLLRDPLSRPGAEQTGIQNKTQIHPLMSQMSGSVTASMATGSATRKGIVVLIDPLAANGTTDMHTSVPRVKGGQRNITDDSRDQPFIKKMHFTIRLTESASTYRDIVVKKEDGFTQIVLSTRSTEKNALNTEVIKEIVNALNSAAADDSKLVLFSAAGSVFCCGLDFGYFVKHLRNNRNTASLEMVDTIKNFVNTFIQFKKPIVVSVNGPAIGLGASILPLCDLVWANEKAWFQTPYTTFGQSPDGCSSITFPKMMGKASANEMLIAGRKLTAREACAKGLVSQVFLTGTFTQEVMIQIKELASYNPIVLEECKALVRCNIKLELEQANERECEVLRKIWSSAQGIESMLKIPLLGYKAAFPPRKTQNDQRWCP

SEQ ID NO: 34363 - protein, 594 aa, Homo sapiens
MWCLLRGLGRPGALARGALGQQQSLGARALASAGSESRDEYSYVVVGAGSAGCVLAGRLTEDPAERVLLLEAGPKDVLAGSKRLSWKIHMPAALVANLCDDRYNWCYHTEVQRGLDGRVLYWPRGRVWGGSSSLNAMVYVRGHAEDYERWQRQGARGWDYAHCLPYFRKAQGHELGASRYRGADGPLRVSRGKTNHPLHCAFLEATQQAGYPLTEDMNGFQQEGFGWMDMTIHEGKRWSAACAYLHPALSRTNLKAEAETLVSRVLFEGTRAVGVEYVKNGQSHRAYASKEVILSGGAINSPQLLMLSGIGNADDLKKLGIPVVCHLPGVGQNLQDHLEIYIQQACTRPITLHSAQKPLRKVCIGLEWLWKFTGEGATAHLETGGFIRSQPGVPHPDIQFHFLPSQVIDHGRVPTQQEAYQVHVGPMRGTSVGWLKLRSANPQDHPVIQPNYLSTETDIEDFRLCVKLTREIFAQEALAPFRGKELQPGSHIQSDKEIDAFVRAKADSAYHPSCTCKMGQPSDPTAVVDPQTRVLGVENLRVVDASIMPSMVSGNLNAPTIMIAEKAADIIKGQPALWDKDVPVYKPRTLATQR

SEQ ID NO: 34364 - protein, 199 aa, Homo sapiens
MPEQSNDYRVAVFGAGGVGKSSLVLRFVKGTFRESYIPTVEDTYRQVISCDKSICTLQITDTTGSHQFPAMQRLSISKGHAFILVYSITSRQSLEELKPIYEQICEIKGDVESIPIMLVGNKCDESPSREVQSSEAEALARTWKCAFMETSAKLNHNVKELFQELLNLEKRRTVSLQIDGKKSKQQKRKEKLKGKCVIM

SEQ ID NO: 34365 - protein, 598 aa, Homo sapiens
MTFQASHRSAWGKSRKKNWQYEGPTQKLFLKRNNVSAPDGPSDPSISVSSEQSGAQQPPALQVERIVDKRKNKKGKTEYLVRWKGYDSEDDTWEPEQHLVNCEEYIHDFNRRHTEKQKESTLTRTNRTSPNNARKQISRSTNSNFSKTSPKALVIGKDHESKNSQLFAASQKFRKNTAPSLSSRKNMDLAKSGIKILVPKSPVKSRTAVDGFQSESPEKLDPVEQGQEDTVAPEVAAEKPVGALLGPGAERARMGSRPRIHPLVPQVPGPVTAAMATGLAVNGKGTSPFMDALTANGTTNIQTSVTGVTASKRKFIDDRRDQPFDKRLRFSVRQTESAYRYRDIVVRKQDGFTHILLSTKSSENNSLNPEVMREVQSALSTAAADDSKLVLLSAVGSVFCCGLDFIYFIRRLTDDRKRESTKMAEAIRNFVNTFIQFKKPIIVAVNGPAIGLGASILPLCDVVWANEKAWFQTPYTTFGQSPDGCSTVMFPKIMGGASANEMLLSGRKLTAQEACGKGLVSQVFWPGTFTQEVMVRIKELASCNPVVLEESKALVRCNMKMELEQANERECEVLKKIWGSAQGMDSMLKYLQRKIDEF

SEQ ID NO: 34366 - protein, 544 aa, Homo sapiens
MASEELYEVERIVDKRKNKKGKTEYLVRWKGYDSEDDTWEPEQHLVNCEEYIHDFNRRHTEKQKESTLTRTNRTSPNNARKQISRSTNSNFSKTSPKALVIGKDHESKNSQLFAASQKFRKNTAPSLSSRKNMDLAKSGIKILVPKSPVKSRTAVDGFQSESPEKLDPVEQGQEDTVAPEVAAEKPVGALLGPGAERARMGSRPRIHPLVPQVPGPVTAAMATGLAVNGKGTSPFMDALTANGTTNIQTSVTGVTASKRKFIDDRRDQPFDKRLRFSVRQTESAYRYRDIVVRKQDGFTHILLSTKSSENNSLNPEVMREVQSALSTAAADDSKLVLLSAVGSVFCCGLDFIYFIRRLTDDRKRESTKMAEAIRNFVNTFIQFKKPIIVAVNGPAIGLGASILPLCDVVWANEKAWFQTPYTTFGQSPDGCSTVMFPKIMGGASANEMLLSGRKLTAQEACGKGLVSQVFWPGTFTQEVMVRIKELASCNPVVLEESKALVRCNMKMELEQANERECEVLKKIWGSAQGMDSMLKYLQRKIDEF

SEQ ID NO: 34367 - protein, 309 aa, Homo sapiens
MDALTANGTTNIQTSVTGVTASKRKFIDDRRDQPFDKRLRFSVRQTESAYRYRDIVVRKQDGFTHILLSTKSSENNSLNPEVMREVQSALSTAAADDSKLVLLSAVGSVFCCGLDFIYFIRRLTDDRKRESTKMAEAIRNFVNTFIQFKKPIIVAVNGPAIGLGASILPLCDVVWANEKAWFQTPYTTFGQSPDGCSTVMFPKIMGGASANEMLLSGRKLTAQEACGKGLVSQVFWPGTFTQEVMVRIKELASCNPVVLEESKALVRCNMKMELEQANERECEVLKKIWGSAQGMDSMLKYLQRKIDEF

SEQ ID NO: 34368 - protein, 412 aa, Homo sapiens
MDLAKSGIKILVPKSPVKSRTAVDGFQSESPEKLDPVEQGQEDTVAPEVAAEKPVGALLGPGAERARMGSRPRIHPLVPQVPGPVTAAMATGLAVNGKGTSPFMDALTANGTTNIQTSVTGVTASKRKFIDDRRDQPFDKRLRFSVRQTESAYRYRDIVVRKQDGFTHILLSTKSSENNSLNPEVMREVQSALSTAAADDSKLVLLSAVGSVFCCGLDFIYFIRRLTDDRKRESTKMAEAIRNFVNTFIQFKKPIIVAVNGPAIGLGASILPLCDVVWANEKAWFQTPYTTFGQSPDGCSTVMFPKIMGGASANEMLLSGRKLTAQEACGKGLVSQVFWPGTFTQEVMVRIKELASCNPVVLEESKALVRCNMKMELEQANERECEVLKKIWGSAQGMDSMLKYLQRKIDEF

SEQ ID NO: 34369 - protein, 1188 aa, Homo sapiens
MKKKQTVQGTFSKLFGKKHTTTPSTSLYATNPPWIFTQEAPEEGTGGFDGIYYGDNRFNTVSESGTATLKARPRVRPLLTFLPLNAQENHGLAVPTPSVPDDFADKEVTGTSSLVNGNLRLYSSVGDLRPGQYGQDLLIPPPPPGPAPGPPQDISEPPGGSPLPSPPSTAPPPPPLLLEPPPPPSMAPPPPPVLEALSPPHTLSSPSIPTPPDFIPPAPPLAFLAPPPPPVPAPAPPAPASPHTVGTRLFPPGGVTKWKSDVALNGRQAEATRASPPRSPAEPKGSALGPNPEPHLTFPRSFKVPPPTPVRTSSIPVQEAQEAPRKEEGATKKAPSRLPLPPSFHIRPASQVYPDRAPEPDCPGELKATAPASPRLGQSQSQADERAGTPPPAPPLPPPAPPLPPPAPPLPPAAPPLPCAQKAAHPPAGFTKTPKSSSPALKPKPNPPSPENTASSAPVDWRDPSQMEKLRNELAAYLCGSRREDRFLSHRPGPTVAPQSKEGKKGPRLPEKETLLSLPAKDTPPGVPEKSLGGSSLTETEAAPSLTLPSVDYIPQDSPTPSVRQIRNELEARLSSAAEKEAKPSIGSLPPKPRLEGGRICENGADDDKLSKPVAKNLPPQSTTLLPTTSLQPKAMLGPAIPPKATPEPAIPPKATLWPATPPKATLGPATPLKATSGPTTPLKATSGPAIASTATTLPTTTSQLMAEKDSGPAGQPEKPASQEVSTPSQARGEGSPSEATRLPTQGARSSAAFPPKTSPGGGEVPCLYKPHCHQSSLSREVAVVMPTLARGGAAGPGEPVEVKEPPGLPAKPPASAQPTDELLRHPVTGEVVERGSPMALLLAARQRAQKGRSVGAALGRSSLPGSLRDHSHQAEASSDSIFHSQGTPNSFTVVPKLPKEAEKDSPLTTEIPNKWGPRLGRDAEGTELSRRHNWTKPEPQAPVAWERVAPSNLPQGHPLPKSFSSPPSPSNKREEEEEEFNFEVIPPPPEFSNDPEPPAPALQYLGRQSSPPRNNYSDLRQLPNAGPGAPPALGFSRFPAGARYAGAGGLERFSGGGRSLIKKRLYVGEPHRGPGLPHGGTGRSLSSPNCFGPQPGGPEMRRVNSAGRAPPGGLHAPRLSLEGAARGAAEAKHKAPGSADYGFAPAAGRSPYTTTRYGSPINTFTVRPGTRHPISYVCSGAHRKATS

SEQ ID NO: 34370 - protein, 99 aa, Homo sapiens
MKKKQTVQGTFSKLFGKKHTTTPSTSLYATNPPWIFTQEAPEEGTGGFDGIYYGDNRFNTVSESGTATLKARPRVRPLLTFLPLTEFHSCCPGWSGTMA

SEQ ID NO: 34371 - protein, 212 aa, Homo sapiens
MKKKQTVQGTFSKLFGKKHTTTPSTSLYATNPPWIFTQEAPEEGTGGFDGIYYGDNRFNTVSESGTATLKARPRVRPLLTFLPLNAQENHGLAVPTPSVPDDFADKEVTGTSSLVNGNLRLYSSVGDLRPGQYGQDLLIPPPPPGPAPGPPQDISEPPGGSPLPSPPSTAPPPPPLLLEPPPPEPGVLLALLQQTVSLRIWALVSCGGWEVH

SEQ ID NO: 34372 - protein, 172 aa, Homo sapiens
MASGFKKPSAASTGQKRKVAPKPELTEDQKQEVREAFDLFDVDGSGTIDAKELKVAMRALGFEPRKEEMKKMISEVDREGTGKISFNDFLAVMTQKMSEKDTKEEILKAFRLFDDDETGKISFKNLKRVANELGENLTDEELQEMIDEADRDGDGEVNEEEFLRIMKKTSLY

SEQ ID NO: 34373 - protein, 127 aa, Homo sapiens
MIYPLDLFRNIPWKQGKCFASLSPEGERAFDGMEPLCQPGARPALRGLQHASDCYRLLSPPGSGLVGTNPSVPAPSPHCGCCQAWSISSFTFTGPTPFKINSDQATPCHLRSPETIFRQREISNEAF

SEQ ID NO: 34374 - protein, 315 aa, Homo sapiens
MYQPSRGAARRLGPCLRAYQARPQDQLYPGTLPFPPLWPHSTTTTSPSSPLFWSPLPPRLPTQRLPQVPPLPLPQIQALSSAWVVLPPGKGEEGPGPELHSGCLDGLRSLFEGPPCPYPGAWIPFQVPGTAHPSPATPSGDPSMEEHLSVMYERLRQELPKLFLQSHDYSLYSLDVEFINEILNIRTKGRTWYILSLTLCRFLAWNYFAHLRLEVLQLTRHPENWTLQARWRLVGLPVHLLFLRFYKRDKDEHYRTYDAYSTFYLNSSGLICRHRLDKLMPSHSPPTPVKKLLVGALVALGLSEPEPDLNLCSKP

SEQ ID NO: 34375 - protein, 172 aa, Homo sapiens
MEEHLSVMYERLRQELPKLFLQSHDYSLYSLDVEFINEILNIRTKGRTWYILSLTLCRFLAWNYFAHLRLEVLQLTRHPENWTLQARWRLVGLPVHLLFLRFYKRDKDEHYRTYDAYSTFYLNSSGLICRHRLDKLMPSHSPPTPVKKLLVGALVALGLSEPEPDLNLCSKP

SEQ ID NO: 34376 - protein, 181 aa, Homo sapiens
MYQPSRGAARRLGPCLRAYQARPQLPKLFLQSHDYSLYSLDVEFINEILNIRTKGRTWYILSLTLCRFLAWNYFAHLRLEVLQLTRHPENWTLQARWRLVGLPVHLLFLRFYKRDKDEHYRTYDAYSTFYLNSSGLICRHRLDKLMPSHSPPTPVKKLLVGALVALGLSEPEPDLNLCSKP

SEQ ID NO: 34377 - protein, 496 aa, Homo sapiens
MYQPSRGAARRLGPCLRAYQARPQVSGGEEGGRRGGGERPSSKPVRGAERALGSAQAQRHPPPLPTCALQRVDRLGVAGAGGRRCRACRARTSVLPGLRAVRRGQGQAAGRVCVAPDSPRLPVPRGDLKGRGREIRSPAAAPSRSSPAQTRPAGRPQQPARLALGERSWQEGRPVCTRFGPLRPGWQDGHAPSRDGASRTPSGTEDQLYPGTLPFPPLWPHSTTTTSPSSPLFWSPLPPRLPTQRLPQVPPLPLPQIQALSSAWVVLPPGKGEEGPGPELHSGCLDGLRSLFEGPPCPYPGAWIPFQVPGTAHPSPATPSGDPSMEEHLSVMYERLRQELPKLFLQSHDYSLYSLDVEFINEILNIRTKGRTWYILSLTLCRFLAWNYFAHLRLEVLQLTRHPENWTLQARWRLVGLPVHLLFLRFYKRDKDEHYRTYDAYSTFYLNSSGLICRHRLDKLMPSHSPPTPVKKLLVGALVALGLSEPEPDLNLCSKP

SEQ ID NO: 34378 - protein, 300 aa, Homo sapiens
MEIPMGTQGCFSKSLLLSASILVLWMLQGSQAALYIQKIPEQPQKNQDLLLSVQGVPDTFQDFNWYLGEETYGGTRLFTYIPGIQRPQRDGSAMGQRDIVGFPNGSMLLRRAQPTDSGTYQVAITINSEWTMKAKTEVQVAEKNKELPSTHLPTNAGILAATIIGSLAAGALLISCIAYLLVTRNWRGQSHRLPAPRGQGSLSILCSAVSPVPSVTPSTWMATTEKPELGPAHDAGDNNIYEVMPSPVLLVSPISDTRSINPARPLPTPPHLQAEPENHQYQQDLLNPDPAPYCQLVPTS

SEQ ID NO: 34379 - protein, 142 aa, Homo sapiens
MEIPMGTQGCFSKSLLLSASILVLWMLQGSQAALYIQKIPEQPQKNQDLLLSVQGVPDTFQDFNWYLGEETYGGTRLFTYIPGIQRPQRDGSAMGQRDIVGFPNGSMLLRRAQPTDSGTYQVAITINSEWTMKAKTEVQVAD

SEQ ID NO: 34380 - protein, 299 aa, Homo sapiens
MEIPMGTQGCFSKSLLLSASILVLWMLQGSQAALYIQKIPEQPQKNQDLLLSVQGVPDTFQDFNWYLGEETYGGTRLFTYIPGIQRPQRDGSAMGQRDIVGFPNGSMLLRRAQPTDSGTYQVAITINSEWTMKAKTEVQVAEKNKELPSTHLPTNAGILAATIIGSLAAGALLISCIAYLLVTRNWRGQSHRLPAPRGQGSLSILCSAVSPVPSVTPSTWMATTEKPELGPAHDAGDNNIYEVMPSPVLLVSPISDTRSINPARPLPTPPHLQAEPENHQYQDLLNPDPAPYCQLVPTS

SEQ ID NO: 34381 - protein, 365 aa, Homo sapiens
MMGRRRAFAVDGRDGAGEGLARGCIVPGVTSTYRRIPDAAHGCSSWERGDKFRGVGREALFLKLASRDSGVEMAVGDSPLAALPGLSQDSLDFESSGSSEPPAQVGRLLASQKLGEVLERSRRLPTAPTSLSGQHRSLRLASKPEREVPLGAGQQESMEADTDLEAGLEEEAVGGLGPGAWACLPGQGLRYLEHLCLVLEQMARLQQLYLQLRIQRPPGDPGEEESTRAPLPSPLHTPGNRGQGPWELLSQTEHTGAKAASPPKVEVPSANPPRLPETPVEPTYHLPSSQGHKRDISHWDKVKVLLNRICRRSHHHPEPPAPPDGSDPRIESRDLPERPQCRPHRKTFMPSLVVKKQRAKNLSVG

SEQ ID NO: 34382 - protein, 357 aa, Homo sapiens
MMGRRRAFAVDGRDGAGEGLARGCIVPGVTSTYRRIPDAAHGCSSWERGDKFRGVGREALFLKLASRDSGVEMAVGDSPLAALPGLSQDSLDFESSGSSEPPAQVGRLLASQKLGEVLERSRRLPTAPTSLSGQHRSLRLASKPEREVPLGAGQQESMEADTDLEAGLEEEAVGGLGPGAWACLPGQGLRYLEHLCLVLEQMARLQQLYLQLRIQRPPGDPGEEESTRAPLPSPLHTPGNRGQGPWELLSQTEHTGAKAASPPKVEVPSANPPRLPETPVEPTYHLPSSQGHKVKVLLNRICRRSHHHPEPPAPPDGSDPRIESRDLPERPQCRPHRKTFMPSLVVKKQRAKNLSVG

SEQ ID NO: 34383 - protein, 208 aa, Homo sapiens
MSSEPPPPYPGGPTAPLLEEKSGAPPTPGRSSPAVMQPPPGMPLPPADIGPPPYEPPGHPMPQPGFIPPHMSADGTYMPPGFYPPPGPHPPMGYYPPGPYTPGPYPGPGGHTATVLVPSGAATTVTVLQGEIFEGAPVQTVCPHCQQAITTKISYEIGLMNFVLGFFCCFMGCDLGCCLIPCLINDFKDVTHTCPSCKAYIYTYKRLC

SEQ ID NO: 34384 - protein, 169 aa, Homo sapiens
MSSEPPPPYPGGPTAPLLEEKSGAPPTPGRSSPAVMQPPPGMPLPPADIGPPPYEPPGHPMPQPGFIPPHMSADGTYMPPGAATTVTVLQGEIFEGAPVQTVCPHCQQAITTKISYEIGLMNFVLGFFCCFMGCDLGCCLIPCLINDFKDVTHTCPSCKAYIYTYKRLC

SEQ ID NO: 34385 - protein, 129 aa, Homo sapiens
MSSEPPPPYPGGPTAPLLEEKSGAPPTPGRSSPAVMQPPPGAATTVTVLQGEIFEGAPVQTVCPHCQQAITTKISYEIGLMNFVLGFFCCFMGCDLGCCLIPCLINDFKDVTHTCPSCKAYIYTYKRLC

SEQ ID NO: 34386 - protein, 151 aa, Homo sapiens
MPRGSRSRTSRMAPPASRAPQMRAAPRPAPVAQPPAAAPPSAVGSSAAAPRQPGLMAQMATTAAGVAVGSAVGHTLGHAITGGFSGGSNAEPARPDITYQEPQGTQPAQQQQPCLYEIKQFLECAQNQGDIKLCEGFNEVLKQCRLANGLA

SEQ ID NO: 34387 - protein, 2479 aa, Homo sapiens
MPPNINWKEIMKVDPDDLPRQEELADNLLISLSKVEVNELKSEKQENVIHLFRITQSLMKMKAQEVELALEEVEKAGEEQAKFENQLKTKVMKLENELEMAQQSAGGRDTRFLRNEICQLEKQLEQKDRELEDMEKELEKEKKVNEQLALRNEEAENENSKLRRENKRLKKKNEQLCQDIIDYQKQIDSQKETLLSRRGEDSDYRSQLSKKNYELIQYLDEIQTLTEANEKIEVQNQEMRKNLEESVQEMEKMTDEYNRMKAIVHQTDNVIDQLKKENDHYQLQVQELTDLLKSKNEEDDPIMVAVNAKVEEWKLILSSKDDEIIEYQQMLHNLREKLKNAQLDADKSNVMALQQGIQERDSQIKMLTEQVEQYTKEMEKNTCIIEDLKNELQRNKGASTLSQQTHMKIQSTLDILKEKTKEAERTAELAEADAREKDKELVEALKRLKDYESGVYGLEDAVVEIKNCKNQIKIRDREIEILTKEINKLELKISDFLDENEALRERVGLEPKTMIDLTEFRNSKHLKQQQYRAENQILLKEIESLEEERLDLKKKIRQMAQERGKRSATSGLTTEDLNLTENISQGDRISERKLDLLSLKNMSEAQSKNEFLSRELIEKERDLERSRTVIAKFQNKLKELVEENKQLEEGMKEILQAIKEMQKDPDVKGGETSLIIPSLERLVNAIESKNAEGIFDASLHLKAQVDQLTGRNEELRQELRESRKEAINYSQQLAKANLKIDHLEKETSLLRQSEGSNVVFKGIDLPDGIAPSSASIINSQNEYLIHLLQELENKEKKLKNLEDSLEDYNRKFAVIRHQQSLLYKEYLSEKETWKTESKTIKEEKRKLEDQVQQDAIKVKEYNNLLNALQMDSDEMKKILAENSRKITVLQVNEKSLIRQYTTLVELERQLRKENEKQKNELLSMEAEVCEKIGCLQRFKEMAIFKIAALQKVVDNSVSLSELELANKQYNELTAKYRDILQKDNMLVQRTSNLEHLECENISLKEQVESINKELEITKEKLHTIEQAWEQETKLGNESSMDKAKKSITNSDIVSISKKITMLEMKELNERQRAEHCQKMYEHLRTSLKQMEERNFELETKFAELTKINLDAQKVEQMLRDELADSVSKAVSDADRQRILELEKNEMELKVEVSKLREISDIARRQVEILNAQQQSRDKEVESLRMQLLDYQAQSDEKSLIAKLHQHNVSLQLSEATALGKLESITSKLQKMEAYNLRLEQKLDEKEQALYYARLEGRNRAKHLRQTIQSLRRQFSGALPLAQQEKFSKTMIQLQNDKLKIMQEMKNSQQEHRNMENKTLEMELKLKGLEELISTLKDTKGAQKVINWHMKIEELRLQELKLNRELVKDKEEIKYLNNIISEYERTISSLEEEIVQQNKFHEERQMAWDQREVDLERQLDIFDRQQNEILNAAQKFEEATGSIPDPSLPLPNQLEIALRKIKENIRIILETRATCKSLEEKLKEKESALRLAEQNILSRDKVINELRLRLPATAEREKLIAELGRKEMEPKSHHTLKIAHQTIANMQARLNQKEEVLKKYQRLLEKAREEQREIVKKHEEDLHILHHRLELQADSSLNKFKQTAWDLMKQSPTPVPTNKHFIRLAEMEQTVAEQDDSLSSLLVKLKKVSQDLERQREITELKVKEFENIKLQLQENHEDEVKKVKAEVEDLKYLLDQSQKESQCLKSELQAQKEANSRAPTTTMRNLVERLKSQLALKEKQQKALSRALLELRAEMTAAAEERIISATSQKEAHLNVQQIVDRHTRELKTQVEDLNENLLKLKEALKTSKNRENSLTDNLNDLNNELQKKQKAYNKILREKEEIDQENDELKRQIKRLTSGLQGKPLTDNKQSLIEELQRKVKKLENQLEGKVEEVDLKPMKEKNAKEELIRWEEGKKWQAKIEGIRNKLKEKEGEVFTLTKQLNTLKDLFAKADKEKLTLQRKLKTTGMTVDQVLGIRALESEKELEELKKRNLDLENDILYMRAHQALPRDSVVEDLHLQNRYLQEKLHALEKQFSKDTYSKPSISGIESDDHCQREQELQKENLKLSSENIELKFQLEQANKDLPRLKNQVRDLKEMCEFLKKEKAEVQRKLGHVRGSGRSGKTIPELEKTIGLMKKVVEKVQRENEQLKKASGILTSEKMANIEQENEKLKAELEKLKAHLGHQLSMHYESKTKGTEKIIAENERLRKELKKETDAAEKLRIAKNNLEILNEKMTVQLEETGKRLQFAESRGPQLEGADSKSWKSIVVTRMYETKLKELETDIAKKNQSITDLKQLVKEATEREQKVNKYNEDLEQQIKILKHVPEGAETEQGLKRELQVLRLANHQLDKEKAELIHQIEANKDQSGAESTIPDADQLKEKIKDLETQLKMSDLEKQHLKEEIKKLKKELENFDPSFFEEIEDLKYNYKEEVKKNILLEEKVKKLSEQLGVELTSPVAASEEFEDEEESPVNFPIY

SEQ ID NO: 34388 - protein, 66 aa, Homo sapiens
MEVDAPGVDGRDGLRERRGFSEGGRQNFDVRPQSGANGLPKHSYWLDLWLFILFDVVVFLFVYFLP

SEQ ID NO: 34389 - protein, 199 aa, Homo sapiens
MTSLINSPINRRPLQNVEGNNRCQRKAKNYGNKYFIHCLDLEKITLSPRRKHDIEGGDKLNVKFSQLRSRRQRKAEPGACALGRVGSECIPEPGARRTAQAAGLRSVSGAANTKVRELKHFRFLGLLRSCRSEMEVDAPGVDGRDGLRERRGFSEGGRQNFDVRPQSGANGLPKHSYWLDLWLFILFDVVVFLFVYFLP

SEQ ID NO: 34390 - protein, 184 aa, Homo sapiens
MFCLLHLCFYLANFASSIKRTHAVNGCCGLQMIALWAQSSGNADARVEEILAGEERRLAALLGSQGMRFWVCLAACRAMWGLAARRGRAEDSSSSPVDASKFPWRGGQHRTTMMPCLLRVGVFRPCHVRPTGDPSCDVQPPRLGFSRVPDTQVAFYGSGHWDPTPFSVHSCFFNFQVRKIIFLL

SEQ ID NO: 34391 - protein, 900 aa, Homo sapiens
MGDSGSRRSTLVSRLPIFRRSINRRHDSLPSSPSSSNTVGVHSSSPSSTNSSSGSTGKRRSIFRTPSISFHHKKGSEPKQEPTNQNLSISNGAQPGHSNMQKLSLEEHIKTRGRHSVGFSSSRNKKITRSLTEDFEREKEHSTNKNVFINCLSSGKSEGDDSGFTEDQTRRSVKQSTRKLLPKSFSSHYKFSKPVLQSQSISLVQQSEFSLEVTQYQEREPVLVRASPSCSVDVTERAGSSLQSPLLSADLTTAQTPSEFLALTEDSVSEMDAFSKSGSMASHCDNFGHNDSTSQMSLNSAAVTKTTTELTGTVPCAIMSPGKYRLEGQCSTESNSLPETSAANQKEVLLQIAELPATSVSHSESNLPADSEREENIGLQNGETMLGTNSPRKLGFYEQHKAIAEHVKGIHPISDSKIIPTSGDHHIFNKTSHGYEANPAKVLASSLSPFREGRFIERRLRSSSEGTAGSSRMILKPKDGNIEEVNSLRKQRAGSSSSKMNSLDVLNNLGSCELDEDDLMLDLEFLEEQSLHPSVCREDSYHSVVSCAAVVLTPMEPMIEMKKREEPEFPEPSKQNLSLKLTKDVDQEARCSHISRMPNSPSADWPLQGVEENGGIDSLPFRLMLQDCTAVKTLLLKMKRVLQESADMSPASSTTSLPVSPLTEEPVPFKDIMKDECSMLKLQLKEKDELISQLQEELGKVRHLQKAFASRVDKSTQTELLCYDGLNLKRLETVQGGREATYRNRIVSQNLSTRDRKAIHTPTEDRFRYSAADQTSPYKNKTCQLPSLCLSNFLKDKELAEVIKHSRGTYETLTSDVTQNLRATVGQSSLKPTAKTEGLSTFLEKPKDQVATARQHSTFTGRFGQPPRGPISLHMYSRKNVFLHHNLHSTELQTLGQQDG

SEQ ID NO: 34392 - protein, 677 aa, Homo sapiens
MGDSGSRRSTLVSRLPIFRRSINRRHDSLPSSPSSSNTVGVHSSSPSSTNSSSGSTGKRRSIFRTPSISFHHKKGSEPKQEPTNQNLSISNGAQPGHSNMQKLSLEEHIKTRGRHSVGFSSSRNKKITRSLTEDFEREKEHSTNKNVFINCLSSGKSEGDDSGFTEDQTRRSVKQSTRKLLPKSFSSHYKFSKPVLQSQSISLVQQSEFSLEVTQYQEREPVLVRASPSCSVDVTERAGSSLQSPLLSADLTTAQTPSEFLALTEDSVSEMDAFSKSGSMASHCDNFGHNDSTSQMSLNSAAVTKTTTELTGTVPCAIMSPGKYRLEGQCSTESNSLPETSAANQKEVLLQIAELPATSVSHSESNLPADSEREENIGLQNGETMLGTNSPRKLGFYEQHKAIAEHVKGIHPISDSKIIPTSGDHHIFNKTSHGYEANPAKVLASSLSPFREGRFIERRLRSSSEGTAGSSRMILKPKDGNIEEVNSLRKQRAGSSSSKMNSLDVLNNLGSCELDEDDLMLDLEFLEEQSLHPSVCREDSYHSVVSCAAVVLTPMEPMIEMKKREEPEFPEPSKQNLSLKLTKDVDQEARCSHISRMPNSPSADWPLQGVEENGGIDSLPFRLMLQDCTAVKTLLLKMKRVLQESADMSPASSTTSLPVSPLTEEPVPFKTTYPREF

SEQ ID NO: 34393 - protein, 320 aa, Homo sapiens
MPEARSSGPDLTRWRKQQQPVRRTVSQVCPPPRRPLTVADIRSGMENERLGVVRDSMFQNPLIVKAAGPASVGTSYSVYDSSAVQKVIPSLAGHHIKGGPQAELGKPRERSYSLPGINFNYGLYIRGLDGGVPEAIGRWNVFKQQPTCPHELTRNYIAMNRGAVKAGLVTARENLLYRQLNDIRISDQDDRRMKKEPPPLPPNMTFGIRARPSTPFFDLLQHRYLQLWVQEQKATQKAIKLEKKQKVVLGKLYETRSSQLRKYKPPVKLDTLWHMPHFQKVGRHLDTFPTEADRQRALKAHREECAVRQGTLRMGNYTHP

SEQ ID NO: 34394 - protein, 284 aa, Homo sapiens
MPEARSSGPDLTRWRKQQQPVRRTVSQVCPPPRRPLTVADIRSGMENERLGVVRDSMFQNPLIVKAELGKPRERSYSLPGINFNYGLYIRGLDGGVPEAIGRWNVFKQQPTCPHELTRNYIAMNRGAVKAGLVTARENLLYRQLNDIRISDQDDRRMKKEPPPLPPNMTFGIRARPSTPFFDLLQHRYLQLWVQEQKATQKAIKLEKKQKVVLGKLYETRSSQLRKYKPPVKLDTLWHMPHFQKVGRHLDTFPTEADRQRALKAHREECAVRQGTLRMGNYTHP

SEQ ID NO: 34395 - protein, 1828 aa, Homo sapiens
MMRNKDKSQEEDSSLHSNASSHSASEEASGSDSGSQSESEQGSDPGSGHGSESNSSSESSESQSESESESAGSKSQPVLPEAKEKPASKKERIADVKKMWEEYPDVYGVRRSNRSRQEPSRFNIKEEASSGSESGSPKRRGQRQLKKQEKWKQEPSEDEQEQGTSAESEPEQKKVKARRPVPRRTVPKPRVKKQPKTQRGKRKKQDSSDEDDDDDEAPKRQTRRRAAKNVSYKEDDDFETDSDDLIEMTGEGVDEQQDNSETIEKVLDSRLGKKGATGASTTVYAIEANGDPSGDFDTEKDEGEIQYLIKWKGWSYIHSTWESEESLQQQKVKGLKKLENFKKKEDEIKQWLGKVSPEDVEYFNCQQELASELNKQYQIVERVIAVKTSKSTLGQTDFPAHSRKPAPSNEPEYLCKWMGLPYSECSWEDEALIGKKFQNCIDSFHSRNNSKTIPTRECKALKQRPRFVALKKQPAYLGGENLELRDYQLEGLNWLAHSWCKNNSVILADEMGLGKTIQTISFLSYLFHQHQLYGPFLIVVPLSTLTSWQREFEIWAPEINVVVYIGDLMSRNTIREYEWIHSQTKRLKFNALITTYEILLKDKTVLGSINWAFLGVDEAHRLKNDDSLLYKTLIDFKSNHRLLITGTPLQNSLKELWSLLHFIMPEKFEFWEDFEEDHGKGRENGYQSLHKVLEPFLLRRVKKDVEKSLPAKVEQILRVEMSALQKQYYKWILTRNYKALAKGTRGSTSGFLNIVMELKKCCNHCYLIKPPEENERENGQEILLSLIRSSGKLILLDKLLTRLRERGNRVLIFSQMVRMLDILAEYLTIKHYPFQRLDGSIKGEIRKQALDHFNADGSEDFCFLLSTRAGGLGINLASADTVVIFDSDWNPQNDLQAQARAHRIGQKKQVNIYRLVTKGTVEEEIIERAKKKMVLDHLVIQRMDTTGRTILENNSGRSNSNPFNKEELTAILKFGAEDLFKELEGEESEPQEMDIDEILRLAETRENEVSTSATDELLSQFKVANFATMEDEEELEERPHKDWDEIIPEEQRKKVEEEERQKELEEIYMLPRIRSSTKKAQTNDSDSDTESKRQAQRSSASESETEDSDDDKKPKRRGRPRSVRKDLVEGFTDAEIRRFIKAYKKFGLPLERLECIARDAELVDKSVADLKRLGELIHNSCVSAMQEYEEQLKENASEGKGPGKRRGPTIKISGVQVNVKSIIQHEEEFEMLHKSIPVDPEEKKKYCLTCRVKAAHFDVEWGVEDDSRLLLGIYEHGYGNWELIKTDPELKLTDKILPVETDKKPQGKQLQTRADYLLKLLRKGLEKKGAVTGGEEAKLKKRKPRVKKENKVPRLKEEHGIELSSPRHSDNPSEEGEVKDDGLEKSPMKKKQKKKENKENKEKQMSSRKDKEGDKERKKSKDKKEKPKSGDAKSSSKSKRSQGPVHITAGSEPVPIGEDEDDDLDQETFSICKERMRPVKKALKQLDKPDKGLNVQEQLEHTRNCLLKIGDRIAECLKAYSDQEHIKLWRRNLWIFVSKFTEFDARKLHKLYKMAHKKRSQEEEEQKKKDDVTGGKKPFRPEASGSSRDSLISQSHTSHNLHPQKPHLPASHGPQMHGHPRDNYNHPNKRHFSNADRGDWQRERKFNYGGGNNNPPWGSDRHHQYEQHWYKDHHYGDRRHMDAHRSGSYRPNNMSRKRPYDQYSSDRDHRGHRDYYDRHHHDSKRRRSDEFRPQNYHQQDFRRMSDHRPAMGYHGQGPSDHYRSFHTDKLGEYKQPLPPLHPAVSDPRSPPSQKSPHDSKSPLDHRSPLERSLEQKNNPDYNWNVRKT

SEQ ID NO: 34396 - protein, 1739 aa, Homo sapiens
MMRNKDKSQEEDSSLHSNASSHSASEEASGSDSGSQSESEQGSDPGSGHGSESNSSSESSESQSESESESAGSKSQPVLPEAKEKPASKKERIADVKKMWEEYPDVYGVRRSNRSRQEPSRFNIKEEASSGSESGSPKRRGQRQLKKQEKWKQEPSEDEQEQGTSAESEPEQKKVKARRPVPRRTVPKPRVKKQPKTQRGKRKKQDSSDEDDDDDEAPKRQTRRRAAKNVSYKEDDDFETDSDDLIEMTGEGVDEQQDNSETIEKVLDSRLGKKGATGASTTVYAIEANGDPSGDFDTEKDEGEIQYLIKWKGWSYIHSTWESEESLQQQKVKGLKKLENFKKKEDEIKQWLGKVSPEDVEYFNCQQELASELNKQYQIVERVIAVKTSKSTLGQTDFPAHSRKPAPSNEPEYLCKWMGLPYSECSWEDEALIGKKFQNCIDSFHSRNNSKTIPTRECKALKQRPRFVALKKQPAYLGGENLELRDYQLEGLNWLAHSWCKNNSVILADEMGLGKTIQTISFLSYLFHQHQLYGPFLIVVPLSTLTSWQREFEIWAPEINVVVYIGDLMSRNTIREYEWIHSQTKRLKFNALITTYEILLKDKTVLGSINWAFLGVDEAHRLKNDDSLLYKTLIDFKSNHRLLITGTPLQNSLKELWSLLHFIMPEKFEFWEDFEEDHGKGRENGYQSLHKVLEPFLLRRVKKDVEKSLPAKVEQILRVEMSALQKQYYKWILTRNYKALAKGTRGSTSGFLNIVMELKKCCNHCYLIKPPEENERENGQEILLSLIRSSGKLILLDKLLTRLRERGNRVLIFSQMVRMLDILAEYLTIKHYPFQRLDGSIKGEIRKQALDHFNADGSEDFCFLLSTRAGGLGINLASADTVVIFDSDWNPQNDLQAQARAHRIGQKKQVNIYRLVTKGTVEEEIIERAKKKMVLDHLVIQRMDTTGRTILENNSGRSNSNPFNKEELTAILKFGAEDLFKELEGEESEPQEMDIDEILRLAETRENEVSTSATDELLSQFKVANFATMEDEEELEERPHKDWDEIIPEEQRKKVEEEERQKELEEIYMLPRIRSSTKKAQTNDSDSDTESKRQAQRSSASESETEDSDDDKKPKRRGRPRSVRKDLVEGFTDAEIRRFIKAYKKFGLPLERLECIARDAELVDKSVADLKRLGELIHNSCVSAMQEYEEQLKENASEGKGPGKRRGPTIKISGVQVNVKSIIQHEEEFEMLHKSIPVDPEEKKKYCLTCRVKAAHFDVEWGVEDDSRLLLGIYEHGYGNWELIKTDPELKLTDKILPVETDKKPQGKQLQTRADYLLKLLRKGLEKKGAVTGGEEAKLKKRKPRVKKENKVPRLKEEHGIELSSPRHSDNPSEEGEVKDDGLEKSPMKKKQKKKENKENKEKQMSSRKDKEGDKERKKSKDKKEKPKSGDAKSSSKSKRSQGPVHITAGSEPVPIGEDEDDDLDQETFSICKERMRPVKKALKQLDKPDKGLNVQEQLEHTRNCLLKIGDRIAECLKAYSDQEHIKLWRRNLWIFVSKFTEFDARKLHKLYKMAHKKRSQEEEEQKKKDDVTGGKKPFRPEASGSSRDSLISQSHTSHNLHPQKPHLPASHGPQMHGHPRDNYNHPNKRHFSNADRGDWQRERKFNYGGGNNNPPWGSDRHHQYEQHWYKDHHYGDRRHMDAHRSGSYRPNNMSRKRPYDQYSSDRDHRGHRDYYDRYAKGCETPGANLCQELFLGRK

SEQ ID NO: 34397 - protein, 501 aa, Homo sapiens
MMRNKDKSQEEDSSLHSNASSHSASEEASGSDSGSQSESEQGSDPGSGHGSESNSSSESSESQSESESESAGSKSQPVLPEAKEKPASKKERIADVKKMWEEYPDVYGVRRSNRSRQEPSRFNIKEEASSGSESGSPKRRGQRQLKKQEKWKQEPSEDEQEQGTSAESEPEQKKVKARRPVPRRTVPKPRVKKQPKTQRGKRKKQDSSDEDDDDDEAPKRQTRRRAAKNVSYKEDDDFETDSDDLIEMTGEGVDEQQDNSETIEKVLDSRLGKKGATGASTTVYAIEANGDPSGDFDTEKDEGEIQYLIKWKGWSYIHSTWESEESLQQQKVKGLKKLENFKKKEDEIKQWLGKVSPEDVEYFNCQQELASELNKQYQIVERVIAVKTSKSTLGQTDFPAHSRKPAPSNEPEYLCKWMGLPYSECSWEDEALIGKKFQNCIDSFHSRNNSKTIPTRECKALKQRPRFVALKKQPAYLGGENLELRDYQLEGLNWLAHSWCK

SEQ ID NO: 34398 - protein, 2715 aa, Homo sapiens
MKMKIQKKEKQLSNLKVLNHSPMSDASVNFDYKSPSPFDCSTDQEEKIEDVASHCLPQKDLYTAEEEAATLFPRKMTSHNGMEDSGGGGTGVKKKRKKKEPGDQEGAAKGSKDREPKPKRKREPKEPKEPRKAKEPKKAKEHKEPKQKDGAKKARKPREASGTKEAKEKRSCTDSAARTKSRKASKEQGPTPVEKKKKGKRKSETTVESLELDQGLTNPSLRSPEESTESTDSQKRRSGRQVKRRKYNEDLDFKVVDDDGETIAVLGAGRTSALSASTLAWQAEEPPEDDANIIEKILASKTVQEVHPGEPPFDLELFYVKYRNFSYLHCKWATMEELEKDPRIAQKIKRFRNKQAQMKHIFTEPDEDLFNPDYVEVDRILEVAHTKDAETGEEVTHYLVKWCSLPYEESTWELEEDVDPAKVKEFESLQVLPEIKHVERPASDSWQKLEKSREYKNSNQLREYQLEGMNWLLFNWYNRKNCILADEMGLGKTIQSITFLSEIFLRGIHGPFLIIAPLSTITNWEREFRTWTEMNAIVYHGSQISRQMIQQYEMVYRDAQGNPLSGVFKFHVVITTFEMILADCPELKKIHWSCVIIDEAHRLKNRNCKLLEGLKLMALEHKVLLTGTPLQNSVEELFSLLNFLEPSQFPSETAFLEEFGDLKTEEQVKKLQSILKPMMLRRLKDDVEKNLAPKQETIIEVELTNIQKKYYRAILEKNFSFLTKGANQHNMPNLINTMMELRKCCNHPYLINGAEEKILEDFRKTHSPDAPDFQLQAMIQAAGKLVLIDKLLPKLIAGGHKVLIFSQMVRCLDILEDYLIQRRYTYERIDGRVRGNLRQAAIDRFCKPDSDRFVFLLCTRAGGLGINLTAADTCIIFDSDWNPQNDLQAQARCHRIGQSKAVKVYRLITRNSYEREMFDKASLKLGLDKAVLQDINRKGGTNGVQQLSKMEVEDLLRKGAYGALMDEEDEGSKFCEEDIDQILQRRTHTITIQSEGKGSTFAKASFVASGNRTDISLDDPNFWQKWAKIAELDTEAKNEKESLVIDRPRVRKQTKHYNSFEEDELMEFSELDSDSDERPTRSRRLNDKARRYLRAECFRVEKNLLIFGWGRWKDILTHGRFKWHLNEKDMEMICRALLVYCVKHYKGDEKIKSFIWELITPTKDGQAQTLQNHSGLSAPVPRGRKGKKTKNQLLIPELKDADWLATCNPEVVLHDDGYKKHLKQHCNKVLLRVRMLYYLKAEILGEAAEKAFEGSPARELDVPLPDIDYMEIPVDWWDAEADKSLLIGVFKHGYERYNAMRADPALCFLEKVGMPDEKSLSAEQGVTDGTSDIPERGNTDKEDNAEDKVDGLQKQTESSSDGGDGVFSEKKDDSRAAQDGSDPDKSPWPVSSALTARLRRLVTVYQRCNRKELCRPEILGPGNQGYWVQEEMFRRTSEMDLINKEAQKRWTRREQADFYRTVSSFGVVYDQEKKTFDWTQFRIISRLDKKSDESLEQYFYSFVAMCRNVCRLPTWKDGGPPDTTIYVEPITEERAARTLYRIELLRKVREQVLKCPQLHERLQLCRPSLYLPVWWECGKHDRDLLIGTAKHGLNRTDCYIMNDPQLSFLDAYRNYAQHKRSGTQAPGNLCCLYQTNSKLYESLTYSQMSRTSESLENEPENLVRVESRDDHLSLPDVTCENFISKVQDVISINHDESLLPESLESMMYGKKVLSQEPSSFQESPSTNTESRKDVITISISKDGNCQSGGPEAEIASGPTFMGSLEAGGVAQANIKNGKHLLMSISKEGELCCSEAGQRPENIGQLEAKCLASPSLNPGNESGFVDMCSLSVCDSKRNLSSDQQLIDLLENKSLESKLILSQNHSDEEEEEEENEEENLAMAVGMGERPEVLHLTEPTTNISREKNQGFQDETKKGSLEVANQTPGLQRAFPAPAACQCHCKHMERWMHGLENDEFEIEKPKAYIPDLFKSKTNTIAMEGEPTAIPSQPFKVKHELLKEPWKESAEGQNVFPTYPLEGSELKSEDMDFENKDDYDRDGNCHSQDYPGKYSEEESKSSTSGITGDIGDELQEARAPTIAQLLQEKTLYSFSEWPKDRVIINRLDNICHVVLKGKWPSSQQYEPSGTLPTPVLTSSAGSRTSLSEPEAAEHSFSNGAALAAQIHKESFLAPVFTKDEQKHRRPYEFEVERDAKARGLEQFSATHGHTPIILNGWHGESAMDLSCSSEGSPGATSPFPVSASTPKIGAISSLQGALGMDLSGILQAGLIHPVTGQIVNGSLRRDDAATRRRRGRRKHVEGGMDLIFLKEQTLQAGILEVHEDPGQATLSTTHPEGPGPATSAPEPATAASSQAEKSIPSKSLLDWLRQQADYSLEVPGFGANFSDKPKQRRPRCKEPGKLDVSSLSGEERVPAIPKEPGLRGFLPENKFNHTLAEPILRDTGPRRRGRRPRSELLKAPSIVADSPSGMGPLFMNGLIAGMDLVGLQNMRNMPGIPLTGLVGFPAGFATMPTGEEVKSTLSMLPMMLPGMAAVPQMFGVGGLLSPPMATTCTSTAPASLSSTTKSGTAVTEKTAEDKPSSHDVKTDTLAEDKPGPGPFSDQSEPAITTSSPVAFNPFLIPGVSPGLIYPSMFLSPGMGMALPAMQQARHSEIVGLESQKRKKKKTKGDNPNSHPEPAPSCEREPSGDENCAEPSAPLPAEREHGAQAGEGALKDSNNDTN

SEQ ID NO: 34399 - protein, 373 aa, Homo sapiens
MCQSHMIGFCTSSVNEETETQGDQISCPNPTTLVFRTQISSLPSLQLSNLKVLNHSPMSDASVNFDYKSPSPFDCSTDQEEKIEDVASHCLPQKDLYTAEEEAATLFPRKMTSHNGMEDSGGGGTGVKKKRKKKEPGDQEGAAKGSKDREPKPKRKREPKEPKEPRKAKEPKKAKEHKEPKQKDGAKKARKPREASGTKEAKEKRSCTDSAARTKSRKASKEQGPTPVEKKKKGKRKSETTVESLELDQGLTNPSLRSPEESTESTDSQKRRSGRQVKRRKYNEDLDFKVVDDDGETIAVLGAGRTSALSASTLAWQAEEPPEDDANIIEKILASKTVQEVHPGEPPFDLELFYVKYRNLYVYLKYSLYLGFI

SEQ ID NO: 34400 - protein, 822 aa, Homo sapiens
MKMKIQKKEKQLSNLKVLNHSPMSDASVNFDYKSPSPFDCSTDQEEKIEDVASHCLPQKDLYTAEEEAATLFPRKMTSHNGMEDSGGGGTGVKKKRKKKEPGDQEGAAKGSKDREPKPKRKREPKEPKEPRKAKEPKKAKEHKEPKQKDGAKKARKPREASGTKEAKEKRSCTDSAARTKSRKASKEQGPTPVEKKKKGKRKSETTVESLELDQGLTNPSLRSPEESTESTDSQKRRSGRQVKRRKYNEDLDFKVVDDDGETIAVLGAGRTSALSASTLAWQAEEPPEDDANIIEKILASKTVQEVHPGEPPFDLELFYVKYRNFSYLHCKWATMEELEKDPRIAQKIKRFRNKQAQMKHIFTEPDEDLFNPDYVEVDRILEVAHTKDAETGEEVTHYLVKWCSLPYEESTWELEEDVDPAKVKEFESLQVLPEIKHVERPASDSWQKLEKSREYKNSNQLREYQLEGMNWLLFNWYNRKNCILADEMGLGKTIQSITFLSEIFLRGIHGPFLIIAPLSTITNWEREFRTWTEMNAIVYHGSQISRQMIQQYEMVYRDAQGNPLSGVFKFHVVITTFEMILADCPELKKIHWGRWKDILTHGRFKWHLNEKDMEMICRALLVYCVKHYKGDEKIKSFIWELITPTKDGQAQTLQNHSGLSAPVPRGRKGKKTKNQLLIPELKDADWLATCNPEVVLHDDGYKKHLKQHCNKVLLRVRMLYYLKAEILGEAAEKAFEGSPARELDVPLPDIDYMEIPVDWWDAEADKSLLIGVFKHGYERYNAMRADPALCFLEKVGMPDEKSLSAEQGVTDGTSDIPERQHR

SEQ ID NO: 34401 - protein, 374 aa, Homo sapiens
MSGESMNFSDVFDSSEDYFVSVNTSYYSVDSEMLLCSLQEVRQFSRLFVPIAYSLICVFGLLGNILVVITFAFYKKARSMTDVYLLNMAIADILFVLTLPFWAVSHATGAWVFSNATCKLLKGIYAINFNCGMLLLTCISMDRYIAIVQATKSFRLRSRTLPRSKIICLVVWGLSVIISSSTFVFNQKYNTQGSDVCEPKYQTVSEPIRWKLLMLGLELLFGFFIPLMFMIFCYTFIVKTLVQAQNSKRHKAIRVIIAVVLVFLACQIPHNMVLLVTAANLGKMNRSCQSEKLIGYTKTVTEVLAFLHCCLNPVLYAFIGQKFRNYFLKILKDLWCVRRKYKSSGFSCAGRYSENISRQTSETADNDNASSFTM

SEQ ID NO: 34402 - protein, 377 aa, Homo sapiens
MKFPGPLENQRLSFLLEKAITREAQMWKVNVRKMPSNQNVSPSQRDEVIQWLAKLKYQFNLYPETFALASSLLDRFLATVKAHPKYLSCIAISCFFLAAKTVEEDERIPVLKVLARDSFCGCSSSEILRMERIILDKLNWDLHTATPLDFLHIFHAIAVSTRPQLLFSLPKLSPSQHLAVLTKQLLHCMACNQLLQFRGSMLALAMVSLEMEKLIPDWLSLTIELLQKAQMDSSQLIHCRELVAHHLSTLQSSLPLNSVYVYRPLKHTLVTCDKGVFRLHPSSVPGPDFSKDNSKPEVPVRGTAAFYHHLPAASGCKQTSTKRKVEEMEVDDFYDGIKRLYNEDNVSENVGSVCGTDLSRQEGHASPCPPLQPVSVM

SEQ ID NO: 34403 - protein, 363 aa, Homo sapiens
MTPRHHCEAYSSAGEEEEEEEEEKNVSPSQRDEVIQWLAKLKYQFNLYPETFALASSLLDRFLATVKAHPKYLSCIAISCFFLAAKTVEEDERIPVLKVLARDSFCGCSSSEILRMERIILDKLNWDLHTATPLDFLHIFHAIAVSTRPQLLFSLPKLSPSQHLAVLTKQLLHCMACNQLLQFRGSMLALAMVSLEMEKLIPDWLSLTIELLQKAQMDSSQLIHCRELVAHHLSTLQSSLPLNSVYVYRPLKHTLVTCDKGVFRLHPSSVPGPDFSKDNSKPEVPVRGTAAFYHHLPAASGCKQTSTKRKVEEMEVDDFYDGIKRLYNEDNVSENVGSVCGTDLSRQEGHASPCPPLQPVSVM

SEQ ID NO: 34404 - protein, 378 aa, Homo sapiens
MDLGKPMKSVLVVALLVIFQVCLCQDEVTDDYIGDNTTVDYTLFESLCSKKDVRNFKAWFLPIMYSIICFVGLLGNGLVVLTYIYFKRLKTMTDTYLLNLAVADILFLLTLPFWAYSAAKSWVFGVHFCKLIFAIYKMSFFSGMLLLLCISIDRYVAIVQAVSAHRHRARVLLISKLSCVGIWILATVLSIPELLYSDLQRSSSEQAMRCSLITEHVEAFITIQVAQMVIGFLVPLLAMSFCYLVIIRTLLQARNFERNKAIKVIIAVVVVFIVFQLPYNGVVLAQTVANFNITSSTCELSKQLNIAYDVTYSLACVRCCVNPFLYAFIGVKFRNDLFKLFKDLGCLSQEQLRQWSSCRHIRRSSMSVEAETTTTFSP

SEQ ID NO: 34405 - protein, 418 aa, Homo sapiens
MAPRGRRRPRPHRSEGARRSKNTLERTHSMKDKAGQKCKPIDVFDFPDNSDVSSIGRLGENEKDEETYETFDPPLHSTAIYADEEEFSKHCGLSLSSTPPGKEAKRSSDTSGNEASEIESVKISAKKPGRKLRPISDDSESIEESDTRRKVKSAEKISTQRHEVIRTTASSELSEKPAESVTSKKTGPLSAQPSVEKENLAIESQSKTQKKGKISHDKRKKSRSKAIGSDTSDIVHIWCPEGMKTSDIKELNIVLPEFEKTHLEHQQRIESKVCKAAIATFYVNVKEQFIKMLKESQMLTNLKRKNAKMISDIEKKRQRMIEVQDELLRLEPQLKQLQTKYDELKERKSSLRNAAYFLSNLKQLYQDYSDVQAQEPNVKETYDSSSLPALLFKARTLLGAESHLRNINHQLEKLLDQG

SEQ ID NO: 34406 - protein, 176 aa, Homo sapiens
MKTSDIKELNIVLPEFEKTHLEHQQRIESKVCKAAIATFYVNVKEQFIKMLKESQMLTNLKRKNAKMISDIEKKRQRMIEVQDELLRLEPQLKQLQTKYDELKERKSSLRNAAYFLSNLKQLYQDYSDVQAQEPNVKETYDSSSLPALLFKARTLLGAESHLRNINHQLEKLLDQG

SEQ ID NO: 34407 - protein, 337 aa, Homo sapiens
MAPRGRRRPRPHRSEGARRSKNTLERTHSMKDKAGQKCKPIDVFDFPDNSDVSSIGRLGENEKDEETYETFDPPLHSTAIYADEEEFSKHCGLSLSSTPPGKEAKRSSDTSGNEASEIESVKISAKKPGRKLRPISDDSESIEESDTRRKVKSAEKISTQRHEVIRTTASSELSEKPAESVTSKKTGPLSAQPSVEKENLAIESQSKTQKKGKISHDKRKKSRSKAIGSDTSDIVHIWCPEGMKTSDIKELNIVLPEFEKTHLEHQQRIESKVCKAAIATFYVNVKEQFIKMLKESQMLTNLKRKNAKMISDIEKKRQRMIEVQDELLRLWTGAGLW

SEQ ID NO: 34408 - protein, 307 aa, Homo sapiens
MGTVLSLSPSYRKATLFEDGAATVGHYTAVQNSKNAKDKNLKRHSIISVLPWKRIVAVSAKKKNSKKVQPNSSYQNNITHLNNENLKKSLSCANLSTFAQPPPAQPPAPPASQLSGSQTGGSSSVKKAPHPAVTSAGTPKRVIVQASTSELLRCLGEFLCRRCYRLKHLSPTDPVLWLRSVDRSLLLQGWQDQGFITPANVVFLYMLCRDVISSEVGSDHELQAVLLTCLYLSYSYMGNEISYPLKPFLVESCKEAFWDRCLSVINLMSSKMLQINADPHYFTQVFSDLKNESGQEDKKRLLLGLDR

SEQ ID NO: 34409 - protein, 531 aa, Homo sapiens
MADVLSVLRQYNIQKKEIVVKGDEVIFGEFSWPKNVKTNYVVWGTGKEGQPREYYTLDSILFLLNNVHLSHPVYVRRAATENIPVVRRPDRKDLLGYLNGEASTSASIDRSAPLEIGLQRSTQVKRAADEVLAEAKKPRIEDEECVRLDKERLAARLEGHKEGIVQTEQIRSLSEAMSVEKIAAIKAKIMAKKRSTIKTDLDDDITALKQRSFVDAEVDVTRDIVSRERVWRTRTTILQSTGKNFSKNIFAILQSVKAREEGRAPEQRPAPNAAPVDPTLRTKQPIPAAYNRYDQERFKGKEETEGFKIDTMGTYHGMTLKSVTEGASARKTQTPAAQPVPRPVSQARPPPNQKKGSRTPIIIIPAATTSLITMLNAKDLLQDLKFVPSDEKKKQGCQRENETLIQRRKDQMQPGGTAISVTVPYRVVDQPLKLMPQDWDRVVAVFVQGPAWQFKGWPWLLPDGSPVDIFAKIKAFHLKYDEVRLDPNVQKWDVTVLELSYHKRHLDRPVFLRFWETLDRYMVKHKSHLRF

SEQ ID NO: 34410 - protein, 267 aa, Homo sapiens
MGSACIKVTKYFLFLFNLIFFILGAVILGFGVWILADKSSFISVLQTSSSSLRMGAYVFIGVGAVTMLMGFLGCIGAVNEVRCLLGLYFAFLLLILIAQVTAGALFYFNMGKLKQEMGGIVTELIRDYNSSREDSLQDAWDYVQAQVKCCGWVSFYNWTDNAELMNRPEVTYPCSCEVKGEEDNSLSVRKGFCEAPGNRTQSGNHPEDWPVYQEGCMEKVQAWLQENLGIILGVGVGVAIIELLGMVLSICLCRHVHSEDYSKVPKY

SEQ ID NO: 34411 - protein, 242 aa, Homo sapiens
MGSACIKVTKYFLFLFNLIFFILGAVILGFGVWILADKSSFISVLQTSSSSLRMGAYVFIGVGAVTMLMGFLGCIGAVNEVRCLLGLLKQEMGGIVTELIRDYNSSREDSLQDAWDYVQAQVKCCGWVSFYNWTDNAELMNRPEVTYPCSCEVKGEEDNSLSVRKGFCEAPGNRTQSGNHPEDWPVYQEGCMEKVQAWLQENLGIILGVGVGVAIIELLGMVLSICLCRHVHSEDYSKVPKY

SEQ ID NO: 34412 - protein, 3187 aa, Homo sapiens
MNTQKGSLTINVHRGSLAMSIQRGSLVPRDMDSSGRDMQLRVIPAEVKFLDTMAGRVYRLPITVHNICRWNQKIRFKEPVKPQFKLMLTSLDKELASGLQMTAMVEYHPDKDEDTFDRLLISIENKTTEIPLIGLIPSCQLEIESVVNFGTLVANSKVYSKEITITNHGKAPGIFKAEYHGQLPILIFPTSGIVDAKSSMVIKVDFCADQPRIVDEEAIVILQGQPEMLLSIKAHVVEQIIELLSMSSDRRLECIHFGPVFFGSSKIKHARVYNNSPEPINWVAIIQDDAVGEELGTDIQQRTDIALNNLTYIRKIKNIDTTIIISCLPNEGTLQPYQKTVITFCFTPKLMAVGKKDIGPSYRQDYALFLRFESVGSKDGFLRDDDYKTIKSERFQKVELALTGTGLPVLLQFDPGPVLNFKPCFMGERSEIQCIIKNQCELLPVTYHFKKTANFEIDPEKGKITGGGMVDVMCSFVPHQLGVFKVKQMIEIIGLVAEEDLQSLSVKSFHHVYLAFNSICKASTKKVVMKFDPGILPSIRNPTGKFVVKDLAKRKNYAPVAMLQSAMTRTHNHRSCEEPVKDMLLAFPNDRAATIRSKDHHKHFRPIFTKVPRFNYVNHDFAYTTFEKQQKKLHENYYAMYLKYLRSVRLQKKQAERERMYSYDDTDIGLEPGSGLKSPSLSEAEIEEELSSAANSIRANRLLTTRGIASQEEESVRRKVLKGLKSEPSTPQEKHDCSLMLTPKQIHQVIVGPSVLNFGNICVNSPNTHLLHVINMLPMHVLLQLDTDLEELQKTNQFSYVILPTSSTYISMVFDSPTIGKFWKSFTFTVNNVPSGHILVVAVVQPVTLELSSNELVLRPRGFFMKTCFRGTVRLYNRQNCCAQFQWQPVNTGRGIAFSICPAKGTVEAYSSLECEVTWQQGFSSPEEGEFILHVFQGNALKLKCVAHLGRTKVLLLQPRILFSNCPQGLTTWRKAILQNVGQNHAYFKVCSQSLLPIINIIPSQGIVPFGGITVLNISCKPTVAEKFDTRAKVSIRHANVIDLRIGGSAEIADVEINPDVFNFSGAYIGGTQIIPFVIKNKGITRARVEFNLKDFPDFSMDLKDKSEEFKDPAVPYIYSLELEENTSLECSITFSPKEVTVVEFIIQVQINFFESSKLYTKYLSSSPSNPKTVPLIRPCYVQATALQSPLNLSSTKFVFEIPLHEMNPNNKVTKTQNLVLYNITKHHVTWTLDLSNTGKLFKDGTFKFSVLNGILRPNEKYNVSISFCPNRPGTYTADIPMLLNYIPVCYKILHLTGEVKSPELLFDPPFIFFTPVPLDITTVMDINILPQNYFRNSTLCVQIPTVRLLDGEEIHPLSVKFPKGRVIPGSHSGINNKLTCHLSFKSSKPVSFFTNLLFCDDRKNWFSLPVTATAENCILTIYPYMAIHLDKQNIILKNDKDEYLKKTRDGVLPPYQDAKPPSPASIKKTYTTSKFNDAEPAKGNLFIGVEVLPENLHLDESETSEEDHGSLEKEKYEQFLSLEEGTKAHYFFEKVVNAAQTWFSLFGWPEGPHSFSIPETIRRDVYKMQFYSSTSPPQKFSRQNDFSKYNKTIYDVLLHLSGKMPPGINSSQSLPVDNHEKRVIQLHLQHSSLLDFLNAQGGCISHVLPEFLLEPEDYKRWIEIMSSTNTMPVSSCTPKKKCSIVIEMSKFEAWSKRAWTDVFLQIYKVLVLSRVVPYCSNNMPPICVQNTPKVNPCFASSNIYSDSERILLSWMNINYENTRHVIWKNCHKDVIPSERWIVNFDKDLSDGLVFATQLGAYCPFLIESHFINMYTRPKSPEEYLHNCLIIVNTLYEIDFDVEIQATDICDPNPILMLMLCVYMYERLPTYLPKKVVSFECTLHDTVLNKILLKNSSSRNLVYNARIVGRDAADFSLSQKGNVVTISPRNEINVTLKFTSRFIRPAEASLLLISKPKNAVRGITMTFALKGKVLDFKAIDIIKCESPCYQFQEVTVNVKNPFHTAGDFSVILVESSTFVSSPTKLTESRQYPKHDDDMSSSGSDTDQGCSDSPNVLHTSIKSTFIREFFCSMHTVHLGVKGTSSLELRFLPFNMHVRYCVIILSNKKIGQLIYVAEGKGMTPLPSSCLPMNTSSSPVYYSTTREEGPNKKYPVLYLKCKPYQILYVDLKLPMTNEAKEKALAFAAQQQMSSIEYERRLITGTLESSSIRVAIALLGLTKIETLMLFRISKLRKPKTVSYTTEVSLPKYFYIPEKISIPWIPEPQVIKLSKAKASDGSVPLPLQFLPLQSGRYPCKILLKSRYDVRAYYVEGIVNEEQPEAKFEFETPAFEALTQNIPIKNQTNDKWTFQVTIEGEWFYGPVDLHVGPDEIVEYPLTFKPIFECVITGKLILQNEVDGREHIFDIKGVGKKPSALEHITVECQVGNVTQKHITLPHFTNTALTFKVTADLPIVWGNPQITVYPYKEILYLIHVRPWKRGILKGTITFSTTRRCTTRRKHDDYEEDTDQDQALSCLDSITEQSSILDDADTYGNFNNLRFWYNLEIHSTPGPPIEIMEMTCIALDSTCIEIPLSNPKDRGLHLEVQLTSAALNGDNEIILSPLQCTKYIVWYSPATTGYSDESIIFQPEMAEEFWYLLKLTIELPKPTTMPEIQCDLGKHVTQIIPLVNCTHETLKLQVTNSNPENFVLDINRKSQLIISPHSTTELPVLFYPSALGRADHQACINFYCTQFTEWKFYLSGVGLFPQPLDTERITTRIGLQSTIVIPFKNPTMEDVLIDIILTSVEHPRNLVMDHCWDSFIYESSAFRFSSPSEIQGIALPPKGNIDISLLFIPQIMKLHKTMVIIEMTKANGKYWPIDNFDELDIKFKSIVGIDSEEIQAIHWIYPIVGLPQAPPPKSPPVVIQCQSRKRAEEKVEIILNAGFFGFSLTPDLTEVLVIPKRNSHNFCEDPNEIPKIHEFEYEIQFESEAMKSKLESCVALYMIEKSYDIMAKRITFIFNLVFTPKKPLRSHITLKIECVTEGIWKFPIMLIATEPDTDAVIDIEGVGLFKESVFELRLKSQTRNPEPFTAHFLPGSDLEFFVKPQAGELLPFNTNGTLITVGFKPKMYCRKYKATLVIQTEEMYWKYEINGLTPTTVPPKNAKAKIDATHKTHDNMPVRPHNFVRENTKLIRTGVSSTIKGAPLVKNQ

SEQ ID NO: 34413 - protein, 976 aa, Homo sapiens
MNTQKGSLTINVHRGSLAMSIQRGSLVPRDMDSSGRDMQLRVIPAEVKFLDTMAGRVYRLPITVHNICRWNQKIRFKEPVKPQFKLMLTSLDKELASGLQMTAMVEYHPDKDEDTFDRLLISIENKTTEIPLIGLIPSCQLEIESVVNFGTLVANSKVYSKEITITNHGKAPGIFKAEYHGQLPILIFPTSGIVDAKSSMVIKVDFCADQPRIVDEEAIVILQGQPEMLLSIKAHVVEQIIELLSMSSDRRLECIHFGPVFFGSSKIKHARVYNNSPEPINWVAIIQDDAVGEELGTDIQQRTDIALNNLTYIRKIKNIDTTIIISCLPNEGTLQPYQKTVITFCFTPKLMAVGKKDIGPSYRQDYALFLRFESVGSKDGFLRDDDYKTIKSERFQKVELALTGTGLPVLLQFDPGPVLNFKPCFMGERSEIQCIIKNQCELLPVTYHFKKTANFEIDPEKGKITGGGMVDVMCSFVPHQLGVFKVKQMIEIIGLVAEEDLQSLSVKSFHHVYLAFNSICKASTKKVVMKFDPGILPSIRNPTGKFVVKDLAKRKNYAPVAMLQSAMTRTHNHRSCEEPVKDMLLAFPNDRAATIRSKDHHKHFRPIFTKVPRFNYVNHDFAYTTFEKQQKKLHENYYAMYLKYLRSVRLQKKQAERERMYSYDDTDIGLEPGSGLKSPSLSEAEIEEELSSAANSIRANRLLTTRGIASQEEESVRRKVLKGLKSEPSTPQEKHDCSLMLTPKQIHQVIVGPSVLNFGNICVNSPNTHLLHVINMLPMHVLLQLDTDLEELQKTNQFSYVILPTSSTYISMVFDSPTIGKFWKSFTFTVNNVPSGHILVVAVVQPVTLELSSNELVLRPRGFFMKTCFRGTVRLYNRQNCCAQFQWQPVNTGRGIAFSICPAKGTVEAYSSLECEVTWQQGFSSPEEGEFILHVFQGNALKLKCVAHVIIFLEHGFCFEGYEFVGYTLVYIVTYI

SEQ ID NO: 34414 - protein, 754 aa, Homo sapiens
MNTQKGSLTINVHRGSLAMSIQRGSLVPRDMDSSGRDMQLRVIPAEVKFLDTMAGRVYRLPITVHNICRWNQKIRFKEPVKPQFKLMLTSLDKELASGLQMTAMVEYHPDKDEDTFDRLLISIENKTTEIPLIGLIPSCQLEIESVVNFGTLVANSKVYSKEITITNHGKAPGIFKAEYHGQLPILIFPTSGIVDAKSSMVIKVDFCADQPRIVDEEAIVILQGQPEMLLSIKAHVVEQIIELLSMSSDRRLECIHFGPVFFGSSKIKHARVYNNSPEPINWVAIIQDDAVGEELGTDIQQRTDIALNNLTYIRKIKNIDTTIIISCLPNEGTLQPYQKTVITFCFTPKLMAVGKKDIGPSYRQDYALFLRFESVGSKDGFLRDDDYKTIKSERFQKVELALTGTGLPVLLQFDPGPVLNFKPCFMGERSEIQCIIKNQCELLPVTYHFKKTANFEIDPEKGKITGGGMVDVMCSFVPHQLGVFKVKQMIEIIGLVAEEDLQSLSVKSFHHVYLAFNSICKASTKKVVMKFDPGILPSIRNPTGKFVVKDLAKRKNYAPVAMLQSAMTRTHNHRSCEEPVKDMLLAFPNDRAATIRSKDHHKHFRPIFTKVPRFNYVNHDFAYTTFEKQQKKLHENYYAMYLKYLRSVRLQKKQAERERMYSYDDTDIGLEPGSGLKSPSLSEAEIEEELSSAANSIRANRLLTTRGIASQEEESVRRKVLKGLKSEPSTPQEKHDCSLMLTPKQIHQVIVVRY

SEQ ID NO: 34415 - protein, 1927 aa, Homo sapiens
MNTQKGSLTINVHRGSLAMSIQRGSLVPRDMDSSGRDMQLRVIPAEVKFLDTMAGRVYRLPITVHNICRWNQKIRFKEPVKPQFKLMLTSLDKELASGLQMTAMVEYHPDKDEDTFDRLLISIENKTTEIPLIGLIPSCQLEIESVVNFGTLVANSKVYSKEITITNHGKAPGIFKAEYHGQLPILIFPTSGIVDAKSSMVIKVDFCADQPRIVDEEAIVILQGQPEMLLSIKAHVVEQIIELLSMSSDRRLECIHFGPVFFGSSKIKHARVYNNSPEPINWVAIIQDDAVGEELGTDIQQRTDIALNNLTYIRKIKNIDTTIIISCLPNEGTLQPYQKTVITFCFTPKLMAVGKKDIGPSYRQDYALFLRFESVGSKDGFLRDDDYKTIKSERFQKVELALTGTGLPVLLQFDPGPVLNFKPCFMGERSEIQCIIKNQCELLPVTYHFKKTANFEIDPEKGKITGGGMVDVMCSFVPHQLGVFKVKQMIEIIGLVAEEDLQSLSVKSFHHVYLAFNSICKASTKKVVMKFDPGILPSIRNPTGKFVVKDLAKRKNYAPVAMLQSAMTRTHNHRSCEEPVKDMLLAFPNDRAATIRSKDHHKHFRPIFTKVPRFNYVNHDFAYTTFEKQQKKLHENYYAMYLKYLRSVRLQKKQAERERMYSYDDTDIGLEPGSGLKSPSLSEAEIEEELSSAANSIRANRLLTTRGIASQEEESVRRKVLKGLKSEPSTPQEKHDCSLMLTPKQIHQVIVGPSVLNFGNICVNSPNTHLLHVINMLPMHVLLQLDTDLEELQKTNQFSYVILPTSSTYISMVFDSPTIGKFWKSFTFTVNNVPSGHILVVAVVQPVTLELSSNELVLRPRGFFMKTCFRGTVRLYNRQNCCAQFQWQPVNTGRGIAFSICPAKGTVEAYSSLECEVTWQQGFSSPEEGEFILHVFQGNALKLKCVAHLGRTKVLLLQPRILFSNCPQGLTTWRKAILQNVGQNHAYFKVCSQSLLPIINIIPSQGIVPFGGITVLNISCKPTVAEKFDTRAKVSIRHANVIDLRIGGSAEIADVEINPDVFNFSGAYIGGTQIIPFVIKNKGITRARVEFNLKDFPDFSMDLKDKSEEFKDPAVPYIYSLELEENTSLECSITFSPKEVTVVEFIIQVQINFFESSKLYTKYLSSSPSNPKTVPLIRPCYVQATALQSPLNLSSTKFVFEIPLHEMNPNNKVTKTQNLVLYNITKHHVTWTLDLSNTGKLFKDGTFKFSVLNGILRPNEKYNVSISFCPNRPGTYTADIPMLLNYIPVCYKILHLTGEVKSPELLFDPPFIFFTPVPLDITTVMDINILPQNYFRNSTLCVQIPTVRLLDGEEIHPLSVKFPKGRVIPGSHSGINNKLTCHLSFKSSKPVSFFTNLLFCDDRKNWFSLPVTATAENCILTIYPYMAIHLDKQNIILKNDKDEYLKKTRDGVLPPYQDAKPPSPASIKKTYTTSKFNDAEPAKGNLFIGVEVLPENLHLDESETSEEDHGSLEKEKYEQFLSLEEGTKAHYFFEKVVNAAQTWFSLFGWPEGPHSFSIPETIRRDVYKMQFYSSTSPPQKFSRQNDFSKYNKTIYDVLLHLSGKMPPGINSSQSLPVDNHEKRVIQLHLQHSSLLDFLNAQGGCISHVLPEFLLEPEDYKRWIEIMSSTNTMPVSSCTPKKKCSIVIEMSKFEAWSKRAWTDVFLQIYKVLVLSRVVPYCSNNMPPICVQNTPKVNPCFASSNIYSDSERILLSWMNINYENTRHVIWKNCHKDVIPSERWIVNFDKDLSDGLVFATQLGAYCPFLIESHFINMYTRPKSPEEYLHNCLIIVNTLYEIDFDVEIQVCLRVFPKEMDAGVSGLRKEDMPSVWVVTIRLAVAVARTKRQKKGDIQFACFFVCLFFFIFVVISFSLWSRMHFFLLLPLDI

SEQ ID NO: 34416 - protein, 1322 aa, Homo sapiens
MPVVWPTLLDLSRDECKRILRKLELEAYAGVISALRAQGDLTKEKKDLLGELSKVLSISTERHRAEVRRAVNDERLTTIAHNMSGPNSSSEWSIEGRRLVPLMPRLVPQTAFTVTANAVANAAIQHNASLPVPAETGSKEVVCYSYTSTTSTPTSTPVPSGSIATVKSPRPASPASNVVVLPSGSTVYVKSVSCSDEDEKPRKRRRTNSSSSSPVVLKEVPKAVVPVSKTITVPVSGSPKMSNIMQSIANSLPPHMSPVKITFTKPSTQTTNTTTQKVIIVTTSPSSTFVPNILSKSHNYAAVTKLVPTSVIASTTQKPPVVITASQSSLVSNSSSGSSSSTPSPIPNTVAVTAVVSSTPSVVMSTVAQGVSTSAIKMASTRLPSPKSLVSAPTQILAQFPKQHQQSPKQQLYQVQQQTQQQVAQPSPVSHQQQPQQSPLPPGIKPTIQIKQESGVKIITQQVQPSKILPKPVTATLPTSSNSPIMVVSSNGAIMTTKLVTTPTGTQATYTRPTVSPSIGRMAATPGAATYVKTTSGSIITVVPKSLATLGGKIISSNIVSGTTTKITTIPMTSKPNVIVVQKTTGKGTTIQGLPGKNVVTTLLNAGGEKTIQTVPTGAKPAILTATRPITKMIVTQPKGIGSTVQPAAKIIPTKIVYGQQGKTQVLIKPKPVTFQATVVSEQTRQLVTETLQQASRVAEAGNSSIQEGKEEPQNYTDSSSSSTESSQSSQDSQPVVHVIASRRQDWSEHEIAMETSPTIIYQDVSSESQSATSTIKALLELQQTTVKEKLESKPRQPTIDLSQMAVPIQMTQEKRHSPESPSIAVVESELVAEYITTERTDEGTEVAFPLLVSHRSQPQQPSQPQRTLLQHVAQSQTATQTSVVVKSIPASSPGAITHIMQQALSSHTAFTKHSEELGTEEGEVEEMDTLDPQTGLFYRSALTQSQSAKQQKLSQPPLEQTQLQVKTLQCFQTKQKQTIHLQADQLQHKLPQMPQLSIRHQKLTPLQQEQAQPKPDVQHTQHPMVAKDRQLPTLMAQPPQTVVQVLAVKTTQQLPKLQQAPNQPKIYVQPQTPQSQMSLPASSEKQTASQVEQPIITQGSSVTKITFEGRQPPTVTKITGGSSVPKLTSPVTSISPIQASEKTAVSDILKMSLMEAQIDTNVEHMIVDPPKKALATSMLTGEAGSLPSTHMVVAGMANSTPQQQKCRESCSSPSTVGSSLTTRKIDPPAVPATGQFMRIQNVGQKKAEESPAEIIIQAIPQYAIPCHSSSNVVVEPSGLLELNNFTSQQLDDEETAMEQDIDSSTEDGTEPSPSQSSAERS

SEQ ID NO: 34417 - protein, 1155 aa, Homo sapiens
MPVVWPTLLDLSRDECKRILRKLELEAYAGVISALRAQGDLTKEKKDLLGELSKVLSISTERHRAEVRRAVNDERLTTIAHNMSGPNSSSEWSIEGRRLVPLMPRLVPQTAFTVTANAVANAAIQHNASLPVPAETGSKEVVCYSYTSTTSTPTSTPVPSGSIATVKSPRPASPASNVVVLPSGSTVYVKSVSCSDEDEKPRKRRRTNSSSSSPVVLKEVPKAVVPVSKTITVPVSGSPKMSNIMQSIANSLPPHMSPVKITFTKPSTQTTNTTTQKVIIVTTSPSSTFVPNILSKSHNYAAVTKLVPTSVIASTTQKPPVVITASQSSLVSNSSSGSSSSTPSPIPNTVAVTAVVSSTPSVVMSTVAQGVSTSAIKMASTRLPSPKSLVSAPTQILAQFPKQHQQSPKQQLYQVQQQTQQQVAQPSPVSHQQQPQQSPLPPGIKPTIQIKQESGVKIITQQVQPSKILPKPVTATLPTSSNSPIMVVSSNGAIMTTKLVTTPTGTQATYTRPTVSPSIGRMAATPGAATYVKTTSGSIITVVPKSLATLGGKIISSNIVSGTTTKITTIPMTSKPNVIVVQKTTGKGTTIQGLPGKNVVTTLLNAGGEKTIQTVPTGAKPAILTATRPITKMIVTQPKGIGSTVQPAAKIIPTKIVYGQQGKTQVLIKPKPVTFQATVVSEQTRQLVTETLQQASRVAEAGNSSIQEGKEEPQNYTDSSSSSTESSQSSQDSQPVVHVIASRRQDWSEHEIAMETSPTIIYQDVSSESQSATSTIKALLELQQTTVKEKLESKPRQPTIDLSQMAVPIQMTQEKRHSPESPSIAVVESELVAEYITTERTDEGTEVAFPLLVSHRSQPQQPSQPQRTLLQHVAQSQTATQTSVVVKSIPASSPGAITHIMQQALSSHTAFTKHSEELGTEEGEVEEMDTLDPQTGLFYRSALTQSQSAKQQKLSQPPLEQTQLQVKTLQCFQTKQKQTIHLQADQLQHKLPQMPQLSIRHQKLTPLQQEQAQPKPDVQHTQHPMVAKDRQLPTLMAQPPQTVVQVLAVKTTQQLPKLQQAPNQPKIYVQPQTPQSQMSLPASSEKQTASQAIPQYAIPCHSSSNVVVEPSGLLELNNFTSQQLDDEETAMEQDIDSSTEDGTEPSPSQSSAERS

SEQ ID NO: 34418 - protein, 82 aa, Homo sapiens
MPVVWPTLLDLSRDECKRILRKLELEAYAGVISALRAQGDLTKEKKDLLGELSKVLSISTERHRAEVRRAVNDERLTTIAHK

SEQ ID NO: 34419 - protein, 1323 aa, Homo sapiens
MPVVWPTLLDLSRDECKRILRKLELEAYAGVISALRAQGDLTKEKKDLLGELSKVLSISTERHRAEVRRAVNDERLTTIAHKMNLSLYLGERPSYSMSGPNSSSEWSIEGRRLVPLMPRLVPQTAFTVTANAVANAAIQHNASLPVPAETGSKEVVVCYSYTSTTSTPTSTPVPSGSIATVKSPRPASPASNVVVLPSGSTVYVKSVSCSDEDEKPRKRRRTNSSSSSPVVLKEVPKAVVPVSKTITVPVSGSPKMSNIMQSIANSLPPHMSPVKITFTKPSTQTTNTTTQKVIIVTTSPSSTFVPNILSKSHNYAAVTKLVPTSVIASTTQKPPVVITASQSSLVSNSSSGSSSSTPSPIPNTVAVTAVVSSTPSVVMSTVAQGVSTSAIKMASTRLPSPKSLVSAPTQILAQFPKQHQQSPKQQLYQVQQQTQQQVAQPSPVSHQQQPQQSPLPPGIKPTIQIKQESGVKIITQQVQPSKILPKPVTATLPTSSNSPIMVVSSNGAIMTTKLVTTPTGTQATYTRPTVSPSIGRMAATPGAATYVKTTSGSIITVVPKSLATLGGKIISSNIVSGTTTKITTIPMTSKPNVIVVQKTTGKGTTIQGLPGKNVVTTLLNAGGEKTIQTVPTGAKPAILTATRPITKMIVTQPKGIGSTVQPAAKIIPTKIVYGQQGKTQVLIKPKPVTFQATVVSEQTRQLVTETLQQASRVAEAGNSSIQEGKEEPQNYTDSSSSSTESSQSSQDSQPVVHVIASRRQDWSEHEIAMETSPTIIYQDVSSESQSATSTIKALLELQQTTVKEKLESKPRQPTIDLSQMAVPIQMTQEKRHSPESPSIAVVESELVAEYITTVSHRSQPQQPSQPQRTLLQHVAQSQTATQTSVVVKSIPASSPGAITHIMQQALSSHTAFTKHSEELGTEEGEVEEMDTLDPQTGLFYRSALTQSQSAKQQKLSQPPLEQTQLQVKTLQCFQTKQKQTIHLQADQLQHKLPQMPQLSIRHQKLTPLQQEQAQPKPDVQHTQHPMVAKDRQLPTLMAQPPQTVVQVLAVKTTQQLPKLQQAPNQPKIYVQPQTPQSQMSLPASSEKQTASQVEQPIITQGSSVTKITFEGRQPPTVTKITGGSSVPKLTSPVTSISPIQASEKTAVSDILKMSLMEAQIDTNVEHMIVDPPKKALATSMLTGEAGSLPSTHMVVAGMANSTPQQQKCRESCSSPSTVGSSLTTRKIDPPAVPATGQFMRIQNVGQKKAEESPAEIIIQAIPQYAIPCHSSSNVVVEPSGLLELNNFTSQQLDDEETAMEQDIDSSTEDGTEPSPSQSSAERS

SEQ ID NO: 34420 - protein, 1323 aa, Homo sapiens
MPVVWPTLLDLSRDECKRILRKLELEAYAGVISALRAQGDLTKEKKDLLGELSKVLSISTERHRAEVRRAVNDERLTTIAHNMSGPNSSSEWSIEGRRLVPLMPRLVPQTAFTVTANAVANAAIQHNASLPVPAETGSKEVVVCYSYTSTTSTPTSTPVPSGSIATVKSPRPASPASNVVVLPSGSTVYVKSVSCSDEDEKPRKRRRTNSSSSSPVVLKEVPKAVVPVSKTITVPVSGSPKMSNIMQSIANSLPPHMSPVKITFTKPSTQTTNTTTQKVIIVTTSPSSTFVPNILSKSHNYAAVTKLVPTSVIASTTQKPPVVITASQSSLVSNSSSGSSSSTPSPIPNTVAVTAVVSSTPSVVMSTVAQGVSTSAIKMASTRLPSPKSLVSAPTQILAQFPKQHQQSPKQQLYQVQQQTQQQVAQPSPVSHQQQPQQSPLPPGIKPTIQIKQESGVKIITQQVQPSKILPKPVTATLPTSSNSPIMVVSSNGAIMTTKLVTTPTGTQATYTRPTVSPSIGRMAATPGAATYVKTTSGSIITVVPKSLATLGGKIISSNIVSGTTTKITTIPMTSKPNVIVVQKTTGKGTTIQGLPGKNVVTTLLNAGGEKTIQTVPTGAKPAILTATRPITKMIVTQPKGIGSTVQPAAKIIPTKIVYGQQGKTQVLIKPKPVTFQATVVSEQTRQLVTETLQQASRVAEAGNSSIQEGKEEPQNYTDSSSSSTESSQSSQDSQPVVHVIASRRQDWSEHEIAMETSPTIIYQDVSSESQSATSTIKALLELQQTTVKEKLESKPRQPTIDLSQMAVPIQMTQEKRHSPESPSIAVVESELVAEYITTERTDEGTEVAFPLLVSHRSQPQQPSQPQRTLLQHVAQSQTATQTSVVVKSIPASSPGAITHIMQQALSSHTAFTKHSEELGTEEGEVEEMDTLDPQTGLFYRSALTQSQSAKQQKLSQPPLEQTQLQVKTLQCFQTKQKQTIHLQADQLQHKLPQMPQLSIRHQKLTPLQQEQAQPKPDVQHTQHPMVAKDRQLPTLMAQPPQTVVQVLAVKTTQQLPKLQQAPNQPKIYVQPQTPQSQMSLPASSEKQTASQVEQPIITQGSSVTKITFEGRQPPTVTKITGGSSVPKLTSPVTSISPIQASEKTAVSDILKMSLMEAQIDTNVEHMIVDPPKKALATSMLTGEAGSLPSTHMVVAGMANSTPQQQKCRESCSSPSTVGSSLTTRKIDPPAVPATGQFMRIQNVGQKKAEESPAEIIIQAIPQYAIPCHSSSNVVVEPSGLLELNNFTSQQLDDEETAMEQDIDSSTEDGTEPSPSQSSAERS

SEQ ID NO: 34421 - protein, 1231 aa, Homo sapiens
MPVVWPTLLDLSRDECKRILRKLELEAYAGVISALRAQGDLTKEKKDLLGELSKVLSISTERHRAEVRRAVNDERLTTIAHKMNLSLYLGERPSYSMSGPNSSSEWSIEGRRLVPLMPRLVPQTAFTVTANAVANAAIQHNASLPVPAETGSKEVVCYSYTSTTSTPTSTPVPSGSIATVKSPRPASPASNVVVLPSGSTVYVKSVSCSDEDEKPRKRRRTNSSSSSPVVLKEVPKAVVPVSKTITVPVSGSPKMSNIMQSIANSLPPHMSPVKITFTKPSTQTTNTTTQKVIIVTTSPSSTFVPNILSKSHNYAAVTKLVPTSVIASTTQKPPVVITASQSSLVSNSSSGSSSSTPSPIPNTVAVTAVVSSTPSVVMSTVAQGVSTSAIKMASTRLPSPKSLVSAPTQILAQFPKQHQQSPKQQLYQVQQQTQQQVAQPSPVSHQQQPQQSPLPPGIKPTIQIKQESGVKIITQQVQPSKILPKPVTATLPTSSNSPIMVVSSNGAIMTTKLVTTPTGTQATYTRPTVSPSIGRMAATPGAATYVKTTSGSIITVVPKSLATLGGKIISSNIVSGTTTKITTIPMTSKPNVIVVQKTTGKGTTIQGLPGKNVVTTLLNAGGEKTIQTVPTGAKPAILTATRPITKMIVTQPKGIGSTVQPAAKIIPTKIVYGQQGKTQVLIKPKPVTFQATVVSEQTRQLVTETLQQASRVAEAGNSSIQEGKEEPQNYTDSSSSSTESSQSSQDAVVISGEISSPPLFSVSHRSQPQQPSQPQRTLLQHVAQSQTATQTSVVVKSIPASSPGAITHIMQQALSSHTAFTKHSEELGTEEGEVEEMDTLDPQTGLFYRSALTQSQSAKQQKLSQPPLEQTQLQVKTLQCFQTKQKQTIHLQADQLQHKLPQMPQLSIRHQKLTPLQQEQAQPKPDVQHTQHPMVAKDRQLPTLMAQPPQTVVQVLAVKTTQQLPKLQQAPNQPKIYVQPQTPQSQMSLPASSEKQTASQVEQPIITQGSSVTKITFEGRQPPTVTKITGGSSVPKLTSPVTSISPIQASEKTAVSDILKMSLMEAQIDTNVEHMIVDPPKKALATSMLTGEAGSLPSTHMVVAGMANSTPQQQKCRESCSSPSTVGSSLTTRKIDPPAVPATGQFMRIQNVGQKKAEESPAEIIIQAIPQYAIPCHSSSNVVVEPSGLLELNNFTSQQLDDEETAMEQDIDSSTEDGTEPSPSQSSAERS

SEQ ID NO: 34422 - protein, 1337 aa, Homo sapiens
MPVVWPTLLDLSRDECKRILRKLELEAYAGVISALRAQGDLTKEKKDLLGELSKVLSISTERHRAEVRRAVNDERLTTIAHKMNLSLYLGERPSYSMSGPNSSSEWSIEGRRLVPLMPRLVPQTAFTVTANAVANAAIQHNASLPVPAETGSKEVVVCYSYTSTTSTPTSTPVPSGSIATVKSPRPASPASNVVVLPSGSTVYVKSVSCSDEDEKPRKRRRTNSSSSSPVVLKEVPKAVVPVSKTITVPVSGSPKMSNIMQSIANSLPPHMSPVKITFTKPSTQTTNTTTQKVIIVTTSPSSTFVPNILSKSHNYAAVTKLVPTSVIASTTQKPPVVITASQSSLVSNSSSGSSSSTPSPIPNTVAVTAVVSSTPSVVMSTVAQGVSTSAIKMASTRLPSPKSLVSAPTQILAQFPKQHQQSPKQQLYQVQQQTQQQVAQPSPVSHQQQPQQSPLPPGIKPTIQIKQESGVKIITQQVQPSKILPKPVTATLPTSSNSPIMVVSSNGAIMTTKLVTTPTGTQATYTRPTVSPSIGRMAATPGAATYVKTTSGSIITVVPKSLATLGGKIISSNIVSGTTTKITTIPMTSKPNVIVVQKTTGKGTTIQGLPGKNVVTTLLNAGGEKTIQTVPTGAKPAILTATRPITKMIVTQPKGIGSTVQPAAKIIPTKIVYGQQGKTQVLIKPKPVTFQATVVSEQTRQLVTETLQQASRVAEAGNSSIQEGKEEPQNYTDSSSSSTESSQSSQDSQPVVHVIASRRQDWSEHEIAMETSPTIIYQDVSSESQSATSTIKALLELQQTTVKEKLESKPRQPTIDLSQMAVPIQMTQEKRHSPESPSIAVVESELVAEYITTERTDEGTEVAFPLLVSHRSQPQQPSQPQRTLLQHVAQSQTATQTSVVVKSIPASSPGAITHIMQQALSSHTAFTKHSEELGTEEGEVEEMDTLDPQTGLFYRSALTQSQSAKQQKLSQPPLEQTQLQVKTLQCFQTKQKQTIHLQADQLQHKLPQMPQLSIRHQKLTPLQQEQAQPKPDVQHTQHPMVAKDRQLPTLMAQPPQTVVQVLAVKTTQQLPKLQQAPNQPKIYVQPQTPQSQMSLPASSEKQTASQVEQPIITQGSSVTKITFEGRQPPTVTKITGGSSVPKLTSPVTSISPIQASEKTAVSDILKMSLMEAQIDTNVEHMIVDPPKKALATSMLTGEAGSLPSTHMVVAGMANSTPQQQKCRESCSSPSTVGSSLTTRKIDPPAVPATGQFMRIQNVGQKKAEESPAEIIIQAIPQYAIPCHSSSNVVVEPSGLLELNNFTSQQLDDEETAMEQDIDSSTEDGTEPSPSQSSAERS

SEQ ID NO: 34423 - protein, 2517 aa, Homo sapiens
MVGERHAGDLMVPLGPRLQAYPEELIRQRPGHDGHPEYLIRWSVLKCGEVGKVGVEEGKAEHILMWLSAPEVYANCPGLLGERALSKGLQHEPAGVSGSFPRDPGGLDEVAMGEMEADVQALVRRAARQLAESGTPSLTAAVLHTIHVLSAYASIGPLTGVFRETGALDLLMHMLCNPEPQIRRSAGKMLQALAAHDAGSRAHVLLSLSQQDGIEQHMDFDSRYTLLELFAETTSSEEHCMAFEGIHLPQIPGKLLFSLVKRYLCVTSLLDQLNSSPELGAGDQSSPCATREKSRGQRELEFSMAVGNLISELVRSMGWARNLSEQGMSPPRPTRSIFQPYISGPSLLLPTIVTTPRRQGWVFRQRSEFSSRSGYGEYVQQTLQPGMRVRMLDDYEEISAGDEGEFRQSNNGIPPVQVFWQSTGRTYWVHWHMLEILGPEEATEDKASAAVEKGAGATVLGTAFPSWDWNPMDGLYPLPYLQPEPQKNERVGYLTQAEWWELLFFIKKLDLCEQQPIFQNLWKNLDETLGEKALGEISVSVEMAESLLQVLSSRFEGSTLNDLLNSQIYTKYGLLSNEPSSSSTSRNHSCTPDPEEESKSEASFSEEETESLKAKAEAPKTEAEPTKTRTETPMAQSDSQLFNQLLVTEGMTLPTEMKEAASEMARALRGPGPRSSLDQHVAAVVATVQISSLDTNLQLSGLSALSQAVEEVTERDHPLVRPDRSLREKLVKMLVELLTNQVGEKMVVVQALRLLYLLMTKHEWRPLFAREGGIYAVLVCMQEYKTSVLVQQAGLAALKMLAVASSSEIPTFVTGRDSIHSLFDAQMTREIFASIDSATRPGSESLLLTVPAAVILMLNTEGCSSAARNGLLLLNLLLCNHHTLGDQIITQELRDTLFRHSGIAPRTEPMPTTRTILMMLLNRYSEPPGSPERAALETPIIQGQDGSPELLIRSLVGGPSAELLLDLERVLCREGSPGGAVRPLLKRLQQETQPFLLLLRTLDAPGPNKTLLLSVLRVITRLLDFPEAMVLPWHEVLEPCLNCLSGPSSDSEIVQELTCFLHRLASMHKDYAVVLCCLGAKEILSKVLDKHSAQLLLGCELRDLVTECEKYAQLYSNLTSSILAGCIQMVLGQIEDHRRTHQPINIPFFDVFLRHLCQGSSVEVKEDKCWEKVEVSSNPHRASKLTDHNPKTYWESNGSTGSHYITLHMHRGVLVRQLTLLVASEDSSYMPARVVVFGGDSTSCIGTELNTVNVMPSASRVILLENLNRFWPIIQIRIKRCQQGGIDTRVRGVEVLGPKPTFWPLFREQLCRRTCLFYTIRAQAWSRDIAEDHRRLLQLCPRLNRVLRHEQNFADRFLPDDEAAQALGKTCWEALVSPLVQNITSPDAEGVSALGWLLDQYLEQRETSRNPLSRAASFASRVRRLCHLLVHVEPPPGPSPEPSTRPFSKNSKGRDRSPAPSPVLPSSSLRNITQCWLSVVQEQVSRFLAAAWRAPDFVPRYCKLYEHLQRAGSELFGPRAAFMLALRSGFSGALLQQSFLTAAHMSEQFARYIDQQIQGGLIGGAPGVEMLGQLQRHLEPIMVLSGLELATTFEHFYQHYMADRLLSFGSSWLEGAVLEQIGLCFPNRLPQLMLQSLSTSEELQRQFHLFQLQRLDKLFLEQEDEEEKRLEEEEEEEEEEEAEKELFIEDPSPAISILVLSPRCWPVSPLCYLYHPRKCLPTEFCDALDRFSSFYSQSQNHPVLDMGPHRRLQWTWLGRAELQFGKQILHVSTVQMWLLLKFNQTEEVSVETLLKDSDLSPELLLQALVPLTSGNGPLTLHEGQDFPHGGVLRLHEPGPQRSGEALWLIPPQAYLNVEKDEGRTLEQKRNLLSCLLVRILKAHGEKGLHIDQLVCLVLEAWQKGPNPPGTLGHTVAGGVACTSTDVLSCILHLLGQGYVKRRDDRPQILMYAAPEPMGPCRGQADVPFCGSQSETSKPSPEAVATLASLQLPAGRTMSPQEVEGLMKQTVRQVQETLNLEPDVAQHLLAHSHWGAEQLLQSYSEDPEPLLLAAGLCVHQAQAVPVRPDHCPVCVSPLGCDDDLPSLCCMHYCCKSCWNEYLTTRIEQNLVLNCTCPIADCPAQPTGAFIRAIVSSPEVISKYEKALLRGYVESCSNLTWCTNPQGCDRILCRQGLGCGTTCSKCGWASCFNCSFPEAHYPASCGHMSQWVDDGGYYDGMSVEAQSKHLAKLISKRCPSCQAPIEKNEGCLHMTCAKCNHGFCWRCLKSWKPNHKDYYNCSAMVSKAARQEKRFQDYNERCTFHHQAREFAVNLRNRVSAIHEVPPPRSFTFLNDACQGLEQARKVLAYACVYSFYSQDAEYMDVVEQQTENLELHTNALQILLEETLLRCRDLASSLRLLRADCLSTGMELLRRIQERLLAILQHSAQDFRVGLQSPSVEAWEAKGPNMPGSQPQASSGPEAEEEEEDDEDDVPEWQQDEFDEELDNDSFSYDESENLDQETFFFGDEEEDEDEAYD

SEQ ID NO: 34424 - protein, 2407 aa, Homo sapiens
MVGERHAGDLMVPLGPRLQAYPEELIRQRPGHDGHPEYLIRWSVLKCGEVGKVGVEEGKAEHILMWLSAPEVYANCPGLLGERALSKGLQHEPAGVSGSFPRDPGGLDEVAMGEMEADVQALVRRAARQLAESGTPSLTAAVLHTIHVLSAYASIGPLTGVFRETGALDLLMHMLCNPEPQIRRSAGKMLQALAAHDAGSRAHVLLSLSQQDGIEQHMDFDSRYTLLELFAETTSSEEHCMAFEGIHLPQIPGKLLFSLVKRYLCVTSLLDQLNSSPELGAGDQSSPCATREKSRGQRELEFSMAVGNLISELVRSMGWARNLSEQGMSPPRPTRSIFQPYISGPSLLLPTIVTTPRRQGWVFRQRSEFSSRSGYGEYVQQTLQPGMRVRMLDDYEEISAGDEGEFRQSNNGIPPVQTLGEKALGEISVSVEMAESLLQVLSSRFEGSTLNDLLNSQIYTKYGLLSNEPSSSSTSRNHSCTPDPEEESKSEASFSEEETESLKAKAEAPKTEAEPTKTRTETPMAQSDSQLFNQLLVTEGMTLPTEMKEAASEMARALRGPGPRSSLDQHVAAVVATVQISSLDTNLQLSGLSALSQAVEEVTERDHPLVRPDRSLREKLVKMLVELLTNQVGEKMVVVQALRLLYLLMTKHEWRPLFAREGGIYAVLVCMQEYKTSVLVQQAGLAALKMLAVASSSEIPTFVTGRDSIHSLFDAQMTREIFASIDSATRPGSESLLLTVPAAVILMLNTEGCSSAARNGLLLLNLLLCNHHTLGDQIITQELRDTLFRHSGIAPRTEPMPTTRTILMMLLNRYSEPPGSPERAALETPIIQGQDGSPELLIRSLVGGPSAELLLDLERVLCREGSPGGAVRPLLKRLQQETQPFLLLLRTLDAPGPNKTLLLSVLRVITRLLDFPEAMVLPWHEVLEPCLNCLSGPSSDSEIVQELTCFLHRLASMHKDYAVVLCCLGAKEILSKVLDKHSAQLLLGCELRDLVTECEKYAQLYSNLTSSILAGCIQMVLGQIEDHRRTHQPINIPFFDVFLRHLCQGSSVEVKEDKCWEKVEVSSNPHRASKLTDHNPKTYWESNGSTGSHYITLHMHRGVLVRQLTLLVASEDSSYMPARVVVFGGDSTSCIGTELNTVNVMPSASRVILLENLNRFWPIIQIRIKRCQQGGIDTRVRGVEVLGPKPTFWPLFREQLCRRTCLFYTIRAQAWSRDIAEDHRRLLQLCPRLNRVLRHEQNFADRFLPDDEAAQALGKTCWEALVSPLVQNITSPDAEGVSALGWLLDQYLEQRETSRNPLSRAASFASRVRRLCHLLVHVEPPPGPSPEPSTRPFSKNSKGRDRSPAPSPVLPSSSLRNITQCWLSVVQEQVSRFLAAAWRAPDFVPRYCKLYEHLQRAGSELFGPRAAFMLALRSGFSGALLQQSFLTAAHMSEQFARYIDQQIQGGLIGGAPGVEMLGQLQRHLEPIMVLSGLELATTFEHFYQHYMADRLLSFGSSWLEGAVLEQIGLCFPNRLPQLMLQSLSTSEELQRQFHLFQLQRLDKLFLEQEDEEEKRLEEEEEEEEEEEAEKELFIEDPSPAISILVLSPRCWPVSPLCYLYHPRKCLPTEFCDALDRFSSFYSQSQNHPVLDMGPHRRLQWTWLGRAELQFGKQILHVSTVQMWLLLKFNQTEEVSVETLLKDSDLSPELLLQALVPLTSGNGPLTLHEGQDFPHGGVLRLHEPGPQRSGEALWLIPPQAYLNVEKDEGRTLEQKRNLLSCLLVRILKAHGEKGLHIDQLVCLVLEAWQKGPNPPGTLGHTVAGGVACTSTDVLSCILHLLGQGYVKRRDDRPQILMYAAPEPMGPCRGQADVPFCGSQSETSKPSPEAVATLASLQLPAGRTMSPQEVEGLMKQTVRQVQETLNLEPDVAQHLLAHSHWGAEQLLQSYSEDPEPLLLAAGLCVHQAQAVPVRPDHCPVCVSPLGCDDDLPSLCCMHYCCKSCWNEYLTTRIEQNLVLNCTCPIADCPAQPTGAFIRAIVSSPEVISKYEKALLRGYVESCSNLTWCTNPQGCDRILCRQGLGCGTTCSKCGWASCFNCSFPEAHYPASCGHMSQWVDDGGYYDGMSVEAQSKHLAKLISKRCPSCQAPIEKNEGCLHMTCAKCNHGFCWRCLKSWKPNHKDYYNCSAMVSKAARQEKRFQDYNERCTFHHQAREFAVNLRNRVSAIHEVPPPRSFTFLNDACQGLEQARKVLAYACVYSFYSQDAEYMDVVEQQTENLELHTNALQILLEETLLRCRDLASSLRLLRADCLSTGMELLRRIQERLLAILQHSAQDFRVGLQSPSVEAWEAKGPNMPGSQPQASSGPEAEEEEEDDEDDVPEWQQDEFDEELDNDSFSYDESENLDQETFFFGDEEEDEDEAYD

SEQ ID NO: 34425 - protein, 114 aa, Homo sapiens
MSLPSSRAARVPGPSGSLCALLALLLLLTPPGPLASAGPVSAVLTELRCTCLRVTLRVNPKTIGKLQVFPAGPQCSKVEVVASLKNGKQVCLDPEAPFLKKVIQKILDSGNKKN

SEQ ID NO: 34426 - protein, 187 aa, Homo sapiens
MSEMAELSELYEESSDLQMDVMPGEGDLPQMEVGSGSRELSLRPSRSGAQQLEEEGPMEEEEAQPMAAPEGKRSLANGPNAGEQPGQVAGADFESEDEGEEFDDWEDDYDYPEEEQLSGAGYRVSAALEEADKMFLRTREPALDGGFQMHYEKTPFDQLAFIEELFSLMVVNRLTEELGCDEIIDRE

SEQ ID NO: 34427 - protein, 164 aa, Homo sapiens
MSEMAELSELYEESSDLQMDVMPGEGDLPQMEVGSGSRELSLRPSRSGAQQLEEEGPMEEEEAQVAGADFESEDEGEEFDDWEDDYDYPEEEQLSGAGYRVSAALEEADKMFLRTREPALDGGFQMHYEKTPFDQLAFIEELFSLMVVNRLTEELGCDEIIDRE

SEQ ID NO: 34428 - protein, 2073 aa, Homo sapiens
MAEVRKFTKRLSKPGTAAELRQSVSEAVRGSVVLEKAKVVEPLDYENVIAQRKTQIYSDPLRDLLMFPMEDISISVIGRQRRTVQSTVPEDAEKRAQSLFVKECIKTYSTDWHVVNYKYEDFSGDFRMLPCKSLRPEKIPNHVFEIDEDCEKDEDSSSLCSQKGGVIKQGWLHKANVNSTITVTMKVFKRRYFYLTQLPDGSYILNSYKDEKNSKESKGCIYLDACIDVVQCPKMRRHAFELKMLDKYSHYLAAETEQEMEEWLITLKKIIQINTDSLVQEKKETVETAQDDETSSQGKAENIMASLERSMHPELMKYGRETEQLNKLSRGDGRQNLFSFDSEVQRLDFSGIEPDIKPFEEKCNKRFLVNCHDLTFNILGQIGDNAKGPPTNVEPFFINLALFDVKNNCKISADFHVDLNPPSVREMLWGSSTQLASDGSPKGSSPESYIHGIAESQLRYIQQGIFSVTNPHPEIFLVARIEKVLQGNITHCAEPYIKNSDPVKTAQKVHRTAKQVCSRLGQYRMPFAWAARPIFKDTQGSLDLDGRFSPLYKQDSSKLSSEDILKLLSEYKKPEKTKLQIIPGQLNITVECVPVDLSNCITSSYVPLKPFEKNCQNITVEVEEFVPEMTKYCYPFTIYKNHLYVYPLQLKYDSQKTFAKARNIAVCVEFRDSDESDASALKCIYGKPAGSVFTTNAYAVVSHHNQNPEFYDEIKIELPIHLHQKHHLLFTFYHVSCEINTKGTTKKQDTVETPVGFAWVPLLKDGRIITFEQQLPVSANLPPGYLNLNDAESRRQCNVDIKWVDGAKPLLKIKSHLESTIYTQDLHVHKFFHHCQLIQSGSKEVPGELIKYLKCLHAMEIQVMIQFLPVILMQLFRVLTNMTHEDDVPINCTMVLLHIVSKCHEEGLDSYLRSFIKYSFRPEKPSAPQAQLIHETLATTMIAILKQSADFLSINKLLKYSWFFFEIIAKSMATYLLEENKIKLPRGQRFPETYHHVLHSLLLAIIPHVTIRYAEIPDESRNVNYSLASFLKRCLTLMDRGFIFNLINDYISGFSPKDPKVLAEYKFEFLQTICNHEHYIPLNLPMAFAKPKLQRVQDSNLEYSLSDEYCKHHFLVGLLLRETSIALQDNYEIRYTAISVIKNLLIKHAFDTRYQHKNQQAKIAQLYLPFVGLLLENIQRLAGRDTLYSCAAMPNSASRDEFPCGFTSPANRGSLSTDKDTAYGSFQNGHGIKREDSRGSLIPEGATGFPDQGNTGENTRQSSTRSSVSQYNRLDQYEIRSLLMCYLYIVKMISEDTLLTYWNKVSPQELINILILLEVCLFHFRYMGKRNIARVHDAWLSKHFGIDRKSQTMPALRNRSGVMQARLQHLSSLESSFTLNHSSTTTEADIFHQALLEGNTATEVSLTVLDTISFFTQCFKTQLLNNDGHNPLMKKVFDIHLAFLKNGQSEVSLKHVFASLRAFISKFPSAFFKGRVNMCAAFCYEVLKCCTSKISSTRNEASALLYLLMRNNFEYTKRKTFLRTHLQIIIAVSQLIADVALSGGSRFQESLFIINNFANSDRPMKATAFPAEVKDLTKRIRTVLMATAQMKEHEKDPEMLIDLQYSLAKSYASTPELRKTWLDSMAKIHVKNGDFSEAAMCYVHVAALVAEFLHRKKLFPNGCSAFKKITPNIDEEGAMKEDAGMMDVHYSEEVLLELLEQCVDGLWKAERYEIISEISKLIVPIYEKRREFEKLTQVYRTLHGAYTKILEVMHTKKRLLGTFFRVAFYGQSFFEEEDGKEYIYKEPKLTGLSEISLRLVKLYGEKFGTENVKIIQDSDKVNAKELDPKYAHIQVTYVKPYFDDKELTERKTEFERNHNISRFVFEAPYTLSGKKQGCIEEQCKRRTILTTSNSFPYVKKRIPINCEQQINLKPIDVATDEIKDKTAELQKLCSSTDVDMIQLQLKLQGCVSVQVNAGPLAYARAFLNDSQASKYPPKKVSELKDMFRKFIQACSIALELNERLIKEDQVEYHEGLKSNFRDMVKELSDIIHEQILQEDTMHSPWMSNTLHVFCAISGTSSDRGYGSPRYAEV

SEQ ID NO: 34429 - protein, 585 aa, Homo sapiens
MFSCFCFSLQDNSFSSTTVTECDEDPVSLHEDQTDCSSLRDENNKENYPDAGALVEEHAPPSWEPQQQNVEATVLVDSVLRPSMGNFKSRKPKSIFKAESGRSHGESQETEHVVSSQSECQVRAGTPAHESPQNNAFKCQETVRLQPRIDQRTAISPKDAFETRQDLNEEEAAQVHGVKDPAPASTQSVLADGTDSADPSPVHKDGQNEADSAPEDLHSVGTSRLLYHITDGDNPLLSPRCSIFSQSQRFNLDPESAPSPPSTQQFMMPRSSSRCSCGDGKEPQTITQLTKHIQSLKRKIRKFEEKFEQEKKYRPSHGDKTSNPEVLKWMNDLAKGRKQLKELKLKLSEEQGSAPKGPPRNLLCEQPTVPRENGKPEAAGPEPSSSGEETPDAALTCLKERREQLPPQEDSKVTKQDKNLIKPLYDRYRIIKQILSTPSLIPTIQEEEDSDEDRPQGSQQPSLADPASHLPVGDHLTYSNETEPVRALLPDEKKEVKPPALSMSNLHEATMPVLLDHLRETRADKKRLRKALREFEEQFFKQTGRSPQKEDRIPMADEYYEYKHIKAKLRLLEVLISKQDVAKTI

SEQ ID NO: 34430 - protein, 458 aa, Homo sapiens
MFSCFCFSLQDNSFSSTTVTECDEDPVSLHEDQTDCSSLRDENNKENYPDAGALVEEHAPPSWEPQQQNVEATVLVDSVLRPSMGNFKSRKPKSIFKAESGRSHGESQETEHVVSSQSECQVRAGTPAHESPQNNAFKCQETVRLQPRIDQRTAISPKDAFETRQDLNEEEAAQVHGVKDPAPASTQSVLADGTDSADPSPVHKDGQNEADSAPEDLHSVGTSRLLYHITDGDNPLLSPRCSIFSQSQRFNLDPESAPSPPSTQQFMMPRSSSRCSCGDGKEPQTITQLTKHIQSLKRKIRKFEEKFEQEKKYRPSHGDKTSNPEVLKWMNDLAKGRKQLKELKLKLSEEQGSAPKGPPRNLLCEQPTVPRENGKPEAAGPEPSSSGEETPDAALTCLKERREQLPPQEDSKVTKQDKNLIKPLYDRYRIIKQILSTPSLIPTIVSQDTCMLLLCTDV

SEQ ID NO: 34431 - protein, 487 aa, Homo sapiens
MFSCFCFSLQDNSFSSTTVTECDEDPVSLHEDQTDCSSLRDENNKENYPDAGALVEEHAPPSWEPQQQNVEATVLVDSVLRPSMGNFKSRKPKSIFKAESGRSHGESQETEHVVSSQSECQVRAGTPAHESPQNNAFKCQETVRLQPRIDQRTAISPKDAFETRQDLNEEEAAQVHGVKDPAPASTQSVLADGTDSADPSPVHKDGQNEADSAPEDLHSVGTSRLLYHITDGDNPLLSPRCSIFSQSQRFNLDPESAPSPPSTQQFMMPRSSSRCSCGDGKEPQTITQLTKHIQSLKRKIRKFEEKFEQEKKYRVTKQDKNLIKPLYDRYRIIKQILSTPSLIPTIQEEEDSDEDRPQGSQQPSLADPASHLPVGDHLTYSNETEPVRALLPDEKKEVKPPALSMSNLHEATMPVLLDHLRETRADKKRLRKALREFEEQFFKQTGRSPQKEDRIPMADEYYEYKHIKAKLRLLEVLISKQDVAKTI

SEQ ID NO: 34432 - protein, 502 aa, Homo sapiens
MGNFKSRKPKSIFKAESGRSHGESQETEHVVSSQSECQVRAGTPAHESPQNNAFKCQETVRLQPRIDQRTAISPKDAFETRQDLNEEEAAQVHGVKDPAPASTQSVLADGTDSADPSPVHKDGQNEADSAPEDLHSVGTSRLLYHITDGDNPLLSPRCSIFSQSQRFNLDPESAPSPPSTQQFMMPRSSSRCSCGDGKEPQTITQLTKHIQSLKRKIRKFEEKFEQEKKYRPSHGDKTSNPEVLKWMNDLAKGRKQLKELKLKLSEEQGSAPKGPPRNLLCEQPTVPRENGKPEAAGPEPSSSGEETPDAALTCLKERREQLPPQEDSKVTKQDKNLIKPLYDRYRIIKQILSTPSLIPTIQEEEDSDEDRPQGSQQPSLADPASHLPVGDHLTYSNETEPVRALLPDEKKEVKPPALSMSNLHEATMPVLLDHLRETRADKKRLRKALREFEEQFFKQTGRSPQKEDRIPMADEYYEYKHIKAKLRLLEVLISKQDVAKTI

SEQ ID NO: 34433 - protein, 501 aa, Homo sapiens
MGNFKSRKPKSIFKAESGRSHGESQETEHVVSSQSECQVRAGTPAHESPQNNAFKCQETVRLQPRIDQRTAISPKDAFETRQDLNEEEAAQVHGVKDPAPASTQSVLADGTDSADPSPVHKDGQNEADSAPEDLHSVGTSRLLYHITDGDNPLLSPRCSIFSQSQRFNLDPESAPSPPSTQQFMMPRSSSRCSCGDGKEPQTITQLTKHIQSLKRKIRKFEEKFEQEKKYRPSHGDKTSNPEVLKWMNDLAKGRKQLKELKLKLSEEQGSAPKGPPRNLLCEQPTVPRENGKPEAAGPEPSSSGEETPDAALTCLKERREQLPPQEDSKVTKQDKNLIKPLYDRYRIIKQILSTPSLIPTIEEEDSDEDRPQGSQQPSLADPASHLPVGDHLTYSNETEPVRALLPDEKKEVKPPALSMSNLHEATMPVLLDHLRETRADKKRLRKALREFEEQFFKQTGRSPQKEDRIPMADEYYEYKHIKAKLRLLEVLISKQDVAKTI

SEQ ID NO: 34434 - protein, 747 aa, Homo sapiens
MEIPNPPTSKCITYWKRKVKSEYMRLRQLKRLQANMGAKALYVANFAKVQEKTQILNEEWKKLRVQPVQSMKPVSGHPFLKKCTIESIFPGFASQHMLMRSLNTVALVPIMYSWSPLQQNFMVEDETVLCNIPYMGDEVKEEDETFIEELINNYDGKVHGEEEMIPGSVLISDAVFLELVDALNQYSDEEEEGHNDTSDGKQDDSKEDLPVTRKRKRHAIEGNKKSSKKQFPNDMIFSAIASMFPENGVPDDMKERYRELTEMSDPNALPPQCTPNIDGPNAKSVQREQSLHSFHTLFCRRCFKYDCFLHPFHATPNVYKRKNKEIKIEPEPCGTDCFLLLEGAKEYAMLHNPRSKCSGRRRRRHHIVSASCSNASASAVAETKEGDSDRDTGNDWASSSSEANSRCQTPTKQKASPAPPQLCVVEAPSEPVEWTGAEESLFRVFHGTYFNNFCSIARLLGTKTCKQVFQFAVKESLILKLPTDELMNPSQKKKRKHRLWAAHCRKIQLKKDNSSTQVYNYQPCDHPDRPCDSTCPCIMTQNFCEKFCQCNPDCQNRFPGCRCKTQCNTKQCPCYLAVRECDPDLCLTCGASEHWDCKVVSCKNCSIQRGLKKHLLLAPSDVAGWGTFIKESVQKNEFISEYCGELISQDEADRRGKVYDKYMSSFLFNLNNDFVVDATRKGNKIRFANHSVNPNCYAKVVMVNGDHRIGIFAKRAIQAGEELFFDYRYSQADALKYVGIERETDVL

SEQ ID NO: 34435 - protein, 753 aa, Homo sapiens
MEDYSKMEIPNPPTSKCITYWKRKVKSEYMRLRQLKRLQANMGAKALYVANFAKVQEKTQILNEEWKKLRVQPVQSMKPVSGHPFLKKCTIESIFPGFASQHMLMRSLNTVALVPIMYSWSPLQQNFMVEDETVLCNIPYMGDEVKEEDETFIEELINNYDGKVHGEEEMIPGSVLISDAVFLELVDALNQYSDEEEEGHNDTSDGKQDDSKEDLPVTRKRKRHAIEGNKKSSKKQFPNDMIFSAIASMFPENGVPDDMKERYRELTEMSDPNALPPQCTPNIDGPNAKSVQREQSLHSFHTLFCRRCFKYDCFLHPFHATPNVYKRKNKEIKIEPEPCGTDCFLLLEGAKEYAMLHNPRSKCSGRRRRRHHIVSASCSNASASAVAETKEGDSDRDTGNDWASSSSEANSRCQTPTKQKASPAPPQLCVVEAPSEPVEWTGAEESLFRVFHGTYFNNFCSIARLLGTKTCKQVFQFAVKESLILKLPTDELMNPSQKKKRKHRLWAAHCRKIQLKKDNSSTQVYNYQPCDHPDRPCDSTCPCIMTQNFCEKFCQCNPDCQNRFPGCRCKTQCNTKQCPCYLAVRECDPDLCLTCGASEHWDCKVVSCKNCSIQRGLKKHLLLAPSDVAGWGTFIKESVQKNEFISEYCGELISQDEADRRGKVYDKYMSSFLFNLNNDFVVDATRKGNKIRFANHSVNPNCYAKVVMVNGDHRIGIFAKRAIQAGEELFFDYRYSQADALKYVGIERETDVL

SEQ ID NO: 34436 - protein, 707 aa, Homo sapiens
MEIPNPPTSKCITYWKRKVKSEYMRLRQLKRLQANMGAKALYVANFAKVQEKTQILNEEWKKLRVQPVQSMKPVSGHPFLKKVEDETVLCNIPYMGDEVKEEDETFIEELINNYDGKVHGEEEMIPGSVLISDAVFLELVDALNQYSDEEEEGHNDTSDGKQDDSKEDLPVTRKRKRHAIEGNKKSSKKQFPNDMIFSAIASMFPENGVPDDMKERYRELTEMSDPNALPPQCTPNIDGPNAKSVQREQSLHSFHTLFCRRCFKYDCFLHPFHATPNVYKRKNKEIKIEPEPCGTDCFLLLEGAKEYAMLHNPRSKCSGRRRRRHHIVSASCSNASASAVAETKEGDSDRDTGNDWASSSSEANSRCQTPTKQKASPAPPQLCVVEAPSEPVEWTGAEESLFRVFHGTYFNNFCSIARLLGTKTCKQVFQFAVKESLILKLPTDELMNPSQKKKRKHRLWAAHCRKIQLKKDNSSTQVYNYQPCDHPDRPCDSTCPCIMTQNFCEKFCQCNPDCQNRFPGCRCKTQCNTKQCPCYLAVRECDPDLCLTCGASEHWDCKVVSCKNCSIQRGLKKHLLLAPSDVAGWGTFIKESVQKNEFISEYCGELISQDEADRRGKVYDKYMSSFLFNLNNDFVVDATRKGNKIRFANHSVNPNCYAKVVMVNGDHRIGIFAKRAIQAGEELFFDYRYSQADALKYVGIERETDVL

SEQ ID NO: 34437 - protein, 677 aa, Homo sapiens
MKPVSGHPFLKKCTIESIFPGFASQHMLMRSLNTVALVPIMYSWSPLQQNFMVEDETVLCNIPYMGDEVKEEDETFIEELINNYDGKVHGEEEMIPGSVLISDAVFLELVDALNQYSDEEEEGHNDTSDGKQDDSKEDLPVTRKRKRHAIEGNKKSSKKQFPNDMIFSAIASMFPENGVPDDMKERYRELTEMSDPNALPPQCTPNIDGPNAKSVQREQSLHSFHTLFCRRCFKYDCFLHPFHATPNVYKRKNKEIKIEPEPCGTDCFLLLEGAKEYAMLHNPRSKCSGRRRRRHHIVSASCSNASASAVAETKEGDSDRDTGNDWASSSSEANSRCQTPTKQKASPAPPQLCVVEAPSEPVEWTGAEESLFRVFHGTYFNNFCSIARLLGTKTCKQVFQFAVKESLILKLPTDELMNPSQKKKRKHRLWAAHCRKIQLKKDNSSTQVYNYQPCDHPDRPCDSTCPCIMTQNFCEKFCQCNPDCQNRFPGCRCKTQCNTKQCPCYLAVRECDPDLCLTCGASEHWDCKVVSCKNCSIQRGLKKHLLLAPSDVAGWGTFIKESVQKNEFISEYCGELISQDEADRRGKVYDKYMSSFLFNLNNDFVVDATRKGNKIRFANHSVNPNCYAKVVMVNGDHRIGIFAKRAIQAGEELFFDYRYSQADALKYVGIERETDVL

SEQ ID NO: 34438 - protein, 608 aa, Homo sapiens
MEEASCPTCSVNEACEWTPFSQKEMIPGSVLISDAVFLELVDALNQYSDEEEEGHNDTSDGKQDDSKEDLPVTRKRKRHAIEGNKKSSKKQFPNDMIFSAIASMFPENGVPDDMKERYRELTEMSDPNALPPQCTPNIDGPNAKSVQREQSLHSFHTLFCRRCFKYDCFLHPFHATPNVYKRKNKEIKIEPEPCGTDCFLLLEGAKEYAMLHNPRSKCSGRRRRRHHIVSASCSNASASAVAETKEGDSDRDTGNDWASSSSEANSRCQTPTKQKASPAPPQLCVVEAPSEPVEWTGAEESLFRVFHGTYFNNFCSIARLLGTKTCKQVFQFAVKESLILKLPTDELMNPSQKKKRKHRLWAAHCRKIQLKKDNSSTQVYNYQPCDHPDRPCDSTCPCIMTQNFCEKFCQCNPDCQNRFPGCRCKTQCNTKQCPCYLAVRECDPDLCLTCGASEHWDCKVVSCKNCSIQRGLKKHLLLAPSDVAGWGTFIKESVQKNEFISEYCGELISQDEADRRGKVYDKYMSSFLFNLNNDFVVDATRKGNKIRFANHSVNPNCYAKVVMVNGDHRIGIFAKRAIQAGEELFFDYRYSQADALKYVGIERETDVL

SEQ ID NO: 34439 - protein, 605 aa, Homo sapiens
MSNESCLPYYTAHSYSSMSAFKTSMGDLQRQLYNRGEYNIFKYAPMFESNFIQINKKGEVIDVHNRVRMVTVGIVCTSPILPLPDVMVLAQPTKICEQHVRWGRFAKGRGRRPVKTLELTRLLPLKFVKISIHDHEKQQLRLKLATGRTFYLQLCPSSDTREDLFCYWEKLVYLLRPPVESYCSTPTLLSGDAPPEDNKSLVAAELHREGDQSETGLYKPCDVSAATSSAYAGGEGIQHASHGTASAASPSTSTPGAAEGGAARTAGGMAVAGTATGPRTDVAIAGAAMSPATGAMSIATTKSAGPGQVTTALAGAAIKNPGENESSKSMAGAANISSEGISLALVGAASTSLEGTSTSMAGAASLSQDSSLSAAFAGSITTSKCAAERTEGPAVGPLISTLQSEGYMSERDGSQKVSQPSAEVWNENKERREKKDRHPSRKSSHHRKAGESHRRRAGDKNQKASSHRSASGHKNTRDDKKEKGYSNVRGKRHGSSRKSSTHSSTKKESRTTQELGKNQSASSTGALQKKASKISSFLRSLRATPGSKTRVTSHDREVDIVAKMVEKQNIEAKVEKAQGGQELEMISGTMTSEKTEMIVFETKSI

SEQ ID NO: 34440 - protein, 1493 aa, Homo sapiens
MPNEGIPHSSQTQEQDCLQSQPVSNNEEMAIKQESGGDGEVEEYLSFRSVGDGLSTSAVGCASAAPRRGPALLHIDRHQIQAVEPSAQALELQGLGVDVYDQDVLEQGVLQQVDNAIHEASRASQLVDVEKEYRSVLDDLTSCTTSLRQINKIIEQLSPQAATSRDINRKLDSVKRQKYNKEQQLKKITAKQKHLQAILGGAEVKIELDHASLEEDAEPGPSSLGSMLMPVQETAWEELIRTGQMTPFGTQIPQKQEKKPRKIMLNEASGFEKYLADQAKLSFERKKQGCNKRAARKAPAPVTPPAPVQNKNKPNKKARVLSKKEERLKKHIKKLQKRALQFQGKVGLPKARRPWESDMRPEAEGDSEGEESEYFPTEEEEEEEDDEVEGAEADLSGDGTDYELKPLPKGGKRQKKVPVQEIDDDFFPSSGEEAEAASVGEGGGGGRKVGRYRDDGDEDYYKQRLRRWNKLRLQDKEKRLKLEDDSEESDAEFDEGFKVPGFLFKKLFKYQQTGVRWLWELHCQQAGGILGDEMGLGKTIQIIAFLAGLSYSKIRTRGSNYRFEGLGPTVIVCPTTVMHQWVKEFHTWWPPFRVAILHETGSYTHKKEKLIRDVAHCHGILITSYSYIRLMQDDISRYDWHYVILDEGHKIRNPNAAVTLACKQFRTPHRIILSGSPMQNNLRELWSLFDFIFPGKLGTLPVFMEQFSVPITMGGYSNASPVQVKTAYKCACVLRDTINPYLLRRMKSDVKMSLSLPDKNEQVLFCRLTDEQHKVYQNFVDSKEVYRILNGEMQIFSGLIALRKICNHPDLFSGGPKNLKGLPDDELEEDQFGYWKRSGKMIVVESLLKIWHKQGQRVLLFSQSRQMLDILEVFLRAQKYTYLKMDGTTTIASRQPLITRYNEDTSIFVFLLTTRVGGLGVNLTGANRVVIYDPDWNPSTDTQARERAWRIGQKKQVTVYRLLTAGTIEEKIYHRQIFKQFLTNRVLKDPKQRRFFKSNDLYELFTLTSPDASQSTETSAIFAGTGSDVQTPKCHLKRRIQPAFGADHDVPKRKKFPASNISVNDATSSEEKSEAKGAEVNAVTSNRSDPLKDDPHMSSNVTSNDRLGEETNAVSGPEELSVISGNGECSNSSGTGKTSMPSGDESIDEKLGLSYKRERPSQAQTEAFWENKQMENNFYKHKSKTKHHSVAEEETLEKHLRPKQKPKNSKHCRDAKFEGTRIPHLVKKRRYQKQDSENKSEAKEQSNDDYVLEKLFKKSVGVHSVMKHDAIMDGASPDYVLVEAEANRVAQDALKALRLSRQRCLGAVSGVPTWTGHRGISGAPAGKKSRFGKKRNSNFSVQHPSSTSPTEKCQDGIMKKEGKDNVPEHFSGRAEDADSSSGPLASSSLLAKMRARNHLILPERLESESGHLQEASALLPTTEHDDLLVEMRNFIAFQAHTDGQASTREILQEFESKLSASQSCVFRELLRNLCTFHRTSGGEGIWKLKPEYC

SEQ ID NO: 34441 - protein, 536 aa, Homo sapiens
MATPDAGLPGAEGVEPAPWAQLEAPARLLLQALQAGPEGARRGLGVLRALGSRGWEPFDWGRLLEALCREEPVVQGPDGRLELKPLLLRLPRICQRNLMSLLMAVRPSLPESGLLSVLQIAQQDLAPDPDAWLRALGELLRRDLGVGTSMEGASPLSERCQRQLQSLCRGLGLGGRRLKSPQAPDPEEEENRDSQQPGKRRKDSEEEAASPEGKRVPKRLRCWEEEEDHEKERPEHKSLESLADGGSASPIKDQPVMAVKTGEDGSNLDDAKGLAESLELPKAIQDQLPRLQQLLKTLEEGLEGLEDAPPVELQLLHECSPSQMDLLCAQLQLPQLSDLGLLRLCTWLLALSPDLSLSNATVLTRSLFLGRILSLTSSASRLLTTALTSFCAKYTYPVCSALLDPVLQAPGTGPAQTELLCCLVKMESLEPDAQVLMLGQILELPWKEETFLVLQSLLERQVEMTPEKFSVLMEKLCKKGLAATTSMAYAKLMLTVMTKYQANITETQRLGLAMALEPNTTFLRKSLKAALKHLGP

SEQ ID NO: 34442 - protein, 647 aa, Homo sapiens
MGQTKSKIKSKYASYLSFIKILLKRGGVKVSTKNLIKLFQIIEQFCPWFPEQGTLDLKDWKRIGKELKQAGRKGNIIPLTVWNDWAIIKAALEPFQTEEDSISVSDAPGSCLIDCNENTRKKSQKETESLHCEYVAEPVMAQSTQNVDYNQLQEVIYPETLKLEGKGPELVGPSESKPRGTSPLPAGQVPVTLQPQKQVKENKTQPPVAYQYWPPAELQYRPPPESQYGYPGMPPAPQGREPYPQPPTRRLNPTAPPSRQGSELHEIIDKSRKEGDTEAWQFPVTLEPMPPGEGAQEGEPPTVEARYKSFSIKMLKDMKEGVKQYGPNSPYMRTLLDSIAHGHRLIPYDWEILAKSSLSPSQFLQFKTWWIDGVQEQVRRNRAANPPVNIDADQLLGIGQNWSTISQQALMQNEAIEQVRAICLRAWEKIQDPGSTCPSFNTVRQGSKEPYPDFVARLQDVAQKSIADEKARKVIVELMAYENANPECQSAIKPLKGKVPAGSDVISEYVKACDGIGGAMHKAMLMAQAITGVVLGGQVRTFGGKCYNCGQIGHLKKNCPVLNKQNITIQATTTGREPPDLCPRCKKGKHWASQCRSKFDKNGQPLSGNEQRGQPQAPQQTGAFPIQPFVPQGFQDNNPHCPKCFRE

SEQ ID NO: 34443 - protein, 549 aa, Homo sapiens
MRRPRGEPGPRAPRPTEGATCAGPGESWSPSPNSMLRVLLSAQTSPARLSGLLLIPPVQPCCLGPSKWGDRPVGGGPSAGPVQGLQRLLEQAKSPGELLRWLGQNPSKVRAHHYSVALRRLGQLLGSRPRPPPVEQVTLQDLSQLIIRNCPSFDIHTIHVCLHLAVLLGFPSDGPLVCALEQERRLRLPPKPPPPLQPLLRGGQGLEAALSCPRFLRYPRQHLISSLAEARPEELTPHVMVLLAQHLARHRLREPQLLEAIAHFLVVQETQLSSKVVQKLVLPFGRLNYLPLEQQFMPCLERILAREAGVAPLATVNILMSLCQLRCLPFRALHFVFSPGFINYISGTPHALIVRRYLSLLDTAVELELPGYRGPRLPRRQQVPIFPQPLITDRARCKYSHKDIVAEGLRQLLGEEKYRQDLTVPPGYCTDFLLCASSSGAVLPVRTQDPFLPYPPRSCPQGQAASSATTRDPAQRVVLVLRERWHFCRDGRVLLGSRALRERHLGLMGYQLLPLPFEELESQRGLPQLKSYLRQKLQALGLRWGPEGG

SEQ ID NO: 34444 - protein, 408 aa, Homo sapiens
MRRPRGEPGPRAPRPTEGATCAGPGESCFPSDGPLVCALEQERRLRLPPKPPPPLQPLLRGGQGLEAALSCPRFLRYPRQHLISSLAEARPEELTPHVMVLLAQHLARHRLREPQLLEAIAHFLVVQETQLSSKVVQKLVLPFGRLNYLPLEQQFMPCLERILAREAGVAPLATVNILMSLCQLRCLPFRALHFVFSPGFINYISGTPHALIVRRYLSLLDTAVELELPGYRGPRLPRRQQVPIFPQPLITDRARCKYSHKDIVAEGLRQLLGEEKYRQDLTVPPGYCTDFLLCASSSGAVLPVRTQDPFLPYPPRSCPQGQAASSATTRDPAQRVVLVLRERWHFCRDGRVLLGSRALRERHLGLMGYQLLPLPFEELESQRGLPQLKSYLRQKLQALGLRWGPEGG

SEQ ID NO: 34445 - protein, 522 aa, Homo sapiens
MRRPRGEPGPRAPRPTEGATCAGPGESWSPSPNSMLRVLLSAQTSPARLSGLLLIPPVQPCCLGPSKWGDRPVGGGPSAGPVQGLQRLLEQAKSPGELLRWLGQNPSKVRAHHYSVALRRLGQLLGSRPRPPPVEQVTLQDLSQLIIRNCPSFDIHTIHVCLHLAVLLGFPSDGPLVCALEQERRLRLPPKPPPPLQPLLREARPEELTPHVMVLLAQHLARHRLREPQLLEAIAHFLVVQETQLSSKVVQKLVLPFGRLNYLPLEQQFMPCLERILAREAGVAPLATVNILMSLCQLRCLPFRALHFVFSPGFINYISGTPHALIVRRYLSLLDTAVELELPGYRGPRLPRRQQVPIFPQPLITDRARCKYSHKDIVAEGLRQLLGEEKYRQDLTVPPGYCTDFLLCASSSGAVLPVRTQDPFLPYPPRSCPQGQAASSATTRDPAQRVVLVLRERWHFCRDGRVLLGSRALRERHLGLMGYQLLPLPFEELESQRGLPQLKSYLRQKLQALGLRWGPEGG

SEQ ID NO: 34446 - protein, 515 aa, Homo sapiens
MLRVLLSAQTSPARLSGLLLIPPVQPCCLGPSKWGDRPVGGGPSAGPVQGLQRLLEQAKSPGELLRWLGQNPSKVRAHHYSVALRRLGQLLGSRPRPPPVEQVTLQDLSQLIIRNCPSFDIHTIHVCLHLAVLLGFPSDGPLVCALEQERRLRLPPKPPPPLQPLLRGGQGLEAALSCPRFLRYPRQHLISSLAEARPEELTPHVMVLLAQHLARHRLREPQLLEAIAHFLVVQETQLSSKVVQKLVLPFGRLNYLPLEQQFMPCLERILAREAGVAPLATVNILMSLCQLRCLPFRALHFVFSPGFINYISGTPHALIVRRYLSLLDTAVELELPGYRGPRLPRRQQVPIFPQPLITDRARCKYSHKDIVAEGLRQLLGEEKYRQDLTVPPGYCTDFLLCASSSGAVLPVRTQDPFLPYPPRSCPQGQAASSATTRDPAQRVVLVLRERWHFCRDGRVLLGSRALRERHLGLMGYQLLPLPFEELESQRGLPQLKSYLRQKLQALGLRWGPEGG

SEQ ID NO: 34447 - protein, 409 aa, Homo sapiens
MHWGVGFASSRPCVVDLSWNQSISFFGWWAGSEEPFSFYGDIIAFPLQDYGGIMAGLGSDPWWKKTLYLTGGALLAAAAYLLHELLVIRKQQEIDSKDAIILHQFARPNNGVPSLSPFCLKMETYLRMADLPYQNYFGGKLSAQGKMPWIEYNHEKVSGTEFIIDFLEEKLGVNLNKNLGPHERAISRAVTKMVEEHFYWTLAYCQWVDNLNETRKMLSLSGGGPFSNLLRWVVCHITKGIVKREMHGHGIGRFSEEEIYMLMEKDMRSLAGLLGDKKYIMGPKLSTLDATVFGHLAQAMWTLPGTRPERLIKGELINLAMYCERIRRKFWPEWHHDDDNTIYESEESSEGSKTHTPLLDFSFYSRTETFEDEGAENSFSRTPDTDFTGHSLFDSDVDMDDYTDHEQCK

SEQ ID NO: 34448 - protein, 129 aa, Homo sapiens
MGPKLSTLDATVFGHLAQAMWTLPGTRPERLIKGELINLAMYCERIRRKFWPEWHHDDDNTIYESEESSEGSKTHTPLLDFSFYSRTETFEDEGAENSFSRTPDTDFTGHSLFDSDVDMDDYTDHEQCK

SEQ ID NO: 34449 - protein, 416 aa, Homo sapiens
MNLPRAERPRSTPQRSLRDSDGEDGKIDVLGEEEDEDEVEDEEEEARQQFLEQSLQPGLQVARWGGVALPREHIEGGGGPSDPSEFGTKFRAPPRSAAASEDARQPAKPPYSYIALITMAILQNPHKRLTLSGICAFISGRFPYYRRKFPAWQNSIRHNLSLNDCFVKIPREPGHPGKGNYWSLDPASQDMFDNGSFLRRRKRFKRHQLTPGAHLPHPFPLPAAHAALHNPHPGPLLGAPAPPQPVPGAYPNTAPGRCPYALLHPHPLRYLLLSAPVYAGAPKKAEGADLATPAPFPCCSPHLVLSLGRRARVWRRHREADASLSALRVLCKGSGERVQGLRRVCPRPRGATATCSSDHQACCIPKPLPLCCKCPPPLLLGQFCSNSSSIRRTAPTAALPPRARCWAGTCRPRRRC

SEQ ID NO: 34450 - protein, 349 aa, Homo sapiens
MELAVGNLSEGNASWPEPPAPEPGPLFGIGVENFVTLVVFGLIFALGVLGNSLVITVLARSKPGKPRSTTNLFILNLSIADLAYLLFCIPFQATVYALPTWVLGAFICKFIHYFFTVSMLVSIFTLAAMSVDRYVAIVHSRRSSSLRVSRNALLGVGCIWALSIAMASPVAYHQGLFHPRASNQTFCWEQWPDPRHKKAYVVCTFVFGYLLPLLLICFCYAKVLNHLHKKLKNMSKKSEASKKKTAQTVLVVVVVFGISWLPHHIIHLWAEFGVFPLTPASFLFRITAHCLAYSNSSVNPIIYAFLSENFRKAYKQVFKCHIRKDSHLSDTKESKSRIDTPPSTNCTHV

SEQ ID NO: 34451 - protein, 335 aa, Homo sapiens
MGKVKVGVNGFGRIGRLVTRAAFNSGKVDIVAINDPFIDLNYMVYMFQYDSTHGKFHGTVKAENGKLVINGNPITIFQERDPSKIKWGDAGAEYVVESTGVFTTMEKAGAHLQGGAKRVIISAPSADAPMFVMGVNHEKYDNSLKIISNASCTTNCLAPLAKVIHDNFGIVEGLMTTVHAITATQKTVDGPSGKLWRDGRGALQNIIPASTGAAKAVGKVIPELNGKLTGMAFRVPTANVSVVDLTCRLEKPAKYDDIKKVVKQASEGPLKGILGYTEHQVVSSDFNSDTHSSTFDAGAGIALNDHFVKLISWYDNEFGYSNRVVDLMAHMASKE

SEQ ID NO: 34452 - protein, 293 aa, Homo sapiens
MVYMFQYDSTHGKFHGTVKAENGKLVINGNPITIFQERDPSKIKWGDAGAEYVVESTGVFTTMEKAGAHLQGGAKRVIISAPSADAPMFVMGVNHEKYDNSLKIISNASCTTNCLAPLAKVIHDNFGIVEGLMTTVHAITATQKTVDGPSGKLWRDGRGALQNIIPASTGAAKAVGKVIPELNGKLTGMAFRVPTANVSVVDLTCRLEKPAKYDDIKKVVKQASEGPLKGILGYTEHQVVSSDFNSDTHSSTFDAGAGIALNDHFVKLISWYDNEFGYSNRVVDLMAHMASKE

SEQ ID NO: 34453 - protein, 508 aa, Homo sapiens
MGSCCSCPDKDTVPDNHRNKFKVINVDDDGNELGSGIMELTDTELILYTRKRDSVKWHYLCLRRYGYDSNLFSFESGRRCQTGQGIFAFKCARAEELFNMLQEIMQNNSINVVEEPVVERNNHQTELEVPRTPRTPTTPGFAAQNLPNGYPRYPSFGDASSHPSSRHPSVGSARLPSVGEESTHPLLVAEEQVHTYVNTTGVQEERKNRTSVHVPLEARVSNAESSTPKEEPSSIEDRDPQILLEPEGVKFVLGPTPVQKQLMEKEKLEQLGRDQVSGSGANNTEWDTGYDSDERRDAPSVNKLVYENINGLSIPSASGVRRGRLTSTSTSDTQNINNSAQRRTALLNYENLPSLPPVWEARKLSRDEDDNLGPKTPSLNGYHNNLDPMHNYVNTENVTVPASAHKIEYSRRRDCTPTVFNFDIRRPSLEHRQLNYIQVDLEGGSDSDNPQTPKTPTTPLPQTPTRRTELYAVIDIERTAAMSNLQKALPRDDGTSRKTRHNSTDLPM

SEQ ID NO: 34454 - protein, 696 aa, Homo sapiens
MGNGMCSRKQKRIFQTLLLLTVVFGFLYGAMLYYELQTQLRKAEAVALKYQQHQESLSAQLQVVYEHRSRLEKSLQKERLEHKKAKEDFLVYKLEAQETLNKGRQDSNSRYSALNVQHQMLKSQHEELKKQHSDLEEEHRKQGEDFSRTFNDHKQKYLQLQQEKEQELSKLKETVYNLREENRQLRKAHQDIHTQLQDVKQQHKNLLSEHEQLVVTLEDHKSALAAAQTQVAEYKQLKDTLNRIPSLRKPDPAEQQNVTQVAHSPQGYNTAREKPTREVQEVSRNNDVWQNHEAVPGRAEDTKLYAPTHKEAEFQAPPEPIQQEVERREPEEHQVEEEHRKALEEEEMEQVGQAEHLEEEHDPSPEEQDREWKEQHEQREAANLLEGHARAEVYPSAKPMIKFQSPYEEQLEQQRLAVQQVEEAQQLREHQEALHQQRLQGHLLRQQEQQQQQVAREMALQRQAELEEGRPQHQEQLRQQAHYDAMDNDIVQGAEDQGIQGEEGAYERDNQHQDEAEGDPGNRHEPREQGPREADPESEADRAAVEDINPADDPNNQGEDEFEEAEQVREENLPDENEEQKQSNQKQENTEVEEHLVMAGNPDQQEDNVDEQYQEEAEEEVQEDLTEEKKRELEHNAEETYGENDENTDDKNNDGEEQEVRDDNRPKGREEHYEEEEEEEEDGAAVAEKSHRRAEM

SEQ ID NO: 34455 - protein, 221 aa, Homo sapiens
MSETAPLAPTIPAPAEKTPVKKKAKKAGATAGKRKASGPPVSELITKAVAASKERSGVSLAALKKALAAAGYDVEKNNSRIKLGLKSLVSKGTLVQTKGTGASGSFKLNKKAASGEGKPKAKKAGAAKPRKPAGAAKKPKKVAGAATPKKSIKKTPKKVKKPATAAGTKKVAKSAKKVKTPQPKKAAKSPAKAKAPKPKAAKPKSGKPKVTKAKKAAPKKK

SEQ ID NO: 34456 - protein, 213 aa, Homo sapiens
MSVELEEALPVTTAEGMAKKVTKAGGSAALSPSKKRKNSKKKNQPGKYSQLVVETIRRLGERNGSSLAKIYTEAKKVPWFDQQNGRTYLKYSIKALVQNDTLLQVKGTGANGSFKLNRKKLEGGGERRGAPAAATAPAPTAHKAKKAAPGAAGSRRADKKPARGQKPEQRSHKKGAGAKKDKGGKAKKTAAAGGKKVKKAAKPSVPKVPKGRK

SEQ ID NO: 34457 - protein, 227 aa, Homo sapiens
MGAVMGTFSSLQTKQRRPSKDIAWWYYQYQRDKIEDELEMTMVCHRPEGLEQLEAQTNFTKRELQVLYRGFKNECPSGVVNEDTFKQIYAQFFPHGDASTYAHYLFNAFDTTQTGSVKFEDFVTALSILLRGTVHEKLRWTFNLYDINKDGYINKEEMMDIVKAIYDMMGKYTYPVLKEDTPRQHVDVFFQKMDKNKDGIVTLDEFLESCQEDDNIMRSLQLFQNVM

SEQ ID NO: 34458 - protein, 216 aa, Homo sapiens
MGAVMGTFSSLQTKQRRPSKDKIEDELEMTMVCHRPEGLEQLEAQTNFTKRELQVLYRGFKNECPSGVVNEDTFKQIYAQFFPHGDASTYAHYLFNAFDTTQTGSVKFEDFVTALSILLRGTVHEKLRWTFNLYDINKDGYINKEEMMDIVKAIYDMMGKYTYPVLKEDTPRQHVDVFFQKMDKNKDGIVTLDEFLESCQEDDNIMRSLQLFQNVM

SEQ ID NO: 34459 - protein, 188 aa, Homo sapiens
MTMVCHRPEGLEQLEAQTNFTKRELQVLYRGFKNECPSGVVNEDTFKQIYAQFFPHGDASTYAHYLFNAFDTTQTGSVKFEDFVTALSILLRGTVHEKLRWTFNLYDINKDGYINKEEMMDIVKAIYDMMGKYTYPVLKEDTPRQHVDVFFQKMDKNKDGIVTLDEFLESCQEDDNIMRSLQLFQNVM

SEQ ID NO: 34460 - protein, 225 aa, Homo sapiens
MSGCSKRCKLGFVKFAQTIFKLITGTLSKDKIEDELEMTMVCHRPEGLEQLEAQTNFTKRELQVLYRGFKNECPSGVVNEDTFKQIYAQFFPHGDASTYAHYLFNAFDTTQTGSVKFEDFVTALSILLRGTVHEKLRWTFNLYDINKDGYINKEEMMDIVKAIYDMMGKYTYPVLKEDTPRQHVDVFFQKMDKNKDGIVTLDEFLESCQEDDNIMRSLQLFQNVM

SEQ ID NO: 34461 - protein, 241 aa, Homo sapiens
MGAVMGTFSSLQTKQRRPSKDKIEDELEMTMVCHRPEGLEQLEAQTNFTKRELQVLYRGFKNECPSGVVNEDTFKQIYAQFFPHGALPCLEGSPCVEFLPPSPALLFCLVDASTYAHYLFNAFDTTQTGSVKFEDFVTALSILLRGTVHEKLRWTFNLYDINKDGYINKEEMMDIVKAIYDMMGKYTYPVLKEDTPRQHVDVFFQKMDKNKDGIVTLDEFLESCQEDDNIMRSLQLFQNVM

SEQ ID NO: 34462 - protein, 509 aa, Homo sapiens
MAERAALEELVKLQGERVRGLKQQKASAELIEEEVAKLLKLKAQLGPDESKQKFVLKTPKGTRDYSPRQMAVREKVFDVIIRCFKRHGAEVIDTPVFELKETLMGKYGEDSKLIYDLKDQGGELLSLRYDLTVPFARYLAMNKLTNIKRYHIAKVYRRDNPAMTRGRYREFYQCDFDIAGNFDPMIPDAECLKIMCEILSSLQIGDFLVKVNDRRILDGMFAICGVSDSKFRTICSSVDKLDKVSWEEVKNEMVGEKGLAPEVADRIGDYVQQHGGVSLVEQLLQDPKLSQNKQALEGLGDLKLLFEYLTLFGIDDKISFDLSLARGLDYYTGVIYEAVLLQTPAQAGEEPLGVGSVAAGGRYDGLVGMFDPKGRKVPCVGLSIGVERIFSIVEQRLEALEEKIRTTETQVLVASAQKKLLEERLKLVSELWDAGIKAELLYKKNPKLLNQLQYCEEAGIPLVAIIGEQELKDGVIKLRSVTSREEVDVRREDLVEEIKRRTGQPLCIC

SEQ ID NO: 34463 - protein, 469 aa, Homo sapiens
MAERAALEELVKLQGERVRGLKQQKASAELIEEEVAKLLKLKAQLGPDESKQKFVLKTPKETLMGKYGEDSKLIYDLKDQGGELLSLRYDLTVPFARYLAMNKLTNIKRYHIAKVYRRDNPAMTRGRYREFYQCDFDIAGNFDPMIPDAECLKIMCEILSSLQIGDFLVKVNDRRILDGMFAICGVSDSKFRTICSSVDKLDKVSWEEVKNEMVGEKGLAPEVADRIGDYVQQHGGVSLVEQLLQDPKLSQNKQALEGLGDLKLLFEYLTLFGIDDKISFDLSLARGLDYYTGVIYEAVLLQTPAQAGEEPLGVGSVAAGGRYDGLVGMFDPKGRKVPCVGLSIGVERIFSIVEQRLEALEEKIRTTETQVLVASAQKKLLEERLKLVSELWDAGIKAELLYKKNPKLLNQLQYCEEAGIPLVAIIGEQELKDGVIKLRSVTSREEVDVRREDLVEEIKRRTGQPLCIC

SEQ ID NO: 34464 - protein, 449 aa, Homo sapiens
MAERAALEELVKLQGERVRGLKQQKASAELIEEEVAKLLKLKAQLGPDESKQKFVLKTPKETLMGKYGEDSKLIYDLKDQGGELLSLRYDLTVPFARYLAMNKLTNIKRYHIAKDFDIAGNFDPMIPDAECLKIMCEILSSLQIGDFLVKVNDRRILDGMFAICGVSDSKFRTICSSVDKLDKVSWEEVKNEMVGEKGLAPEVADRIGDYVQQHGGVSLVEQLLQDPKLSQNKQALEGLGDLKLLFEYLTLFGIDDKISFDLSLARGLDYYTGVIYEAVLLQTPAQAGEEPLGVGSVAAGGRYDGLVGMFDPKGRKVPCVGLSIGVERIFSIVEQRLEALEEKIRTTETQVLVASAQKKLLEERLKLVSELWDAGIKAELLYKKNPKLLNQLQYCEEAGIPLVAIIGEQELKDGVIKLRSVTSREEVDVRREDLVEEIKRRTGQPLCIC

SEQ ID NO: 34465 - protein, 489 aa, Homo sapiens
MAERAALEELVKLQGERVRGLKQQKASAELIEEEVAKLLKLKAQLGPDESKQKFVLKTPKGTRDYSPRQMAVREKVFDVIIRCFKRHGAEVIDTPVFELKETLMGKYGEDSKLIYDLKDQGGELLSLRYDLTVPFARYLAMNKLTNIKRYHIAKDFDIAGNFDPMIPDAECLKIMCEILSSLQIGDFLVKVNDRRILDGMFAICGVSDSKFRTICSSVDKLDKVSWEEVKNEMVGEKGLAPEVADRIGDYVQQHGGVSLVEQLLQDPKLSQNKQALEGLGDLKLLFEYLTLFGIDDKISFDLSLARGLDYYTGVIYEAVLLQTPAQAGEEPLGVGSVAAGGRYDGLVGMFDPKGRKVPCVGLSIGVERIFSIVEQRLEALEEKIRTTETQVLVASAQKKLLEERLKLVSELWDAGIKAELLYKKNPKLLNQLQYCEEAGIPLVAIIGEQELKDGVIKLRSVTSREEVDVRREDLVEEIKRRTGQPLCIC

SEQ ID NO: 34466 - protein, 349 aa, Homo sapiens
MAIPITVLDCDLLLYGRGHRTLDRFKLDDVTDEYLMSMYGFPRQFIYYLVELLGANLSRPTQRSRAISPETQVLAALGFYTSGSFQTRMGDAIGISQASMSRCVANVTEALVERASQFIRFPADEASIQALKDEFYGLAGMPGVMGVVDCIHVAIKAPNAEDLSYVNRKGLHSLNCLMVCDIRGTLMTVETNWPGSLQDCAVLQQSSLSSQFEAGMHKDSWLLGDSSFFLRTWLMTPLHIPETPAEYRYNMAHSATHSVIEKTFRTLCSRFRCLDGSKGALQYSPEKSSHIILACCVLHNISLEHGMDVWSSPMTGPMEQPPEEEYEHMESLDLEADRIRQELMLTHFS

SEQ ID NO: 34467 - protein, 1101 aa, Homo sapiens
MDECGSRIRRRVSLPKRNRPSLGCIFGAPTAAELVPGDEGKEEEEMVAENRRRKTAGVLPVEVQPLLLSDSPECLVLGGGDTNPDLLRHMPTDRGVGDQPNDSEVDMFGDYDSFTENSFIAQVDDLEQKYMQLPEHKKHATDFATENLCSESIKNKLSITTIGNLTELQTDKHTENQSGYEGVTIEPGADLLYDVPSSQAIYFENLQNSSNDLGDHSMKERDWKSSSHNTVNEELPHNCIEQPQQNDESSSKVRTSSDMNRRKSIKDHLKNAMTGNAKAQTPIFSRSKQLKDTLLSEEINVAKKTVESSSNDLGPFYSLPSKVRDLYAQFKGIEKLYEWQHTCLTLNSVQERKNLIYSLPTSGGKTLVAEILMLQELLCCRKDVLMILPYVAIVQEKISGLSSFGIELGFFVEEYAGSKGRFPPTKRREKKSLYIATIEKGHSLVNSLIETGRIDSLGLVVVDELHMIGEGSRGATLEMTLAKILYTSKTTQIIGMSATLNNVEDLQKFLQAEYYTSQFRPVELKEYLKINDTIYEVDSKAENGMTFSRLLNYKYSDTLKKMDPDHLVALVTEVIPNYSCLVFCPSKKNCENVAEMICKFLSKEYLKHKEKEKCEVIKNLKNIGNGNLCPVLKRTIPFGVAYHHSGLTSDERKLLEEAYSTGVLCLFTCTSTLAAGVNLPARRVILRAPYVAKEFLKRNQYKQMIGRAGRAGIDTIGESILILQEKDKQQVLELITKPLENCYSHLVQEFTKGIQTLFLSLIGLKIATNLDDIYHFMNGTFFGVQQKVLLKEKSLWEITVESLRYLTEKGLLQKDTIYKSEEEVQYNFHITKLGRASFKGTIDLAYCDILYRDLKKGLEGLVLESLLHLIYLTTPYDLVSQCNPDWMIYFRQFSQLSPAEQNVAAILGVSESFIGKKASGQAIGKKVDKNVVNRLYLSFVLYTLLKETNIWTVSEKFNMPRGYIQNLLTGTASFSSCVLHFCEELEEFWVYRALLVELTKKLTYCVKAELIPLMEVTGVLEGRAKQLYSAGYKSLMHLANANPEVLVRTIDHLSRRQAKQIVSSAKMLLHEKAEALQEEVEELLRLPSDFPGAVASSTDKA

SEQ ID NO: 34468 - protein, 316 aa, Homo sapiens
MDECGSRIRRRVSLPKRNRPSLGCIFGAPTAAELVPGDEGKEEEEMVAENRRRKTAGVLPVEPNDSEVDMFGDYDSFTENSFIAQVDDLEQKYMQLPEHKKHATDFATENLCSESIKNKLSITTIGNLTELQTDKHTENQSGYEGVTIEPGADLLYDVPSSQAIYFENLQNSSNDLGDHSMKERDWKSSSHNTVNEELPHNCIEQPQQNDESSSKVRTSSDMNRRKSIKDHLKNAMTGNAKAQTPIFSRSKQLKDTLLSEEINVAKKTVESSSNDLGPFYSLPSKVRDLYAQFKGIEKLYGNAFCWNKKIFFLSLP

SEQ ID NO: 34469 - protein, 247 aa, Homo sapiens
MFGDYDSFTENSFIAQVDDLEQKYMQLPEHKKHATDFATENLCSESIKNKLSITTIGNLTELQTDKHTENQSGYEGVTIEPGADLLYDVPSSQAIYFENLQNSSNDLGDHSMKERDWKSSSHNTVNEELPHNCIEQPQQNDESSSKVRTSSDMNRRKSIKDHLKNAMTGNAKAQTPIFSRSKQLKDTLLSEEINVAKKTVESSSNDLGPFYSLPSKVRDLYAQFKGIEKLYGNAFCWNKKIFFLSLP

SEQ ID NO: 34470 - protein, 136 aa, Homo sapiens
MDECGSRIRRRVSLPKRNRPSLGCIFGAPTAAELVPGDEGKEEEEMVAENRRRKTAGVLPVEVQPLLLSDSPECLVLGGGDTNPDLLRHMPTDRGVGDQVRRTWNLKLQTFGILPRCKELTSFIAFVYFSRLRYRC

SEQ ID NO: 34471 - protein, 1130 aa, Homo sapiens
MKRSEKPEGYRQMRPKTFPASNYTVSSRQMLQEIRESLRNLSKPSDAAKAEHNMSKMSTEDPRQVRNPPKFGTHHKALQEIRNSLLPFANETNSSRSTSEVNPQMLQDLQAAGFDEDMVIQALQKTNNRSIEAAIEFISKMSYQDPRREQMAAAAARPINASMKPGNVQQSVNRKQSWKGSKESLVPQRHGPPLGESVAYHSESPNSQTDVGRPLSGSGISAFVQAHPSNGQRVNPPPPPQVRSVTPPPPPRGQTPPPRGTTPPPPSWEPNSQTKRYSGNMEYVISRISPVPPGAWQEGYPPPPLNTSPMNPPNQGQRGISSVPVGRQPIIMQSSSKFNFPSGRPGMQNGTGQTDFMIHQNVVPAGTVNRQPPPPYPLTAANGQSPSALQTGGSAAPSSYTNGSIPQSMMVPNRNSHNMELYNISVPGLQTNWPQSSSAPAQSSPSSGHEIPTWQPNIPVRSNSFNNPLGNRASHSANSQPSATTVTAITPAPIQQPVKSMRVLKPELQTALAPTHPSWIPQPIQTVQPSPFPEGTASNVTVMPPVAEAPNYQGPPPPYPKHLLHQNPSVPPYESISKPSKEDQPSLPKEDESEKSYENVDSGDKEKKQITTSPITVRKNKKDEERRESRIQSYSPQAFKFFMEQHVENVLKSHQQRLHRKKQLENEMMRVGLSQDAQDQMRKMLCQKESNYIRLKRAKMDKSMFVKIKTLGIGAFGEVCLARKVDTKALYATKTLRKKDVLLRNQVAHVKAERDILAEADNEWVVRLYYSFQDKDNLYFVMDYIPGGDMMSLLIRMGIFPESLARFYIAELTCAVESVHKMGFIHRDIKPDNILIDRDGHIKLTDFGLCTGFRWTHDSKYYQSGDHPRQDSMDFSNEWGDPSSCRCGDRLKPLERRAARQHQRCLAHSLVGTPNYIAPEVLLRTGYTQLCDWWSVGVILFEMLVGQPPFLAQTPLETQMKVINWQTSLHIPPQAKLSPEASDLIIKLCRGPEDRLGKNGADEIKAHPFFKTIDFSSDLRQQSASYIPKITHPTDTSNFDPVDPDKLWSDDNEEENVNDTLNGWYKNGKHPEHAFYEFTFRRFFDDNGYPYNYPKPIEYEYINSQGSEQQSDEDDQNTGSEIKNRDLVYV

SEQ ID NO: 34472 - protein, 690 aa, Homo sapiens
MKRSEKPEGYRQMRPKTFPASNYTVSSRQMLQEIRESLRNLSKPSDAAKAEHNMSKMSTEDPRQVRNPPKFGTHHKALQEIRNSLLPFANETNSSRSTSEVNPQMLQDLQAAGFDEDMVIQALQKTNNRSIEAAIEFISKMSYQDPRREQMAAAAARPINASMKPGNVQQSVNRKQSWKGSKESLVPQRHGPPLGESVAYHSESPNSQTDVGRPLSGSGISAFVQAHPSNGQRVNPPPPPQVRSVTPPPPPRGQTPPPRGTTPPPPSWEPNSQTKRYSGNMEYVISRISPVPPGAWQEGYPPPPLNTSPMNPPNQGQRGISSVPVGRQPIIMQSSSKFNFPSGRPGMQNGTGQTDFMIHQNVVPAGTVNRQPPPPYPLTAANGQSPSALQTGGSAAPSSYTNGSIPQSMMVPNRNSHNMELYNISVPGLQTNWPQSSSAPAQSSPSSGHEIPTWQPNIPVRSNSFNNPLGNRASHSANSQPSATTVTAITPAPIQQPVKSMRVLKPELQTALAPTHPSWIPQPIQTVQPSPFPEGTASNVTVMPPVAEAPNYQGPPPPYPKHLLHQNPSVPPYESISKPSKEDQPSLPKEDESEKSYENVDSGDKEKKQITTSPITVRKNKKDEERRESRIQSYSPQAFKFFMEQHVENVLKSHQQRLHRKKQLENEMMRVKPFKMSIFILNHLFAWCLF

SEQ ID NO: 34473 - protein, 391 aa, Homo sapiens
MESETEPEPVTLLVKSPNQRHRDLELSGDRGWSVGHLKAHLSRVYPERPRPEDQRLIYSGKLLLDHQCLRDLLPKQEKRHVLHLVCNVKSPSKMPEINAKVAESTEEPAGSNRGQYPEDSSSDGLRQREVLRNLSSPGWENISRPEAAQQAFQGLGPGFSGYTPYGWLQLSWFQQIYARQYYMQYLAATAASGAFVPPPSAQEIPVVSAPAPAPIHNQFPAENQPANQNAAPQVVVNPGANQNLRMNAQGGPIVEEDDEINRDWLDWTYSAATFSVFLSILYFYSSLSRFLMVMGATVVMYLHHVGWFPFRPRPVQNFPNDGPPPDVVNQDPNNNLQEGTDPETEDPNHLPPDRDVLDGEQTSPSFMSTAWLVFKTFFASLLPEGPPAIAN

SEQ ID NO: 34474 - protein, 390 aa, Homo sapiens
MESETEPEPVTLLVKSPNQRHRDLELSGDRGWSVGHLKAHLSRVYPERPRPEDQRLIYSGKLLLDHQCLRDLLPKEKRHVLHLVCNVKSPSKMPEINAKVAESTEEPAGSNRGQYPEDSSSDGLRQREVLRNLSSPGWENISRPEAAQQAFQGLGPGFSGYTPYGWLQLSWFQQIYARQYYMQYLAATAASGAFVPPPSAQEIPVVSAPAPAPIHNQFPAENQPANQNAAPQVVVNPGANQNLRMNAQGGPIVEEDDEINRDWLDWTYSAATFSVFLSILYFYSSLSRFLMVMGATVVMYLHHVGWFPFRPRPVQNFPNDGPPPDVVNQDPNNNLQEGTDPETEDPNHLPPDRDVLDGEQTSPSFMSTAWLVFKTFFASLLPEGPPAIAN

SEQ ID NO: 34475 - protein, 232 aa, Homo sapiens
MESETEPEPVTLLVKSPNQRHRDLELSGDRGWSVGHLKAHLSRVYPERPRPEDQRLIYSGKLLLDHQCLRDLLPKEKRHVLHLVCNVKSPSKMPEINAKVAESTEEPAGSNRGQYPEDSSSDGLRQREVLRNLSSPGWENISRHHVGWFPFRPRPVQNFPNDGPPPDVVNQDPNNNLQEGTDPETEDPNHLPPDRDVLDGEQTSPSFMSTAWLVFKTFFASLLPEGPPAIAN

SEQ ID NO: 34476 - protein, 366 aa, Homo sapiens
MESETEPEPVTLLVKSPNQRHRDLELSGDRGWSVGHLKAHLSRVYPERPRPEDQRLIYSGKLLLDHQCLRDLLPKVAESTEEPAGSNRGQYPEDSSSDGLRQREVLRNLSSPGWENISRPEAAQQAFQGLGPGFSGYTPYGWLQLSWFQQIYARQYYMQYLAATAASGAFVPPPSAQEIPVVSAPAPAPIHNQFPAENQPANQNAAPQVVVNPGANQNLRMNAQGGPIVEEDDEINRDWLDWTYSAATFSVFLSILYFYSSLSRFLMVMGATVVMYLHHVGWFPFRPRPVQNFPNDGPPPDVVNQDPNNNLQEGTDPETEDPNHLPPDRDVLDGEQTSPSFMSTAWLVFKTFFASLLPEGPPAIAN

SEQ ID NO: 34477 - protein, 221 aa, Homo sapiens
MAADTPGKPSASPMAGAPASASRTPDKPRSAAEHRKSSKPVMEKRRRARINESLAQLKTLILDALRKESSRHSKLEKADILEMTVRHLRSLRRVQVTAALSADPAVLGKYRAGFHECLAEVNRFLAGCEGVPADVRSRLLGHLAACLRQLGPSRRPASLSPAAPAEAPAPEVYAGRPLLPSLGGPFPLLAPPLLPGLTRALPAAPRAGPQGPGGPWRPWLR

SEQ ID NO: 34478 - protein, 142 aa, Homo sapiens
MSLLPVPYTEAASLSTGSTVTIKGRPLACFLNEPYLQVDFHTEMKEESDIVFHFQVCFGRRVVMNSREYGAWKQQVESKNMPFQDGQEFELSISVLPDKYQVMVNGQSSYTFDHRIKPEAVKMVQVWRDISLTKFNVSYLKR

SEQ ID NO: 34479 - protein, 504 aa, Homo sapiens
MGIKTALPAAELGLYSLVLSGALAYAGRGLLEASQDGAHRKAFRESVRPGWEYIGRKMDVADFEWVMWFTSFRNVIIFALSGHVLFAKLCTMVAPKLRSWMYAVYGALAVMGTMGPWYLLLLLGHCVGLYVASLLGQPWLCLGLGLASLASFKMDPLISWQSGFVTGTFDLQEVLFHGGSSFTVLRCTSFALESCAHPDRHYSLADLLKYNFYLPFFFFGPIMTFDRFHAQVSQVEPVRREGELWHIRAQAGLSVVAIMAVDIFFHFFYILTIPSDLKFANRLPDSALAGLAYSNLVYDWVKAAVLFGVVNTVACLDHLDPPQPPKCITALYVFAETHFDRGINDWLCKYVYNHIGGEHSAVIPELAATVATFAITTLWLGPCDIVYLWSFLNCFGLNFELWMQKLAEWGPLARIEASLSVQMSRRVRALFGAMNFWAIIMYNLVSLNSLKFTELVARRLLLTGFPQTTLSILFVTYCGVQLVKERERTLALEEEQKQDKEKPE

SEQ ID NO: 34480 - protein, 240 aa, Homo sapiens
MSRSNRQKEYKCGDLVFAKMKGYPHWPARIDEMPEAAVKSTANKYQVFFFGTHETAFLGPKDLFPYEESKEKFGKPNKRKGFSEGLWEIENNPTVKASGYQSSQKKSCVEEPEPEPEAAEGDGDKKGNAEGSSDEEGKLVIDEPAKEKNEKGALKRRAGDLLEDSPKRPKEAENPEGEEKEAATLEVERPLPMEVEKNSTPSEPGSGRGPPQEEEEEEDEEEEATKEDAEAPGIRDHESL

SEQ ID NO: 34481 - protein, 233 aa, Homo sapiens
MEQRAGGNRVQTSTLNCAGAAVIDEMPEAAVKSTANKYQVFFFGTHETAFLGPKDLFPYEESKEKFGKPNKRKGFSEGLWEIENNPTVKASGYQSSQKKSCVEEPEPEPEAAEGDGDKKGNAEGSSDEEGKLVIDEPAKEKNEKGALKRRAGDLLEDSPKRPKEAENPEGEEKEAATLEVERPLPMEVEKNSTPSEPGSGRGPPQEEEEEEDEEEEATKEDAEAPGIRDHESL

SEQ ID NO: 34482 - protein, 256 aa, Homo sapiens
MHPEGGQFVPQLLGHLLATKLKRFLLSKGGRRAQIPDVSRATPHTIDEMPEAAVKSTANKYQVFFFGTHETAFLGPKDLFPYEESKEKFGKPNKRKGFSEGLWEIENNPTVKASGYQSSQKKSCVEEPEPEPEAAEGDGDKKGNAEGSSDEEGKLVIDEPAKEKNEKGALKRRAGDLLEDSPKRPKEAENPEGEEKEAATLEVERPLPMEVEKNSTPSEPGSGRGPPQEEEEEEDEEEEATKEDAEAPGIRDHESL

SEQ ID NO: 34483 - protein, 337 aa, Homo sapiens
MKRPCEETTSESDMDETIDVGSENNYSGQSTSSVIRLNSPTTTSQIMARKKRRGIIEKRRRDRINNSLSELRRLVPTAFEKQGSAKLEKAEILQMTVDHLKMLQATGGKGYFDAHALAMDFMSIGFRECLTEVARYLSSVEGLDSSDPLRVRLVSHLSTCATQREAAAMTSSMAHHHHPLHPHHWAAAFHHLPAALLQPNGLHASESTPCRLSTTSEVPPAHGSALLTATFAHADSALRMPSTGSVAPCVPPLSTSLLSLSATVHAAAAAATAAAHSFPLSFAGAFPMLPPNAAAAVAAATAISPPLSVSATSSPQQTSSGTNNKPYRPWGTEVGAF

SEQ ID NO: 34484 - protein, 454 aa, Homo sapiens
MALQLGRLSSGPCWLVARGGCGGPRAWSQCGGGGLRAWSQRSAAGRVCRPPGPAGTEQSRGLGHGSTSRGGPWVGTGLAAALAGLVGLATAAFGHVQRAEMLPKTSGTRATSLGRPEEEEDELAHRCSSFMAPPVTDLGELRRRPGDMKTKMELLILETQAQVCQALAQVDGGANFSVDRWERKEGGGGISCVLQDGCVFEKAGVSISVVHGNLSEEAAKQMRSRGKVLKTKDGKLPFCAMGVSSVIHPKNPHAPTIHFNYRYFEVEEADGNKQWWFGGGCDLTPTYLNQEDAVHFHRTLKEACDQHGPDLYPKFKKWCDDYFFIAHRGERRGIGGIFFDDLDSPSKEEVFRFVQSCARAVVPSYIPLVKKHCDDSFTPQEKLWQQLRRGRYVEFNLLYDRGTKFGLFTPGSRIESILMSLPLTARWEYMHSPSENSKEAEILEVLRHPRDWVR

SEQ ID NO: 34485 - protein, 287 aa, Homo sapiens
MALQLGRLSSGPCWLVARGGCGGPRAWSQCGGGGLRAWSQRSAAGRVCRPPGPAGTEQSRGLGHGSTSRGGPWVGTGLAAALAGLVGLATAAFGHVQRAEMLPKTSGTRATSLGRPEEEEDELAHRCSSFMAPPVTDLGELRRRPGDMKTKMELLILETQAQVCQALAQVDGGANFSVDRWERKEGGGGISCVLQDGCVFEKAGVSISVVHGNLSEEAAKQMRSRGKVLKTKDGKLPFCAMGVSSVIHPKNPHAPTIHFNYRYFEVEEADGKGLRSYGKYCRAKCAF

SEQ ID NO: 34486 - protein, 488 aa, Homo sapiens
MAYSQGGGKKKVCYYYDGDIGNYYYGQGHPMKPHRIRMTHNLLLNYGLYRKMEIYRPHKATAEEMTKYHSDEYIKFLRSIRPDNMSEYSKQMQRFNVGEDCPVFDGLFEFCQLSTGGSVAGAVKLNRQQTDMAVNWAGGLHHAKKSEASGFCYVNDIVLAILELLKYHQRVLYIDIDIHHGDGVEEAFYTTDRVMTVSFHKYGEYFPGTGDLRDIGAGKGKYYAVNFPMRDGIDDESYGQIFKPIISKVMEMYQPSAVVLQCGADSLSGDRLGCFNLTVKGHAKCVEVVKTFNLPLLMLGGGGYTIRNVARCWTYETAVALDCEIPNELPYNDYFEYFGPDFKLHISPSNMTNQNTPEYMEKIKQRLFENLRMLPHAPGVQMQAIPEDAVHEDSGDEDGEDPDKRISIRASDKRIACDEEFSDSEDEGEGGRRNVADHKKGAKKARIEEDKKETEDKKTDVKEEDKSKDNSGEKTDTKGTKSEQLSNP

SEQ ID NO: 34487 - protein, 458 aa, Homo sapiens
MKPHRIRMTHNLLLNYGLYRKMEIYRPHKATAEEMTKYHSDEYIKFLRSIRPDNMSEYSKQMQRFNVGEDCPVFDGLFEFCQLSTGGSVAGAVKLNRQQTDMAVNWAGGLHHAKKSEASGFCYVNDIVLAILELLKYHQRVLYIDIDIHHGDGVEEAFYTTDRVMTVSFHKYGEYFPGTGDLRDIGAGKGKYYAVNFPMRDGIDDESYGQIFKPIISKVMEMYQPSAVVLQCGADSLSGDRLGCFNLTVKGHAKCVEVVKTFNLPLLMLGGGGYTIRNVARCWTYETAVALDCEIPNELPYNDYFEYFGPDFKLHISPSNMTNQNTPEYMEKIKQRLFENLRMLPHAPGVQMQAIPEDAVHEDSGDEDGEDPDKRISIRASDKRIACDEEFSDSEDEGEGGRRNVADHKKGAKKARIEEDKKETEDKKTDVKEEDKSKDNSGEKTDTKGTKSEQLSNP

SEQ ID NO: 34488 - protein, 420 aa, Homo sapiens
MEVPPRLSHVPPPLFPSAPATLASRSLSHWRPRPPRQLAPLLPSLAPSSARQGARRAQRHVTAQQPSRLAGGAAIKGGRRRRPDLFRRHFKSSSIQRSAAAAAATRTARQHPPADSSVTMEDMNEYSNIEEFAEGSKINASKNQQDDGKMFIGGLSWDTSKKDLTEYLSRFGEVVDCTIKTDPVTGRSRGFGFVLFKDAASVDKVLELKEHKLDGKLIDPKRAKALKGKEPPKKVFVGGLSPDTSEEQIKEYFGAFGEIENIELPMDTKTNERRGFCFITYTDEEPVKKLLESRYHQIGSGKCEIKVAQPKEVYRQQQQQQKGGRGAAAGGRGGTRGRGRGQGQNWNQGFNNYYDQGYGNYNSAYGGDQNYSGYGGYDYTGYNYGNYGYGQGYADYSGQQSTYGKASRGGGNHQNNYQPY

SEQ ID NO: 34489 - protein, 301 aa, Homo sapiens
MEDMNEYSNIEEFAEGSKINASKNQQDDGKMFIGGLSWDTSKKDLTEYLSRFGEVVDCTIKTDPVTGRSRGFGFVLFKDAASVDKVLELKEHKLDGKLIDPKRAKALKGKEPPKKVFVGGLSPDTSEEQIKEYFGAFGEIENIELPMDTKTNERRGFCFITYTDEEPVKKLLESRYHQIGSGKCEIKVAQPKEVYRQQQQQQKGGRGAAAGGRGGTRGRGRGQGQNWNQGFNNYYDQGYGNYNSAYGGDQNYSGYGGYDYTGYNYGNYGYGQGYADYSGQQSTYGKASRGGGNHQNNYQPY

SEQ ID NO: 34490 - protein, 244 aa, Homo sapiens
MEDMNEYSNIEEFAEGSKINASKNQQDDGKMFIGGLSWDTSKKDLTEYLSRFGEVVDCTIKTDPVTGRSRGFGFVLFKDAASVDKVLELKEHKLDGKLIDPKRAKALKGKEPPKKVFVGGLSPDTSEEQIKEYFGAFGEIENIELPMDTKTNERRGFCFITYTDEEPVKKLLESRYHQIGSGKCEIKVAQPKEVYRQQQQQQKGGRGAAAGGRGGTRGRGRGQQSTYGKASRGGGNHQNNYQPY

SEQ ID NO: 34491 - protein, 292 aa, Homo sapiens
MASSMRSLFSDHGKYVESFRRFLNHSTEHQCMQEFMDKKLPGIIGRIGDTKSEIKILSIGGGAGEIDLQILSKVQAQYPGVCINNEVVEPSAEQIAKYKELVAKTSNLENVKFAWHKETSSEYQSRMLEKKELQKWDFIHMIQMLYYVKDIPATLKFFHSLLGTNAKMLIIVVSGSSGWDKLWKKYGSRFPQDDLCQYITSDDLTQMLDNLGLKYECYDLLSTMDISDCFIDGNENGDLLWDFLTETCNFNATAPPDLRAELGKDLQEPEFSAKKEGKVLFNNTLSFIVIEA

SEQ ID NO: 34492 - protein, 126 aa, Homo sapiens
MASSMRSLFSDHGKYVESFRRFLNHSTEHQCMQEFMDKKLPGIIGRIGDTKSEIKILSIGGGADCLIRGSSRVLKRNSCFILCSTRQKDKPGMRIHDERSSELPFGAARLESKSAFPSFLVSFILF

SEQ ID NO: 34493 - protein, 51 aa, Homo sapiens
MASSMRSLFSDHGKYVESFRRFLNHSTEHQCMQEFMDKKLPGIIGRYQNCC

SEQ ID NO: 34494 - protein, 327 aa, Homo sapiens [sequence omitted]

SEQ ID NO: 34495 - protein, 164 aa, Homo sapiens
MLGPQVWSSVRQGLSRSLSRNVGVWASGEGKKVDIAGIYPPVTTPFTATAEVDYGKLEENLHKLGTFPFRGAVGGVCALANVLGAQVCQLERLCCTGQWEDAQKLQHRLIEPNAAVTRRFGIPGLKKIMDWFGYYGGPCRAPLQELSPAEEEALRMDFTSNGWL

SEQ ID NO: 34496 - protein, 298 aa, Homo sapiens
MGDTWAQLPWPGPPHPAMLLISLLLAAGLMHSDAGTSCPVLCTCRNQVVDCSSQRLFSVPPDLPMDTRNLSLAHNRITAVPPGYLTCYMELQVLDLHNNSLMELPRGLFLHAKRLAHLDLSYNNFSHVPADMFQEAHGLVHIDLSHNPWLRRVHPQAFQGLMQLRDLDLSYGGLAFLSLEALEGLPGLVTLQIGGNPWVCGCTMEPLLKWLRNRIQRCTADSQLAECRGPPEVEGAPLFSLTEESFKACHLTLTLDDYLFIAFVGFVVSIASVATNFLLGITANCCHRWSKASEEEEI

SEQ ID NO: 34497 - protein, 918 aa, Homo sapiens
MLTLQTWLVQALFIFLTTESTGELLDPCGYISPESPVVQLHSNFTAVCVLKEKCMDYFHVNANYIVWKTNHFTIPKEQYTIINRTASSVTFTDIASLNIQLTCNILTFGQLEQNVYGITIISGLPPEKPKNLSCIVNEGKKMRCEWDGGRETHLETNFTLKSEWATHKFADCKAKRDTPTSCTVDYSTVYFVNIEVWVEAENALGKVTSDHINFDPVYKVKPNPPHNLSVINSEELSSILKLTWTNPSIKSVIILKYNIQYRTKDASTWSQIPPEDTASTRSSFTVQDLKPFTEYVFRIRCMKEDGKGYWSDWSEEASGITYEDRPSKAPSFWYKIDPSHTQGYRTVQLVWKTLPPFEANGKILDYEVTLTRWKSHLQNYTVNATKLTVNLTNDRYLATLTVRNLVGKSDAAVLTIPACDFQATHPVMDLKAFPKDNMLWVEWTTPRESVKKYILEWCVLSDKAPCITDWQQEDGTVHRTYLRGNLAESKCYLITVTPVYADGPGSPESIKAYLKQAPPSKGPTVRTKKVGKNEAVLEWDQLPVDVQNGFIRNYTIFYRTIIGNETAVNVDSSHTEYTLSSLTSDTLYMVRMAAYTDEGGKDGPEFTFTTPKFAQGEIEAIVVPVCLAFLLTTLLGVLFCFNKRDLIKKHIWPNVPDPSKSHIAQWSPHTPPRHNFNSKDQMYSDGNFTDVSVVEIEANDKKPFPEDLKSLDLFKKEKINTEGHSSGIGGSSCMSSSRPSISSSDENESSQNTSSTVQYSTVVHSGYRHQVPSVQVFSRSESTQPLLDSEERPEDLQLVDHVDGGDGILPRQQYFKQNCSQHESSPDISHFERSKQVSSVNEEDFVRLKQQISDHISQSCGSGQMKMFQEVSAADAFGPGTEGQVERFETVGMEAATDEGMPKSYLPQTVRQGGYMPQ

SEQ ID NO: 34498 - protein, 329 aa, Homo sapiens
MLTLQTWLVQALFIFLTTESTGELLDPCGYISPESPVVQLHSNFTAVCVLKEKCMDYFHVNANYIVWKTNHFTIPKEQYTIINRTASSVTFTDIASLNIQLTCNILTFGQLEQNVYGITIISGLPPEKPKNLSCIVNEGKKMRCEWDGGRETHLETNFTLKSEWATHKFADCKAKRDTPTSCTVDYSTVYFVNIEVWVEAENALGKVTSDHINFDPVYKVKPNPPHNLSVINSEELSSILKLTWTNPSIKSVIILKYNIQYRTKDASTWSQIPPEDTASTRSSFTVQDLKPFTEYVFRIRCMKEDGKGYWSDWSEEASGITYEDNIASF

SEQ ID NO: 34499 - protein, 857 aa, Homo sapiens
MLTLQTWLVQALFIFLTTESTGELLDPCGYISPESPVVQLHSNFTAVCVLKEKCMDYFHVNANYIVWKTNHFTIPKEQYTIINRTASSVTFTDIASLNIQLTCNILTFGQLEQNVYGITIISGLPPEKPKNLSCIVNEGKKMRCEWDGGRETHLETNFTLKSEWATHKFADCKAKRDTPTSCTVDYSTVYFVNIEVWVEAENALGKVTSDHINFDPVYKVKPNPPHNLSVINSEELSSILKLTWTNPSIKSVIILKYNIQYRTKDASTWSQIPPEDTASTRSSFTVQDLKPFTEYVFRIRCMKEDGKGYWSDWSEEASGITYEDRPSKAPSFWYKIDPSHTQGYRTVQLVWKTLPPFEANGKILDYEVTLTRWKSHLQNYTVNATKLTVNLTNDRYLATLTVRNLVGKSDAAVLTIPACDFQGNLAESKCYLITVTPVYADGPGSPESIKAYLKQAPPSKGPTVRTKKVGKNEAVLEWDQLPVDVQNGFIRNYTIFYRTIIGNETAVNVDSSHTEYTLSSLTSDTLYMVRMAAYTDEGGKDGPEFTFTTPKFAQGEIEAIVVPVCLAFLLTTLLGVLFCFNKRDLIKKHIWPNVPDPSKSHIAQWSPHTPPRHNFNSKDQMYSDGNFTDVSVVEIEANDKKPFPEDLKSLDLFKKEKINTEGHSSGIGGSSCMSSSRPSISSSDENESSQNTSSTVQYSTVVHSGYRHQVPSVQVFSRSESTQPLLDSEERPEDLQLVDHVDGGDGILPRQQYFKQNCSQHESSPDISHFERSKQVSSVNEEDFVRLKQQISDHISQSCGSGQMKMFQEVSAADAFGPGTEGQVERFETVGMEAATDEGMPKSYLPQTVRQGGYMPQ

SEQ ID NO: 34500 - protein, 153 aa, Homo sapiens
MYRMQLLSCIALSLALVTNSAPTSSSTKKTQLQLEHLLLDLQMILNGINNYKNPKLTRMLTFKFYMPKKATELKHLQCLEEELKPLEEVLNLAQSKNFHLRPRDLISNINVIVLELKGSETTFMCEYADETATIVEFLNRWITFCQSIISTLT

SEQ ID NO: 34501 - protein, 378 aa, Homo sapiens
MVLLWLTLLLIALPCLLQTKEDPNPPITNLRMKAKAQQLTWDLNRNVTDIECVKDADYSMPAVNNSYCQFGAISLCEVTNYTVRVANPPFSTWILFPENSGKPWAGAENLTCWIHDVDFLSCSWAVGPGAPADVQYDLYLNVANRRQQYECLHYKTDAQGTRIGCRFDDISRLSSGSQSSHILVRGRSAAFGIPCTDKFVVFSQIEILTPPNMTAKCNKTHSFMHWKMRSHFNRKFRYELQIQKRMQPVITEQVRDRTSFQLLNPGTYTVQIRARERVYEFLSAWSTPQRFECDQEEGANTRAWRTSLLIALGTLLALVCVFVICRRYLVMQRLFPRIPHMKDPIGDSFQNDKLVVWEAGKAGLEECLVTEVQVVQKT

SEQ ID NO: 34502 - protein, 300 aa, Homo sapiens
MVLLWLTLLLIALPCLLQTKEGGKPWAGAENLTCWIHDVDFLSCSWAVGPGAPADVQYDLYLNVANRRQQYECLHYKTDAQGTRIGCRFDDISRLSSGSQSSHILVRGRSAAFGIPCTDKFVVFSQIEILTPPNMTAKCNKTHSFMHWKMRSHFNRKFRYELQIQKRMQPVITEQVRDRTSFQLLNPGTYTVQIRARERVYEFLSAWSTPQRFECDQEEGANTRAWRTSLLIALGTLLALVCVFVICRRYLVMQRLFPRIPHMKDPIGDSFQNDKLVVWEAGKAGLEECLVTEVQVVQKT

SEQ ID NO: 34503 - protein, 255 aa, Homo sapiens
MVMSSYMVNSKYVDPKFPPCEEYLQGGYLGEQGADYYGGGAQGADFQPPGLYPRPDFGEQPFGGSGPGPGSALPARGHGQEPGGPGGHYAAPGEPCPAPPAPPPAPLPGARAYSQSDPKQPPSGTALKQPAVVYPWMKKVHVNSVNPNYTGGEPKRSRTAYTRQQVLELEKEFHFNRYLTRRRRIEIAHTLCLSERQIKIWFQNRRMKWKKDHKLPNTKGRSSSSSSSSSCSSSVAPSQHLQPMAKDHHTDLTTL

SEQ ID NO: 34504 - protein, 465 aa, Homo sapiens [sequence omitted]

SEQ ID NO: 34505 - protein, 466 aa, Homo sapiens
MAMDVTRSQAQTALTLVEQILAEFQLQEEDLKKVMRRMQKEMDRGLRLETHEEASVKMLPTYVRSTPEGSEVGDFLSLDLGGTNFRVMLVKVGEGEEGQWSVKTKHQMYSIPEDAMTGTAEMLFDYISECISDFLDKHQMKHKKLPLGFTFSFPVRHEDIDKGILLNWTKGFKASGAEGNNVVGLLRDAIKRRGDFEMDVVAMVNDTVATMISCYYEDHQCEVGMIVGTGCNACYMEEMQNVELVEGDEGRMCVNTEWGAFGDSGELDEFLLEYDRLVDESSANPGQQLYEKLIGGKYMGELVRLVLLRLVDENLLFHGEASEQLRTRGAFETRFVSQVESDTGDRKQIYNILSTLGLRPSTTDCDIVRRACESVSTRAAHMCSAGLAGVINRMRESRSEDVMRITVGVDGSVYKLHPSFKERFHASVRRLTPSCEITFIESEEGSGRGAALVSAVACKKACMLGQ

SEQ ID NO: 34506 - protein, 464 aa, Homo sapiens
MPRPRSQLPQPNSQVEQILAEFQLQEEDLKKVMRRMQKEMDRGLRLETHEEASVKMLPTYVRSTPEGSEVGDFLSLDLGGTNFRVMLVKVGEGEEGQWSVKTKHQMYSIPEDAMTGTAEMLFDYISECISDFLDKHQMKHKKLPLGFTFSFPVRHEDIDKGILLNWTKGFKASGAEGNNVVGLLRDAIKRRGDFEMDVVAMVNDTVATMISCYYEDHQCEVGMIVGTGCNACYMEEMQNVELVEGDEGRMCVNTEWGAFGDSGELDEFLLEYDRLVDESSANPGQQLYEKLIGGKYMGELVRLVLLRLVDENLLFHGEASEQLRTRGAFETRFVSQVESDTGDRKQIYNILSTLGLRPSTTDCDIVRRACESVSTRAAHMCSAGLAGVINRMRESRSEDVMRITVGVDGSVYKLHPSFKERFHASVRRLTPSCEITFIESEEGSGRGAALVSAVACKKACMLGQ

SEQ ID NO: 34507 - protein, 798 aa, Homo sapiens
MNLQPIFWIGLISSVCCVFAQTDENRCLKANAKSCGECIQAGPNCGWCTNSTFLQEGMPTSARCDDLEALKKKGCPPDDIENPRGSKDIKKNKNVTNRSKGTAEKLKPEDITQIQPQQLVLRLRSGEPQTFTLKFKRAEDYPIDLYYLMDLSYSMKDDLENVKSLGTDLMNEMRRITSDFRIGFGSFVEKTVMPYISTTPAKLRNPCTSEQNCTSPFSYKNVLSLTNKGEVFNELVGKQRISGNLDSPEGGFDAIMQVAVCGSLIGWRNVTRLLVFSTDAGFHFAGDGKLGGIVLPNDGQCHLENNMYTMSHYYDYPSIAHLVQKLSENNIQTIFAVTEEFQPVYKELKNLIPKSAVGTLSANSSNVIQLIIDAYNSLSSEVILENGKLSEGVTISYKSYCKNGVNGTGENGRKCSNISIGDEVQFEISITSNKCPKKDSDSFKIRPLGFTEEVEVILQYICECECQSEGIPESPKCHEGNGTFECGACRCNEGRVGRHCECSTDEVNSEDMDAYCRKENSSEICSNNGECVCGQCVCRKRDNTNEIYSGKFCECDNFNCDRSNGLICGGNGVCKCRVCECNPNYTGSACDCSLDTSTCEASNGQICNGRGICECGVCKCTDPKFQGQTCEMCQTCLGVCAEHKECVQCRAFNKGEKKDTCTQECSYFNITKVESRDKLPQPVQPDPVSHCKEKDVDDCWFYFTYSVNGNNEVMVHVVENPECPTGPDIIPIVAGVVAGIVLIGLALLLIWKLLMIIHDRREFAKFEKEKMNAKWDTGENPIYKSAVTTVVNPKYEGK

SEQ ID NO: 34508 - protein, 789 aa, Homo sapiens
MNLQPIFWIGLISSVCCVFAQTDENRCLKANAKSCGECIQAGPNCGWCTNSTFLQEGMPTSARCDDLEALKKKGCPPDDIENPRGSKDIKKNKNVTNRSKGTAEKLKPEDITQIQPQQLVLRLRSGEPQTFTLKFKRAEDYPIDLYYLMDLSYSMKDDLENVKSLGTDLMNEMRRITSDFRIGFGSFVEKTVMPYISTTPAKLRNPCTSEQNCTSPFSYKNVLSLTNKGEVFNELVGKQRISGNLDSPEGGFDAIMQVAVCGSLIGWRNVTRLLVFSTDAGFHFAGDGKLGGIVLPNDGQCHLENNMYTMSHYYDYPSIAHLVQKLSENNIQTIFAVTEEFQPVYKELKNLIPKSAVGTLSANSSNVIQLIIDAYNSLSSEVILENGKLSEGVTISYKSYCKNGVNGTGENGRKCSNISIGDEVQFEISITSNKCPKKDSDSFKIRPLGFTEEVEVILQYICECECQSEGIPESPKCHEGNGTFECGACRCNEGRVGRHCECSTDEVNSEDMDAYCRKENSSEICSNNGECVCGQCVCRKRDNTNEIYSGKFCECDNFNCDRSNGLICGGNGVCKCRVCECNPNYTGSACDCSLDTSTCEASNGQICNGRGICECGVCKCTDPKFQGQTCEMCQTCLGVCAEHKECVQCRAFNKGEKKDTCTQECSYFNITKVESRDKLPQPVQPDPVSHCKEKDVDDCWFYFTYSVNGNNEVMVHVVENPECPTGPDIIPIVAGVVAGIVLIGLALLLIWKLLMIIHDRREFAKFEKEKMNAKWDTVSYKTSKKQSGL

SEQ ID NO: 34509 - protein, 825 aa, Homo sapiens
MNLQPIFWIGLISSVCCVFAQTDENRCLKANAKSCGECIQAGPNCGWCTNSTFLQEGMPTSARCDDLEALKKKGCPPDDIENPRGSKDIKKNKNVTNRSKGTAEKLKPEDITQIQPQQLVLRLRSGEPQTFTLKFKRAEDYPIDLYYLMDLSYSMKDDLENVKSLGTDLMNEMRRITSDFRIGFGSFVEKTVMPYISTTPAKLRNPCTSEQNCTSPFSYKNVLSLTNKGEVFNELVGKQRISGNLDSPEGGFDAIMQVAVCGSLIGWRNVTRLLVFSTDAGFHFAGDGKLGGIVLPNDGQCHLENNMYTMSHYYDYPSIAHLVQKLSENNIQTIFAVTEEFQPVYKELKNLIPKSAVGTLSANSSNVIQLIIDAYNSLSSEVILENGKLSEGVTISYKSYCKNGVNGTGENGRKCSNISIGDEVQFEISITSNKCPKKDSDSFKIRPLGFTEEVEVILQYICECECQSEGIPESPKCHEGNGTFECGACRCNEGRVGRHCECSTDEVNSEDMDAYCRKENSSEICSNNGECVCGQCVCRKRDNTNEIYSGKFCECDNFNCDRSNGLICGGNGVCKCRVCECNPNYTGSACDCSLDTSTCEASNGQICNGRGICECGVCKCTDPKFQGQTCEMCQTCLGVCAEHKECVQCRAFNKGEKKDTCTQECSYFNITKVESRDKLPQPVQPDPVSHCKEKDVDDCWFYFTYSVNGNNEVMVHVVENPECPTGPDIIPIVAGVVAGIVLIGLALLLIWKLLMIIHDRREFAKFEKEKMNAKWDTSLSVAQPGVQWCDISSLQPLTSRFQQFSCLSLPSTWDYRVKILFIRVP

SEQ ID NO: 34510 - protein, 819 aa, Homo sapiens
MNLQPIFWIGLISSVCCVFAQTDENRCLKANAKSCGECIQAGPNCGWCTNSTFLQEGMPTSARCDDLEALKKKGCPPDDIENPRGSKDIKKNKNVTNRSKGTAEKLKPEDITQIQPQQLVLRLRSGEPQTFTLKFKRAEDYPIDLYYLMDLSYSMKDDLENVKSLGTDLMNEMRRITSDFRIGFGSFVEKTVMPYISTTPAKLRNPCTSEQNCTSPFSYKNVLSLTNKGEVFNELVGKQRISGNLDSPEGGFDAIMQVAVCGSLIGWRNVTRLLVFSTDAGFHFAGDGKLGGIVLPNDGQCHLENNMYTMSHYYDYPSIAHLVQKLSENNIQTIFAVTEEFQPVYKELKNLIPKSAVGTLSANSSNVIQLIIDAYNSLSSEVILENGKLSEGVTISYKSYCKNGVNGTGENGRKCSNISIGDEVQFEISITSNKCPKKDSDSFKIRPLGFTEEVEVILQYICECECQSEGIPESPKCHEGNGTFECGACRCNEGRVGRHCECSTDEVNSEDMDAYCRKENSSEICSNNGECVCGQCVCRKRDNTNEIYSGKFCECDNFNCDRSNGLICGGNGVCKCRVCECNPNYTGSACDCSLDTSTCEASNGQICNGRGICECGVCKCTDPKFQGQTCEMCQTCLGVCAEHKECVQCRAFNKGEKKDTCTQECSYFNITKVESRDKLPQPVQPDPVSHCKEKDVDDCWFYFTYSVNGNNEVMVHVVENPECPTGPDIIPIVAGVVAGIVLIGLALLLIWKLLMIIHDRREFAKFEKEKMNAKWDTPGVQWCDISSLQPLTSRFQQFSCLSLPSTWDYRVKILFIRVP

SEQ ID NO: 34511 - protein, 801 aa, Homo sapiens
MNLQPIFWIGLISSVCCVFAQTDENRCLKANAKSCGECIQAGPNCGWCTNSTFLQEGMPTSARCDDLEALKKKGCPPDDIENPRGSKDIKKNKNVTNRSKGTAEKLKPEDITQIQPQQLVLRLRSGEPQTFTLKFKRAEDYPIDLYYLMDLSYSMKDDLENVKSLGTDLMNEMRRITSDFRIGFGSFVEKTVMPYISTTPAKLRNPCTSEQNCTSPFSYKNVLSLTNKGEVFNELVGKQRISGNLDSPEGGFDAIMQVAVCGSLIGWRNVTRLLVFSTDAGFHFAGDGKLGGIVLPNDGQCHLENNMYTMSHYYDYPSIAHLVQKLSENNIQTIFAVTEEFQPVYKELKNLIPKSAVGTLSANSSNVIQLIIDAYNSLSSEVILENGKLSEGVTISYKSYCKNGVNGTGENGRKCSNISIGDEVQFEISITSNKCPKKDSDSFKIRPLGFTEEVEVILQYICECECQSEGIPESPKCHEGNGTFECGACRCNEGRVGRHCECSTDEVNSEDMDAYCRKENSSEICSNNGECVCGQCVCRKRDNTNEIYSGKFCECDNFNCDRSNGLICGGNGVCKCRVCECNPNYTGSACDCSLDTSTCEASNGQICNGRGICECGVCKCTDPKFQGQTCEMCQTCLGVCAEHKECVQCRAFNKGEKKDTCTQECSYFNITKVESRDKLPQPVQPDPVSHCKEKDVDDCWFYFTYSVNGNNEVMVHVVENPECPTGPDIIPIVAGVVAGIVLIGLALLLIWKLLMIIHDRREFAKFEKEKMNAKWDTQENPIYKSPINNFKNPNYGRKAGL

SEQ ID NO: 34512 - protein, 154 aa, Homo sapiens
MAAAWGSSLTAATQRAVTPWPRGRLLTASLGPQARREASSSSPEAGEGQIRLTDSCVQRLLEITEGSEFLRLQVEGGGCSGFQYKFSLDTVINPDDRVFEQGGARVVVDSDSLAFVKGAQVDFSQELIRSSFQVLNNPQAQQGCSCGSSFSIKL

SEQ ID NO: 34513 - protein, 60 aa, Homo sapiens
MAAAWGSSLTAATQRAVTPWPRGRLLTASLGPQARREASSSSPEAGEGQIRLTDSCVQGI

SEQ ID NO: 34514 - protein, 1332 aa, Homo sapiens
MGDPAPARSLDDIDLSALRDPAGIFELVEVVGNGTYGQVYKGRHVKTGQLAAIKVMDVTEDEEEEIKQEINMLKKYSHHRNIATYYGAFIKKSPPGNDDQLWLVMEFCGAGSVTDLVKNTKGNALKEDCIAYICREILRGLAHLHAHKVIHRDIKGQNVLLTENAEVKLVDFGVSAQLDRTVGRRNTFIGTPYWMAPEVIACDENPDATYDYRSDIWSLGITAIEMAEGAPPLCDMHPMRALFLIPRNPPPRLKSKKWSKKFIDFIDTCLIKTYLSRPPTEQLLKFPFIRDQPTERQVRIQLKDHIDRSRKKRGEKEETEYEYSGSEEEDDSHGEEGEPSSIMNVPGESTLRREFLRLQQENKSNSEALKQQQQLQQQQQRDPEAHIKHLLHQRQRRIEEQKEERRRVEEQQRREREQRKLQEKEQQRRLEDMQALRREEERRQAEREQEYKRKQLEEQRQSERLQRQLQQEHAYLKSLQQQQQQQQLQKQQQQQLLPGDRKPLYHYGRGMNPADKPAWAREVEERTRMNKQQNSPLAKSKPGSTGPEPPIPQASPGPPGPLSQTPPMQRPVEPQEGPHKSLVAHRVPLKPYAAPVPRSQSLQDQPTRNLAAFPASHDPDPAIPAPTATPSARGAVIRQNSDPTSEGPGPSPNPPAWVRPDNEAPPKVPQRTSSIATALNTSGAGGSRPAQAVRARPRSNSAWQIYLQRRAERGTPKPPGPPAQPPGPPNASSNPDLRRSDPGWERSDSVLPASHGHLPQAGSLERNRVGVSSKPDSSPVLSPGNKAKPDDHRSRPGRPADFVLLKERTLDEAPRPPKKAMDYSSSSEEVESSEDDEEEGEGGPAEGSRDTPGGRSDGDTDSVSTMVVHDVEEITGTQPPYGGGTMVVQRTPEEERNLLHADSNGYTNLPDVVQPSHSPTENSKGQSPPSKDGSGDYQSRGLVKAPGKSSFTMFVDLGIYQPGGSGDSIPITALVGGEGTRLDQLQYDVRKGSVVNVNPTNTRAHSETPEIRKYKKRFNSEILCAALWGVNLLVGTENGLMLLDRSGQGKVYGLIGRRRFQQMDVLEGLNLLITISGKRNKLRVYYLSWLRNKILHNDPEVEKKQGWTTVGDMEGCGHYRVVKYERIKFLVIALKSSVEVYAWAPKPYHKFMAFKSFADLPHRPLLVDLTVEEGQRLKVIYGSSAGFHAVDVDSGNSYDIYIPVHIQSQITPHAIIFLPNTDGMEMLLCYEDEGVYVNTYGRIIKDVVLQWGEMPTSVAYICSNQIMGWGEKAIEIRSVETGHLDGVFMHKRAQRLKFLCERNDKVFFASVRSGGSSQVYFMTLNRNCIMNW

SEQ ID NO: 34515 - protein, 1295 aa, Homo sapiens
MGDPAPARSLDDIDLSALRDPAGIFELVEVVGNGTYGQVYKGRHVKTGQLAAIKVMDVTEDEEEEIKQEINMLKKYSHHRNIATYYGAFIKKSPPGNDDQLWLVMEFCGAGSVTDLVKNTKGNALKEDCIAYICREILRGLAHLHAHKVIHRDIKGQNVLLTENAEVKLVDFGVSAQLDRTVGRRNTFIGTPYWMAPEVIACDENPDATYDYRSDIWSLGITAIEMAEGAPPLCDMHPMRALFLIPRNPPPRLKSKKWSKKFIDFIDTCLIKTYLSRPPTEQLLKFPFIRDQPTERQVRIQLKDHIDRSRKKRGEKEETEYEYSGSEEEDDSHGEEGEPSSIMNVPGESTLRREFLRLQQENKSNSEALKQQQQLQQQQQRDPEAHIKHLLHQRQRRIEEQKEERRRVEEQQRREREQRKLQEKEQQRRLEDMQALRREEERRQAEREQEYKRKQLEEQRQSERLQRQLQQEHAYLKSLQQQQQQQQLQKQQQQQLLPGDRKPLYHYGRGMNPADKPAWAREVEERTRMNKQQNSPLAKSKPGSTGPEPPIPQASPGPPGPLSQTPPMQRPVEPQEGPHKSLVAHRVPLKPYAAPVPRSQSLQDQPTRNLAAFPASHDPDPAIPAPTATPSARGAVIRQNSDPTSEGPGPSPNPPAWVRPDNEAPPKVPQRTSSIATALNTSGAGGSRPAQAVRASNPDLRRSDPGWERSDSVLPASHGHLPQAGSLERNRVGVSSKPDSSPVLSPGNKAKPDDHRSRPGRPADFVLLKERTLDEAPRPPKKAMDYSSSSEEVESSEDDEEEGEGGPAEGSRDTPGGRSDGDTDSVSTMVVHDVEEITGTQPPYGGGTMVVQRTPEEERNLLHADSNGYTNLPDVVQPSHSPTENSKGQSPPSKDGSGDYQSRGLVKAPGKSSFTMFVDLGIYQPGGSGDSIPITALVGGEGTRLDQLQYDVRKGSVVNVNPTNTRAHSETPEIRKYKKRFNSEILCAALWGVNLLVGTENGLMLLDRSGQGKVYGLIGRRRFQQMDVLEGLNLLITISGKRNKLRVYYLSWLRNKILHNDPEVEKKQGWTTVGDMEGCGHYRVVKYERIKFLVIALKSSVEVYAWAPKPYHKFMAFKSFADLPHRPLLVDLTVEEGQRLKVIYGSSAGFHAVDVDSGNSYDIYIPVHIQSQITPHAIIFLPNTDGMEMLLCYEDEGVYVNTYGRIIKDVVLQWGEMPTSVAYICSNQIMGWGEKAIEIRSVETGHLDGVFMHKRAQRLKFLCERNDKVFFASVRSGGSSQVYFMTLNRNCIMNW

SEQ ID NO: 34516 - protein, 1303 aa, Homo sapiens
MGDPAPARSLDDIDLSALRDPAGIFELVEVVGNGTYGQVYKGRHVKTGQLAAIKVMDVTEDEEEEIKQEINMLKKYSHHRNIATYYGAFIKKSPPGNDDQLWLVMEFCGAGSVTDLVKNTKGNALKEDCIAYICREILRGLAHLHAHKVIHRDIKGQNVLLTENAEVKLVDFGVSAQLDRTVGRRNTFIGTPYWMAPEVIACDENPDATYDYRSDIWSLGITAIEMAEGAPPLCDMHPMRALFLIPRNPPPRLKSKKWSKKFIDFIDTCLIKTYLSRPPTEQLLKFPFIRDQPTERQVRIQLKDHIDRSRKKRGEKEETEYEYSGSEEEDDSHGEEGEPSSIMNVPGESTLRREFLRLQQENKSNSEALKQQQQLQQQQQRDPEAHIKHLLHQRQRRIEEQKEERRRVEEQQRREREQRKLQEKEQQRRLEDMQALRREEERRQAEREQEYKRKQLEEQRQSERLQRQLQQEHAYLKSLQQQQQQQQLQKQQQQQLLPGDRKPLYHYGRGMNPADKPAWAREVEERTRMNKQQNSPLAKSKPGSTGPEPPIPQASPGPPGPLSQTPPMQRPVEPQEGPHKSLVAHRVPLKPYAAPVPRSQSLQDQPTRNLAAFPASHDPDPAIPAPTATPSARGAVIRQNSDPTSEGPGPSPNPPAWVRPDNEAPPKVPQRTSSIATALNTSGAGGSRPAQAVRASNPDLRRSDPGWERSDSVLPASHGHLPQAGSLERNRVGVSSKPDSSPVLSPGNKAKPDDHRSRPGRPASYKRAIGEDFVLLKERTLDEAPRPPKKAMDYSSSSEEVESSEDDEEEGEGGPAEGSRDTPGGRSDGDTDSVSTMVVHDVEEITGTQPPYGGGTMVVQRTPEEERNLLHADSNGYTNLPDVVQPSHSPTENSKGQSPPSKDGSGDYQSRGLVKAPGKSSFTMFVDLGIYQPGGSGDSIPITALVGGEGTRLDQLQYDVRKGSVVNVNPTNTRAHSETPEIRKYKKRFNSEILCAALWGVNLLVGTENGLMLLDRSGQGKVYGLIGRRRFQQMDVLEGLNLLITISGKRNKLRVYYLSWLRNKILHNDPEVEKKQGWTTVGDMEGCGHYRVVKYERIKFLVIALKSSVEVYAWAPKPYHKFMAFKSFADLPHRPLLVDLTVEEGQRLKVIYGSSAGFHAVDVDSGNSYDIYIPVHIQSQITPHAIIFLPNTDGMEMLLCYEDEGVYVNTYGRIIKDVVLQWGEMPTSVAYICSNQIMGWGEKAIEIRSVETGHLDGVFMHKRAQRLKFLCERNDKVFFASVRSGGSSQVYFMTLNRNCIMNW

SEQ ID NO: 34517 - protein, 1312 aa, Homo sapiens
MGDPAPARSLDDIDLSALRDPAGIFELVEVVGNGTYGQVYKGRHVKTGQLAAIKVMDVTEDEEEEIKQEINMLKKYSHHRNIATYYGAFIKKSPPGNDDQLWLVMEFCGAGSVTDLVKNTKGNALKEDCIAYICREILRGLAHLHAHKVIHRDIKGQNVLLTENAEVKLVDFGVSAQLDRTVGRRNTFIGTPYWMAPEVIACDENPDATYDYRSDIWSLGITAIEMAEGAPPLCDMHPMRALFLIPRNPPPRLKSKKWSKKFIDFIDTCLIKTYLSRPPTEQLLKFPFIRDQPTERQVRIQLKDHIDRSRKKRGEKEETEYEYSGSEEEDDSHGEEGEPSSIMNVPGESTLRREFLRLQQENKSNSEALKQQQQLQQQQQRDPEAHIKHLLHQRQRRIEEQKEERRRVEEQQRREREQRKLQEKEQQRRLEDMQALRREEERRQAEREQEYKRKQLEEQRQSERLQRQLQQEHAYLKSLQQQQQQQQLQKQQQQQLLPGDRKPLYHYGRGMNPADKPAWAREVEERTRMNKQQNSPLAKSKPGSTGPEPPIPQASPGPPGPLSQTPPMQRPVEPQEGPHKSLQDQPTRNLAAFPASHDPDPAIPAPTATPSARGAVIRQNSDPTSEGPGPSPNPPAWVRPDNEAPPKVPQRTSSIATALNTSGAGGSRPAQAVRARPRSNSAWQIYLQRRAERGTPKPPGPPAQPPGPPNASSNPDLRRSDPGWERSDSVLPASHGHLPQAGSLERNRVGVSSKPDSSPVLSPGNKAKPDDHRSRPGRPADFVLLKERTLDEAPRPPKKAMDYSSSSEEVESSEDDEEEGEGGPAEGSRDTPGGRSDGDTDSVSTMVVHDVEEITGTQPPYGGGTMVVQRTPEEERNLLHADSNGYTNLPDVVQPSHSPTENSKGQSPPSKDGSGDYQSRGLVKAPGKSSFTMFVDLGIYQPGGSGDSIPITALVGGEGTRLDQLQYDVRKGSVVNVNPTNTRAHSETPEIRKYKKRFNSEILCAALWGVNLLVGTENGLMLLDRSGQGKVYGLIGRRRFQQMDVLEGLNLLITISGKRNKLRVYYLSWLRNKILHNDPEVEKKQGWTTVGDMEGCGHYRVVKYERIKFLVIALKSSVEVYAWAPKPYHKFMAFKSFADLPHRPLLVDLTVEEGQRLKVIYGSSAGFHAVDVDSGNSYDIYIPVHIQSQITPHAIIFLPNTDGMEMLLCYEDEGVYVNTYGRIIKDVVLQWGEMPTSVAYICSNQIMGWGEKAIEIRSVETGHLDGVFMHKRAQRLKFLCERNDKVFFASVRSGGSSQVYFMTLNRNCIMNW

SEQ ID NO: 34518 - protein, 1275 aa, Homo sapiens
MGDPAPARSLDDIDLSALRDPAGIFELVEVVGNGTYGQVYKGRHVKTGQLAAIKVMDVTEDEEEEIKQEINMLKKYSHHRNIATYYGAFIKKSPPGNDDQLWLVMEFCGAGSVTDLVKNTKGNALKEDCIAYICREILRGLAHLHAHKVIHRDIKGQNVLLTENAEVKLVDFGVSAQLDRTVGRRNTFIGTPYWMAPEVIACDENPDATYDYRSDIWSLGITAIEMAEGAPPLCDMHPMRALFLIPRNPPPRLKSKKWSKKFIDFIDTCLIKTYLSRPPTEQLLKFPFIRDQPTERQVRIQLKDHIDRSRKKRGEKEETEYEYSGSEEEDDSHGEEGEPSSIMNVPGESTLRREFLRLQQENKSNSEALKQQQQLQQQQQRDPEAHIKHLLHQRQRRIEEQKEERRRVEEQQRREREQRKLQEKEQQRRLEDMQALRREEERRQAEREQEYKRKQLEEQRQSERLQRQLQQEHAYLKSLQQQQQQQQLQKQQQQQLLPGDRKPLYHYGRGMNPADKPAWAREVEERTRMNKQQNSPLAKSKPGSTGPEPPIPQASPGPPGPLSQTPPMQRPVEPQEGPHKSLQDQPTRNLAAFPASHDPDPAIPAPTATPSARGAVIRQNSDPTSEGPGPSPNPPAWVRPDNEAPPKVPQRTSSIATALNTSGAGGSRPAQAVRASNPDLRRSDPGWERSDSVLPASHGHLPQAGSLERNRVGVSSKPDSSPVLSPGNKAKPDDHRSRPGRPADFVLLKERTLDEAPRPPKKAMDYSSSSEEVESSEDDEEEGEGGPAEGSRDTPGGRSDGDTDSVSTMVVHDVEEITGTQPPYGGGTMVVQRTPEEERNLLHADSNGYTNLPDVVQPSHSPTENSKGQSPPSKDGSGDYQSRGLVKAPGKSSFTMFVDLGIYQPGGSGDSIPITALVGGEGTRLDQLQYDVRKGSVVNVNPTNTRAHSETPEIRKYKKRFNSEILCAALWGVNLLVGTENGLMLLDRSGQGKVYGLIGRRRFQQMDVLEGLNLLITISGKRNKLRVYYLSWLRNKILHNDPEVEKKQGWTTVGDMEGCGHYRVVKYERIKFLVIALKSSVEVYAWAPKPYHKFMAFKSFADLPHRPLLVDLTVEEGQRLKVIYGSSAGFHAVDVDSGNSYDIYIPVHIQSQITPHAIIFLPNTDGMEMLLCYEDEGVYVNTYGRIIKDVVLQWGEMPTSVAYICSNQIMGWGEKAIEIRSVETGHLDGVFMHKRAQRLKFLCERNDKVFFASVRSGGSSQVYFMTLNRNCIMNW

SEQ ID NO: 34519 - protein, 422 aa, Homo sapiens
MSFVECPYHSPAERLVAEADEGGPSAITGMGLCFRCLLFSFSGRSGVEGGRVDLNVFGSLGLQPWIGSSRCWGGPCSSALRCGWFSSWPPPSKSAIPIGGGSRGAGRVSRWPPPHWLEAWRVSPLPLSPLSPATFGRGFIAVAVIPGLWARGRGCSSDRLPRPAGPARRQFQAASLLTRGWGRAWPWKQILKELDECYERFSRETDGAQKRRMLHCVQRALIRSQELGDEKIQIVSQMVELVENRTRQVDSHVELFEAQQELGDTAGNSGKAGADRPKGEAAAQADKPNSKRSRRQRNNENRENASSNHDHDDGASGTPKEKKAKTSKKKKRSKAKAEREASPADLPIDPNEPTYCLCNQVSYGEMIGCDNDECPIEWFHFSCVGLNHKPKGKWYCPKCRGENEKTMDKALEKSKKERAYNR

SEQ ID NO: 34520 - protein, 279 aa, Homo sapiens
MLSPANGEQLHLVNYVEDYLDSIESLPFDLQRNVSLMREIDAKYQEILKELDECYERFSRETDGAQKRRMLHCVQRALIRSQELGDEKIQIVSQMVELVENRTRQVDSHVELFEAQQELGDTAGNSGKAGADRPKGEAAAQADKPNSKRSRRQRNNENRENASSNHDHDDGASGTPKEKKAKTSKKKKRSKAKAEREASPADLPIDPNEPTYCLCNQVSYGEMIGCDNDECPIEWFHFSCVGLNHKPKGKWYCPKCRGENEKTMDKALEKSKKERAYNR

SEQ ID NO: 34521 - protein, 210 aa, Homo sapiens
MLHCVQRALIRSQELGDEKIQIVSQMVELVENRTRQVDSHVELFEAQQELGDTAGNSGKAGADRPKGEAAAQADKPNSKRSRRQRNNENRENASSNHDHDDGASGTPKEKKAKTSKKKKRSKAKAEREASPADLPIDPNEPTYCLCNQVSYGEMIGCDNDECPIEWFHFSCVGLNHKPKGKWYCPKCRGENEKTMDKALEKSKKERAYNR

SEQ ID NO: 34522 - protein, 235 aa, Homo sapiens
MEILKELDECYERFSRETDGAQKRRMLHCVQRALIRSQELGDEKIQIVSQMVELVENRTRQVDSHVELFEAQQELGDTAGNSGKAGADRPKGEAAAQADKPNSKRSRRQRNNENRENASSNHDHDDGASGTPKEKKAKTSKKKKRSKAKAEREASPADLPIDPNEPTYCLCNQVSYGEMIGCDNDECPIEWFHFSCVGLNHKPKGKWYCPKCRGENEKTMDKALEKSKKERAYNR

SEQ ID NO: 34523 - protein, 262 aa, Homo sapiens
MSFVECPYHSPAERLVAEADEGGPSAITEILKELDECYERFSRETDGAQKRRMLHCVQRALIRSQELGDEKIQIVSQMVELVENRTRQVDSHVELFEAQQELGDTAGNSGKAGADRPKGEAAAQADKPNSKRSRRQRNNENRENASSNHDHDDGASGTPKEKKAKTSKKKKRSKAKAEREASPADLPIDPNEPTYCLCNQVSYGEMIGCDNDECPIEWFHFSCVGLNHKPKGKWYCPKCRGENEKTMDKALEKSKKERAYNR

SEQ ID NO: 34524 - protein, 517 aa, Homo sapiens
MSGSCSSRKCFSVPATSLCSTEVSCGGPICLPSSCQSQTWQLVTCQDSCGSSSCGPQCRQPSCPVSSCAQPLCCDPVICEPSCSVSSGCQPVCCEATTCEPSCSVSNCYQPVCFEATICEPSCSVSNCCQPVCFEATVCEPSCSVSSCAQPVCCEPAICEPSCSVSSCCQPVGSEATSCQPVLCVPTSCQPVLCKSSCCQPVVCEPSCCSAVCTLPSSCQPVVCEPSCCQPVCPTPTCSVTSSCQAVCCDPSPCEPSCSESSICQPATCVALVCEPVCLRPVCCVQSSCEPPSVPSTCQEPSCCVSSICQPICSEPSPCSPAVCVSSPCQPTCYVVKRCPSVCPEPVSCPSTSCRPLSCSPGSSASAICRPTCPRTFYIPSSSKRPCSATISYRPVSRPICRPICSGLLTYRQPYMTSISYRPACYRPCYSILRRPACVTSYSCRPVYFRPSCTESDSCKRDCKKSTSSQLDCVDTTPCKVDVSEEAPCQPTEAKPISPTTREAAAAQPAASKPANC

SEQ ID NO: 34525 - protein, 72 aa, Homo sapiens
MNYYGNYYGGLGYGYGGFDDLGYGYGCGCGSFRRLGYGGGYGGYGYGSGFGGYGYRSCRPSCYGGYGFSGFY

SEQ ID NO: 34526 - protein, 44 aa, Homo sapiens
MSYYGNYYGGLGYGYDCKYSYTSGFGAFRILDCGYRCGCGGVWI

SEQ ID NO: 34527 - protein, 172 aa, Homo sapiens
MSYNCCSGNFSSRSCGGYLHYPASSCGFSYPSNQVYSTDLCSPSTCQLGSSLYRGCQQTCWEPTSCQTSYVESSPCQTSCYRPRTSLLCSPCQTTYSGSLGFGSSSCRSLGYGSRSCYSVGCGSSGFRSLGYGGCGFPSLGYGVGFCRPTYLASRSCQSSCYRPTCGSGFYY

SEQ ID NO: 34528 - protein, 195 aa, Homo sapiens
MVSSCCGSVCSDQSCGQGLGQESCCRPSCCQTTCCRTTCCRPSCCISSCCRPSCCISSCCKPSCCRTTCCRPSCCISSCCRPSCCISSCCKPSCCRTTCCRPSCCISSCCRPSCCISSCCKPSCCQTTCCRPSCCISSCYRPQCCQPSCCRPACCISSCCHPSCCVSSCRCPFSCPTTCCRTTCFHPICCGSSCC

SEQ ID NO: 34529 - protein, 673 aa, Homo sapiens
MSRTLASAVPLSSPDYYERLGQLQHGLRDSEKKRLDLEKKLYEYNQSDTCRVKLKYVKLKNYLKEICESEKKAHTRNQEYLKRFERVQAHVVHFTTNTEKLQKLKLEYETQIKKMLCSKDSLGLKEELTDEDREKVAVHEGINSGTAMSRGLYQPATIFMGRQMSAILSMRDFSTEHKSPQPTKNFSIPDPHSHRQTAQSSNVTDSCVVQTSNDTQCLNKSDNIDGKASLQIGEKMPVTASVLSEEEQTHCLEIGSNTRHGKSNLSEGKKSAELNSPLRERLSPENRTTDLKCDSSSGSEGEILTREHIEVEEKRASPPVSPIPVSEYCESENKWSQEKHSPWEGVSDHLAHREPKSQKPFRKMQEEEEESWSTSSDLTISISEDDLILESPEPQPNPGGKMEGEDGIEALKLIHAEQERVALSTEKNCILQTLSSPDSEKESSTNAPTREPGQTPDSDVPRAQVGQHVATLKEHDNSVKEEATALLRKALTEECGRRSAIHSSESSCSLPSILNDNSGIKEAKPAVWLNSVPTREQEVSSGCGDKSKKENVAADIPITETEAYQLLKKATLQDNTNQTENRFQKTDASVSHLSGLNIGSGAFETKTANKIASEASFSSSEGSPLSRHENKKKPVINLKSNALWDESDDSNSEIEAALRPRNHNTDDSDDFYD

SEQ ID NO: 34530 - protein, 570 aa, Homo sapiens
MQLEYETQIKKMLCSKDSLGLKEELTDEDREKVAVHEGINSGTAMSRGLYQPATIFMGRQMSAILSMRDFSTEHKSPQPTKNFSIPDPHSHRQTAQSSNVTDSCVVQTSNDTQCLNKSDNIDGKASLQIGEKMPVTASVLSEEEQTHCLEIGSNTRHGKSNLSEGKKSAELNSPLRERLSPENRTTDLKCDSSSGSEGEILTREHIEVEEKRASPPVSPIPVSEYCESENKWSQEKHSPWEGVSDHLAHREPKSQKPFRKMQEEEEESWSTSSDLTISISEDDLILESPEPQPNPGGKMEGEDGIEALKLIHAEQERVALSTEKNCILQTLSSPDSEKESSTNAPTREPGQTPDSDVPRAQVGQHVATLKEHDNSVKEEATALLRKALTEECGRRSAIHSSESSCSLPSILNDNSGIKEAKPAVWLNSVPTREQEVSSGCGDKSKKENVAADIPITETEAYQLLKKATLQDNTNQTENRFQKTDASVSHLSGLNIGSGAFETKTANKIASEASFSSSEGSPLSRHENKKKPVINLKSNALWDESDDSNSEIEAALRPRNHNTDDSDDFYD

SEQ ID NO: 34531 - protein, 627 aa, Homo sapiens
MSRTLASAVPLSSPDYYERLGQLQHGLRDSEKKRLDLEKKLYEYNQSDTCRVKLKYVKLKNYLKEICESEKKAHTRNQEYLKRFERVQAHVVHFTTNTEKLQKLKLEYETQIKKMLCSKDSLGLKEELTDEDREKVAVHEGINSGTAMSRGLYQPATIFMGRQMSAILSMRDFSTEHKSPQPTKNFSIPDPHSHRQTAQSSNVTDSCVVQTSNDTQCLNKSDNIDGKASLQIGEKMPVTASVLSEEEQTHCLEIGSNTRHGKSNLSEGKKSAELNSPLRERLSPENRTTDLKCDSSSGSEGEILTREHIEVEEKRASPPVSPIPVSEYCESENKWSQEKHSPWEGVSDHLAHREPKSQKPFRKMQEEEEESWSTSSDLTISISEDDLILESPEPQPNPGGKMEGEDGIEALKLIHAEQERVALSTEKNCILQTLSSPDSEKESSTNAPTREPGQTPDSDVPRAQVGQHVATLKEHDNSVKEEATALLRKALTEECGRRSAIHSSESSCSLPSILNDNSGIKEAKPAVWLNSVPTREQEVSSGCGDKSKKENVAADIPITETEAYQLLKKATLQDNTNQTENRFQKTDASVSHLSGLNIGSGAFETKTANKIASEASFSSSEGSPLSR

SEQ ID NO: 34532 - protein, 655 aa, Homo sapiens
MSRTLASAVPLSSPDYYERLGQLQHGLRDSEKKRLDLEKKLYEYNQSDTCRVKLKYVKLKNYLKEICESEKKAHTRNQEYLKRFERVQAHVVHFTTNTEKLQKLKLEYETQIKKMLCSKDSLGLKEELTDEDREKVAVHEGINSGTAMSRGLYQPATIFMGRQMSAILSMRDFSTEHKSPQPTKNFSIPDPHSHRQTAQSSNVTDSCVVQTSNDTQCLNKSDNIDGKASLQIGEKMPVTASVLSEEEQTHCLEIGSNTRHGKSNLSEGKKSAELNSPLRERLSPENRTTDLKCDSSSGSEGEILTREHIEVEEKRASPPVSPIPVSEYCESENKWSQEKHSPWEGVSDHLAHREPKSQKPFRKMQEEEEESWSTSSDLTISISEDDLILESPEPQPNPGGKMEGEDGIEALKLIHAEQERVALSTEKNCILQTLSSPDSEKESSTNAPTREPGQTPDSDVPRAQVGQHVATLKEHDNSVKEEATALLRKALTEECGRRSAIHSSESSCSLPSILNDNSGIKEAKPAVWLNSVPTREQEVSSGCGDKSKKENVAADIPITETEAYQLLKKATLQDNTNQTENRFQKTDASVSHLSGLNIGSGAFETKTANKIASEASFSSSEGSPLSRHENKKKPVINLKSNGERDNRTLDFLFLF

SEQ ID NO: 34533 - protein, 540 aa, Homo sapiens
MQVAVHEGINSGTAMSRGLYQPATIFMGRQMSAILSMRDFSTEHKSPQPTKNFSIPDPHSHRQTAQSSNVTDSCVVQTSNDTQCLNKSDNIDGKASLQIGEKMPVTASVLSEEEQTHCLEIGSNTRHGKSNLSEGKKSAELNSPLRERLSPENRTTDLKCDSSSGSEGEILTREHIEVEEKRASPPVSPIPVSEYCESENKWSQEKHSPWEGVSDHLAHREPKSQKPFRKMQEEEEESWSTSSDLTISISEDDLILESPEPQPNPGGKMEGEDGIEALKLIHAEQERVALSTEKNCILQTLSSPDSEKESSTNAPTREPGQTPDSDVPRAQVGQHVATLKEHDNSVKEEATALLRKALTEECGRRSAIHSSESSCSLPSILNDNSGIKEAKPAVWLNSVPTREQEVSSGCGDKSKKENVAADIPITETEAYQLLKKATLQDNTNQTENRFQKTDASVSHLSGLNIGSGAFETKTANKIASEASFSSSEGSPLSRHENKKKPVINLKSNALWDESDDSNSEIEAALRPRNHNTDDSDDFYD

SEQ ID NO: 34534 - protein, 323 aa, Homo sapiens
MSAAVACLDYFAAECLVSMSAGAVVHRRPPDPEGAGGAAGSEVGAAPPESALPGPGPPGPASVPQLPQVPAPSPGAGGAAPHLLAASVWADLRGSSGEGSWENSGEAPRASSGFSDPIPCSVQTPCSELAPASGAAAVCAPESSSDAPAVPSAPAAPGAPAASGGFSGGALGAGPAPAADQAPRRRSVTPAAKRHQCPFPGCTKAYYKSSHLKSHQRTHTGERPFSCDWLDCDKKFTRSDELARHYRTHTGEKRFSCPLCPKQFSRSDHLTKHARRHPTYHPDMIEYRGRRRTPRIDPPLTSEVESSASGSGPGPAPSFTTCL

SEQ ID NO: 34535 - protein, 165 aa, Homo sapiens
MGCCGCSEGCGSGCGGCGSGCGGCGSGCGGCGSSCCVPVCCCKPVCCCVPACSCSSCGSCGGSKGGCGSCGGSKGGCGSCGGSKGGCGSCGCSQCSCYKPCCCSSGCGSSCCQSSCCKPCCCQSSCCKPCCCSSGCGSSCCQSSCCNPCCSQSSCCVPVCCQCKI

SEQ ID NO: 34536 - protein, 352 aa, Homo sapiens
MAGTICFIMWVLFITDTVWSRSVRQVYEVHDSDDWTIHDFECPMECFCPPSFPTALYCENRGLKEIPAIPSRIWYLYLQNNLIETIPEKPFENATQLRWINLNKNKITNYGIEKGALSQLKKLLFLFLEDNELEEVPSPLPRSLEQLQLARNKVSRIPQGTFSNLENLTLLDLQNNKLVDNAFQRDTFKGLKNLMQLNMAKNALRNMPPRLPANTMQLFLDNNSIEGIPENYFNVIPKVAFLRLNHNKLSDEGLPSRGFDVSSILDLQLSHNQLTKVPRISAHLQHLHLDHNKIKSVNVSVICPSPSMLPAERDSFSYGPHLRYLRLDGNEIKPPIPMALMTCFRLLQAVII

SEQ ID NO: 34537 - protein, 252 aa, Homo sapiens
MSAAVACVDYFAADVLMAISSGAVVHRGRPGPEGAGPAAGLDVRAARREAASPGTPGPPPPPPAASGPGPGAAAAPHLLAASILADLRGGPGAAPGGASPASSSSAASSPSSGRAPGAAPSAAAKSHRCPFPDCAKAYYKSSHLKSHLRTHTGERPFACDWQGCDKKFARSDELARHHRTHTGEKRFSCPLCSKRFTRSDHLAKHARRHPGFHPDLLRRPGARSTSPSDSLPCSLAGSPAPSPAPSPAPAGL

SEQ ID NO: 34538 - protein, 604 aa, Homo sapiens
MAGDVEGFCSSIHDTSVSAGFRALYEEGLLLDVTLVIEDHQFQAHKALLATQSDYFRIMFTADMRERDQDKIHLKGLTATGFSHVLQFMYYGTIELSMNTVHEILQAAMYVQLIEVVKFCCSFLLAKICLENCAEIMRLLDDFGVNIEGVREKLDTFLLDNFVPLMSRPDFLSYLSFEKLMSYLDNDHLSRFPEIELYEAVQSWLRHDRRRWRHTDTIIQNIRFCLMTPTSVFEKVKTSEFYRYSRQLRYEVDQALNYFQNVHQQPLLDMKSSRIRSAKPQTTVFRGMIGHSMVNSKILLLKKPRVWWELEGPQVPLRPDCLAIVNNFVFLLGGEELGPDGEFHASSKVFRYDPRQNSWLQMADMSVPRSEFAVGVIGKFIYAVAGRTRDETFYSTERYDITNDKWEFVDPYPVNKYGHEGTVLNNKLFITGGITSSSTSKQVCVFDPSKEGTIEQRTRRTQVVTNCWENKSKMNYARCFHKMISYNGKLYVFGGVCVILRASFESQGCPSTEVYNPETDQWTILASMPIGRSGHGVTVLDKQIMVLGGLCYNGHYSDSILTFDPDENKWKEDEYPRMPCKLDGLQVCNLHFPDYVLDEVRRCN

SEQ ID NO: 34539 - protein, 634 aa, Homo sapiens
MAEEQEFTQLCKLPAQPSHPHCVNNTYRSAQHSQALLRGLLALRDSGILFDVVLVVEGRHIEAHRILLAASCDYFRGMFAGGLKEMEQEEVLIHGVSYNAMCQILHFIYTSELELSLSNVQETLVAACQLQIPEIIHFCCDFLMSWVDEENILDVYRLAELFDLSRLTEQLDTYILKNFVAFSRTDKYRQLPLEKVYSLLSSNRLEVSCETEVYEGALLYHYSLEQVQADQISLHEPPKLLETVRFPLMEAEVLQRLHDKLDPSPLRDTVASALMYHRNESLQPSLQSPQTELRSDFQCVVGFGGIHSTPSTVLSDQAKYLNPLLGEWKHFTASLAPRMSNQGIAVLNNFVYLIGGDNNVQGFRAESRCWRYDPRHNRWFQIQSLQQEHADLSVCVVGRYIYAVAGRDYHNDLNAVERYDPATNSWAYVAPLKREVYAHAGATLEGKMYITCGRRGEDYLKETHCYDPGSNTWHTLADGPVRRAWHGMATLLNKLYVIGGSNNDAGYRRDVHQVACYSCTSGQWSSVCPLPAGHGEPGIAVLDNRIYVLGGRSHNRGSRTGYVHIYDVEKDCWEEGPQLDNSISGLAACVLTLPRSLLLEPPRGTPDRSQADPDFASEVMSVSDWEEFDNSSED

SEQ ID NO: 34540 - protein, 491 aa, Homo sapiens
MSWVDEENILDVYRLAELFDLSRLTEQLDTYILKNFVAFSRTDKYRQLPLEKVYSLLSSNRLEVSCETEVYEGALLYHYSLEQVQADQISLHEPPKLLETVRFPLMEAEVLQRLHDKLDPSPLRDTVASALMYHRNESLQPSLQSPQTELRSDFQCVVGFGGIHSTPSTVLSDQAKYLNPLLGEWKHFTASLAPRMSNQGIAVLNNFVYLIGGDNNVQGFRAESRCWRYDPRHNRWFQIQSLQQEHADLSVCVVGRYIYAVAGRDYHNDLNAVERYDPATNSWAYVAPLKREVYAHAGATLEGKMYITCGRRGEDYLKETHCYDPGSNTWHTLADGPVRRAWHGMATLLNKLYVIGGSNNDAGYRRDVHQVACYSCTSGQWSSVCPLPAGHGEPGIAVLDNRIYVLGGRSHNRGSRTGYVHIYDVEKDCWEEGPQLDNSISGLAACVLTLPRSLLLEPPRGTPDRSQADPDFASEVMSVSDWEEFDNSSED

SEQ ID NO: 34541 - protein, 558 aa, Homo sapiens
MALKGQEDYIYLFKDSTHPVDFLDAFRTFYLDGLFTDITLQCPSGIIFHCHRAVLAACSNYFKAMFTADMKEKFKNKIKLSGIHHDILEGLVNYAYTSQIEITKRNVQSLLEAADLLQFLSVKKACERFLVRHLDIDNCIGMHSFAEFHVCPELEKESRRILCSKFKEVWQQEEFLEISLEKFLFILSRKNLSVWKEEAIIEPVIKWTAHDVENRIECLYNLLSYINIDIDPVYLKTALGLQRSCLLTENKIRSLIYNALNPMHKEISQRSTATMYIIGGYYWHPLSEVHIWDPLTNVWIQGAEIPDYTRESYGVTCLGPNIYVTGGYRTDNIEALDTVWIYNSESDEWTEGLPMLNARYYHCAVTLGGCVYALGGYRKGAPAEEAEFYDPLKEKWIPIANMIKGVGNATACVLHDVIYVIGGHCGYRGSCTYDKVQSYNSDINEWSLITSSPHPEYGLCSVPFENKLYLVGGQTTITECYDPEQNEWREIAPMMERRMECGAVIMNGCIYVTGGYSYSKGTYLQSIEKYDPDLNKWEIVGNLPSAMRSHGCVCVYNV

SEQ ID NO: 34542 - protein, 755 aa, Homo sapiens
MNVIYFPLHIFVVYSRAYTSLVLVGCTNLCAVLFARCLDDHLVSLRMSGSRKEFDVKQILKIRWRWFGHQASSPNSTVDSQQGEFWNRGQTGANGGRKFLDPCSLQLPLASIGYRRSSQLDFQNSPSWPMASTSEVPAFEFTAEDCGGAHWLDRPEVDDGTSEEENESDSSSCRTSNSSQTLSSCHTMEPCTSDEFFQALNHAEQTFKKMENYLRHKQLCDVILVAGDRRIPAHRLVLSSVSDYFAAMFTNDVREARQEEIKMEGVEPNSLWSLIQYAYTGRLELKEDNIECLLSTACLLQLSQVVEACCKFLMKQLHPSNCLGIRSFADAQGCTDLHKVAHNYTMEHFMEVIRNQEFVLLPASEIAKLLASDDMNIPNEETILNALLTWVRHDLEQRRKDLSKLLAYIRLPLLAPQFLADMENNVLFRDDIECQKLIMEAMKYHLLPERRPMLQSPRTKPRKSTVGTLFAVGGMDSTKGATSIEKYDLRTNMWTPVANMNGRRLQFGVAVLDDKLYVVGGRDGLKTLNTVECYNPKTKTWSVMPPMSTHRHGLGVAVLEGPMYAVGGHDGWSYLNTVERWDPQARQWNFVATMSTPRSTVGVAVLSGKLYAVGGRDGSSCLKSVECFDPHTNKWTLCAQMSKRRGGVGVTTWNGLLYAIGGHDAPASNLTSRLSDCVERYDPKTDMWTAVASMSISRDAVGVCLLGDKLYAVGGYDGQAYLNTVEAYDPQTNEWTQVAPLCLGRAGACVVTVKL

SEQ ID NO: 34543 - protein, 757 aa, Homo sapiens
MNVIYFPLHIFVVYSRAYTSLVLVGCTNLCAVLFARCLDDHLVSLRMSGSRKEFDVKQILKIRWRWFGHQASSPNSTVDSQQGEFWNRGQTGANGGRKFLDPCSLQLPLASIGYRRSSQLDFQNSPSWPMASTSEVPAFEFTAEDCGGAHWLDRPEVDDGTSEEENESDSSSCRTSNSSQTLSSCHTMEPCTSDEFFQALNHAEQTFKKMENYLRHKQLCDVILVAGDRRIPAHRLVLSSVSDYFAAMFTNDVREARQEEIKMEGVEPNSLWSLIQYAYTGRLELKEDNIECLLSTACLLQLSQVVEACCKFLMKQLHPSNCLGIRSFADAQGCTDLHKVAHNYTMEHFMEVIRNQEFVLLPASEIAKLLASDDMNIPNEETILNALLTWVRHDLEQRRKDLSKLLAYIRLPLLAPQFLADMENNVLFRDDIECQKLIMEAMKYHLLPERRPMLQSPRTKPRKSTVGTLFAVGGMDSTKGATSIEKYDLRTNMWTPVANMNGRRLQFGVAVLDDKLYVVGGRDGLKTLNTVECYNPKTKTWSVMPPMSTHRHGLGVAVLEGPMYAVGGHDGWSYLNTVERWDPQARQWNFVATMSTPRSTVGVAVLSGKLYAVGGRDGSSCLKSVECFDPHTNKWTLCAQMSKRRGGVGVTTWNGLLYAIGGHDAPASNLTSRLSDCVERYDPKTDMWTAVASMSISRDAVGVCLLGDKLYAVGGYDGQAYLNTVEAYDPQTNEWTQVWHSCFIITLTLFLLKQFLW

SEQ ID NO: 34544 - protein, 770 aa, Homo sapiens
MNVIYFPLHIFVVYSRAYTSLVLVGCTNLCAVLFARCLDDHLVSLRMSGSRKEFDVKQILKIRWRWFGHQASSPNSTVDSQQGEFWNRGQTGANGGRKFLDPCSLQLPLASIGYRRSSQLDFQNSPSWPMASTSEVPAFEFTAEDCGGAHWLDRPEVDDGTSEEENESDSSSCRTSNSSQTLSSCHTMEPCTSDEFFQALNHAEQTFKKMENYLRHKQLCDVILVAGDRRIPAHRLVLSSVSDYFAAMFTNDVREARQEEIKMEGVEPNSLWSLIQYAYTGRLELKEDNIECLLSTACLLQLSQVVEACCKFLMKQLHPSNCLGIRSFADAQGCTDLHKVAHNYTMEHFMEVIRNQEFVLLPASEIAKLLASDDMNIPNEETILNALLTWVRHDLEQRRKDLSKLLAYIRLPLLAPQFLADMENNVLFRDDIECQKLIMEAMKYHLLPERRPMLQSPRTKPRKSTVGTLFAVGGMDSTKGATSIEKYDLRTNMWTPVANMNGRRLQFGVAVLDDKLYVVGGRDGLKTLNTVECYNPKTKTWSVMPPMSTHRHGLGVAVLEGPMYAVGGHDGWSYLNTVERWDPQARQWNFVATMSTPRSTVGVAVLSGKLYAVGGRDGSSCLKSVECFDPHTNKWTLCAQMSKRRGGVGVTTWNGLLYAIGGHDAPASNLTSRLSDCVERYDPKTDMWTAVASMSISRDAVGVCLLGDKLYAVGGYDGQAYLNTVEAYDPQTNEWTQVFSHTFEDSKDHLVAIKQTIWRQNSLSEEFRSH

SEQ ID NO: 34545 - protein, 694 aa, Homo sapiens
MNVIYFPLHIFVVYSRAYTSLVLVGCTNLCAVLFARCLDDHLVSLRMSGSRKEFDVKQILKIRWRWFGHQASSPNSTVDSQQGEFWNRGQTGANGGRKFLDPCSLQLPLASIGYRRSSQLDFQNSPSWPMASTSEVPAFEFTAEDCGGAHWLDRPEVDDGTSEEENESDSSSCRLVLSSVSDYFAAMFTNDVREARQEEIKMEGVEPNSLWSLIQYAYTGRLELKEDNIECLLSTACLLQLSQVVEACCKFLMKQLHPSNCLGIRSFADAQGCTDLHKVAHNYTMEHFMEVIRNQEFVLLPASEIAKLLASDDMNIPNEETILNALLTWVRHDLEQRRKDLSKLLAYIRLPLLAPQFLADMENNVLFRDDIECQKLIMEAMKYHLLPERRPMLQSPRTKPRKSTVGTLFAVGGMDSTKGATSIEKYDLRTNMWTPVANMNGRRLQFGVAVLDDKLYVVGGRDGLKTLNTVECYNPKTKTWSVMPPMSTHRHGLGVAVLEGPMYAVGGHDGWSYLNTVERWDPQARQWNFVATMSTPRSTVGVAVLSGKLYAVGGRDGSSCLKSVECFDPHTNKWTLCAQMSKRRGGVGVTTWNGLLYAIGGHDAPASNLTSRLSDCVERYDPKTDMWTAVASMSISRDAVGVCLLGDKLYAVGGYDGQAYLNTVEAYDPQTNEWTQVAPLCLGRAGACVVTVKL

SEQ ID NO: 34546 - protein, 568 aa, Homo sapiens
MEPCTSDEFFQALNHAEQTFKKMENYLRHKQLCDVILVAGDRRIPAHRLVLSSVSDYFAAMFTNDVREARQEEIKMEGVEPNSLWSLIQYAYTGRLELKEDNIECLLSTACLLQLSQVVEACCKFLMKQLHPSNCLGIRSFADAQGCTDLHKVAHNYTMEHFMEVIRNQEFVLLPASEIAKLLASDDMNIPNEETILNALLTWVRHDLEQRRKDLSKLLAYIRLPLLAPQFLADMENNVLFRDDIECQKLIMEAMKYHLLPERRPMLQSPRTKPRKSTVGTLFAVGGMDSTKGATSIEKYDLRTNMWTPVANMNGRRLQFGVAVLDDKLYVVGGRDGLKTLNTVECYNPKTKTWSVMPPMSTHRHGLGVAVLEGPMYAVGGHDGWSYLNTVERWDPQARQWNFVATMSTPRSTVGVAVLSGKLYAVGGRDGSSCLKSVECFDPHTNKWTLCAQMSKRRGGVGVTTWNGLLYAIGGHDAPASNLTSRLSDCVERYDPKTDMWTAVASMSISRDAVGVCLLGDKLYAVGGYDGQAYLNTVEAYDPQTNEWTQVAPLCLGRAGACVVTVKL

SEQ ID NO: 34547 - protein, 709 aa, Homo sapiens
MSGSRKEFDVKQILKIRWRWFGHQASSPNSTVDSQQGEFWNRGQTGANGGRKFLDPCSLQLPLASIGYRRSSQLDFQNSPSWPMASTSEVPAFEFTAEDCGGAHWLDRPEVDDGTSEEENESDSSSCRTSNSSQTLSSCHTMEPCTSDEFFQALNHAEQTFKKMENYLRHKQLCDVILVAGDRRIPAHRLVLSSVSDYFAAMFTNDVREARQEEIKMEGVEPNSLWSLIQYAYTGRLELKEDNIECLLSTACLLQLSQVVEACCKFLMKQLHPSNCLGIRSFADAQGCTDLHKVAHNYTMEHFMEVIRNQEFVLLPASEIAKLLASDDMNIPNEETILNALLTWVRHDLEQRRKDLSKLLAYIRLPLLAPQFLADMENNVLFRDDIECQKLIMEAMKYHLLPERRPMLQSPRTKPRKSTVGTLFAVGGMDSTKGATSIEKYDLRTNMWTPVANMNGRRLQFGVAVLDDKLYVVGGRDGLKTLNTVECYNPKTKTWSVMPPMSTHRHGLGVAVLEGPMYAVGGHDGWSYLNTVERWDPQARQWNFVATMSTPRSTVGVAVLSGKLYAVGGRDGSSCLKSVECFDPHTNKWTLCAQMSKRRGGVGVTTWNGLLYAIGGHDAPASNLTSRLSDCVERYDPKTDMWTAVASMSISRDAVGVCLLGDKLYAVGGYDGQAYLNTVEAYDPQTNEWTQVAPLCLGRAGACVVTVKL

SEQ ID NO: 34548 - protein, 248 aa, Homo sapiens
MGLSIFLLLCVLGLSQAATPKIFNGTECGRNSQPWQVGLFEGTSLRCGGVLIDHRWVLTAAHCSGSRYWVRLGEHSLSQLDWTEQIRHSGFSVTHPGYLGASTSHEHDLRLLRLRLPVRVTSSVQPLPLPNDCATAGTECHVSGWGITNHPRNPFPDLLQCLNLSIVSHATCHGVYPGRITSNMVCAGGVPGQDACQGDSGGPLVCGGVLQGLVSWGSVGPCGQDGIPGVYTYICKYVDWIRMIMRNN

SEQ ID NO: 34549 - protein, 254 aa, Homo sapiens
MGLSIFLLLCVLGLSQAATPKIFNGTECGRNSQPWQVGLFEGTSLRCGGVLIDHRWVLTAAHCSGSRYWVRLGEHSLSQLDWTEQIRHSGFSVTHPGYLGASTSHEHDLRLLRLRLPVRVTSSVQPLPLPNDCATAGTECHVSGWGITNHPRNPFPDLLQCLNLSIVSHATCHGVYPGRITSNMVCAGGVPGQDACQGDSGGPLVCGGVLQGLVSWGSVGPCGQDGIPGVYTYICNSTLVGLGTSWNFNSCQPF

SEQ ID NO: 34550 - protein, 111 aa, Homo sapiens
MGLSIFLLLCVLGLSQAATPKIFNGTECGRNSQPWQVGLFEGTSLRCGGVLIDHRWVLTAAHCSGRPIPGSAPVPQPLHRLPCHLPWCVSRENHEQHGVCRRRPGAGCLPG

SEQ ID NO: 34551 - protein, 852 aa, Homo sapiens
MAVEDSTLQVVVRVRPPTPRELDSQRRPVVQVVDERVLVFNPEEPDGGFPGLKWGGTHDGPKKKGKDLTFVFDRVFGEAATQQDVFQHTTHSVLDSFLQGYNCSVFAYGATGAGKTHTMLGREGDPGIMYLTTVELYRRLEARQQEKHFEVLISYQEVYNEQIHDLLEPKGPLAIREDPDKGVVVQGLSFHQPASAEQLLEILTRGNRNRTQHPTDANATSSRSHAIFQIFVKQQDRVPGLTQAVQVAKMSLIDLAGSERASSTHAKGERLREGANINRSLLALINVLNALADAKGRKTHVPYRDSKLTRLLKDSLGGNCRTVMIAAISPSSLTYEDTYNTLKYADRAKEIRLSLKSNVTSLDCHISQYATICQQLQAEVAALRKKLQVYEGGGQPPPQDLPGSPKSGPPPEHQPCTPELPAGPRALQEESLGMEAQVERAMEGNSSDQEQSPEDEDEGPAEEVPTQMPEQNPTHALPESPRLTLQPKPVVGHFSARELDGDRSKQLALKVLCVAQRQYSLLQAANLLTPDMITEFETLQQLVQEEKIEPGAEALRTSGLARGAPLAQELCSESIPVPSPLCPEPPGYTGPVTRTMARRLSGPLHTLGIPPGPNCTPAQGSRWPMEKKRRRPSALEADSPMAPKRGTKRQRQSFLPCLRRGSLPDTQPSQGPSTPKGERASSPCHSPRVCPATVIKSRVPLGPSAMQNCSTPLALPTRDLNATFDLSEEPPSKPSFHECIGWDKIPQELSRLDQPFIPRAPVPLFTMKGPKPTSSLPGTSACKKKRVASSSVSHGRSRIARLPSSTLKRPAGPLVLPELPLSPLCPSNRRNGKDLIRVGRALSAGNGVTKVS

SEQ ID NO: 34552 - protein, 833 aa, Homo sapiens
MAVEDSTLQVVVRVRPPTPRELDSQRRPVVQVVDERVLVFNPEEPDGGFPGLKWGGTHDGPKKKGKDLTFVFDRVFGEAATQQDVFQHTTHSVLDSFLQGYNCSVFAYGATGAGKTHTMLGREGDPGIMYLTTVELYRRLEARQQEKHFEVLISYQEVYNEQIHDLLEPKGPLAIREDPDKGVVVQGLSFHQPASAEQLLEILTRGNRNRTQHPTDANATSSRSHAIFQIFVKQQDRVPGLTQAVQVAKMSLIDLAGSERASSTHAKGERLREGANINRSLLALINVLNALADAKGRKTHVPYRDSKLTRLLKDSLGGNCRTVMIAAISPSSLTYEDTYNTLKYADRAKEIRLSLKSNVTSLDCHISQYATICQQLQAEVAALRKKLQVYEGGGQPPPQDLPGSPKSGPPPEHLPSSPLPPHPPSQPCTPELPAGPRALQEESLGMEAQVERAMEGNSSDQEQSPEDEDEGPAEEVPTQMPEQNPTHALPESPRLTLQPKPVVGHFSARELDGDRSKQLALKVLCVAQRQYSLLQAANLLTPDMITEFETLQQLVQEEKIEPGAEALRTSGLARGAPLAQELCSESIPVPSPLCPEPPGYTGPVTRTMARRLSGPLHTLGIPPGPNCTPAQGSRWPMEKKRRRPSALEADSPMAPKRGTKRQRQSFLPCLRRGSLPDTQPSQGPSTPKGERASSPCHSPRVCPATVIKSRVPLGPSAMQNCSTPLALPTRDLNATFDLSEEPPSKPSFHECIGWDKIPQELSRLDQPFIPRAPVPLFTMKGPKPTSSLPGTSACKKKRVASSSVSHGRSRIARLPSSTLKRPAGPLVLPGDWH

SEQ ID NO: 34553 - protein, 558 aa, Homo sapiens
MATTATCTRFTDDYQLFEELGKGAFSVVRRCVKKTSTQEYAAKIINTKKLSARDHQKLEREARICRLLKHPNIVRLHDSISEEGFHYLVFDLVTGGELFEDIVAREYYSEADASHCIHQILESVNHIHQHDIVHRDLKPENLLLASKCKGAAVKLADFGLAIEVQGEQQAWFGFAGTPGYLSPEVLRKDPYGKPVDIWACGVILYILLVGYPPFWDEDQHKLYQQIKAGAYDFPSPEWDTVTPEAKNLINQMLTINPAKRITADQALKHPWVCQRSTVASMMHRQETVECLRKFNARRKLKGAILTTMLVSRNFSAAKSLLNKKSDGGVKKRKSSSSVHLMPQSNNKNSLVSPAQEPAPLQTAMEPQTTVVHNATDGIKGSTESCNTTTEDEDLKGRVPEGRSSRDRTAPSAGMQPQPSLCSSAMRKQEIIKITEQLIEAINNGDFEAYTKICDPGLTSFEPEALGNLVEGMDFHKFYFENLLSKNSKPIHTTILNPHVHVIGEDAACIAYIRLTQYIDGQGRPRTSQSEETRVWHRRDGKWLNVHYHCSGAPAAPLQ

SEQ ID NO: 34554 - protein, 547 aa, Homo sapiens
MATTATCTRFTDDYQLFEELGKGAFSVVRRCVKKTSTQEYAAKIINTKKLSARDHQKLEREARICRLLKHPNIVRLHDSISEEGFHYLVFDLVTGGELFEDIVAREYYSEADASHCIHQILESVNHIHQHDIVHRDLKPENLLLASKCKGAAVKLADFGLAIEVQGEQQAWFGFAGTPGYLSPEVLRKDPYGKPVDIWACGVILYILLVGYPPFWDEDQHKLYQQIKAGAYDFPSPEWDTVTPEAKNLINQMLTINPAKRITADQALKHPWVCQRSTVASMMHRQETVECLRKFNARRKLKGAILTTMLVSRNFSAAKSLLNKKSDGGVKPQSNNKNSLVSPAQEPAPLQTAMEPQTTVVHNATDGIKGSTESCNTTTEDEDLKGRVPEGRSSRDRTAPSAGMQPQPSLCSSAMRKQEIIKITEQLIEAINNGDFEAYTKICDPGLTSFEPEALGNLVEGMDFHKFYFENLLSKNSKPIHTTILNPHVHVIGEDAACIAYIRLTQYIDGQGRPRTSQSEETRVWHRRDGKWLNVHYHCSGAPAAPLQ

SEQ ID NO: 34555 - protein, 524 aa, Homo sapiens
MATTATCTRFTDDYQLFEELGKGAFSVVRRCVKKTSTQEYAAKIINTKKLSARDHQKLEREARICRLLKHPNIVRLHDSISEEGFHYLVFDLVTGGELFEDIVAREYYSEADASHCIHQILESVNHIHQHDIVHRDLKPENLLLASKCKGAAVKLADFGLAIEVQGEQQAWFGFAGTPGYLSPEVLRKDPYGKPVDIWACGVILYILLVGYPPFWDEDQHKLYQQIKAGAYDFPSPEWDTVTPEAKNLINQMLTINPAKRITADQALKHPWVCQRSTVASMMHRQETVECLRKFNARRKLKGAILTTMLVSRNFSAAKSLLNKKSDGGVKEPQTTVVHNATDGIKGSTESCNTTTEDEDLKGRVPEGRSSRDRTAPSAGMQPQPSLCSSAMRKQEIIKITEQLIEAINNGDFEAYTKICDPGLTSFEPEALGNLVEGMDFHKFYFENLLSKNSKPIHTTILNPHVHVIGEDAACIAYIRLTQYIDGQGRPRTSQSEETRVWHRRDGKWLNVHYHCSGAPAAPLQ

SEQ ID NO: 34556 - protein, 529 aa, Homo sapiens
MATTATCTRFTDDYQLFEELGKGAFSVVRRCVKKTSTQEYAAKIINTKKLSARDHQKLEREARICRLLKHPNIVRLHDSISEEGFHYLVFDLVTGGELFEDIVAREYYSEADASHCIHQILESVNHIHQHDIVHRDLKPENLLLASKCKGAAVKLADFGLAIEVQGEQQAWFGFAGTPGYLSPEVLRKDPYGKPVDIWACGVILYILLVGYPPFWDEDQHKLYQQIKAGAYDFPSPEWDTVTPEAKNLINQMLTINPAKRITADQALKHPWVCQRSTVASMMHRQETVECLRKFNARRKLKGAILTTMLVSRNFSAAKSLLNKKSDGGVKKRKSSSSVHLMPQSNNKNSLVSPAQEPAPLQTAMEPQTTVVHNATDGIKGSTESCNTTTEDEDLKVRKQEIIKITEQLIEAINNGDFEAYTKICDPGLTSFEPEALGNLVEGMDFHKFYFENLLSKNSKPIHTTILNPHVHVIGEDAACIAYIRLTQYIDGQGRPRTSQSEETRVWHRRDGKWLNVHYHCSGAPAAPLQ

SEQ ID NO: 34557 - protein, 527 aa, Homo sapiens
MATTATCTRFTDDYQLFEELGKGAFSVVRRCVKKTSTQEYAAKIINTKKLSARDHQKLEREARICRLLKHPNIVRLHDSISEEGFHYLVFDLVTGGELFEDIVAREYYSEADASHCIHQILESVNHIHQHDIVHRDLKPENLLLASKCKGAAVKLADFGLAIEVQGEQQAWFGFAGTPGYLSPEVLRKDPYGKPVDIWACGVILYILLVGYPPFWDEDQHKLYQQIKAGAYDFPSPEWDTVTPEAKNLINQMLTINPAKRITADQALKHPWVCQRSTVASMMHRQETVECLRKFNARRKLKGAILTTMLVSRNFSVGRQSSAPASPAASAAGLAGQAAKSLLNKKSDGGVKKRKSSSSVHLMEPQTTVVHNATDGIKGSTESCNTTTEDEDLKVRKQEIIKITEQLIEAINNGDFEAYTKICDPGLTSFEPEALGNLVEGMDFHKFYFENLLSKNSKPIHTTILNPHVHVIGEDAACIAYIRLTQYIDGQGRPRTSQSEETRVWHRRDGKWLNVHYHCSGAPAAPLQ

SEQ ID NO: 34558 - protein, 588 aa, Homo sapiens
MATTATCTRFTDDYQLFEELGKGAFSVVRRCVKKTSTQEYAAKIINTKKLSARDHQKLEREARICRLLKHPNIVRLHDSISEEGFHYLVFDLVTGGELFEDIVAREYYSEADASHCIHQILESVNHIHQHDIVHRDLKPENLLLASKCKGAAVKLADFGLAIEVQGEQQAWFGFAGTPGYLSPEVLRKDPYGKPVDIWACGVILYILLVGYPPFWDEDQHKLYQQIKAGAYDFPSPEWDTVTPEAKNLINQMLTINPAKRITADQALKHPWVCQRSTVASMMHRQETVECLRKFNARRKLKGAILTTMLVSRNFSVGRQSSAPASPAASAAGLAGQAAKSLLNKKSDGGVKKRKSSSSVHLMPQSNNKNSLVSPAQEPAPLQTAMEPQTTVVHNATDGIKGSTESCNTTTEDEDLKGAPLRTGNGSSVPEGRSSRDRTAPSAGMQPQPSLCSSAMRKQEIIKITEQLIEAINNGDFEAYTKICDPGLTSFEPEALGNLVEGMDFHKFYFENLLSKNSKPIHTTILNPHVHVIGEDAACIAYIRLTQYIDGQGRPRTSQSEETRVWHRRDGKWLNVHYHCSGAPAAPLQ

SEQ ID NO: 34559 - protein, 533 aa, Homo sapiens
MATTATCTRFTDDYQLFEELGKGAFSVVRRCVKKTSTQEYAAKIINTKKLSARDHQKLEREARICRLLKHPNIVRLHDSISEEGFHYLVFDLVTGGELFEDIVAREYYSEADASHCIHQILESVNHIHQHDIVHRDLKPENLLLASKCKGAAVKLADFGLAIEVQGEQQAWFGFAGTPGYLSPEVLRKDPYGKPVDIWACGVILYILLVGYPPFWDEDQHKLYQQIKAGAYDFPSPEWDTVTPEAKNLINQMLTINPAKRITADQALKHPWVCQRSTVASMMHRQETVECLRKFNARRKLKGAILTTMLVSRNFSAAKSLLNKKSDGGVKEPQTTVVHNATDGIKGSTESCNTTTEDEDLKGAPLRTGNGSSVPEGRSSRDRTAPSAGMQPQPSLCSSAMRKQEIIKITEQLIEAINNGDFEAYTKICDPGLTSFEPEALGNLVEGMDFHKFYFENLLSKNSKPIHTTILNPHVHVIGEDAACIAYIRLTQYIDGQGRPRTSQSEETRVWHRRDGKWLNVHYHCSGAPAAPLQ

SEQ ID NO: 34560 - protein, 556 aa, Homo sapiens
MATTATCTRFTDDYQLFEELGKGAFSVVRRCVKKTSTQEYAAKIINTKKLSARDHQKLEREARICRLLKHPNIVRLHDSISEEGFHYLVFDLVTGGELFEDIVAREYYSEADASHCIHQILESVNHIHQHDIVHRDLKPENLLLASKCKGAAVKLADFGLAIEVQGEQQAWFGFAGTPGYLSPEVLRKDPYGKPVDIWACGVILYILLVGYPPFWDEDQHKLYQQIKAGAYDFPSPEWDTVTPEAKNLINQMLTINPAKRITADQALKHPWVCQRSTVASMMHRQETVECLRKFNARRKLKGAILTTMLVSRNFSAAKSLLNKKSDGGVKPQSNNKNSLVSPAQEPAPLQTAMEPQTTVVHNATDGIKGSTESCNTTTEDEDLKGAPLRTGNGSSVPEGRSSRDRTAPSAGMQPQPSLCSSAMRKQEIIKITEQLIEAINNGDFEAYTKICDPGLTSFEPEALGNLVEGMDFHKFYFENLLSKNSKPIHTTILNPHVHVIGEDAACIAYIRLTQYIDGQGRPRTSQSEETRVWHRRDGKWLNVHYHCSGAPAAPLQ

SEQ ID NO: 34561 - protein, 542 aa, Homo sapiens
MATTATCTRFTDDYQLFEELGKGAFSVVRRCVKKTSTQEYAAKIINTKKLSARDHQKLEREARICRLLKHPNIVRLHDSISEEGFHYLVFDLVTGGELFEDIVAREYYSEADASHCIHQILESVNHIHQHDIVHRDLKPENLLLASKCKGAAVKLADFGLAIEVQGEQQAWFGFAGTPGYLSPEVLRKDPYGKPVDIWACGVILYILLVGYPPFWDEDQHKLYQQIKAGAYDFPSPEWDTVTPEAKNLINQMLTINPAKRITADQALKHPWVCQRSTVASMMHRQETVECLRKFNARRKLKGAILTTMLVSRNFSAAKSLLNKKSDGGVKPQSNNKNSLEPQTTVVHNATDGIKGSTESCNTTTEDEDLKGAPLRTGNGSSVPEGRSSRDRTAPSAGMQPQPSLCSSAMRKQEIIKITEQLIEAINNGDFEAYTKICDPGLTSFEPEALGNLVEGMDFHKFYFENLLSKNSKPIHTTILNPHVHVIGEDAACIAYIRLTQYIDGQGRPRTSQSEETRVWHRRDGKWLNVHYHCSGAPAAPLQ

SEQ ID NO: 34562 - protein, 495 aa, Homo sapiens
MATTATCTRFTDDYQLFEELGKGAFSVVRRCVKKTSTQEYAAKIINTKKLSARDHQKLEREARICRLLKHPNIVRLHDSISEEGFHYLVFDLVTGGELFEDIVAREYYSEADASHCIHQILESVNHIHQHDIVHRDLKPENLLLASKCKGAAVKLADFGLAIEVQGEQQAWFGFAGTPGYLSPEVLRKDPYGKPVDIWACGVILYILLVGYPPFWDEDQHKLYQQIKAGAYDFPSPEWDTVTPEAKNLINQMLTINPAKRITADQALKHPWVCQRSTVASMMHRQETVECLRKFNARRKLKGAILTTMLVSRNFSAAKSLLNKKSDGGVKEPQTTVVHNATDGIKGSTESCNTTTEDEDLKVRKQEIIKITEQLIEAINNGDFEAYTKICDPGLTSFEPEALGNLVEGMDFHKFYFENLLSKNSKPIHTTILNPHVHVIGEDAACIAYIRLTQYIDGQGRPRTSQSEETRVWHRRDGKWLNVHYHCSGAPAAPLQ

SEQ ID NO: 34563 - protein, 539 aa, Homo sapiens
MATTATCTRFTDDYQLFEELGKGAFSVVRRCVKKTSTQEYAAKIINTKKLSARDHQKLEREARICRLLKHPNIVRLHDSISEEGFHYLVFDLVTGGELFEDIVAREYYSEADASHCIHQILESVNHIHQHDIVHRDLKPENLLLASKCKGAAVKLADFGLAIEVQGEQQAWFGFAGTPGYLSPEVLRKDPYGKPVDIWACGVILYILLVGYPPFWDEDQHKLYQQIKAGAYDFPSPEWDTVTPEAKNLINQMLTINPAKRITADQALKHPWVCQRSTVASMMHRQETVECLRKFNARRKLKGAILTTMLVSRNFSVGRQSSAPASPAASAAGLAGQAAKSLLNKKSDGGVKPQSNNKNSLVSPAQEPAPLQTAMEPQTTVVHNATDGIKGSTESCNTTTEDEDLKVRKQEIIKITEQLIEAINNGDFEAYTKICDPGLTSFEPEALGNLVEGMDFHKFYFENLLSKNSKPIHTTILNPHVHVIGEDAACIAYIRLTQYIDGQGRPRTSQSEETRVWHRRDGKWLNVHYHCSGAPAAPLQ

SEQ ID NO: 34564 - protein, 341 aa, Homo sapiens
MSLMVVSMVCVGFFLLQGAWPHEGVHRKPSLLAHPGPLVKSEETVILQCWSDVRFQHFLLHREGKFKDTLHLIGEHHDGVSKANFSIGPMMQDLAGTYRCYGSVTHSPYQLSAPSDPLDIVITGLYEKPSLSAQPGPTVLAGESVTLSCSSRSSYDMYHLSREGEAHERRFSAGPKVNGTFQADFPLGPATHGGTYRCFGSFRDSPYEWSNSSDPLLVSVTGNPSNSWPSPTEPSSETGNPRHLHVLIGTSVVIILFILLLFFLLHRWCCNKKNAVVMDQEPAGNRTVNREDSDEQDPQEVTYAQLNHCVFTQRKITRPSQRPKTPPTDIIVYTELPNAEP

SEQ ID NO: 34565 - protein, 243 aa, Homo sapiens
MSLMVVSMVCVGFFLLQGAWPHEGVHRKPSLLAHPGPLVKSEETVILQCWSDVRFQHFLLHREGKFKDTLHLIGEHHDGVSKANFSIGPMMQDLAGTYRCYGSVTHSPYQLSAPSDPLLVSVTGNPSNSWPSPTEPSSETGNPRHLHVLIGTSVVIILFILLLFFLLHRWCCNKKNAVVMDQEPAGNRTVNREDSDEQDPQEVTYAQLNHCVFTQRKITRPSQRPKTPPTDIIVYTELPNAEP

SEQ ID NO: 34566 - protein, 309 aa, Homo sapiens
MPSAGLCSCWGGRVLPLLLAYVCYLLLGATIFQLLERQAEAQSRDQFQLEKLRFLENYTCLDQWAMEQFVQVIMEAWVKGVNPKGNSTNPSNWDFGSSFFFAGTVVTTIGYGNLAPSTEAGQVFCVFYALLGIPLNVIFLNHLGTGLRAHLAAIERWEDRPRRSQVLQVLGLALFLTLGTLVILIFPPMVFSHVEGWSFSEGFYFAFITLSTIGFGDYVVGTDPSKHYISVYRSLAAIWILLGLAWLALILPLGPLLLHRCCQLWLLSLRQGCGAKAAPGRRPRRGSTAARGVQVTPQDFPISKKGLGS

SEQ ID NO: 34567 - protein, 294 aa, Homo sapiens
MPSAGLCSCWGGRVLPLLLAYVCYLLLGATIFQLLERQAEAQSRDQFQLEKLRFLENYTCLDQWAMEQFVQVIMEAWVKGVNPKGNSTNPSNWDFGSSFFFAGTVVTTIGYGNLAPSTEAGQVFCVFYALLGIPLNVIFLNHLGTGLRAHLAAIERWEDRPRRSQVLQVLGLALFLTLGTLVILIFPPMVFSHVEGWSFSEGFYFAFITLSTIGFGDYVVGTDPSKHYISVYRSLAAIWILLGLAWLALILPLGPLLLHRCCQLWLLSRGLGVKDGAASDPSGLPRPQKIPISA

SEQ ID NO: 34568 - protein, 322 aa, Homo sapiens
MPSAGLCSCWGGRVLPLLLAYVCYLLLGATIFQLLERQAEAQSRDQFQLEKLRFLENYTCLDQWAMEQFVQVIMEAWVKGVNPKGNSTNPSNWDFGSSFFFAGTVVTTIGYGNLAPSTEAGQVFCVFYALLGIPLNVIFLNHLGTGLRAHLAAIERWEDRPRRSQVLQVLGLALFLTLGTLVILIFPPMVFSHVEGWSFSEGFYFAFITLSTIGFGDYVVGHPLNFITPSGLLPSQEPFQTPHGKPESQQIPGSFQKVSSMNVWPLSGMHSPGLAFPLPDCNIPDQERFRPLHPGAWKFWPLPLPSSNSKWAPMWLGSSAQV

SEQ ID NO: 34569 - protein, 262 aa, Homo sapiens
MPSAGLCSCWGGRVLPLLLAYVCYLLLGATIFQLLERQAEAQSRDQFQLEKLRFLENYTCLDQWAMEQFVQVIMEAWVKGVNPKGNSTNPSNWDFGSSFFFAGTVVTTIGYGNLAPSTEAGQVFCVFYALLGIPLNVIFLNHLGTGLRAHLAAIERWEDRPRRSQVLQVLGLALFLTLGTLVILIFPPMVFSHVEGWSFSEGFYFAFITLSTIGFGDYVVGLRQGCGAKAAPGRRPRRGSTAARGVQVTPQDFPISKKGLGS

SEQ ID NO: 34570 - protein, 504 aa, Homo sapiens
MGAGGPRRGEGPPDGGWGWVVLGACFVVTGFAYGFPKAVSVFFRALMRDFDAGYSDTAWVSSIMLAMLYGTGPVSSILVTRFGCRPVMLAGGLLASAGMILASFATRLLELYLTAGVLTGLGLALNFQPSLIMLGLYFERRRPLANGLAAAGSPVFLSALSPLGQQLLERFGWRGGFLLLGGLLLHCCACGAVMRPPPGPGPRPRRDSAGDRAGDAPGEAEADGAGLQLREASPRVRPRRRLLDLAVCTDRAFAVYAVTKFLMALGLFVPAILLVNYAKDAGVPDTDAAFLLSIVGFVDIVARPACGALAGLARLRPHVPYLFSLALLANGLTDLSSARARSYGALVAFCVAFGLSYGMVGALQFEVLMAAVGAPRFPSALGLVLLVEAAAVLIGPPSAGRLVDVLKNYEIIFYLAGSEVALAGVFMAVATNCCLRCAKAAPSGPGTEGGASDTEDAEAEGDSEPLPVVAEEPGNLEALEVLSARGEPTEPEIEARPRLAAESV

SEQ ID NO: 34571 - protein, 270 aa, Homo sapiens
MRGQGRKESLSDSRDLDGSYDQLTGHPPGPTKKALKQRFLKLLPCCGPQALPSVSETLAAPASLRPHRPRLLDPDSVDDEFELSTVCHRPEGLEQLQEQTKFTRKELQVLYRGFKNECPSGIVNEENFKQIYSQFFPQGDSSTYATFLFNAFDTNHDGSVSFEDFVAGLSVILRGTVDDRLNWAFNLYDLNKDGCITKEEMLDIMKSIYDMMGKYTYPALREEAPREHVESFFQKMDRNKDGVVTIEEFIESCQKDENIMRSMQLFDNVI

SEQ ID NO: 34572 - protein, 252 aa, Homo sapiens
MRGQGRKESLSDSRDLDGSYDQLTGHPPGPTKKALKQRFLKLLPCCGPQALPSVSENSVDDEFELSTVCHRPEGLEQLQEQTKFTRKELQVLYRGFKNECPSGIVNEENFKQIYSQFFPQGDSSTYATFLFNAFDTNHDGSVSFEDFVAGLSVILRGTVDDRLNWAFNLYDLNKDGCITKEEMLDIMKSIYDMMGKYTYPALREEAPREHVESFFQKMDRNKDGVVTIEEFIESCQKDENIMRSMQLFDNVI

SEQ ID NO: 34573 - protein, 220 aa, Homo sapiens
MRGQGRKESLSDSRDLDGSYDQLTDSVDDEFELSTVCHRPEGLEQLQEQTKFTRKELQVLYRGFKNECPSGIVNEENFKQIYSQFFPQGDSSTYATFLFNAFDTNHDGSVSFEDFVAGLSVILRGTVDDRLNWAFNLYDLNKDGCITKEEMLDIMKSIYDMMGKYTYPALREEAPREHVESFFQKMDRNKDGVVTIEEFIESCQKDENIMRSMQLFDNVI

SEQ ID NO: 34574 - protein, 225 aa, Homo sapiens
MNRCPRRCRSPLGQAARSLYQLVTGSLSPDSVDDEFELSTVCHRPEGLEQLQEQTKFTRKELQVLYRGFKNECPSGIVNEENFKQIYSQFFPQGDSSTYATFLFNAFDTNHDGSVSFEDFVAGLSVILRGTVDDRLNWAFNLYDLNKDGCITKEEMLDIMKSIYDMMGKYTYPALREEAPREHVESFFQKMDRNKDGVVTIEEFIESCQKDENIMRSMQLFDNVI

SEQ ID NO: 34575 - protein, 216 aa, Homo sapiens
MRGQGRKESLSDSRDLDGSYDQLTDSVDDEFELSTVCHRPEGLEQLQEQTKFTRKELQVLYRGFKNECPSGIVNEENFKQIYSQFFPQGDSSTYATFLFNAFDTNHDGSDFVAGLSVILRGTVDDRLNWAFNLYDLNKDGCITKEEMLDIMKSIYDMMGKYTYPALREEAPREHVESFFQKMDRNKDGVVTIEEFIESCQKDENIMRSMQLFDNVI

SEQ ID NO: 34576 - protein, 285 aa, Homo sapiens
MRGQGRKESLSDSRDLDGSYDQLTGHPPGPTKKALKQRFLKLLPCCGPQALPSVSEIGRVFRFLGDSSLPSALAAPASLRPHRPRLLDPDSVDDEFELSTVCHRPEGLEQLQEQTKFTRKELQVLYRGFKNECPSGIVNEENFKQIYSQFFPQGDSSTYATFLFNAFDTNHDGSVSFEDFVAGLSVILRGTVDDRLNWAFNLYDLNKDGCITKEEMLDIMKSIYDMMGKYTYPALREEAPREHVESFFQKMDRNKDGVVTIEEFIESCQKDENIMRSMQLFDNVI

SEQ ID NO: 34577 - protein, 227 aa, Homo sapiens
MRGQGRKESLSDSRDLDGSYDQLTDSVDDEFELSTVCHRPEGLEQLQEQTKFTRKELQVLYRGFKNPGALSFQECPSGIVNEENFKQIYSQFFPQGDSSTYATFLFNAFDTNHDGSVSFEDFVAGLSVILRGTVDDRLNWAFNLYDLNKDGCITKEEMLDIMKSIYDMMGKYTYPALREEAPREHVESFFQKMDRNKDGVVTIEEFIESCQKDENIMRSMQLFDNVI

SEQ ID NO: 34578 - protein, 177 aa, Homo sapiens
MWLSWTAWTMNLNCPPCVTGLRVWSSCRSKPNSRARSCRSCTGASRTNVPAELSMRRTSSRFTPSSFLKEDFVAGLSVILRGTVDDRLNWAFNLYDLNKDGCITKEEMLDIMKSIYDMMGKYTYPALREEAPREHVESFFQKMDRNKDGVVTIEEFIESCQKDENIMRSMQLFDNVI

SEQ ID NO: 34579 - protein, 184 aa, Homo sapiens
MRGQGRKESLSDSRDLDGSYDQLTDSVDDEFELSTVCHRPEGLEQLQEQTKFTRKELQVLYRGFKNECPSGIVNEENFKQIYSQFFPQGDSSTYATFLFNAFDTNHDGSVSFEEMLDIMKSIYDMMGKYTYPALREEAPREHVESFFQKMDRNKDGVVTIEEFIESCQKVQLPALYITLTWTQA

SEQ ID NO: 34580 - protein, 304 aa, Homo sapiens
MSLMVIIMACVGFFLLQGAWPQEGVHRKPSFLALPGHLVKSEETVILQCWSDVMFEHFLLHREGKFNNTLHLIGEHHDGVSKANFSIGPMMPVLAGTYRCYGSVPHSPYQLSAPSDPLDMVIIGLYEKPSLSAQPGPTVQAGENVTLSCSSRSSYDMYHLSREGEAHERRLPAVRSINGTFQADFPLGPATHGGTYRCFGSFRDAPYEWSNSSDPLLVSVTGNPSNSWPSPTEPSSKTGNPRHLHVLIGTSVVKIPFTILLFFLLHRWCSDKKNAAVMDQEPAGNRTVNSEDSDEQDHQEVSYA

SEQ ID NO: 34581 - protein, 304 aa, Homo sapiens
MSLMVISMACVAFFLLQGAWPHEGFRRKPSLLAHPGPLVKSEETVILQCWSDVMFEHFLLHREGTFNHTLRLIGEHIDGVSKGNFSIGRMTQDLAGTYRCYGSVTHSPYQLSAPSDPLDIVITGLYEKPSLSAQPGPTVLAGESVTLSCSSRSSYDMYHLSREGEAHERRLPAGPKVNRTFQADFPLDPATHGGTYRCFGSFRDSPYEWSKSSDPLLVSVTGNSSNSWPSPTEPSSETGNPRHLHVLIGTSVVKLPFTILLFFLLHRWCSNKKNASVMDQGPAGNRTVNREDSDEQDHQEVSYA

SEQ ID NO: 34582 - protein, 304 aa, Homo sapiens
MLPPPRPAAALALPVLLLLLVVLTPPPTGARPSPGPDYLRRGWMRLLAEGEGCAPCRPEECAAPRGCLAGRVRDACGCCWECANLEGQLCDLDPSAHFYGHCGEQLECRLDTGGDLSRGEVPEPLCACRSQSPLCGSDGHTYSQICRLQEAARARPDANLTVAHPGPCESGPQIVSHPYDTWNVTGQDVIFGCEVFAYPMASIEWRKDGLDIQLPGDDPHISVQFRGGPQRFEVTGWLQIQAVRPSDEGTYRCLGRNALGQVEAPASLTVLTPDQLNSTGIPQLRSLNLVPEEEAESEENDDYY

SEQ ID NO: 34583 - protein, 252 aa, Homo sapiens
MLPPPRPAAALALPVLLLLLVVLTPPPTGARPSPGPDYLRRGWMRLLAEGEGCAPCRPEECAAPRGCLAGRVRDACGCCWECANLEGQLCDLDPSAHFYGHCGEQLECRLDTGGDLSRGEVPEPLCACRSQSPLCGSDGHTYSQICRLQEAARARPDANLTVAHPGPCESGPQIVSHPYDTQRGPRLQTLGTEDTLTTLVGAGGMARAVACGEAPGEHLALQVLCLSGKRRHLWQVGSTGSSEGVPSGGSFW

SEQ ID NO: 34584 - protein, 491 aa, Homo sapiens
MVFGEFFHRPGQDEELVNLNVGGFKQSVDQSTLLRFPHTRLGKLLTCHSEEAILELCDDYSVADKEYYFDRNPSLFRYVLNFYYTGKLHVMEELCVFSFCQEIEYWGINELFIDSCCSNRYQERKEENHEKDWDQKSHDVSTDSSFEESSLFEKELEKFDTLRFGQLRKKIWIRMENPAYCLSAKLIAISSLSVVLASIVAMCVHSMSEFQNEDGEVDDPVLEGVEIACIAWFTGELAVRLAAAPCQKKFWKNPLNIIDFVSIIPFYATLAVDTKEEESEDIENMGKVVQILRLMRIFRILKLARHSVGLRSLGATLRHSYHEVGLLLLFLSVGISIFSVLIYSVEKDDHTSSLTSIPICWWWATISMTTVGYGDTHPVTLAGKLIASTCIICGILVVALPITIIFNKFSKYYQKQKDIDVDQCSEDAPEKCHELPYFNIRDIYAQRMHTFITSLSSVGIVVSDPDSTDASSIEDNEDICNTTSLENCTAK

SEQ ID NO: 34585 - protein, 500 aa, Homo sapiens
MPSSGRALLDSPLDSGSLTSLDSSVFCSEGEGEPLALGDCFTVNVGGSRFVLSQQALSCFPHTRLGKLAVVVASYRRPGALAAVPSPLELCDDANPVDNEYFFDRSSQAFRYVLHYYRTGRLHVMEQLCALSFLQEIQYWGIDELSIDSCCRDRYFRRKELSETLDFKKDTEDQESQHESEQDFSQGPCPTVRQKLWNILEKPGSSTAARIFGVISIIFVVVSIINMALMSAELSWLDLQLLEILEYVCISWFTGEFVLRFLCVRDRCRFLRKVPNIIDLLAILPFYITLLVESLSGSQTTQELENVGRIVQVLRLLRALRMLKLGRHSTGLRSLGMTITQCYEEVGLLLLFLSVGISIFSTVEYFAEQSIPDTTFTSVPCAWWWATTSMTTVGYGDIRPDTTTGKIVAFMCILSGILVLALPIAIINDRFSACYFTLKLKEAAVRQREALKKLTKNIATDSYISVNLRDVYARSIMEMLRLKGRERASTRSSGGDDFWF

SEQ ID NO: 34586 - protein, 821 aa, Homo sapiens
MAKFALNQNLPDLGGPRLCPVPAAGGARSPSSPYSVETPYGFHLDLDFLKYIEELERGPAARRAPGPPTSRRPRAPRPGLAGARSPGAWTSSESLASDDGGAPGILSQGAPSGLLMQPLSPRAPVRNPRVEHTLRETSRRLELAQTHERAPSPGRGVPRSPRGSGRSSPAPNLAPASPGPAQLQLVREQMAAALRRLRELEDQARTLPELQEQVRALRAEKARLLAGRAQPEPDGEAETRPDKLAQLRRLTERLATSERGGRARASPRADSPDGLAAGRSEGALQVLDGEVGSLDGTPQTREVAAEAVPETREAGAQAVPETREAGVEAAPETVEADAWVTEALLGLPAAAERELELLRASLEHQRGVSELLRGRLRELEEAREAAEEAAAGARAQLREATTQTPWSCAEKAAQTESPAEAPSLTQESSPGSMDGDRAVAPAGILKSIMKKRDGTPGAQPSSGPKSLQFVGVLNGEYESSSSEDASDSDGDSENGGAEPPGSSSGSGDDSGGGSDSGTPGPPSGGDIRDPEPEAEAEPQQVAQGRCELSPRLREACVALQRQLSRPRGVASDGGAVRLVAQEWFRVSSQRRSQAEPVARMLEGVRRLGPELLAHVVNLADGNGNTALHYSVSHGNLAIASLLLDTGACEVNRQNRAGYSALMLAALTSVRQEEEDMAVVQRLFCMGDVNAKASQTGQTALMLAISHGRQDMVATLLACGADVNAQDADGATALMCASEYGRLDTVRLLLTQPGCDPAILDNEGTSALAIALEAEQDEVAALLHAHLSSGQPDTQSESPPGSQTATPGEGECGDNGENPQVQ

SEQ ID NO: 34587 - protein, 840 aa, Homo sapiens
MAKFALNQNLPDLGGPRLCPVPAAGGARSPSSPYSVETPYGFHLDLDFLKYIEELERGPAARRAPGPPTSRRPRAPRPGLAGARSPGAWTSSESLASDDGGAPGILSQGAPSGLLMQPLSPRAPVRNPRVEHTLRETSRRLELAQTHERAPSPGRGVPRSPRGSGRSSPAPNLAPASPGPAQLQLVREQMAAALRRLRELEDQARTLPELQEQVRALRAEKARLLAGRAQPEPDGEAETRPDKLAQLRRLTERLATSERGGRARASPRADSPDGLAAGRSEGALQVLDGEVGSLDGTPQTREVAAEAVPETREAGAQAVPETREAGVEAAPETVEADAWVTEALLGLPAAAERELELLRASLEHQRGVSELLRGRLRELEEAREAAEEAAAGARAQLREATTQTPWSCAEKAAQTESPAEAPSLTQESSPGSMDGDRAVAPAGILKSIMKKRDGTPGAQPSSGPKSLQFVGVLNGEYESSSSEDASDSDGDSENGGAEPPGSSSGSGDDSGGGSDSGTPGPPSGGDIRDPEPEAEAEPQQVAQGRCELSPRLREACVALQRQLSRPRGVASDGGAVRLVAQEWFRVSSQRRSQAEPVARMLEGVRRLGPELLAHVVNLADGNGNTALHYSVSHGNLAIASLLLDTGACEVNRQNRAGYSALMLAALTSVRQEEEDMAVVQRLFCMGDVNAKASQTGQTALMLAISHGRQDMVATLLACGADVNAQDADGATALMCASEYGRLDTVRLLLTQPGCDPAILDNEGTSALAIALEAEQDEVAALLHAHLSSGQPDTQAGVQRHNLSSLQPPPPRFKKFSCLSLPSSWDYNSCEPSRLAQLTIF

SEQ ID NO: 34588 - protein, 872 aa, Homo sapiens [sequence omitted]

SEQ ID NO: 34589 - protein, 854 aa, Homo sapiens
MVQKSRNGGVYPGPSGEKKLKVGFVGLDPGAPDSTRDGALLIAGSEAPKRGSILSKPRAGGAGAGKPPKRNAFYRKLQNFLYNVLERPRGWAFIYHAYVFLLVFSCLVLSVFSTIKEYEKSSEGALYILEIVTIVVFGVEYFVRIWAAGCCCRYRGWRGRLKFARKPFCVIDIMVLIASIAVLAAGSQGNVFATSALRSLRFLQILRMIRMDRRGGTWKLLGSVVYAHSKELVTAWYIGFLCLILASFLVYLAEKGENDHFDTYADALWWGLITLTTIGYGDKYPQTWNGRLLAATFTLIGVSFFALPAGILGSGFALKVQEQHRQKHFEKRRNPAAGLIQSAWRFYATNLSRTDLHSTWQYYERTVTVPMYSSQTQTYGASRLIPPLNQLELLRNLKSKSGLAFRKDPPPEPSPSQKVSLKDRVFSSPRGVAAKGKGSPQAQTVRRSPSADQSLEDSPSKVPKSWSFGDRSRARQAFRIKGAASRQNSEEASLPGEDIVDDKSCPCEFVTEDLTPGLKVSIRAVCVMRFLVSKRKFKESLRPYDVMDVIEQYSAGHLDMLSRIKSLQSRVDQIVGRGPAITDKDRTKGPAEAELPEDPSMMGRLGKVEKQVLSMEKKLDFLVNIYMQRMGIPPTETEAYFGAKEPEPAPPYHSPEDSREHVDRHGCIVKIVRSSSSTGQKNFSAPPAAPPVQCPPSTSWQPQSHPRQGHGTSPVGDHGSLVRIPPPPAHERSLSAYGGGNRASMEFLRQEDTPGCRPPEGNLRDSDTSISIPSVDHEELERSFSGFSISQSKENLDALNSCYAAVAPCAKVRPYIAEGESDTDSDLCTPCGPPPRSATGEGPFGDVGWAGPRK

SEQ ID NO: 34590 - protein, 844 aa, Homo sapiens
MVQKSRNGGVYPGPSGEKKLKVGFVGLDPGAPDSTRDGALLIAGSEAPKRGSILSKPRAGGAGAGKPPKRNAFYRKLQNFLYNVLERPRGWAFIYHAYVFLLVFSCLVLSVFSTIKEYEKSSEGALYILEIVTIVVFGVEYFVRIWAAGCCCRYRGWRGRLKFARKPFCVIDIMVLIASIAVLAAGSQGNVFATSALRSLRFLQILRMIRMDRRGGTWKLLGSVVYAHSKELVTAWYIGFLCLILASFLVYLAEKGENDHFDTYADALWWGLITLTTIGYGDKYPQTWNGRLLAATFTLIGVSFFALPAGILGSGFALKVQEQHRQKHFEKRRNPAAGLIQSAWRFYATNLSRTDLHSTWQYYERTVTVPMYRLIPPLNQLELLRNLKSKSGLAFRKDPPPEPSPSQKVSLKDRVFSSPRGVAAKGKGSPQAQTVRRSPSADQSLEDSPSKVPKSWSFGDRSRARQAFRIKGAASRQNSEEASLPGEDIVDDKSCPCEFVTEDLTPGLKVSIRAVCVMRFLVSKRKFKESLRPYDVMDVIEQYSAGHLDMLSRIKSLQSRVDQIVGRGPAITDKDRTKGPAEAELPEDPSMMGRLGKVEKQVLSMEKKLDFLVNIYMQRMGIPPTETEAYFGAKEPEPAPPYHSPEDSREHVDRHGCIVKIVRSSSSTGQKNFSAPPAAPPVQCPPSTSWQPQSHPRQGHGTSPVGDHGSLVRIPPPPAHERSLSAYGGGNRASMEFLRQEDTPGCRPPEGNLRDSDTSISIPSVDHEELERSFSGFSISQSKENLDALNSCYAAVAPCAKVRPYIAEGESDTDSDLCTPCGPPPRSATGEGPFGDVGWAGPRK

SEQ ID NO: 34591 - protein, 841 aa, Homo sapiens
MVQKSRNGGVYPGPSGEKKLKVGFVGLDPGAPDSTRDGALLIAGSEAPKRGSILSKPRAGGAGAGKPPKRNAFYRKLQNFLYNVLERPRGWAFIYHAYVFLLVFSCLVLSVFSTIKEYEKSSEGALYILEIVTIVVFGVEYFVRIWAAGCCCRYRGWRGRLKFARKPFCVIDIMVLIASIAVLAAGSQGNVFATSALRSLRFLQILRMIRMDRRGGTWKLLGSVVYAHSKELVTAWYIGFLCLILASFLVYLAEKGENDHFDTYADALWWGLITLTTIGYGDKYPQTWNGRLLAATFTLIGVSFFALPAGILGSGFALKVQEQHRQKHFEKRRNPAAGLIQSAWRFYATNLSRTDLHSTWQYYERTVTVPMYSSQTQTYGASRLIPPLNQLELLRNLKSKSGLAFRKDPPPEPSPSPRGVAAKGKGSPQAQTVRRSPSADQSLEDSPSKVPKSWSFGDRSRARQAFRIKGAASRQNSEASLPGEDIVDDKSCPCEFVTEDLTPGLKVSIRAVCVMRFLVSKRKFKESLRPYDVMDVIEQYSAGHLDMLSRIKSLQSRVDQIVGRGPAITDKDRTKGPAEAELPEDPSMMGRLGKVEKQVLSMEKKLDFLVNIYMQRMGIPPTETEAYFGAKEPEPAPPYHSPEDSREHVDRHGCIVKIVRSSSSTGQKNFSAPPAAPPVQCPPSTSWQPQSHPRQGHGTSPVGDHGSLVRIPPPPAHERSLSAYGGGNRASMEFLRQEDTPGCRPPEGNLRDSDTSISIPSVDHEELERSFSGFSISQSKENLDALNSCYAAVAPCAKVRPYIAEGESDTDSDLCTPCGPPPRSATGEGPFGDVGWAGPRK

SEQ ID NO: 34592 - protein, 843 aa, Homo sapiens
MVQKSRNGGVYPGPSGEKKLKVGFVGLDPGAPDSTRDGALLIAGSEAPKRGSILSKPRAGGAGAGKPPKRNAFYRKLQNFLYNVLERPRGWAFIYHAYVFLLVFSCLVLSVFSTIKEYEKSSEGALYILEIVTIVVFGVEYFVRIWAAGCCCRYRGWRGRLKFARKPFCVIDIMVLIASIAVLAAGSQGNVFATSALRSLRFLQILRMIRMDRRGGTWKLLGSVVYAHSKELVTAWYIGFLCLILASFLVYLAEKGENDHFDTYADALWWGLITLTTIGYGDKYPQTWNGRLLAATFTLIGVSFFALPAQEQHRQKHFEKRRNPAAGLIQSAWRFYATNLSRTDLHSTWQYYERTVTVPMYSSQTQTYGASRLIPPLNQLELLRNLKSKSGLAFRKDPPPEPSPSQKVSLKDRVFSSPRGVAAKGKGSPQAQTVRRSPSADQSLEDSPSKVPKSWSFGDRSRARQAFRIKGAASRQNSEEASLPGEDIVDDKSCPCEFVTEDLTPGLKVSIRAVCVMRFLVSKRKFKESLRPYDVMDVIEQYSAGHLDMLSRIKSLQSRVDQIVGRGPAITDKDRTKGPAEAELPEDPSMMGRLGKVEKQVLSMEKKLDFLVNIYMQRMGIPPTETEAYFGAKEPEPAPPYHSPEDSREHVDRHGCIVKIVRSSSSTGQKNFSAPPAAPPVQCPPSTSWQPQSHPRQGHGTSPVGDHGSLVRIPPPPAHERSLSAYGGGNRASMEFLRQEDTPGCRPPEGNLRDSDTSISIPSVDHEELERSFSGFSISQSKENLDALNSCYAAVAPCAKVRPYIAEGESDTDSDLCTPCGPPPRSATGEGPFGDVGWAGPRK

SEQ ID NO: 34593 - protein, 393 aa, Homo sapiens
MVQKSRNGGVYPGPSGEKKLKVGFVGLDPGAPDSTRDGALLIAGSEAPKRGSILSKPRAGGAGAGKPPKRNAFYRKLQNFLYNVLERPRGWAFIYHAYVFLLVFSCLVLSVFSTIKEYEKSSEGALYILEIVTIVVFGVEYFVRIWAAGCCCRYRGWRGRLKFARKPFCVIDIMVLIASIAVLAAGSQGNVFATSALRSLRFLQILRMIRMDRRGGTWKLLGSVVYAHSKELVTAWYIGFLCLILASFLVYLAEKGENDHFDTYADALWWGLITLTTIGYGDKYPQTWNGRLLAATFTLIGVSFFALPAGILGSGFALKVQEQHRQKHFEKRRNPAAGLIQSAWRFYATNLSRTDLHSTWQYYERTVTVPMYRYRRRAPATKQLFHFLFSICS

SEQ ID NO: 34594 - protein, 240 aa, Homo sapiens
MRRCSLCAFDAARGPRRLMRVGLALILVGHVNLLLGAVLHGTVLRHVANPRGAVTPEYTVANVISVGSGLLSVSVGLVALLASRNLLRPPLHWVLLALALVNLLLSVACSLGLLLAVSLTVANGGRRLIADCHPGLLDPLVPLDEGPGHTDCPFDPTRIYDTALALWIPSLLMSAGEAALSGYCCVAALTLRGVGPCRKDGLQGQLEEMTELESPKCKRQENEQLLDQNQEIRASQRSWV

SEQ ID NO: 34595 - protein, 222 aa, Homo sapiens
MRVGLALILVGHVNLLLGAVLHGTVLRHVANPRGAVTPEYTVANVISVGSGLLSVSVGLVALLASRNLLRPPLHWVLLALALVNLLLSVACSLGLLLAVSLTVANGGRRLIADCHPGLLDPLVPLDEGPGHTDCPFDPTRIYDTALALWIPSLLMSAGEAALSGYCCVAALTLRGVGPCRKDGLQGQLEEMTELESPKCKRQENEQLLDQNQEIRASQRSWV

SEQ ID NO: 34596 - protein, 390 aa, Homo sapiens
MLSRKGIIPEEYVLTRLAEDPAEPRYRARQRRARFVSKKGNCNVAHKNIREQGRFLQDVFTTLVDLKWPHTLLIFTMSFLCSWLLFAMAWWLIAFAHGDLAPSEGTAEPCVTSIHSFSSAFLFSIEVQVTIGFGGRMVTEECPLAILILIVQNIVGLMINAIMLGCIFMKTAQAHRRAETLIFSKHAVIALRHGRLCFMLRVGDLRKSMIISATIHMQVVRKTTSPEGEVVPLHQVDIPMENGVGGNSIFLVAPLIIYHVIDANSPLYDLAPSDLHHHQDLEIIVILEGVVETTGITTQARTSYLADEILWGQRFVPIVAEEDGRYSVDYSKFGNTIKVPTPLCTARQLDEDHSLLEALTLASARGPLRKRSVPMAKAKPKFSISPDSLS

SEQ ID NO: 34597 - protein, 303 aa, Homo sapiens
MAWWLIAFAHGDLAPSEGTAEPCVTSIHSFSSAFLFSIEVQVTIGFGGRMVTEECPLAILILIVQNIVGLMINAIMLGCIFMKTAQAHRRAETLIFSKHAVIALRHGRLCFMLRVGDLRKSMIISATIHMQVVRKTTSPEGEVVPLHQVDIPMENGVGGNSIFLVAPLIIYHVIDANSPLYDLAPSDLHHHQDLEIIVILEGVVETTGITTQARTSYLADEILWGQRFVPIVAEEDGRYSVDYSKFGNTIKVPTPLCTARQLDEDHSLLEALTLASARGPLRKRSVPMAKAKPKFSISPDSLS

SEQ ID NO: 34598 - protein, 117 aa, Homo sapiens
MDMRVPAQLLGLLLLWLPGAKCDIQMTQSPSTLSASVGDRVTITCRASQSISSWLAWYQQKPGKAPKLLIYKASSLESGVPSRFSGSGSGTEFTLTISSLQPDDFATYYCQQYNSYS

SEQ ID NO: 34599 - protein, 739 aa, Homo sapiens
MASILLRSCRGRAPARLPPPPRYTVPRGSPGDPAHLSCASTLGLRNCLNVPFGCCTPIHPVYTSSRGDHLGCWALRPECLRIVSRAPWTSTSVGFVAVGPQCLPVRGWHSSRPVRDDSVVEKSLKSLKDKNKKLEEGGPVYSPPAEVVVKKSLGQRVLDELKHYYHGFRLLWIDTKIAARMLWRILNGHSLTRRERRQFLRICADLFRLVPFLVFVVVPFMEFLLPVAVKLFPNMLPSTFETQSLKEERLKKELRVKLELAKFLQDTIEEMALKNKAAKGSATKDFSVFFQKIRETGERPSNEEIMRFSKLFEDELTLDNLTRPQLVALCKLLELQSIGTNNFLRFQLTMRLRSIKADDKLIAEEGVDSLNVKELQAACRARGMRALGVTEDRLRGQLKQWLDLHLHQEIPTSLLILSRAMYLPDTLSPADQLKSTLQTLPEIVAKEAQVKVAEVEGEQVDNKAKLEATLQEEAAIQQEHREKELQKRSEVAKDFEPERVVAAPQRPGTEPQPEMPDTVLQSETLKDTAPVLEGLKEEEITKEEIDILSDACSKLQEQKKSLTKEKEELELLKEDVQDYSEDLQEIKKELSKTGEEKYVEESKASKRLTKRVQQMIGQIDGLISQLEMDQQAGKLAPANGMPTGENVISVAELINAMKQVKHIPESKLTSLAAALDENKDGKVNIDDLVKVIELVDKEDVHISTSQVAEIVATLEKEEKVEEKEKAKEKAEKEVAEVKS

SEQ ID NO: 34600 - protein, 254 aa, Homo sapiens
MRHTWPFRNVPFGCCTPIHPVYTSSRGDHLGCWALRPECLRIVSRAPWTSTSVGFVAVGPQCLPVRGWHSSRPVRDDSVVEKSLKSLKDKNKKLEEGGPVYSPPAEVVVKKSLGQRVLDELKHYYHGFRLLWIDTKIAARMLWRILNGHSLTRRERRQFLRICADLFRLVPFLVFVVVPFMEFLLPVAVKLFPNMLPSTFETQSLKEERLKKELRVKLELAKFLQDTIEEMALKNKAAKGSATKDFSVFFQQVL

SEQ ID NO: 34601 - protein, 294 aa, Homo sapiens
MASILLRSCRGRAPARLPPPPRYTVPRGSPGDPAHLSCASTLGLRNCLNVPFGCCTPIHPVYTSSRGDHLGCWALRPECLRIVSRAPWTSTSVGFVAVGPQCLPVRGWHSSRPVRDDSVVEKSLKSLKDKNKKLEEGGPVYSPPAEVVVKKSLGQRVLDELKHYYHGFRLLWIDTKIAARMLWRILNGHSLTRRERRQFLRICADLFRLVPFLVFVVVPFMEFLLPVAVKLFPNMLPSTFETQSLKEERLKKELRVKLELAKFLQDTIEEMALKNKAAKGSATKDFSVFFQQVL

SEQ ID NO: 34602 - protein, 167 aa, Homo sapiens
MHWGTLCGFLWLWPYLFYVQAVPIQKVQDDTKTLIKTIVTRINDISHTQSVSSKQKVTGLDFIPGLHPILTLSKMDQTLAVYQQILTSMPSRNVIQISNDLENLRDLLHVLAFSKSCHLPWASGLETLDSLGGVLEASGYSTEVVALSRLQGSLQDMLWQLDLSPGC

SEQ ID NO: 34603 - protein, 115 aa, Homo sapiens
MRVPAQLLGLLLLWLPGARCAIRMTQSPSSFSASTGDRVTITCRASQGISSYLAWYQQKPGKAPKLLIYAASTLQSGVPSRFSGSGSGTDFTLTISCLQSEDFATYYCQQYYSYP

SEQ ID NO: 34604 - protein, 950 aa, Homo sapiens [sequence omitted]

SEQ ID NO: 34605 - protein, 439 aa, Homo sapiens
MYNKKAKMEPNASESAIPARRQRQPRAKKKSKPLNLKIHSSVGSCENIPSQQRSPLLSERSLRSFFVGHAPFLPSTPPVHTEANFSANTLSVPRWSPQIPRRDLGNSIKHRFSTKYWMSQTCTVCGKGMLFGLKCKNCKLKCHNKCTKEAPPCHLLIIHRGDPARLVRTESVPCDINNPLRKPPRYSDLHISQTLPKTNKINKDHIPVPYQPDSSSNPSSTTSSTPSSPAPPLPPSATPPSPLHPSPQCTRQQKNFNLPASHYYKYKQQFIFPDVVPVPETPTRAPQVILHPVTSNPILEGNPLLQIEVEPTSENEEVHDEAEESEDDFEEMNLSLLSARSFPRKASQTSIFLQEWDIPFEQLEIGELIGKGRFGQVYHGRWHGEVAIRLIDIERDNEDQLKAFKREVMAYRQTRHENVVLFMGACMSPPHLAIITRPV

SEQ ID NO: 34606 - protein, 348 aa, Homo sapiens
MAATLGPLGSWQQWRRCLSARDGSRMLLLLLLLGSGQGPQQVGAGQTFEYLKREHSLSKPYQGVGTGSSSLWNLMGNAMVMTQYIRLTPDMQSKQGALWNRVPCFLRDWELQVHFKIHGQGKKNLHGDGLAIWYTKDRMQPGPVFGNMDKFVGLGVFVDTYPNEEKQQERVFPYISAMVNNGSLSYDHERDGRPTELGGCTAIVRNLHYDTFLVIRYVKRHLTIMMDIDGKHEWRDCIEVPGVRLPRGYYFGTSSITGDLSDNHDVISLKLFELTVERTPEEEKLHRDVFLPSVDNMKLPEMTAPLPPLSGLALFLIVFFSLVFSVFAIVIGIILYNKWQEQSRKRFY

SEQ ID NO: 34607 - protein, 359 aa, Homo sapiens
MAATLGPLGSWQQWRRCLSARDGSRMLLLLLLLGSGQGPQQVGAGQTFEYLKREHSLSKPYQGVGTGSSSLWNLMGNAMVMTQYIRLTPDMQSKQGALWNRVPCFLRDWELQVHFKIHGQGKKNLHGDGLAIWYTKDRMQPGPVFGNMDKFVGLGVFVDTYPNEEKQQEAQKRRYSPGVQRVFPYISAMVNNGSLSYDHERDGRPTELGGCTAIVRNLHYDTFLVIRYVKRHLTIMMDIDGKHEWRDCIEVPGVRLPRGYYFGTSSITGDLSDNHDVISLKLFELTVERTPEEEKLHRDVFLPSVDNMKLPEMTAPLPPLSGLALFLIVFFSLVFSVFAIVIGIILYNKWQEQSRKRFY

SEQ ID NO: 34608 - protein, 214 aa, Homo sapiens
MDKERRICMGMAWQSGTQRIGCSQAQKRRYSPGVQRVFPYISAMVNNGSLSYDHERDGRPTELGGCTAIVRNLHYDTFLVIRYVKRHLTIMMDIDGKHEWRDCIEVPGVRLPRGYYFGTSSITGDLSDNHDVISLKLFELTVERTPEEEKLHRDVFLPSVDNMKLPEMTAPLPPLSGLALFLIVFFSLVFSVFAIVIGIILYNKWQEQSRKRFY

SEQ ID NO: 34609 - protein, 510 aa, Homo sapiens
MAGSRQRGLRARVRPLFCALLLSLGRFVRGDGVGGDPAVALPHRRFEYKYSFKGPHLVQSDGTVPFWAHAGNAIPSSDQIRVAPSLKSQRGSVWTKTKAAFENWEVEVTFRVTGRGRIGADGLAIWYAENQGLEGPVFGSADLWNGVGIFFDSFDNDGKKNNPAIVIIGNNGQIHYDHQNDGASQALASCQRDFRNKPYPVRAKITYYQNTLTVMINNGFTPDKNDYEFCAKVENMIIPAQGHFGISAATGGLADDHDVLSFLTFQLTEPGKEPPTPDKEISEKEKEKYQEEFEHFQQELDKKKEEFQKGHPDLQGQPAEEIFESVGDRELRQVFEGQNRIHLEIKQLNRQLDMILDEQRRYVSSLTEEISKRGAGMPGQHGQITQQELDTVVKTQHEILRQVNEMKNSMSETVRLVSGMQHPGSAGGVYETTQHFIDIKEHLHIVKRDIDNLVQRNMPSNEKPKCPELPPFPSCLSTVHFIIFVVVQTVLFIGYIMYRSQQEAAAKKFF

SEQ ID NO: 34610 - protein, 193 aa, Homo sapiens [sequence omitted]

SEQ ID NO: 34611 - protein, 489 aa, Homo sapiens
MEAPDYEVLSVREQLFHERIRECIISTLLFATLYILCHIFLTRFKKPAEFTTVDDEDATVNKIALELCTFTLAIALGAVLLLPFSIISNEVLLSLPRNYYIQWLNGSLIHGLWNLVFLFSNLSLIFLMPFAYFFTESEGFAGSRKGVLGRVYETVVMLMLLTLLVLGMVWVASAIVDKNKANRESLYDFWEYYLPYLYSCISFLGVLLLLVCTPLGLARMFSVTGKLLVKPRLLEDLEEQLYCSAFEEAALTRRICNPTSCWLPLDMELLHRQVLALQTQRVLLEKRRKASAWQRNLGYPLAMLCLLVLTGLSVLIVAIHILELLIDEAAMPRGMQGTSLGQVSFSKLGSFGAVIQVVLIFYLMVSSVVGFYSSPLFRSLRPRWHDTAMTQIIGNCVCLLVLSSALPVFSRTLGLTRFDLLGDFGRFNWLGNFYIVFLYNAAFAGLTTLCLVKTFTAAVRAELIRAFGLDRLPLPVSGFPQASRKTQHQ

SEQ ID NO: 34612 - protein, 487 aa, Homo sapiens
MEAPDYEVLSVREQLFHERIRECIISTLLFATLYILCHIFLTRFKKPAEFTTDEDATVNKIALELCTFTLAIALGAVLLLPFSIISNEVLLSLPRNYYIQWLNGSLIHGLWNLVFLFSNLSLIFLMPFAYFFTESEGFAGSRKGVLGRVYETVVMLMLLTLLVLGMVWVASAIVDKNKANRESLYDFWEYYLPYLYSCISFLGVLLLLVCTPLGLARMFSVTGKLLVKPRLLEDLEEQLYCSAFEEAALTRRICNPTSCWLPLDMELLHRQVLALQTQRVLLEKRRKASAWQRNLGYPLAMLCLLVLTGLSVLIVAIHILELLIDEAAMPRGMQGTSLGQVSFSKLGSFGAVIQVVLIFYLMVSSVVGFYSSPLFRSLRPRWHDTAMTQIIGNCVCLLVLSSALPVFSRTLGLTRFDLLGDFGRFNWLGNFYIVFLYNAAFAGLTTLCLVKTFTAAVRAELIRAFGLDRLPLPVSGFPQASRKTQHQ

SEQ ID NO: 34613 - protein, 469 aa, Homo sapiens
MEAPDYEVLSVREQLFHERIRECIISTLLFATLYILCHIFLTRFKKPAEFTTVDDEDATVNKIALELCTFTLAIALGAVLLLPFSIISNEVLLSLPRNYYIQWLNGSLIHGLWNLVFLFSNLSLIFLMPFAYFFTESEGFAGSRKGVLGRVYETVVMLMLLTLLVLGMVWVASAIVDKNKANRESLYDFWEYYLPYLYSCISFLGVLLLLVCTPLGLARMFSVTGKLLVKPRLLEDLEEQLYCSAFEEAALTRRICNPTSCWLPLDMELLHRQVLALQTQRVLLEKRRKASAWQRNLGYPLAMLCLLVLTGLSVLIVAIHILELLIDEAAMPRGMQVVLIFYLMVSSVVGFYSSPLFRSLRPRWHDTAMTQIIGNCVCLLVLSSALPVFSRTLGLTRFDLLGDFGRFNWLGNFYIVFLYNAAFAGLTTLCLVKTFTAAVRAELIRAFGLDRLPLPVSGFPQASRKTQHQ

SEQ ID NO: 34614 - protein, 484 aa, Homo sapiens
MVNVKALCEPEVSNCWMNVITGTGSVSSPLLVLPQPGPETSLMTGEPVDDEDATVNKIALELCTFTLAIALGAVLLLPFSIISNEVLLSLPRNYYIQWLNGSLIHGLWNLVFLFSNLSLIFLMPFAYFFTESEGFAGSRKGVLGRVYETVVMLMLLTLLVLGMVWVASAIVDKNKANRESLYDFWEYYLPYLYSCISFLGVLLLLVCTPLGLARMFSVTGKLLVKPRLLEDLEEQLYCSAFEEAALTRRICNPTSCWLPLDMELLHRQVLALQTQRVLLEKRRKASAWQRNLGYPLAMLCLLVLTGLSVLIVAIHILELLIDEAAMPRGMQGTSLGQVSFSKLGSFGAVIQVVLIFYLMVSSVVGFYSSPLFRSLRPRWHDTAMTQIIGNCVCLLVLSSALPVFSRTLGLTRFDLLGDFGRFNWLGNFYIVFLYNAAFAGLTTLCLVKTFTAAVRAELIRAFGLDRLPLPVSGFPQASRKTQHQ

SEQ ID NO: 34615 - protein, 393 aa, Homo sapiens
MEAPDYEVLSVREQLFHERIRECIISTLLFATLYILCHIFLTRFKKPAEFTTVDDEDATVNKIALELCTFTLAIALGAVLLLPFSIISNEVLLSLPRNYYIQWLNGSLIHGLWNLVFLFSNLSLIFLMPFAYFFTESEGFAGSRKGVLGRVYETVVMLMLLTLLVLGMVWVASAIVDKNKANRESLYDFWEYYLPYLYSCISFLGVLLLLVCTPLGLARMFSVTGKLLVKPRLLEDLEEQLYCSAFEEAALTRRICNPTSCWLPLDMELLHRQVLALQTQRVLLEKRRKASAWQRNLGYPLAMLCLLVLTGLSVLIVAIHILELLIDEAAMPRGMQGTSLGQVSFSKLGSFGAVIQVVLIFYPSGNPSLPLFSKPVSWDSRPSTSWTLSPLGL

SEQ ID NO: 34616 - protein, 294 aa, Homo sapiens
MRPRAPACAAAALGLCSLLLLLAPGHACPAGCACTDPHTVDCRDRGLPSVPDPFPLDVRKLLVAGNRIQRIPEDFFIFYGDLVYLDFRNNSLRSLEEGTFSGSAKLVFLDLSYNNLTQLGAGAFRSAGRLVKLSLANNNLVGVHEDAFETLESLQVLELNDNNLRSLSVAALAALPALRSLRLDGNPWLCDCDFAHLFSWIQENASKLPKGLDEIQCSLPMESRRISLRELSEASFSECRFSLSLTDLCIIIFSGVAVSIAAIISSFFLATVVQCLQRCAPNKDAEDEDEDKDD

SEQ ID NO: 34617 - protein, 301 aa, Homo sapiens
MGARQSRASSKDKGPKRMLFTGRRQKFSPWDDALLSGRDPRSLLKRGMHHVSFSLVTRGMTDIPDFLWGLSEVQKLNLSHNQLRVLPPEVGKLTRIVVLNLCGNRLKSLPREVSLLQCLKVLFVNMNCLTEVPAELSLCRKLEVLSLSHNCLSQLPACFADLSRLRKLNLSNNFFAHIPMCVFSLKELIFLHVGSNRLENIAESIQHLASLQIFIAEGNNIHSFPRSLCLVTSLELLNLNNNDIQTLPSELHLLCRLVRIAWNPMDKGLHISHNPLSKPLPELVEGGLEMLFGYLKDKKHT

SEQ ID NO: 34618 - protein, 647 aa, Homo sapiens
MRLTLLCCTWREERMGEEGSELPVCASCGQRIYDGQYLQALNADWHADCFRCCDCSASLSHQYYEKDGQLFCKKDYWARYGESCHGCSEQITKGLVMVAGELKYHPECFICLTCGTFIGDGDTYTLVEHSKLYCGHCYYQTVVTPVIEQILPDSPGSHLPHTVTLVSIPASSHGKRGLSVSIDPPHGPPGCGTEHSHTVRVQGVDPGCMSPDVKNSIHVGDRILEINGTPIRNVPLDEIDLLIQETSRLLQLTLEHDPHDTLGHGLGPETSPLSSPAYTPSGEAGSSARQKPVLRSCSIDRSPGAGSLGSPASQRKDLGRSESLRVVCRPHRIFRPSDLIHGEVLGKGCFGQAIKVTHRETGEVMVMKELIRFDEETQRTFLKEVKVMRCLEHPNVLKFIGVLYKDKRLNFITEYIKGGTLRGIIKSMDSQYPWSQRVSFAKDIASGMAYLHSMNIIHRDLNSHNCLVRENKNVVVADFGLARLMVDEKTQPEGLRSLKKPDRKKRYTVVGNPYWMAPEMINGRSYDEKVDVFSFGIVLCEIIGRVNADPDYLPRTMDFGLNVRGFLDRYCPPNCPPSFFPITVRCCDLDPEKRPSFVKLEHWLETLRMHLAGHLPLGPQLEQLDRGFWETYRRGESGLPAHPEVPD

SEQ ID NO: 34619 - protein, 633 aa, Homo sapiens
MGEEGSELPVCASCGQRIYDGQYLQALNADWHADCFRCCDCSASLSHQYYEKDGQLFCKKDYWARYGESCHGCSEQITKGLVMVAGELKYHPECFICLTCGTFIGDGDTYTLVEHSKLYCGHCYYQTVVTPVIEQILPDSPGSHLPHTVTLVSIPASSHGKRGLSVSIDPPHGPPGCGTEHSHTVRVQGVDPGCMSPDVKNSIHVGDRILEINGTPIRNVPLDEIDLLIQETSRLLQLTLEHDPHDTLGHGLGPETSPLSSPAYTPSGEAGSSARQKPVLRSCSIDRSPGAGSLGSPASQRKDLGRSESLRVVCRPHRIFRPSDLIHGEVLGKGCFGQAIKVTHRETGEVMVMKELIRFDEETQRTFLKEVKVMRCLEHPNVLKFIGVLYKDKRLNFITEYIKGGTLRGIIKSMDSQYPWSQRVSFAKDIASGMAYLHSMNIIHRDLNSHNCLVRENKNVVVADFGLARLMVDEKTQPEGLRSLKKPDRKKRYTVVGNPYWMAPEMINGRSYDEKVDVFSFGIVLCEIIGRVNADPDYLPRTMDFGLNVRGFLDRYCPPNCPPSFFPITVRCCDLDPEKRPSFVKLEHWLETLRMHLAGHLPLGPQLEQLDRGFWETYRRGESGLPAHPEVPD

SEQ ID NO: 34620 - protein, 305 aa, Homo sapiens
MRLTLLCCTWREERMGEEGSELPVCASCGQRIYDGQYLQALNADWHADCFRCCDCSASLSHQYYEKDGQLFCKKDYWARYGESCHGCSEQITKGLVMVAGELKYHPECFICLTCGTFIGDGDTYTLVEHSKLYCGHCYYQTVVTPVIEQILPDSPGSHLPHTVTLVSIPASSHGKRGLSVSIDPPHGPPGCGTEHSHTVRVQGVDPGCMSPDVKNSIHVGDRILEINGTPIRNVPLDEIDLLIQETSRLLQLTLEHDPHDTLGHGLGPETSPLSSPAYTPSGEAGSSARQKPVFARTWVALSPSA

SEQ ID NO: 34621 - protein, 613 aa, Homo sapiens
MLLASAPRRRRFLQRAKCCDCSASLSHQYYEKDGQLFCKKDYWARYGESCHGCSEQITKGLVMVAGELKYHPECFICLTCGTFIGDGDTYTLVEHSKLYCGHCYYQTVVTPVIEQILPDSPGSHLPHTVTLVSIPASSHGKRGLSVSIDPPHGPPGCGTEHSHTVRVQGVDPGCMSPDVKNSIHVGDRILEINGTPIRNVPLDEIDLLIQETSRLLQLTLEHDPHDTLGHGLGPETSPLSSPAYTPSGEAGSSARQKPVLRSCSIDRSPGAGSLGSPASQRKDLGRSESLRVVCRPHRIFRPSDLIHGEVLGKGCFGQAIKVTHRETGEVMVMKELIRFDEETQRTFLKEVKVMRCLEHPNVLKFIGVLYKDKRLNFITEYIKGGTLRGIIKSMDSQYPWSQRVSFAKDIASGMAYLHSMNIIHRDLNSHNCLVRENKNVVVADFGLARLMVDEKTQPEGLRSLKKPDRKKRYTVVGNPYWMAPEMINGRSYDEKVDVFSFGIVLCEIIGRVNADPDYLPRTMDFGLNVRGFLDRYCPPNCPPSFFPITVRCCDLDPEKRPSFVKLEHWLETLRMHLAGHLPLGPQLEQLDRGFWETYRRGESGLPAHPEVPD

SEQ ID NO: 34622 - protein, 600 aa, Homo sapiens
MSRVAKYRRQVSEDPDIDSLLETLSPEEMEELEKELDVVDPDGSVPVGLRQRNQTEKQSTGVYNREAMLNFCEKETKKLMQREMSMDESKQVETKTDAKNGEERGRDASKKALGPRRDSDLGKEPKRGGLKKSFSRDRDEAGGKSGEKPKEEKIIRGIDKGRVRAAVDKKEAGKDGRGEERAVATKKEEEKKGSDRNTGLSRDKDKKREEMKEVAKKEDDEKVKGERRNTDTRKEGEKMKRAGGNTDMKKEDEKVKRGTGNTDTKKDDEKVKKNEPLHEKEAKDDSKTKTPEKQTPSGPTKPSEGPAKVEEEAAPSIFDEPLERVKNNDPEMTEVNVNNSDCITNEILVRFTEALEFNTVVKLFALANTRADDHVAFAIAIMLKANKTITSLNLDSNHITGKGILAIFRALLQNNTLTELRFHNQRHICGGKTEMEIAKLLKENTTLLKLGYHFELAGPRMTVTNLLSRNMDKQRQKRLQEQRQAQEAKGEKKDLLEVPKAGAVAKGSPKPSPQPSPKPSPKNSPKKGGAPAAPPPPPPPLAPPLIMENLKNSLSPATQRKMGDKVLPAQEKNSRDQLLAAIRSSNLKQLKKVEVPKLLQ

SEQ ID NO: 34623 - protein, 572 aa, Homo sapiens
MEELEKELDVVDPDGSVPVGLRQRNQTEKQSTGVYNREAMLNFCEKETKKLMQREMSMDESKQVETKTDAKNGEERGRDASKKALGPRRDSDLGKEPKRGGLKKSFSRDRDEAGGKSGEKPKEEKIIRGIDKGRVRAAVDKKEAGKDGRGEERAVATKKEEEKKGSDRNTGLSRDKDKKREEMKEVAKKEDDEKVKGERRNTDTRKEGEKMKRAGGNTDMKKEDEKVKRGTGNTDTKKDDEKVKKNEPLHEKEAKDDSKTKTPEKQTPSGPTKPSEGPAKVEEEAAPSIFDEPLERVKNNDPEMTEVNVNNSDCITNEILVRFTEALEFNTVVKLFALANTRADDHVAFAIAIMLKANKTITSLNLDSNHITGKGILAIFRALLQNNTLTELRFHNQRHICGGKTEMEIAKLLKENTTLLKLGYHFELAGPRMTVTNLLSRNMDKQRQKRLQEQRQAQEAKGEKKDLLEVPKAGAVAKGSPKPSPQPSPKPSPKNSPKKGGAPAAPPPPPPPLAPPLIMENLKNSLSPATQRKMGDKVLPAQEKNSRDQLLAAIRSSNLKQLKKVEVPKLLQ

SEQ ID NO: 34624 - protein, 334 aa, Homo sapiens
MRGPSWSRPRPLLLLLLLLSPWPVWAQVSATASPSGSLGAPDCPEVCTCVPGGLASCSALSLPAVPPGLSLRLRALLLDHNRVRALPPGAFAGAGALQRLDLRENGLHSVHVRAFWGLGALQLLDLSANQLEALAPGTFAPLRALRNLSLAGNRLARLEPAALGALPLLRSLSLQDNELAALAPGLLGRLPALDALHLRGNPWGCGCALRPLCAWLRRHPLPASEAETVLCVWPGRLTLSPLTAFSDAAFSHCAQPLALRDLAVVYTLGPASFLVSLASCLALGSGLTACRARRRRLRTAALRPPRPPDPNPDPDPHGCASPADPGSPAAAAQA

SEQ ID NO: 34625 - protein, 45 aa, Homo sapiens
MRARRRRLRTAALRPPRPPDPNPDPDPHGCASPADPGSPAAAAQA

SEQ ID NO: 34626 - protein, 580 aa, Homo sapiens
MQKPPLLLRRPLPPKFTKLSLHEKKTHTAKTGKIESLHVAFTEDETTSIKMDRTRFPDVLRNQSLTPINIQNIFLDHCVQERVTAISSPQKSTKHVREQIPDTATGSIFFPHCNSASTRIFGKQTNKMESSRKFKTMKDVYTEKRLENILILSSKFSKPKSTPGSVIAQKLEKMHPKHQPLPESPGYTYQHISRDLSATVPSPPPMTVSMKPEGQWPEHFKSTATLTLRVTEFPGFVSLPTPVLPRKPHRQSVIETLVTENGNIESVPKQIPPRPPEGLTKTEKIESEIHVVRGEGFKTVAATRYETITAMTNLAIVNCQVYGRNALNLKGFFILNCPDLTPLAFQLIYLNLSFNDLHYFPTEILCLKNLQILKLRNNPIKEIPSEIQQLEFLRIFTIAFNLITVLPIGLFSLSYLEELDVSYNELTFIPNEIQKLRSLEKLTVDGNELSFFPHGILKLNLTKIQFENNFTHPCFWRDNYLNNPQQLTQIISLFIVQNKLHKFYDKIPVEVQKLLKWGAQFLTELAPLSIYSSRKAITEGYIAVELPKFEESKNITEGLLTQKRYEEVMVKCINATTVTS

SEQ ID NO: 34627 - protein, 559 aa, Homo sapiens
MSSEQSAPGASPRAPRPGTQKSSGAVTKKGERAAKEKPATVLPPVGEEEPKSPEEYQCSGVLETDFAELCTRWGYTDFPKVVNRPRPHPPFVPSASLSEKATLDDPRLSGSCSLNSLESKYVFFRPTIQVELEQEDSKSVKEIYIRGWKVEERILGVFSKCLPPLTQLQAINLWKVGLTDKTLTTFIELLPLCSSTLRKVSLEGNPLPEQSYHKLMALDSTIAHLSLRNNNIDDRGAQLLGQALSTLHSCNRTLVSLNLGFNHIGDEGAGYIADGLRLNRSLLWLSLAHNRIQDKGALKLAEVLRAFELTHTEVVERRRLLLEKGTQERSRSPSSSRHGDSKTDREKSQMVGISNSALVDKTDKTQTMKTPKGLGKKKEKSWELAKKEEKLGSGQSPTQGTPKKEDATKAGKGKVTIPEQKPSRAKGIKIGSREKRSILLESELVVEATEVVNPLLEPVEHRDGKVFMPGNKVLLHLNLIRNRITEVGLEGFLATVQYQMQFSKAKSASKGPVGLLWLSLAKNCFAPQCPAYAIIQELMLPRDPIKAKLREDEAMAFFP

SEQ ID NO: 34628 - protein, 354 aa, Homo sapiens
MALDSTIAHLSLRNNNIDDRGAQLLGQALSTLHSCNRTLVSLNLGFNHIGDEGAGYIADGLRLNRSLLWLSLAHNRIQDKGALKLAEVLRAFELTHTEVVERRRLLLEKGTQERSRSPSSSRHGDSKTDREKSQMVGISNSALVDKTDKTQTMKTPKGLGKKKEKSWELAKKEEKLGSGQSPTQGTPKKEDATKAGKGKVTIPEQKPSRAKGIKIGSREKRSILLESEQLVVEATEVVNPLLEPVEHRDGKVFMPGNKVLLHLNLIRNRITEVGLEGFLATVQYQMQFSKAKSASKGPVGLLWLSLAVSPFHSLLLKQTLPLSAVILDSCCRQLLSPHFQGRKIASPHNVLRTP

SEQ ID NO: 34629 - protein, 205 aa, Homo sapiens
MSKKKGLSAEEKRTRMMEIFSETKDVFQLKDLEKIAPKEKGITAMSVKEVLQSLVDDGMVDCERIGTSNYYWAFPSKALHARKHKLEVLESQLSEGSQKHASLQKSIEKAKIGRCETEERTRLAKELSSLRDQREQLKAEVEKYKDCDPQVVEEIRQANKVAKEAANRWTDNIFAIKSWAKRKFGFEENKIDRTFGIPEDFDYID

SEQ ID NO: 34630 - protein, 119 aa, Homo sapiens
MRPVDADEAREPREEPGSPLSPAPRAGRENLASLERERARAHWRARRKLLEIQSLLDAIKSEVEAEERGARAPAPRPRAEAEERVARLCAEAERKAAEAARMGRRIVELHQRIAGCECC

SEQ ID NO: 34631 - protein, 182 aa, Homo sapiens
MARLLWLLRGLTLGTAPRRAVRGQAGGGGPGTGPGLGEAGSLATCELPLAKSEWQKKLTPEQFYVTREKGTEPPFSGIYLNNKEAGMYHCVCCDSPLFSSEKKYCSGTGWPSFSEAHGTSGSDESHTGILRRLDTSLGSARTEVVCKQCEAHLGHVFPDGPGPNGQRFCINSVALKFKPRKH

SEQ ID NO: 34632 - protein, 116 aa, Homo sapiens
  MOD_RES (95)..(95): Selenocysteine
MSFCSFFGGEVFQNHFEPGVYVCAKCGYELFSSRSKYAHSSPWPAFTETIHADSVAKRPEHNRSEALKVSCGKCGNGLGHEFLNDGPKPGQSRFXIFSSSLKFVPKGKETSASQGH

SEQ ID NO: 34633 - protein, 566 aa, Homo sapiens
MKMQKGNVLLMFGLLLHLEAATNSNETSTSANTGSSVISSGASTATNSGSSVTSSGVSTATISGSSVTSNGVSIVTNSEFHTTSSGISTATNSEFSTVSSGISIATNSESSTTSSGASTATNSESSTPSSGASTATNSDSSTTSSGASTATNSDSSTTSSEASTATNSESSTTSSGASTATNSESSTVSSRASTATNSESSTTSSGASTATNSESRTTSNGAGTATNSESSTTSSGASTATNSESSTPSSGAGTATNSESSTTSSGAGTATNSESSTVSSGISTVTNSESSTPSSGANTATNSESSTTSSGANTATNSDSSTTSSGASTATNSESSTTSSGASTATNSESSTTSSGASTATNSGSSTTSSGTSTATNSESSTVSSGASTATTSESSTTSSGASTATNSESSTVSSGASTATNSESSTTSSGANTATNSGSSVTSAGSGTAALTGMHTTSHSASTAVSEAKPGGSLVPWEIFLITLVSVVAAVGLFAGLFFCVRNSLSLRNTFNTAVYHPHGLNHGLGPGPGGNHGAPHRPRWSPNWFWRRPVSSIAMEMSGRNSGP

SEQ ID NO: 34634 - protein, 596 aa, Homo sapiens
MKMQKGNVLLMFGLLLHLEAATNSNETSTSANTGSSVISSGASTATNSGSSVTSSGVSTATISGSSVTSNGVSIVTNSEFHTTSSGISTATNSEFSTVSSGISIATNSESSTTSSGASTATNSESSTPSSGASTVTNSGSSVTSSGASTATNSESSTVSSRASTATNSDSSTTSSGASTATNSDSSTTSSEASTATNSESSTTSSGASTATNSESSTVSSRASTATNSESSTTSSGASTATNSESRTTSNGAGTATNSESSTTSSGASTATNSESSTPSSGAGTATNSESSTTSSGAGTATNSESSTVSSGISTVTNSESSTPSSGANTATNSESSTTSSGANTATNSDSSTTSSGASTATNSESSTTSSGASTATNSESSTTSSGASTATNSGSSTTSSGTSTATNSESSTVSSGASTATTSESSTTSSGASTATNSESSTVSSGASTATNSESSTTSSGANTATNSGSSVTSAGSGTAALTGMHTTSHSASTAVSEAKPGGSLVPWEIFLITLVSVVAAVGLFAGLFFCVRNSLSLRNTFNTAVYHPHGLNHGLGPGPGGNHGAPHRPRWSPNWFWRRPVSSIAMEMSGRNSGP

SEQ ID NO: 34635 - protein, 416 aa, Homo sapiens
MKMQKGNVLLMFGLLLHLEAATNSNETSTSANTGSSVISSGASTATNSGSSVTSSGVSTATISGSSVTSNGVSIVTNSEFHTTSSGISTATNSEFSTVSSGISIATNSESSTTSSGASTATNSESSTPSSGASTATNSDSSTTSSGASTATNSDSSTTSSEASTATNSESSTTSSGASTATNSESSTTSSGASTATNSESSTTSSGASTATNSGSSTTSSGTSTATNSESSTVSSGASTATTSESSTTSSGASTATNSESSTVSSGASTATNSESSTTSSGANTATNSGSSVTSAGSGTAALTGMHTTSHSASTAVSEAKPGGSLVPWEIFLITLVSVVAAVGLFAGLFFCVRNSLSLRNTFNTAVYHPHGLNHGLGPGPGGNHGAPHRPRWSPNWFWRRPVSSIAMEMSGRNSGP

SEQ ID NO: 34636 - protein, 305 aa, Homo sapiens
MASRQPEVPALEASAPLGKMSLPIGIYRRAVSYDDTLEDPAPMTPPPSDMGSVPWKPVIPERKYQHLAKVEEGEASLPSPAMTLSSAIDSVDKVPVVKAKATHVIMNSLITKQTQESIQHFERQAGLRDAGYTPHKGLTTEETKYLRVAEALHKLKLQSGEVTKEERQPASAQSTPSTTPHSSPKQRPRGWFTSGSSTALPGPNPSTMDSGSGDKDRNLSDKWSLFGPRSLQKYDSGSFATQAYRGAQKPSPLELIRAQANRMAEDPAALKPPKMDIPVMEGKKQPPRAHNLKPRDLNVLTPTGF

SEQ ID NO: 34637 - protein, 286 aa, Homo sapiens
MSLPIGIYRRAVSYDDTLEDPAPMTPPPSDMGSVPWKPVIPERKYQHLAKVEEGEASLPSPAMTLSSAIDSVDKVPVVKAKATHVIMNSLITKQTQESIQHFERQAGLRDAGYTPHKGLTTEETKYLRVAEALHKLKLQSGEVTKEERQPASAQSTPSTTPHSSPKQRPRGWFTSGSSTALPGPNPSTMDSGSGDKDRNLSDKWSLFGPRSLQKYDSGSFATQAYRGAQKPSPLELIRAQANRMAEDPAALKPPKMDIPVMEGKKQPPRAHNLKPRDLNVLTPTGF

SEQ ID NO: 34638 - protein, 98 aa, Homo sapiens
MDSGSGDKDRNLSDKWSLFGPRSLQKYDSGSFATQAYRGAQKPSPLELIRAQANRMAEDPAALKPPKMDIPVMEGKKQPPRAHNLKPRDLNVLTPTGF

SEQ ID NO: 34639 - protein, 312 aa, Homo sapiens
MAAPLELSCWGGGWGLPSVHSESLVVMAYAKFSGAPLKVNVIDNTWRGSRGDVPILTTEDDMVSQPAKILNFLRKQKYNADYELSAKQGADTLAYIALLEEKLLPAVLHTFWVESDNYFTVTKPWFASQIPFPLSLILPGRMSKGALNRILLTRGQPPLYHLREVEAQIYRDAKECLNLLSNRLGTSQFFFGDTPSTLDAYVFGFLAPLYKVRFPKVQLQEHLKQLSNLCRFCDDILSSYFRLSLGGISPAGQETVDANLQKLTQLVNKESNLIEKMDDNLRQSPQLPPRKLPTLKLTPAEEENNSFQRLSP

SEQ ID NO: 34640 - protein, 158 aa, Homo sapiens
MAAPLELSCWGGGWGLPSVHSESLVVMAYAKFSGAPLKVNVIDNTWRGSRGDVPILTTEDDMVSQPAKILNFLRKQKYNADYELSAKQGADTLAYIALLEEKLLPAVLHTFWVESDNYFTVTKPWFASQIPFPLSLILPGRMSQQILSSRAGTHMLRK

SEQ ID NO: 34641 - protein, 248 aa, Homo sapiens
MAAPLELSCWGGGWGLPSVHSESLVVMAYAKFSGAPLKVNVIDNTWRGSRGDVPILTTEDDMVSQPAKILNFLRKQKYNADYELSAKQGADTLAYIALLEEKLLPAVLHTFWVESDNYFTVTKPWFASQIPFPLSLILPGRMSKGALNRILLTRGQPPLYHLREVEAQIYRDAKECLNLLSNRLGTSQFFFGDTPSTLDAYVFGFLAPLYKVRFPKVQLQEHLKQLSNLCRFCDDILSSYFRLSLGDG

SEQ ID NO: 34642 - protein, 251 aa, Homo sapiens
MVSQPAKILNFLRKQKYNADYELSAKQGADTLAYIALLEEKLLPAVLHTFWVESDNYFTVTKPWFASQIPFPLSLILPGRMSKGALNRILLTRGQPPLYHLREVEAQIYRDAKECLNLLSNRLGTSQFFFGDTPSTLDAYVFGFLAPLYKVRFPKVQLQEHLKQLSNLCRFCDDILSSYFRLSLGGISPAGQETVDANLQKLTQLVNKESNLIEKMDDNLRQSPQLPPRKLPTLKLTPAEEENNSFQRLSP

SEQ ID NO: 34643 - protein, 709 aa, Homo sapiens
MESPTKEIEEFESNSLKYLQPEQIEKIWLRLRGLRKYKKTSQRLRSLVKQLERGEASVVDLKKNLEYAATVLESVYIDETRRLLDTEDELSDIQSDAVPSEVRDWLASTFTRQMGMMLRRSDEKPRFKSIVHAVQAGIFVERMYRRTSNMVGLSYPPAVIEALKDVDKWSFDVFSLNEASGDHALKFIFYELLTRYDLISRFKIPISALVSFVEALEVGYSKHKNPYHNLMHAADVTQTVHYLLYKTGVANWLTELEIFAIIFSAAIHDYEHTGTTNNFHIQTRSDPAILYNDRSVLENHHLSAAYRLLQDDEEMNILINLSKDDWREFRTLVIEMVMATDMSCHFQQIKAMKTALQQPEAIEKPKALSLMLHTADISHPAKAWDLHHRWTMSLLEEFFRQGDREAELGLPFSPLCDRKSTMVAQSQVGFIDFIVEPTFTVLTDMTEKIVSPLIDETSQTGGTGQRRSSLNSISSSDAKRSGVKTSGSEGSAPINNSVISVDYKSFKATWTEVVHINRERWRAKVPKEEKAKKEAEEKARLAAEEQQKEMEAKSQAEEGASGKAEKKTSGETKNQVNGTRANKSDNPRGKNSKAEKSSGEQQQNGDFKDGKNKTDKKDHSNIGNDSKKTDGTKQRSHGSPAPSTSSTCRLTLPVIKPPLRHFKRPAYASSSYAPSVSKKTDEHPARYKMLDQRIKMKKIQNISHNWNRK

SEQ ID NO: 34644 - protein, 634 aa, Homo sapiens
MESPTKEIEEFESNSLKYLQPEQIEKIWLRLRGLRKYKKTSQRLRSLVKQLERGEASVVDLKKNLEYAATVLESVYIDETRRLLDTEDELSDIQSDAVPSEVRDWLASTFTRQMGMMLRRSDEKPRFKSIVHAVQAGIFVERMYRRTSNMVGLSYPPAVIEALKDVDKWSFDVFSLNEASGDHALKFIFYELLTRYDLISRFKIPISALVSFVEALEVGYSKHKNPYHNLMHAADVTQTVHYLLYKTGVANWLTELEIFAIIFSAAIHDYEHTGTTNNFHIQTRSDPAILYNDRSVLENHHLSAAYRLLQDDEEMNILINLSKDDWREFRTLVIEMVMATDMSCHFQQIKAMKTALQQPEAIEKPKALSLMLHTADISHPAKAWDLHHRWTMSLLEEFFRQGDREAELGLPFSPLCDRKSTMVAQSQVGFIDFIVEPTFTVLTDMTEKIVSPLIDETSQTGGTGQRRSSLNSISSSDAKRSGVKTSGSEGSAPINNSVISVDYKSFKATWTEVVHINRERWRAKVPKEEKAKKEAEEKARLAAEEQQKEMEAKSQAEEGASGKAEKKTSGETKNQVNGTRANKSDNPRGKNSKAEKSSGEQQQNGDFKDGKNKTDKKDHSNIGNDSKKTDDSQE

SEQ ID NO: 34645 - protein, 769 aa, Homo sapiens
MTDAGNRKEGFKKCRSATFSIDGYSFTIVANEAGDKNARPLARFSRSKSQNCLWNSLIDGLTGNVKEKPRPTIVHDPRPPEEILADELPQLDSSEVLVKTSQRLRSLVKQLERGEASVVDLKKNLEYAATVLESVYIDETRRLLDTEDELSDIQSDAVPSEVRDWLASTFTRQMGMMLRRSDEKPRFKSIVHAVQAGIFVERMYRRTSNMVGLSYPPAVIEALKDVDKWSFDVFSLNEASGDHALKFIFYELLTRYDLISRFKIPISALVSFVEALEVGYSKHKNPYHNLMHAADVTQTVHYLLYKTGVANWLTELEIFAIIFSAAIHDYEHTGTTNNFHIQTRSDPAILYNDRSVLENHHLSAAYRLLQDDEEMNILINLSKDDWREFRTLVIEMVMATDMSCHFQQIKAMKTALQQPEAIEKPKALSLMLHTADISHPAKAWDLHHRWTMSLLEEFFRQGDREAELGLPFSPLCDRKSTMVAQSQVGFIDFIVEPTFTVLTDMTEKIVSPLIDETSQTGGTGQRRSSLNSISSSDAKRSGVKTSGSEGSAPINNSVISVDYKSFKATWTEVVHINRERWRAKVPKEEKAKKEAEEKARLAAEEQQKEMEAKSQAEEGASGKAEKKTSGETKNQVNGTRANKSDNPRGKNSKAEKSSGEQQQNGDFKDGKNKTDKKDHSNIGNDSKKTDGTKQRSHGSPAPSTSSTCRLTLPVIKPPLRHFKRPAYASSSYAPSVSKKTDEHPARYKMLDQRIKMKKIQNISHNWNRK

SEQ ID NO: 34646 - protein, 263 aa, Homo sapiens
MLLAWVQAFLVSNMLLAEAYGSGGCFWDNGHLYREDQTSPAPGLRCLNWLDAQSGLASAPVSGAGNHSYCRNPDEDPRGPWCYVSGEAGVPEKRPCEDLRCPETTSQALPAFTTEIQEASEGPGADEVQVFAPANALPARSEAAAVQPVIGISQRVRMNSKEKKDLGTLGYVLGITMMVIIIAIGAGIILGYSYKRGKDLKEQHDQKVCEREMQRITLPLSAFTNPTCEIVDEKTVVVHTSQTPVDPQEGTTPLMGQAGTPGA

SEQ ID NO: 34647 - protein, 234 aa, Homo sapiens
MLLAWVQAFLVSNMLLAEAYGSGGCFWDNGHLYREDQTSPAPGLRCLNWLDAQSGLASAPVSGAGNHSYCRNPDEDPRGPWCYVSGEAGVPEKRPCEDLRCPETTSQALPAFTTEIQEASEGPGADEVQVFAPANALPARSEAAAVQPVIGISQRVRMNSKEKKDLGTLGYVLGITMMVIIIAIGAGIILGYSYKRSVASLLGPLRRRGGRYTKSNFVAFLPKRKQDVENQLKM

SEQ ID NO: 34648 - protein, 106 aa, Homo sapiens
MNSKEKKDLGTLGYVLGITMMVIIIAIGAGIILGYSYKRGKDLKEQHDQKVCEREMQRITLPLSAFTNPTCEIVDEKTVVVHTSQTPVDPQEGTTPLMGQAGTPGA

SEQ ID NO: 34649 - protein, 173 aa, Homo sapiens
MLLAWVQAFLVSNMLLAEAYGSGGCFWDNGHLYREDQTSPAPGLRCLNWLDAQSGLASAPVSGAGNHSYCRNPDEDPRGPWCYVSGEAGVPEKRPCEDLRCPETTSQALPAFTTEIQEASEGPGADEVQVFAPANALPARSEAAAVQPVIGISQRVRMNSKEKKDLGTLGGRI

SEQ ID NO: 34650 - protein, 184 aa, Homo sapiens
MLLAWVQAFLVSNMLLAEAYGSGETTSQALPAFTTEIQEASEGPGADEVQVFAPANALPARSEAAAVQPVIGISQRVRMNSKEKKDLGTLGYVLGITMMVIIIAIGAGIILGYSYKRGKDLKEQHDQKVCEREMQRITLPLSAFTNPTCEIVDEKTVVVHTSQTPVDPQEGTTPLMGQAGTPGA

SEQ ID NO: 34651 - protein, 709 aa, Homo sapiens
MWWGGRGQSFNIAPQKEEPEMGSVQENRMPEPRSRQPSSCLASRCLPGEQILAWAPGVRKGLEPELSGTLICTNFRVTFQPCGWQWNQDTPLNSEYDFALVNIGRLEAVSGLSRVQLLRPGSLHKFIPEEILIHGRDFRLLRVGFEAGGLEPQAFQVTMAIVQARAQSNQAQQYSGITLSKAGQGSGSRKPPIPLMETAEDWETERKKQAARGWRVSTVNERFDVATSLPRYFWVPNRILDSEVRRAFGHFHQGRGPRLSWHHPGGSDLLRCGGFYTASDPNKEDIRAVELMLQAGHSDVVLVDTMDELPSLADVQLAHLRLRALCLPDSSVAEDKWLSALEGTRWLDYVRACLRKASDISVLVTSRVRSVILQERGDRDLNGLLSSLVQLLSAPEARTLFGFQSLVQREWVAAGHPFLTRLGGTGASEEAPVFLLFLDCVWQLLQQFPADFEFSEFFLLALHDSVRVPDTLTFLRNTPWERGKQSGQLNSYTQVYTPGYSQPPAGNSFNLQLSVWDWDLRYSNAQILQFQNPGYDPEHCPDSWLPRPQPSFMVPGPPSSVWLFSRGALTPLNQLCPWRDSPSLLAVSSRWLPRPAISSESLADQEWGLPSHWGACPLPPGLLLPGYLGPQIRLWRRCYLRGRPEVQMGLSAPTISGLQDELSHLQELLRKWTPRISPEDHSKKRDPHTILNPTEIAGILKGRAEGDLG

SEQ ID NO: 34652 - protein, 268 aa, Homo sapiens
MWWGGRGQSFNIAPQKEEPEMGSVQENRMPEPRSRQPSSCLASRCLPGEQILAWAPGVRKGLEPELSGTLICTNFRVTFQPCGWQWNQDTPLNSEYDFALVNIGRLEAVSGLSRVQLLRPGSLHKFIPEEILIHGRDFRLLRVGFEAGGLEPQAFQVTMAIVQARAQSNQAQQYSGITLSKAGQGSGSRKPPIPLMETAEDWETERKKQAARGWRVSTVNERFDVATSLPRYFWVPNRILDSEVRRAFGHFHQGRGPVSVMVRVMAVD

SEQ ID NO: 34653 - protein, 240 aa, Homo sapiens
MPEPRSRQPSSCLASRCLPGEQILAWAPGVRKGLEPELSGTLICTNFRVTFQPCGWQWNQDTPLNSEYDFALVNIGRLEAVSGLSRVQLLRPGSLHKFIPEEILIHGRDFRLLRVGFEAGGLEPQAFQVTMAIVQARAQSNQAQQYSGITLSKAGQGSGSRKPPIPLMETAEDWETERKKQAARGWRVSTVNERFDVATSLPRYFWVPNRILDSEVRRAFGHFHQGRGPVSVMVRVMAVD

SEQ ID NO: 34654 - protein, 640 aa, Homo sapiens
MPPRVTFQPCGWQWNQDTPLNSEYDFALVNIGRLEAVSGLSRVQLLRPGSLHKFIPEEILIHGRDFRLLRVGFEAGGLEPQAFQVTMAIVQARAQSNQAQQYSGITLSKAGQGSGSRKPPIPLMETAEDWETERKKQAARGWRVSTVNERFDVATSLPRYFWVPNRILDSEVRRAFGHFHQGRGPRLSWHHPGGSDLLRCGGFYTASDPNKEDIRAVELMLQAGHSDVVLVDTMDELPSLADVQLAHLRLRALCLPDSSVAEDKWLSALEGTRWLDYVRACLRKASDISVLVTSRVRSVILQERGDRDLNGLLSSLVQLLSAPEARTLFGFQSLVQREWVAAGHPFLTRLGGTGASEEAPVFLLFLDCVWQLLQQFPADFEFSEFFLLALHDSVRVPDTLTFLRNTPWERGKQSGQLNSYTQVYTPGYSQPPAGNSFNLQLSVWDWDLRYSNAQILQFQNPGYDPEHCPDSWLPRPQPSFMVPGPPSSVWLFSRGALTPLNQLCPWRDSPSLLAVSSRWLPRPAISSESLADQEWGLPSHWGACPLPPGLLLPGYLGPQIRLWRRCYLRGRPEVQMGLSAPTISGLQDELSHLQELLRKWTPRISPEDHSKKRDPHTILNPTEIAGILKGQSHPFWITRC

SEQ ID NO: 34655 - protein, 272 aa, Homo sapiens
MWWGGRGQSFNIAPQKEEPEMGSVQENRMPEPRSRQPSSCLASRCLPGEQILAWAPGVRKGLEPELSGTLICTNFRVTFQPCGWQWNQDTPLNSEYDFALVNIGRLEAVSGLSRVQLLRPGSLHKFIPEEILIHGRDFRLLRVGFEAGGLEPQAFQVTMAIVQARAQSNQAQQYSGITLSKAGQGSGSRKPPIPLMETAEDWETERKKQAARGWRVSTVNERFDVATRLRCFSSSLIVSGSSSSSFQLILNSLSFSFLLFMTVSGFLTPLPS

SEQ ID NO: 34656 - protein, 354 aa, Homo sapiens
MPEPRSRQPSSCLASRCLPGEQILAWAPGVRKGLEPELSGTLICTNFRVTFQPCGWQWNQDTPLNSEYDFALVNIGRLEAVSGLSRVQLLRPGSLHKFIPEEILIHGRDFRLLRVGFEAGGLEPQAFQVTMAIVQARAQSNQAQQYSGITLSKAGQGSGSRKPPIPLMETAEDWETERKKQAARGWRVSTVNERFDVATSLPRYFWVPNRILDSEVRRAFGHFHQGRGPRLSWHHPGGSDLLRCGGFYTASDPNKEDIRAVELMLQAGHSDVVLVDTMDELPSLADVQLAHLRLRALCLPDSSVAEDKWLSALEGTRWLDYVRACLRKASDISVLVTSRVRSVILQGSGVSPLP

SEQ ID NO: 34657 - protein, 660 aa, Homo sapiens
MEHIRTPKVENVRLVDRVSPKKAALGTLYLTATHVIFVENSPDPRKETWILHSQISTIEKQATTATGCPLLIRCKNFQIIQLIIPQERDCHDVYISLIRLARPVKYEELYCFSFNPMLDKEEREQGWVLIDLSEEYTRMGLPNHYWQLSDVNRDYRVCDSYPTELYVPKSATAHIIVGSSKFRSRRRFPVLSYYYKDNHASICRSSQPLSGFSARCLEDEQMLQAIRKANPGSDFVYVVDTRPKLNAMANRAAGKGYENEDNYSNIKFQFIGIENIHVMRNSLQKMLEVCELKSPSMSDFLWGLENSGWLRHIKAIMDAGIFIAKAVSEEGASVLVHCSDGWDRTAQVCSVASLLLDPHYRTLKGFMVLIEKDWISFGHKFNHRYGNLDGDPKEISPVIDQFIECVWQLMEQFPCAFEFNERFLIHIQHHIYSCQFGNFLCNSQKERRELKIQERTYSLWAHLWKNRADYLNPLFRADHSQTQGTLHLPTTPCNFMYKFWSGMYNRFEKGMQPRQSVTDYLMAVKEETQQLEEELEALEERLEKIQKVQLNCTKVKSKQSEPSKHSGFSTSDNSIANTPQDYSGNMKSFPSRSPSQGDEDSALILTQDNLKSSDPDLSANSDQESGVEDLSCRSPSGGEHAPSEDSGKDRDSDEAVFLTA

SEQ ID NO: 34658 - protein, 555 aa, Homo sapiens
MEHIRTPKVENVRLVDRVSPKKAALGTLYLTATHVIFVENSPDPRKETWILHSQISTIEKQATTATGCPLLIRCKNFQIIQLIIPQERDCHDVYISLIRLARPVKYEELYCFSFNPMLDKEEREQGWVLIDLSEEYTRMGLPNHYWQLSDVNRDYRVCDSYPTELYVPKSATAHIIVGSSKFRSRRRFPVLSYYYKDNHASICRSSQPLSGFSARCLEDEQMLQAIRKANPGSDFVYVVDTRPKLNAMANRAAGKGYENEDNYSNIKFQFIGIENIHVMRNSLQKMLEVCELKSPSMSDFLWGLENSGWLRHIKAIMDAGIFIAKAVSEEGASVLVHCSDGWDRTAQVCSVASLLLDPHYRTLKGFMVLIEKDWISFGHKFNHRYGNLDGDPKEISPVIDQFIECVWQLMEQFPCAFEFNERFLIHIQHHIYSCQFGNFLCNSQKERRELKIQERTYSLWAHLWKNRADYLNPLFRADHSQTQGTLHLPTTPCNFMYKFWSGMYNRFEKGMQPRQSVTDYLMAVKEETQQLEEELEALEEVRHTCFVNLFSVLIS

SEQ ID NO: 34659 - protein, 235 aa, Homo sapiens
MNIRNARPEDLMNMQHCNLLCLPENYQMKYYFYHGLSWPQLSYIAEDENGKIVGYVLAKMEEDPDDVPHGHITSLAVKRSHRRLGLAQKLMDQASRAMIENFNAKYVSLHVRKSNRAALHLYSNTLNFQISEVEPKYYADGEDAYAMKRDLTQMADELRRHLELKEKGRHVVLGAIENKVESKGNSPPSSGEACREEKGLAAEDSGGDSKDLSEVSETTESTDVKDSSEASDSAS

SEQ ID NO: 34660 - protein, 220 aa, Homo sapiens
MNIRNARPEDLMNMQHCNLLCLPENYQMKYYFYHGLSWPQLSYIAEDENGKIVGYVLAKMEEDPDDVPHGHITSLAVKRSHRRLGLAQKLMDQASRAMIENFNAKYVSLHVRKRISEVEPKYYADGEDAYAMKRDLTQMADELRRHLELKEKGRHVVLGAIENKVESKGNSPPSSGEACREEKGLAAEDSGGDSKDLSEVSETTESTDVKDSSEASDSAS

SEQ ID NO: 34661 - protein, 1972 aa, Homo sapiens
MAQKGQLSDDEKFLFVDKNFINSPVAQADWAAKRLVWVPSEKQGFEAASIKEEKGDEVVVELVENGKKVTVGKDDIQKMNPPKFSKVEDMAELTCLNEASVLHNLRERYFSGLIYTYSGLFCVVVNPYKHLPIYSEKIVDMYKGKKRHEMPPHIYAIADTAYRSMLQDREDQSILCTGESGAGKTENTKKVIQYLAVVASSHKGKKDTSITGELEKQLLQANPILEAFGNAKTVKNDNSSRFGKFIRINFDVTGYIVGANIETYLLEKSRAIRQARDERTFHIFYYMIAGAKEKMRSDLLLEGFNNYTFLSNGFVPIPAAQDDEMFQETVEAMAIMGFSEEEQLSILKVVSSVLQLGNIVFKKERNTDQASMPDNTAAQKVCHLMGINVTDFTRSILTPRIKVGRDVVQKAQTKEQADFAVEALAKATYERLFRWILTRVNKALDKTHRQGASFLGILDIAGFEIFEVNSFEQLCINYTNEKLQQLFNHTMFILEQEEYQREGIEWNFIDFGLDLQPCIELIERPNNPPGVLALLDEECWFPKATDKSFVEKLCTEQGSHPKFQKPKQLKDKTEFSIIHYAGKVDYNASAWLTKNMDPLNDNVTSLLNASSDKFVADLWKDVDRIVGLDQMAKMTESSLPSASKTKKGMFRTVGQLYKEQLGKLMTTLRNTTPNFVRCIIPNHEKRSGKLDAFLVLEQLRCNGVLEGIRICRQGFPNRIVFQEFRQRYEILAANAIPKGFMDGKQACILMIKALELDPNLYRIGQSKIFFRTGVLAHLEEERDLKITDVIMAFQAMCRGYLARKAFAKRQQQLTAMKVIQRNCAAYLKLRNWQWWRLFTKVKPLLQVTRQEEEMQAKEDELQKTKERQQKAENELKELEQKHSQLTEEKNLLQEQLQAETELYAEAEEMRVRLAAKKQELEEILHEMEARLEEEEDRGQQLQAERKKMAQQMLDLEEQLEEEEAARQKLQLEKVTAEAKIKKLEDEILVMDDQNNKLSKERKLLEERISDLTTNLAEEEEKAKNLTKLKNKHESMISELEVRLKKEEKSRQELEKLKRKLEGDASDFHEQIADLQAQIAELKMQLAKKEEELQAALARLDDEIAQKNNALKKIRELEGHISDLQEDLDSERAARNKAEKQKRDLGEELEALKTELEDTLDSTATQQELRAKREQEVTVLKKALDEETRSHEAQVQEMRQKHAQAVEELTEQLEQFKRAKANLDKNKQTLEKENADLAGELRVLGQAKQEVEHKKKKLEAQVQELQSKCSDGERARAELNDKVHKLQNEVESVTGMLNEAEGKAIKLAKDVASLSSQLQDTQELLQEETRQKLNVSTKLRQLEEERNSLQDQLDEEMEAKQNLERHISTLNIQLSDSKKKLQDFASTVEALEEGKKRFQKEIENLTQQYEEKAAAYDKLEKTKNRLQQELDDLVVDLDNQRQLVSNLEKKQRKFDQLLAEEKNISSKYADERDRAEAEAREKETKALSLARALEEALEAKEELERTNKMLKAEMEDLVSSKDDVGKNVHELEKSKRALETQMEEMKTQLEELEDELQATEDAKLRLEVNMQALKGQFERDLQARDEQNEEKRRQLQRQLHEYETELEDERKQRALAAAAKKKLEGDLKDLELQADSAIKGREEAIKQLRKLQAQMKDFQRELEDARASRDEIFATAKENEKKAKSLEADLMQLQEDLAAAERARKQADLEKEELAEELASSLSGRNALQDEKRRLEARIAQLEEELEEEQGNMEAMSDRVRKATQQAEQLSNELATERSTAQKNESARQQLERQNKELRSKLHEMEGAVKSKFKSTIAALEAKIAQLEEQVEQEAREKQAATKSLKQKDKKLKEILLQVEDERKMAEQYKEQAEKGNARVKQLKRQLEEAEEESQRINANRRKLQRELDEATESNEAMGREVNALKSKLRRGNETSFVPSRRSGGRRVIENADGSEEETDTRDADFNGTKASE

SEQ ID NO: 34662 - protein, 1979 aa, Homo sapiens
MAQKGQLSDDEKFLFVDKNFINSPVAQADWAAKRLVWVPSEKQGFEAASIKEEKGDEVVVELVENGKKVTVGKDDIQKMNPPKFSKVEDMAELTCLNEASVLHNLRERYFSGLIYTYSGLFCVVVNPYKHLPIYSEKIVDMYKGKKRHEMPPHIYAIADTAYRSMLQDREDQSILCTGESGAGKTENTKKVIQYLAVVASSHKGKKDTSITQGPSFAYGELEKQLLQANPILEAFGNAKTVKNDNSSRFGKFIRINFDVTGYIVGANIETYLLEKSRAIRQARDERTFHIFYYMIAGAKEKMRSDLLLEGFNNYTFLSNGFVPIPAAQDDEMFQETVEAMAIMGFSEEEQLSILKVVSSVLQLGNIVFKKERNTDQASMPDNTAAQKVCHLMGINVTDFTRSILTPRIKVGRDVVQKAQTKEQADFAVEALAKATYERLFRWILTRVNKALDKTHRQGASFLGILDIAGFEIFEVNSFEQLCINYTNEKLQQLFNHTMFILEQEEYQREGIEWNFIDFGLDLQPCIELIERPNNPPGVLALLDEECWFPKATDKSFVEKLCTEQGSHPKFQKPKQLKDKTEFSIIHYAGKVDYNASAWLTKNMDPLNDNVTSLLNASSDKFVADLWKDVDRIVGLDQMAKMTESSLPSASKTKKGMFRTVGQLYKEQLGKLMTTLRNTTPNFVRCIIPNHEKRSGKLDAFLVLEQLRCNGVLEGIRICRQGFPNRIVFQEFRQRYEILAANAIPKGFMDGKQACILMIKALELDPNLYRIGQSKIFFRTGVLAHLEEERDLKITDVIMAFQAMCRGYLARKAFAKRQQQLTAMKVIQRNCAAYLKLRNWQWWRLFTKVKPLLQVTRQEEEMQAKEDELQKTKERQQKAENELKELEQKHSQLTEEKNLLQEQLQAETELYAEAEEMRVRLAAKKQELEEILHEMEARLEEEEDRGQQLQAERKKMAQQMLDLEEQLEEEEAARQKLQLEKVTAEAKIKKLEDEILVMDDQNNKLSKERKLLEERISDLTTNLAEEEEKAKNLTKLKNKHESMISELEVRLKKEEKSRQELEKLKRKLEGDASDFHEQIADLQAQIAELKMQLAKKEEELQAALARLDDEIAQKNNALKKIRELEGHISDLQEDLDSERAARNKAEKQKRDLGEELEALKTELEDTLDSTATQQELRAKREQEVTVLKKALDEETRSHEAQVQEMRQKHAQAVEELTEQLEQFKRAKANLDKNKQTLEKENADLAGELRVLGQAKQEVEHKKKKLEAQVQELQSKCSDGERARAELNDKVHKLQNEVESVTGMLNEAEGKAIKLAKDVASLSSQLQDTQELLQEETRQKLNVSTKLRQLEEERNSLQDQLDEEMEAKQNLERHISTLNIQLSDSKKKLQDFASTVEALEEGKKRFQKEIENLTQQYEEKAAAYDKLEKTKNRLQQELDDLVVDLDNQRQLVSNLEKKQRKFDQLLAEEKNISSKYADERDRAEAEAREKETKALSLARALEEALEAKEELERTNKMLKAEMEDLVSSKDDVGKNVHELEKSKRALETQMEEMKTQLEELEDELQATEDAKLRLEVNMQALKGQFERDLQARDEQNEEKRRQLQRQLHEYETELEDERKQRALAAAAKKKLEGDLKDLELQADSAIKGREEAIKQLRKLQAQMKDFQRELEDARASRDEIFATAKENEKKAKSLEADLMQLQEDLAAAERARKQADLEKEELAEELASSLSGRNALQDEKRRLEARIAQLEEELEEEQGNMEAMSDRVRKATQQAEQLSNELATERSTAQKNESARQQLERQNKELRSKLHEMEGAVKSKFKSTIAALEAKIAQLEEQVEQEAREKQAATKSLKQKDKKLKEILLQVEDERKMAEQYKEQAEKGNARVKQLKRQLEEAEEESQRINANRRKLQRELDEATESNEAMGREVNALKSKLRRGNETSFVPSRRSGGRRVIENADGSEEETDTRDADFNGTKASE

SEQ ID NO: 34663 - protein, 1945 aa, Homo sapiens
MAQKGQLSDDEKFLFVDKNFINSPVAQADWAAKRLVWVPSEKQGFEAASIKEEKGDEVVVELVENGKKVTVGKDDIQKMNPPKFSKVEDMAELTCLNEASVLHNLRERYFSGLIYTYSGLFCVVVNPYKHLPIYSEKIVDMYKGKKRHEMPPHIYAIADTAYRSMLQDREDQSILCTGESGAGKTENTKKVIQYLAVVASSHKGKKDTSITQGPSFAYGELEKQLLQANPILEAFGNAKTVKNDNSSRFGKFIRINFDVTGYIVGANIETYLLEKSRAIRQARDERTFHIFYYMIAGAKEKMRSDLLLEGFNNYTFLSNGFVPIPAAQDDEMFQETVEAMAIMGFSEEEQLSILKVVSSVLQLGNIVFKKERNTDQASMPDNTAAQKVCHLMGINVTDFTRSILTPRIKVGRDVVQKAQTKEQADFAVEALAKATYERLFRWILTRVNKALDKTHRQGASFLGILDIAGFEIFEVNSFEQLCINYTNEKLQQLFNHTMFILEQEEYQREGIEWNFIDFGLDLQPCIELIERPNNPPGVLALLDEECWFPKATDKSFVEKLCTEQGSHPKFQKPKQLKDKTEFSIIHYAGKVDYNASAWLTKNMDPLNDNVTSLLNASSDKFVADLWKDVDRIVGLDQMAKMTESSLPSASKTKKGMFRTVGQLYKEQLGKLMTTLRNTTPNFVRCIIPNHEKRSGKLDAFLVLEQLRCNGVLEGIRICRQGFPNRIVFQEFRQRYEILAANAIPKGFMDGKQACILMIKALELDPNLYRIGQSKIFFRTGVLAHLEEERDLKITDVIMAFQAMCRGYLARKAFAKRQQQLTAMKVIQRNCAAYLKLRNWQWWRLFTKVKPLLQVTRQEEEMQAKEDELQKTKERQQKAENELKELEQKHSQLTEEKNLLQEQLQAETELYAEAEEMRVRLAAKKQELEEILHEMEARLEEEEDRGQQLQAERKKMAQQMLDLEEQLEEEEAARQKLQLEKVTAEAKIKKLEDEILVMDDQNNKLSKERKLLEERISDLTTNLAEEEEKAKNLTKLKNKHESMISELEVRLKKEEKSRQELEKLKRKLEGDASDFHEQIADLQAQIAELKMQLAKKEEELQAALARLDDEIAQKNNALKKIRELEGHISDLQEDLDSERAARNKAEKQKRDLGEELEALKTELEDTLDSTATQQELRAKREQEVTVLKKALDEETRSHEAQVQEMRQKHAQAVEELTEQLEQFKRAKANLDKNKQTLEKENADLAGELRVLGQAKQEVEHKKKKLEAQVQELQSKCSDGERARAELNDKVHKLQNEVESVTGMLNEAEGKAIKLAKDVASLSSQLQDTQELLQEETRQKLNVSTKLRQLEEERNSLQDQLDEEMEAKQNLERHISTLNIQLSDSKKKLQDFASTVEALEEGKKRFQKEIENLTQQYEEKAAAYDKLEKTKNRLQQELDDLVVDLDNQRQLVSNLEKKQRKFDQLLAEEKNISSKYADERDRAEAEAREKETKALSLARALEEALEAKEELERTNKMLKAEMEDLVSSKDDVGKNVHELEKSKRALETQMEEMKTQLEELEDELQATEDAKLRLEVNMQALKGQFERDLQARDEQNEEKRRQLQRQLHEYETELEDERKQRALAAAAKKKLEGDLKDLELQADSAIKGREEAIKQLRKLQAQMKDFQRELEDARASRDEIFATAKENEKKAKSLEADLMQLQEDLAAAERARKQADLEKEELAEELASSLSGRNALQDEKRRLEARIAQLEEELEEEQGNMEAMSDRVRKATQQAEQLSNELATERSTAQKNESARQQLERQNKELRSKLHEMEGAVKSKFKSTIAALEAKIAQLEEQVEQEAREKQAATKSLKQKDKKLKEILLQVEDERKMAEQYKEQAEKGNARVKQLKRQLEEAEEESQRINANRRKLQRELDEATESNEAMGREVNALKSKLRGPPPQETSQ

SEQ ID NO: 34664 - protein, 1938 aa, Homo sapiens
MAQKGQLSDDEKFLFVDKNFINSPVAQADWAAKRLVWVPSEKQGFEAASIKEEKGDEVVVELVENGKKVTVGKDDIQKMNPPKFSKVEDMAELTCLNEASVLHNLRERYFSGLIYTYSGLFCVVVNPYKHLPIYSEKIVDMYKGKKRHEMPPHIYAIADTAYRSMLQDREDQSILCTGESGAGKTENTKKVIQYLAVVASSHKGKKDTSITGELEKQLLQANPILEAFGNAKTVKNDNSSRFGKFIRINFDVTGYIVGANIETYLLEKSRAIRQARDERTFHIFYYMIAGAKEKMRSDLLLEGFNNYTFLSNGFVPIPAAQDDEMFQETVEAMAIMGFSEEEQLSILKVVSSVLQLGNIVFKKERNTDQASMPDNTAAQKVCHLMGINVTDFTRSILTPRIKVGRDVVQKAQTKEQADFAVEALAKATYERLFRWILTRVNKALDKTHRQGASFLGILDIAGFEIFEVNSFEQLCINYTNEKLQQLFNHTMFILEQEEYQREGIEWNFIDFGLDLQPCIELIERPNNPPGVLALLDEECWFPKATDKSFVEKLCTEQGSHPKFQKPKQLKDKTEFSIIHYAGKVDYNASAWLTKNMDPLNDNVTSLLNASSDKFVADLWKDVDRIVGLDQMAKMTESSLPSASKTKKGMFRTVGQLYKEQLGKLMTTLRNTTPNFVRCIIPNHEKRSGKLDAFLVLEQLRCNGVLEGIRICRQGFPNRIVFQEFRQRYEILAANAIPKGFMDGKQACILMIKALELDPNLYRIGQSKIFFRTGVLAHLEEERDLKITDVIMAFQAMCRGYLARKAFAKRQQQLTAMKVIQRNCAAYLKLRNWQWWRLFTKVKPLLQVTRQEEEMQAKEDELQKTKERQQKAENELKELEQKHSQLTEEKNLLQEQLQAETELYAEAEEMRVRLAAKKQELEEILHEMEARLEEEEDRGQQLQAERKKMAQQMLDLEEQLEEEEAARQKLQLEKVTAEAKIKKLEDEILVMDDQNNKLSKERKLLEERISDLTTNLAEEEEKAKNLTKLKNKHESMISELEVRLKKEEKSRQELEKLKRKLEGDASDFHEQIADLQAQIAELKMQLAKKEEELQAALARLDDEIAQKNNALKKIRELEGHISDLQEDLDSERAARNKAEKQKRDLGEELEALKTELEDTLDSTATQQELRAKREQEVTVLKKALDEETRSHEAQVQEMRQKHAQAVEELTEQLEQFKRAKANLDKNKQTLEKENADLAGELRVLGQAKQEVEHKKKKLEAQVQELQSKCSDGERARAELNDKVHKLQNEVESVTGMLNEAEGKAIKLAKDVASLSSQLQDTQELLQEETRQKLNVSTKLRQLEEERNSLQDQLDEEMEAKQNLERHISTLNIQLSDSKKKLQDFASTVEALEEGKKRFQKEIENLTQQYEEKAAAYDKLEKTKNRLQQELDDLVVDLDNQRQLVSNLEKKQRKFDQLLAEEKNISSKYADERDRAEAEAREKETKALSLARALEEALEAKEELERTNKMLKAEMEDLVSSKDDVGKNVHELEKSKRALETQMEEMKTQLEELEDELQATEDAKLRLEVNMQALKGQFERDLQARDEQNEEKRRQLQRQLHEYETELEDERKQRALAAAAKKKLEGDLKDLELQADSAIKGREEAIKQLRKLQAQMKDFQRELEDARASRDEIFATAKENEKKAKSLEADLMQLQEDLAAAERARKQADLEKEELAEELASSLSGRNALQDEKRRLEARIAQLEEELEEEQGNMEAMSDRVRKATQQAEQLSNELATERSTAQKNESARQQLERQNKELRSKLHEMEGAVKSKFKSTIAALEAKIAQLEEQVEQEAREKQAATKSLKQKDKKLKEILLQVEDERKMAEQYKEQAEKGNARVKQLKRQLEEAEEESQRINANRRKLQRELDEATESNEAMGREVNALKSKLRGPPPQETSQ

SEQ ID NO: 34665 - protein, 1983 aa, Homo sapiens
MSGNKRGSRASCPHRGAECLLPWAALNLQGFQLLLLHPSATAMMDVSELGESARYLRQGYQEMTKVHTIPWDGKKRVWVPDEQDAYVEAEVKSEATGGRVTVETKDQKVLMVREAELQPMNPPRFDLLEDMAMMTHLNEASVLHNLRQRYARWMIYTYSGLFCVTINPYKWLPVYTASVVAAYKGKRRSDSPPHIYAVADNAYNDMLRNRDNQSMLITGESGAGKTVNTKRVIQYFAIVAALGDGPGKKAQFLATKTGGTLEDQIIEANPAMEAFGNAKTLRNDNSSRFGKFIRIHFGPSGKLASADIDSYLLEKSRVIFQLPGERSYHVYYQILSGRKPELQDMLLLSMNPYDYHFCSQGVITVDNMNDGEELIATDHAMDILGFSVDEKCACYKIVGALLHFGNMKFKQKQREEQAEADGTESADKAAYLMGVSSGDLLKGLLHPRVRVGNEYVTKGQSVEQVVFAVGALAKATYDRLFRWLVSRINQTLDTKLPRQFFIGVLDIAGFEIFEFNSFEQLCINFTNEKLQQFFNQHMFVLEQEEYKREGIDWVFIDFGLDLQPCIDLIEKPLGILSILEEECMFPKASDASFRAKLYDNHAGKSPNFQQPRPDKKRKYQAHFEVVHYAGVVPYSIVGWLEKNKDPLNETVVPIFQKSQNRLLATLYENYAGSCSTEPPKSGVKEKRKKAASFQTVSQLHKENLNKLMTNLRATQPHFVRCIVPNENKTPGVMDAFLVLHQLRCNGVLEGIRICRQGFPNRLLYTDFRQRYRILNPSAIPDDTFMDSRKATEKLLGSLDLDHTQYQFGHTKVFFKAGLLGVLEELRDQRLAKVLTLLQARSRGRLMRLEYQRLLGGRDALFTIQWNIRAFNAVKNWSWMKLFFKMKPLLRSAQAEEELAALRAELRGLRGALAAAEAKRQELEETHVSITQEKNDLALQLQAEQDNLADAEERCHLLIKSKVQLEGKVKELSERLEDEEEVNADLAARRRKLEDECTELKKDIDDLELTLAKAEKEKQATENKVKNLTEEMAALDESVARLTKEKKALQEAHQQALGDLQAEEDRVSALTKAKLRLEQQVEDLECSLEQEKKLRMDTERAKRKLEGDLKLTQESVADAAQDKQQLEEKLKKKDSELSQLSLRVEDEQLLGAQMQKKIKELQARAEELEEELEAERAARARVEKQRAEAARELEELSERLEEAGGASAGQREGCRKREAELGRLRRELEEAALRHEATVAALRRKQAEGAAELGEQVDSLQRVRQKLEKEKSELRMEVDDLAANVETLTRAKASAEKLCRTYEDQLSEAKIKVEELQRQLADASTQRGRLQTESGELSRLLEEKECLISQLSRGKALAAQSLEELRRQLEEESKAKSALAHAVQALRHDCDLLREQHEEEAEAQAELQRLLSKANAEVAQWRSKYEADAIQRTEELEEAKKKLALRLQEAEEGVEAANAKCSSLEKAKLRLQTESEDVTLELERATSAAAALDKKQRHLERALEERRRQEEEMQRELEAAQRESRGLGTELFRLRHGHEEALEALETLKRENKNLQEEISDLTDQVSLSGKSIQELEKTKKALEGEKSEIQAALEEAEGALELEETKTLRIQLELSQVKAEVDRKLAEKDEECANLRRNHQRAVESLQASLDAETRARNEALRLKKKMEGDLNDLELQLGHATRQATEAQAATRLMQAQLKEEQAGRDEEQRLAAELHEQAQALERRASLLAAELEELRAALEQGERSRRLAEQELLEATERLNLLHSQNTGLLNQKKKLEADLAQLSGEVEEAAQERREAEEKAKKAITDAAMMAEELKKEQDTSAHLERMKKTLEQTVRELQARLEEAEQAALRGGKKQVQKLEAKVRELEAELDAEQKKHAEALKGVRKHERRVKELAYQAEEDRKNLARMQDLVDKLQSKVKSYKRQFEEAEQQANTNLAKYRKAQHELDDAEERADMAETQANKLRARTRDALGPKHKE

SEQ ID NO: 34666 - protein, 176 aa, Homo sapiens
MMDVSELGESARYLRQGYQEMTKVHTIPWDGKKRVWVPDEQDAYVEAEVKSEATGGRVTVETKDQKVLMVREAELQPMNPPRFDLLEDMAMMTHLNEASVLHNLRQRYARWMIYTYSGLFCVTINPYKWLPVYTASVVAAYKGKRRSDSPPHIYAVADNAYNDMLRNRDNQSMLIT

SEQ ID NO: 34667 - protein, 174 aa, Homo sapiens
MPAMMAEELKKEQDTSAHLERMKKTLEQTVRELQARLEEAEQAALRGGKKQVQKLEAKVRELEAELDAEQKKHAEALKGVRKHERRVKELAYQAEEDRKNLARMQDLVDKLQSKVKSYKRQFEEAEQQANTNLAKYRKAQHELDDAEERADMAETQANKLRARTRDALGPKHKE

SEQ ID NO: 34668 - protein, 2694 aa, Homo sapiens
MASRERLFELWMLYCTKKDPDYLKLWLDTFVSSYEQFLDVDFEKLPTRVDDMPPGISLLPDNILQVLRIQLLQCVQKMADGLEEQQQALSILLVKFFIILCRNLSNVEEIGTCSYINYVITMTTLYIQQLKSKKKEKEMADQTCIEEFVIHALAFCESLYDPYRNWRHRISGRILSTVEKSRQKYKPASLTVEFVPFFYQCFQESEHLKESLKCCLLHLFGAIVAGGQRNALQAISPATMEVLMRVLADCDSWEDGDPEEVGRKAELTLKCLTEVVHILLSSNSDQRQVETSTILENYFKLLNSDHSALPNQRRSRQWENRFIALQIKMLNTITAMLDCTDRPVLQAIFLNSNCFEHLIRLLQNCKVFQGQLDCLAISTIQALTAVMNKSPAAKEVFKERIGYTHMLEVLKSLGQPPLELLKELMNMAVEGDHTSVGILGISNVQPLLLLIQWLPELQSHDLQIFISDWLKRICCINRQSRTTCVNANMGIRIIETLDLHSSLHQTCAENLIAIHGSLGSQSVSSEEIRRLLRLLRVDESESVHPYVTPVTRAILTMARKLSLESALQYFNLSHSMAGISVPPIQKWPGSAFSFSAWFCLDQDQLTLGIANKGGKRKQLYSFFTGSGMGFEAFITHSGMLVVAVCTKREYATVMLPDHSFCDSLWHNITVVHMPGKRPFGQSFVYIYDNGQQKVSAPLRFPAMNEPFTSCCIGSAGQRTTTPPPSQIPDPPFSSPITPHRTSFGGILSSASWGGTIEKSKLITKLISAGTQDSEWGCPTSLEGQLGSVIIFYEPLQPPQVKALYLAGPNCLSPWKCQESDMADLPGNILLYYTAKACKNSICLDLSTNCLHGRLTGNKVVNWDIKDIINCIGGLNVLFPLLEQISHFSEGQIPEEKNESTVPESVTPVEGDWLVWTSTKASESRLERNLVATFILIVKHFIQRHPINQGNLIHSHGVATLGALLQKVPSTLMDVNVLMAVQLLIEQVSLEKNMQLLQQMYQYLLFDFRIWNRGDFPFRIGHIQYLSTIIKDSRRVFRKKYGVQFLLDTLRIYYGNGCKYNELSLDDIRTIRTSLYGLIKYFLCKGGSHEEIQSIMGYIAATNEEEQLFGILDVLFSLLRTSPTRGQLFLLLFEPGNADILYALLLNQKYSDRLREIIFKIMEQMLKCTNVYERSKQHIRLREVGYSGLGLLLNEALVNTSLIKNLTHQIINTDPVINFKDLLSVVYISHRAHINVRVAICRKVLQILQFQPDAAHQISQQVGWQDTLVRLFLKAKFENGNTLHKHSRAVLMKDNDKNMSTEDTKKNSDEKTDEEKITSFASANVSSDQWSLEDRHSLDSNTPLFPEDSSVGELSFKSENQEEFWHSNPSHLSLDLSGIDSCEMSDSGSQVPDSLPSTPSPVESTKSFSVHSDRESSITNDMGFSDDFSLLESQERCEEELLQLLTHILNYVMCKGLEKSDDDTWIERGQVFSALSKPGISSELLRPSDEIKLTLLQKMLEWAISENREAKTNPVTAENAFRLVLIIQDFLQSEGLVNSNMWTEKLLEDMMLLFDCLSVCYSESPVWVKLSQIQIQLLLGFIGRGNLQVCAMASAKLNTLLQTKVIENQDEACYILGKLEHVLSQSIKEQTEIYSFLIPLVRTLVSKIYELLFMNLHLPSLPFTNGSSSFFEDFQEYCNSNEWQVYIEKYIVPYMKQYEAHTFYDGHENMALYWKDCYEALMVNMHKRDREGGESKLKFQELFVEPFNRKARQENLRYNNMLKQLSSQQLATLRRWKAIQLYLTCERGPWAKRKQNPIHWKLANVENYSRMRLKLVPNYNFKTHEEASALRDNLGIQHSQPSSDTLLLEVVKQVKVSDMVEDKLDLPEEDITARVNVDEKEEQDQKEKLVLMEDCELITIIDVIPGRLEITTQHIYFYDGSIEKEDGVGFDFKWPHSQIREIHLRRYNLRRSALEIFHVDQSNYFLNFKKEVRNKIYSRLLSLHSPNSYYGSRSPQELFKASGLTQKWVNREISNFDYLIQINTMAGRTYNDLAQYPVFPWILQDYTSEELDLNNPAVFRDLSKPIGVVNEKNAKAMREKYENFEDPMGTIDKFHYGTHYSNSAGVMHYLIRVEPFTTLHIQLQSGRFDCADRQFHSIPATWQALMDNPYDVKELIPEFFYFPEFLENQNQFNLGRLQISKELVNDVILPKWAKSAEDFIYKHRKALESEYVSAHLHEWIDLIFGYKQRGPAAVEALNVFYYCSYEGAVDLDALTDEKERKALEGMINNFGQTPCQLLKEPHPPRLSAEEAVQKPTKIDTSTLNLFQHLPELKSFFIEGISDGIPLLKATIPKNQYRSFMSQGSPELLITISMNYVIGTHGWLPYDRNISNYFTFIKDQTVTNPKTQRSINGSFAPGLEITSKLFVVSHDAKLLFSAGYWDNSIQVMSLTKGKIISHIIRHMDIVTCLATDYCGIHLISGSRDTTCMIWQITQQGGVPVGLASKPFQILYGHTNEVLSVGISTELDMAVSGSRDGTVIIHTIQKGQYMRTLRPPCESSLFLTIPNLAISWEGHIVVYSSTEEKTTLKDKNALHLFSINGKYLGSQILKEQVSDICIIGEHIVTGSIQGFLSIRDLHSLNLSINPLAMRLPIHCVCVTKEYSHILVGLEDGKLIVVGVGKPAEMRSGQLSRKFWGSSKRLSQISAGETEYNTQDSK

SEQ ID NO: 34669 - protein, 2604 aa, Homo sapiens
MASRERLFELWMLYCTKKDPDYLKLWLDTFVSSYEQFLDVDFEKLPTRVDDMPPGISLLPDNILQVLRIQLLQCVQKMADGLEEQQQALSILLVKFFIILCRNLSNVEEIGTCSYINYVITMTTLYIQQLKSKKKEKEMADQTCIEEFVIHALAFCESLYDPYRNWRHRISGRILSTVEKSRQKYKPASLTVEFVPFFYQCFQESEHLKESLKCCLLHLFGAIVAGGQRNALQAISPATMEVLMRVLADCDSWEDGDPEEVGRKAELTLKCLTEVVHILLSSNSDQRQVETSTILENYFKLLNSDHSALPNQRRSRQWENRFIALQIKMLNTITAMLDCTDRPVLQAIFLNSNCFEHLIRLLQNCKVFQGQLDCLAISTIQALTAVMNKSPAAKEVFKERIGYTHMLEVLKSLGQPPLELLKELMNMAVEGDHTSVGILGISNVQPLLLLIQWLPELQSHDLQIFISDWLKRICCINRQSRTTCVNANMGIRIIETLDLHSSLHQTCAENLIAIHGSLGSQSVSSEEIRRLLRLLRVDESESVHPYVTPVTRAILTMARKLSLESALQYFNLSHSMAGISVPPIQKWPGSAFSFSAWFCLDQDQLTLGIANKGGKRKQLYSFFTGSGMGFEAFITHSGMLVVAVCTKREYATVMLPDHSFCDSLWHNITVVHMPGKRPFGQSFVYIYDNGQQKVSAPLRFPAMNEPFTSCCIGSAGQRTTTPPPSQIPDPPFSSPITPHRTSFGGILSSASWGGTIEKSKLITKLISAGTQDSEWGCPTSLEGQLGSVIIFYEPLQPPQVKALYLAGPNCLSPWKCQESDMADLPGNILLYYTAKACKNSICLDLSTNCLHGRLTGNKVVNWDIKDIINCIGGLNVLFPLLEQISHFSEGQIPEEKNESTVPESVTPVEGDWLVWTSTKASESRLERNLVATFILIVKHFIQRHPINQGNLIHSHGVATLGALLQKVPSTLMDVNVLMAVQLLIEQVSLEKNMQLLQQMYQYLLFDFRIWNRGDFPFRIGHIQYLSTIIKDSRRVFRKKYGVQFLLDTLRIYYGNGCKYNELSLDDIRTIRTSLYGLIKYFLCKGGSHEEIQSIMGYIAATNEEEQLFGILDVLFSLLRTSPTRGQLFLLLFEPGNADILYALLLNQKYSDRLREIIFKIMEQMLKCTNVYERSKQHIRLREVGYSGLGLLLNEALVNTSLIKNLTHQIINTDPVINFKDLLSVVYISHRAHINVRVAICRKVLQILQFQPDAAHQISQQVGWQDTLVRLFLKAKFENGNTLHKHSRAVLMKDNDKNMSTEDTKKNSDEKTDEEKITSFASANVSSDQWSLEDRHSLDSNTPLFPEDSSVGELSFKSENQEEFWHSNPSHLSLDLSGIDSCEMSDSGSQVPDSLPSTPSPVESTKSFSVHSDRESSITNDMGFSDDFSLLESQERCEEELLQLLTHILNYVMCKGLEKSDDDTWIERGQVFSALSKPGISSELLRPSDEIKLTLLQKMLEWAISENREAKTNPVTAENAFRLVLIIQDFLQSEGLVNSNMWTEKLLEDMMLLFDCLSVCYSESPVWVKLSQIQIQLLLGFIGRGNLQVCAMASAKLNTLLQTKVIENQDEACYILGKLEHVLSQSIKEQTEIYSFLIPLVRTLVSKIYELLFMNLHLPSLPFTNGSSSFFEDFQEYCNSNEWQVYIEKYIVPYMKQYEAHTFYDGHENMALYWKDCYEALMVNMHKRDREGGESKLKFQELFVEPFNRKARQENLRYNNMLKQLSSQQLATLRRWKAIQLYLTCERGPWAKRKQNPIHWKLANVENYSRMRLKLVPNYNFKTHEEASALRDNLGIQHSQPSSDTLLLEVVKQVKVSDMVEDKLDLPEEDITARVNVDEKEEQDQKEKLVLMEDCELITIIDVIPGRLEITTQHIYFYDGSIEKEDGVGFDFKWPHSQIREIHLRRYNLRRSALEIFHVDQSNYFLNFKKEVRNKIYSRLLSLHSPNSYYGSRSPQELFKASGLTQKWVNREISNFDYLIQINTMAGRTYNDLAQYPVFPWILQDYTSEELDLNNPAVFRDLSKPIGVVNEKNAKAMREKYENFEDPMGTIDKFHYGTHYSNSAGVMHYLIRVEPFTTLHIQLQSGRFDCADRQFHSIPATWQALMDNPYDVKELIPEFFYFPEFLENQNQFNLGRLQISKELVNDVILPKWAKSAEDFIYKHRKALESEYVSAHLHEWIDLIFGYKQRGPAAVEALNVFYYCSYEGAVDLDALTDEKERKALEGMINNFGQTPCQLLKITISMNYVIGTHGWLPYDRNISNYFTFIKDQTVTNPKTQRSINGSFAPGLEITSKLFVVSHDAKLLFSAGYWDNSIQVMSLTKGKIISHIIRHMDIVTCLATDYCGIHLISGSRDTTCMIWQITQQGGVPVGLASKPFQILYGHTNEVLSVGISTELDMAVSGSRDGTVIIHTIPNLAISWEGHIVVYSSTEEKTTLKDKNALHLFSINGKYLGSQILKEQVSDICIIGEHIVTGSIQGFLSIRDLHSLNLSINPLAMRLPIHCVCVTKEYSHILVGLEDGKLIVVGVGKPAEMRSGQLSRKFWGSSKRLSQISAGETEYNTQDSK

SEQ ID NO: 34670 - protein, 1294 aa, Homo sapiens
MEDGKPVWAPHPTDGFQMGNIVDIGPDSLTIEPLNQKGKTFLALINQVFPAEEDSKKDVEDNCSLMYLNEATLLHNIKVRYSKDRIYTYVANILIAVNPYFDIPKIYSSEAIKSYQGKSLGTRPPHVFAIADKAFRDMKVLKMSQSIIVSGESGAGKTENTKFVLRYLTESYGTGQDIDDRIVEANPLLEAFGNAKTVRNNNSSRFGKFVEIHFNEKSSVVGGFVSHYLLEKSRICVQGKEERNYHIFYRLCAGASEDIREKLHLSSPDNFRYLNRGCTRYFANKETDKQILQNRKSPEYLKAGSMKDPLLDDHGDFIRMCTAMKKIGLDDEEKLDLFRVVAGVLHLGNIDFEEAGSTSGGCNLKNKSAQSLEYCAELLGLDQDDLRVSLTTRVMLTTAGGTKGTVIKVPLKVEQANNARDALAKTVYSHLFDHVVNRVNQCFPFETSSYFIGVLDIAGFEYFEHNSFEQFCINYCNEKLQQFFNERILKEEQELYQKEGLGVNEVHYVDNQDCIDLIEAKLVGILDILDEENRLPQPSDQHFTSAVHQKHKDHFRLTIPRKSKLAVHRNIRDDEGFIIRHFAGAVCYETTQFVEKNNDALHMSLESLICESRDKFIRELFESSTNNNKDTKQKAGKLSFISVGNKFKTQLNLLLDKLRSTGASFIRCIKPNLKMTSHHFEGAQILSQLQCSGMVSVLDLMQGGYPSRASFHELYNMYKKYMPDKLARLDPRLFCKALFKALGLNENDYKFGLTKVFFRPGKFAEFDQIMKSDPDHLAELVKRVNHWLTCSRWKKVQWCSLSVIKLKNKIKYRAEACIKMQKTIRMWLCKRRHKPRIDGLVKVGTLKKRLDKFNEVVSVLKDGKPEMNKQIKNLEISIDTLMAKIKSTMMTQEQIQKEYDALVKSSEELLSALQKKKQQEEEAERLRRIQEEMEKERKRREEDEKRRRKEEEERRMKLEMEAKRKQEEEERKKREDDEKRIQAEVEAQLARQKEEESQQQAVLEQERRDRELALRIAQSEAELISDEAQADLALRRSLDSYPVSKNDGTRPKMTPEQMAKEMSEFLSRGPAVLATKAAAGTKKYDLSKWKYAELRDTINTSCDIELLAACREEFHRRLKVYHAWKSKNKKRNTETEQRAPKSVTDYDFAPFLNNSPQQNPAAQIPARQREIEMNRQQRFFRIPFIRPADQYKDPQSKKKGWWYAHFDGPWIARQMELHPDKPPILLVAGKDDMEMCELNLEETGLTRKRGAEILPRQFEEIWERCGGIQYLQNAIESRQARPTYATAMLQSLLK

SEQ ID NO: 34671 - protein, 1285 aa, Homo sapiens
MEDGKPVWAPHPTDGFQMGNIVDIGPDSLTIEPLNQKGKTFLALINQVFPAEEDSKKDVEDNCSLMYLNEATLLHNIKVRYSKDRIYTYVANILIAVNPYFDIPKIYSSEAIKSYQGKSLGTRPPHVFAIADKAFRDMKVLKMSQSIIVSGESGAGKTENTKFVLRYLTESYGTGQDIDDRIVEANPLLEAFGNAKTVRNNNSSRFGKFVEIHFNEKSSVVGGFVSHYLLEKSRICVQGKEERNYHIFYRLCAGASEDIREKLHLSSPDNFRYLNRGCTRYFANKETDKQILQNRKSPEYLKAGSMKDPLLDDHGDFIRMCTAMKKIGLDDEEKLDLFRVVAGVLHLGNIDFEEAGSTSGGCNLKNKSAQSLEYCAELLGLDQDDLRVSLTTRVMLTTAGGTKGTVIKVPLKVEQANNARDALAKTVYSHLFDHVVNRVNQCFPFETSSYFIGVLDIAGFEYFEHNSFEQFCINYCNEKLQQFFNERILKEEQELYQKEGLGVNEVHYVDNQDCIDLIEAKLVGILDILDEENRLPQPSDQHFTSAVHQKHKDHFRLTIPRKSKLAVHRNIRDDEGFIIRHFAGAVCYETTQFVEKNNDALHMSLESLICESRDKFIRELFESSTNNNKDTKQKAGKLSFISVGNKFKTQLNLLLDKLRSTGASFIRCIKPNLKMTSHHFEGAQILSQLQCSGMVSVLDLMQGGYPSRASFHELYNMYKKYMPDKLARLDPRLFCKALFKALGLNENDYKFGLTKVFFRPGKFAEFDQIMKSDPDHLAELVKRVNHWLTCSRWKKVQWCSLSVIKLKNKIKYRAEACIKMQKTIRMWLCKRRHKPRIDGLVKVGTLKKRLDKFNEVVSVLKDGKPEMNKQIKNLEISIDTLMAKIKSTMMTQEQIQKEYDALVKSSEELLSALQKKKQQEEEAERLRRIQEEMEKERKRREEDEKRRRKEEEERRMKLEMEAKRKQEEEERKKREDDEKRIQAEVEAQLARQKEEESQQQAVLEQERRDRELALRIAQSEAELISDEAQADLALRRNDGTRPKMTPEQMAKEMSEFLSRGPAVLATKAAAGTKKYDLSKWKYAELRDTINTSCDIELLAACREEFHRRLKVYHAWKSKNKKRNTETEQRAPKSVTDYDFAPFLNNSPQQNPAAQIPARQREIEMNRQQRFFRIPFIRPADQYKDPQSKKKGWWYAHFDGPWIARQMELHPDKPPILLVAGKDDMEMCELNLEETGLTRKRGAEILPRQFEEIWERCGGIQYLQNAIESRQARPTYATAMLQSLLK

SEQ ID NO: 34672 - protein, 1262 aa, Homo sapiens
MEDGKPVWAPHPTDGFQMGNIVDIGPDSLTIEPLNQKGKTFLALINQVFPAEEDSKKDVEDNCSLMYLNEATLLHNIKVRYSKDRIYTYVANILIAVNPYFDIPKIYSSEAIKSYQGKSLGTRPPHVFAIADKAFRDMKVLKMSQSIIVSGESGAGKTENTKFVLRYLTESYGTGQDIDDRIVEANPLLEAFGNAKTVRNNNSSRFGKFVEIHFNEKSSVVGGFVSHYLLEKSRICVQGKEERNYHIFYRLCAGASEDIREKLHLSSPDNFRYLNRGCTRYFANKETDKQILQNRKSPEYLKAGSMKDPLLDDHGDFIRMCTAMKKIGLDDEEKLDLFRVVAGVLHLGNIDFEEAGSTSGGCNLKNKSAQSLEYCAELLGLDQDDLRVSLTTRVMLTTAGGTKGTVIKVPLKVEQANNARDALAKTVYSHLFDHVVNRVNQCFPFETSSYFIGVLDIAGFEYFEHNSFEQFCINYCNEKLQQFFNERILKEEQELYQKEGLGVNEVHYVDNQDCIDLIEAKLVGILDILDEENRLPQPSDQHFTSAVHQKHKDHFRLTIPRKSKLAVHRNIRDDEGFIIRHFAGAVCYETTQFVEKNNDALHMSLESLICESRDKFIRELFESSTNNNKDTKQKAGKLSFISVGNKFKTQLNLLLDKLRSTGASFIRCIKPNLKMTSHHFEGAQILSQLQCSGMVSVLDLMQGGYPSRASFHELYNMYKKYMPDKLARLDPRLFCKALFKALGLNENDYKFGLTKVFFRPGKFAEFDQIMKSDPDHLAELVKRVNHWLTCSRWKKVQWCSLSVIKLKNKIKYRAEACIKMQKTIRMWLCKRRHKPRIDGLVKVGTLKKRLDKFNEVVSVLKDGKPEMNKQIKNLEISIDTLMAKIKSTMMTQEQIQKEYDALVKSSEELLSALQKKKQQEEEAERLRRIQEEMEKERKRREEDEKRRRKEEEERRMKLEMEAKRKQEEEERKKREDDEKRIQAEVEAQLARQKEEESQQQAVLEQERRDRELALRIAQSEAELISDEAQADLALRRGPAVLATKAAAGTKKYDLSKWKYAELRDTINTSCDIELLAACREEFHRRLKVYHAWKSKNKKRNTETEQRAPKSVTDYDFAPFLNNSPQQNPAAQIPARQREIEMNRQQRFFRIPFIRPADQYKDPQSKKKGWWYAHFDGPWIARQMELHPDKPPILLVAGKDDMEMCELNLEETGLTRKRGAEILPRQFEEIWERCGGIQYLQNAIESRQARPTYATAMLQSLLK

SEQ ID NO: 34673 - protein, 1285 aa, Homo sapiens
MEDGKPVWAPHPTDGFQMGNIVDIGPDSLTIEPLNQKGKTFLALINQVFPAEEDSKKDVEDNCSLMYLNEATLLHNIKVRYSKDRIYTYVANILIAVNPYFDIPKIYSSEAIKSYQGKSLGTRPPHVFAIADKAFRDMKVLKMSQSIIVSGESGAGKTENTKFVLRYLTESYGTGQDIDDRIVEANPLLEAFGNAKTVRNNNSSRFGKFVEIHFNEKSSVVGGFVSHYLLEKSRICVQGKEERNYHIFYRLCAGASEDIREKLHLSSPDNFRYLNRGCTRYFANKETDKQILQNRKSPEYLKAGSMKDPLLDDHGDFIRMCTAMKKIGLDDEEKLDLFRVVAGVLHLGNIDFEEAGSTSGGCNLKNKSAQSLEYCAELLGLDQDDLRVSLTTRVMLTTAGGTKGTVIKVPLKVEQANNARDALAKTVYSHLFDHVVNRVNQCFPFETSSYFIGVLDIAGFEYFEHNSFEQFCINYCNEKLQQFFNERILKEEQELYQKEGLGVNEVHYVDNQDCIDLIEAKLVGILDILDEENRLPQPSDQHFTSAVHQKHKDHFRLTIPRKSKLAVHRNIRDDEGFIIRHFAGAVCYETTQFVEKNNDALHMSLESLICESRDKFIRELFESSTNNNKDTKQKAGKLSFISVGNKFKTQLNLLLDKLRSTGASFIRCIKPNLKMTSHHFEGAQILSQLQCSGMVSVLDLMQGGYPSRASFHELYNMYKKYMPDKLARLDPRLFCKALFKALGLNENDYKFGLTKVFFRPGKFAEFDQIMKSDPDHLAELVKRVNHWLTCSRWKKVQWCSLSVIKLKNKIKYRAEACIKMQKTIRMWLCKRRHKPRIDGLVKVGTLKKRLDKFNEVVSVLKDGKPEMNKQIKNLEISIDTLMAKIKSTMMTQEQIQKEYDALVKSSEELLSALQKKKQQEEEAERLRRIQEEMEKERKRREEDEKRRRKEEEERRMKLEMEAKRKQEEEERKKREDDEKRIQAEVEAQLARQKEEESQQQAVLEQERRDRELALRIAQSEAELISDEAQADLALRRSLDSYPVSKNDGTRPKMTPEQMAKEMSEFLSRGPAVLATKAAAGTKKYDLSKWKYAELRDTINTSCDIELLAACREEFHRRLKVYHAWKSKNKKRNTETEQRAPKSVTDYPQQNPAAQIPARQREIEMNRQQRFFRIPFIRPADQYKDPQSKKKGWWYAHFDGPWIARQMELHPDKPPILLVAGKDDMEMCELNLEETGLTRKRGAEILPRQFEEIWERCGGIQYLQNAIESRQARPTYATAMLQSLLK

SEQ ID NO: 34674 - protein, 1253 aa, Homo sapiens
MEDGKPVWAPHPTDGFQMGNIVDIGPDSLTIEPLNQKGKTFLALINQVFPAEEDSKKDVEDNCSLMYLNEATLLHNIKVRYSKDRIYTYVANILIAVNPYFDIPKIYSSEAIKSYQGKSLGTRPPHVFAIADKAFRDMKVLKMSQSIIVSGESGAGKTENTKFVLRYLTESYGTGQDIDDRIVEANPLLEAFGNAKTVRNNNSSRFGKFVEIHFNEKSSVVGGFVSHYLLEKSRICVQGKEERNYHIFYRLCAGASEDIREKLHLSSPDNFRYLNRGCTRYFANKETDKQILQNRKSPEYLKAGSMKDPLLDDHGDFIRMCTAMKKIGLDDEEKLDLFRVVAGVLHLGNIDFEEAGSTSGGCNLKNKSAQSLEYCAELLGLDQDDLRVSLTTRVMLTTAGGTKGTVIKVPLKVEQANNARDALAKTVYSHLFDHVVNRVNQCFPFETSSYFIGVLDIAGFEYFEHNSFEQFCINYCNEKLQQFFNERILKEEQELYQKEGLGVNEVHYVDNQDCIDLIEAKLVGILDILDEENRLPQPSDQHFTSAVHQKHKDHFRLTIPRKSKLAVHRNIRDDEGFIIRHFAGAVCYETTQFVEKNNDALHMSLESLICESRDKFIRELFESSTNNNKDTKQKAGKLSFISVGNKFKTQLNLLLDKLRSTGASFIRCIKPNLKMTSHHFEGAQILSQLQCSGMVSVLDLMQGGYPSRASFHELYNMYKKYMPDKLARLDPRLFCKALFKALGLNENDYKFGLTKVFFRPGKFAEFDQIMKSDPDHLAELVKRVNHWLTCSRWKKVQWCSLSVIKLKNKIKYRAEACIKMQKTIRMWLCKRRHKPRIDGLVKVGTLKKRLDKFNEVVSVLKDGKPEMNKQIKNLEISIDTLMAKIKSTMMTQEQIQKEYDALVKSSEELLSALQKKKQQEEEAERLRRIQEEMEKERKRREEDEKRRRKEEEERRMKLEMEAKRKQEEEERKKREDDEKRIQAEVEAQLARQKEEESQQQAVLEQERRDRELALRIAQSEAELISDEAQADLALRRGPAVLATKAAAGTKKYDLSKWKYAELRDTINTSCDIELLAACREEFHRRLKVYHAWKSKNKKRNTETEQRAPKSVTDYPQQNPAAQIPARQREIEMNRQQRFFRIPFIRPADQYKDPQSKKKGWWYAHFDGPWIARQMELHPDKPPILLVAGKDDMEMCELNLEETGLTRKRGAEILPRQFEEIWERCGGIQYLQNAIESRQARPTYATAMLQSLLK

SEQ ID NO: 34675 - protein, 1285 aa, Homo sapiens
MEDGKPVWAPHPTDGFQMGNIVDIGPDSLTIEPLNQKGKTFLALINQVFPAEEDSKKDVEDNCSLMYLNEATLLHNIKVRYSKDRIYTYVANILIAVNPYFDIPKIYSSEAIKSYQGKSLGTRPPHVFAIADKAFRDMKVLKMSQSIIVSGESGAGKTENTKFVLRYLTESYGTGQDIDDRIVEANPLLEAFGNAKTVRNNNSSRFGKFVEIHFNEKSSVVGGFVSHYLLEKSRICVQGKEERNYHIFYRLCAGASEDIREKLHLSSPDNFRYLNRGCTRYFANKETDKQILQNRKSPEYLKAGSMKDPLLDDHGDFIRMCTAMKKIGLDDEEKLDLFRVVAGVLHLGNIDFEEAGSTSGGCNLKNKSAQSLEYCAELLGLDQDDLRVSLTTRVMLTTAGGTKGTVIKVPLKVEQANNARDALAKTVYSHLFDHVVNRVNQCFPFETSSYFIGVLDIAGFEYFEHNSFEQFCINYCNEKLQQFFNERILKEEQELYQKEGLGVNEVHYVDNQDCIDLIEAKLVGILDILDEENRLPQPSDQHFTSAVHQKHKDHFRLTIPRKSKLAVHRNIRDDEGFIIRHFAGAVCYETTQFVEKNNDALHMSLESLICESRDKFIRELFESSTNNNKDTKQKAGKLSFISVGNKFKTQLNLLLDKLRSTGASFIRCIKPNLKMTSHHFEGAQILSQLQCSGMVSVLDLMQGGYPSRASFHELYNMYKKYMPDKLARLDPRLFCKALFKALGLNENDYKFGLTKVFFRPGKFAEFDQIMKSDPDHLAELVKRVNHWLTCSRWKKVQWCSLSVIKLKNKIKYRAEACIKMQKTIRMWLCKRRHKPRIDGLVKVGTLKKRLDKFNEVVSVLKDGKPEMNKQIKNLEISIDTLMAKIKSTMMTQEQIQKEYDALVKSSEELLSALQKKKQQEEEAERLRRIQEEMEKERKRREEDEKRRRKEEEERRMKLEMEAKRKQEEEERKKREDDEKRIQAEVEAQLARQKEEESQQQAVLEQERRDRELALRIAQSEAELISDEAQADLALRRSLDSYPVSKNDGTRPKMTPEQMAKEMSEFLSRGPAVLATKAAAGTKKYDLSKWKYAELRDTINTSCDIELLAACREEFHRRLKVYHAWKSKNKKRNTETEQRAPKSVTDYAQQNPAAQIPARQREIEMNRQQRFFRIPFIRPADQYKDPQSKKKGWWYAHFDGPWIARQMELHPDKPPILLVAGKDDMEMCELNLEETGLTRKRGAEILPRQFEEIWERCGGIQYLQNAIESRQARPTYATAMLQSLLK

SEQ ID NO: 34676 - protein, 197 aa, Homo sapiens
MAPKKPEPKKEAAKPAPAPAPAPAPAPAPAPEAPKEPAFDPKSVKIDFTADQIEEFKEAFSLFDRTPTGEMKITYGQCGDVLRALGQNPTNAEVLRVLGKPKPEEMNVKMLDFETFLPILQHISRNKEQGTYEDFVEGLRVFDKESNGTVMGAELRHVLATLGEKMTEAEVEQLLAGQEDANGCINYEAFVKHIMSG

SEQ ID NO: 34677 - protein, 465 aa, Homo sapiens
MATLPAAETWIDGGGGVGADAVNLTASLAAGAATGAVETGWLQLLDQAGNLSSSPSALGLPVASPAPSQPWANLTNQFVQPSWRIALWSLAYGVVVAVAVLGNLIVIWIILAHKRMRTVTNYFLVNLAFSDASMAAFNTLVNFIYALHSEWYFGANYCRFQNFFPITAVFASIYSMTAIAVDRYMAIIDPLKPRLSATATKIVIGSIWILAFLLAFPQCLYSKTKVMPGRTLCFVQWPEGPKQHFTYHIIVIILVYCFPLLIMGITYTIVGITLWGGEIPGDTCDKYHEQLKAKRKVVKMMIIVVMTFAICWLPYHIYFILTAIYQQLNRWKYIQQVYLASFWLAMSSTMYNPIIYCCLNKRFRAGFKRAFRWCPFIKVSSYDELELKTTRFHPNRQSSMYTVTRMESMTVVFDPNDADTTRSSRKKRATPRDPSFNGCSRRNSKSASATSSFISSPYTSVDEYS

SEQ ID NO: 34678 - protein, 310 aa, Homo sapiens
MLAWQDGGAKAAPSHHKISFSVLDILDPQKFTRAALPAVRPAPREARKSLAEVEAGKDASSRDPVRQLETPDAAGPGAGQASPLEGSEAEEEEDAEDPRRPRLRERAARLLPGLARSPDAPAGALASGEPCEDGGGGPVRSPPGSPGSPRPRRRRLEPNCAKPRRARTAFTYEQLVALENKFRATRYLSVCERLNLALSLSLTETQVKIWFQNRRTKWKKQNPGADGAAQVGGGAPQPGAAGGGGGGGSGGSPGPPGTGALHFQTFPSYSAANVLFPSAASFPLTAAAPGSPFAPFLGPSYLTPFYAPRL

SEQ ID NO: 34679 - protein, 690 aa, Homo sapiens
MEKILQMAEGIDIGEMPSYDLVLSKPSKGQKRHLSTCDGQNPPKKQAGSKFHARPRFEPVHFVASSSKDERQEDPYGPQTKEVNEQTHFASMPRDIYQDYTQDSFSIQDGNSQYCDSSGFILTKDQPVTANMYFDSGNPAPSTTSQQANSQSTPEPSPSQTFPESVVAEKQYFIEKLTATIWKNLSNPEMTSGSDKINYTYMLTRCIQACKTNPEYIYAPLKEIPPADIPKNKKLLTDGYACEVRCQNIYLTTGYAGSKNGSRDRATELAVKLLQKRIEVRVVRRKFKHTFGEDLVVCQIGMSSYEFPPALKPPEDLVVLGKDASGQPIFNASAKHWTNFVITENANDAIGILNNSASFNKMSIEYKYEMMPNRTWRCRVFLQDHCLAEGYGTKKTSKHAAADEALKILQKTQPTYPSVKSSQCHTGSSPRGSGKKKDIKDLVVYENSSNPVCTLNDTAQFNRMTVEYVYERMTGLRWKCKVILESEVIAEAVGVKKTVKYEAAGEAVKTLKKTQPTVINNLKKGAVEDVISRNEIQGRSAEEAYKQQIKEDNIGNQLLRKMGWTGGGLGKSGEGIREPISVKEQHKREGLGLDVERVNKIAKRDIEQIIRNYARSESHTDLTFSRELTNDERKQIHQIAQKYGLKSKSHGVGHDRYLVVGRKRRKEDLLDQLKQEGQVGHYELVMPQAN

SEQ ID NO: 34680 - protein, 705 aa, Homo sapiens
MGFMLPLIFRYSPRLMEKILQMAEGIDIGEMPSYDLVLSKPSKGQKRHLSTCDGQNPPKKQAGSKFHARPRFEPVHFVASSSKDERQEDPYGPQTKEVNEQTHFASMPRDIYQDYTQDSFSIQDGNSQYCDSSGFILTKDQPVTANMYFDSGNPAPSTTSQQANSQSTPEPSPSQTFPESVVAEKQYFIEKLTATIWKNLSNPEMTSGSDKINYTYMLTRCIQACKTNPEYIYAPLKEIPPADIPKNKKLLTDGYACEVRCQNIYLTTGYAGSKNGSRDRATELAVKLLQKRIEVRVVRRKFKHTFGEDLVVCQIGMSSYEFPPALKPPEDLVVLGKDASGQPIFNASAKHWTNFVITENANDAIGILNNSASFNKMSIEYKYEMMPNRTWRCRVFLQDHCLAEGYGTKKTSKHAAADEALKILQKTQPTYPSVKSSQCHTGSSPRGSGKKKDIKDLVVYENSSNPVCTLNDTAQFNRMTVEYVYERMTGLRWKCKVILESEVIAEAVGVKKTVKYEAAGEAVKTLKKTQPTVINNLKKGAVEDVISRNEIQGRSAEEAYKQQIKEDNIGNQLLRKMGWTGGGLGKSGEGIREPISVKEQHKREGLGLDVERVNKIAKRDIEQIIRNYARSESHTDLTFSRELTNDERKQIHQIAQKYGLKSKSHGVGHDRYLVVGRKRRKEDLLDQLKQEGQVGHYELVMPQAN

SEQ ID NO: 34681 - protein, 358 aa, Homo sapiens
MSADAAAGAPLPRLCCLEKGPNGYGFHLHGEKGKLGQYIRLVEPGSPAEKAGLLAGDRLVEVNGENVEKETHQQVVSRIRAALNAVRLLVVDPETDEQLQKLGVQVREELLRAQEAPGQAEPPAAAEVQGAGNENEPREADKSHPEQRELRPRLCTMKKGPSGYGFNLHSDKSKPGQFIRSVDPDSPAEASGLRAQDRIVEVNGVCMEGKQHGDVVSAIRAGGDETKLLVVDRETDEFFKKCRVIPSQEHLNGPLPVPFTNGEIQKENSREALAEAALESPRPALVRSASSDTSEELNSQDSPPKQDSTAPSSTSSSDPILDFNISLAMAKERAHQKRSSKRAPQMDWSKKNELFSNL

SEQ ID NO: 34682 - protein, 202 aa, Homo sapiens
MKKGPSGYGFNLHSDKSKPGQFIRSVDPDSPAEASGLRAQDRIVEVNGVCMEGKQHGDVVSAIRAGGDETKLLVVDRETDEFFKKCRVIPSQEHLNGPLPVPFTNGEIQKENSREALAEAALESPRPALVRSASSDTSEELNSQDSPPKQDSTAPSSTSSSDPILDFNISLAMAKERAHQKRSSKRAPQMDWSKKNELFSNL

SEQ ID NO: 34683 - protein, 975 aa, Homo sapiens
MATGLGEPVYGLSEDEGESRILRVKVVSGIDLAKKDIFGASDPYVKLSLYVADENRELALVQTKTIKKTLNPKWNEEFYFRVNPSNHRLLFEVFDENRLTRDDFLGQVDVPLSHLPTEDPTMERPYTFKDFLLRPRSHKSRVKGFLRLKMAYMPKNGGQDEENSDQRDDMEHGWEVVDSNDSASQHQEELPPPPLPPGWEEKVDNLGRTYYVNHNNRTTQWHRPSLMDVSSESDNNIRQINQEAAHRRFRSRRHISEDLEPEPSEGGDVPEPWETISEEVNIAGDSLGLALPPPPASPGSRTSPQELSEELSRRLQITPDSNGEQFSSLIQREPSSRLRSCSVTDAVAEQGHLPPPSAPAGRARSSTVTGGEEPTPSVAYVHTTPGLPSGWEERKDAKGRTYYVNHNNRTTTWTRPIMQLAEDGASGSATNSNNHLIEPQIRRPRSLSSPTVTLSAPLEGAKDSPVRRAVKDTLSNPQSPQPSPYNSPKPQHKVTQSFLPPGWEMRIAPNGRPFFIDHNTKTTTWEDPRLKFPVHMRSKTSLNPNDLGPLPPGWEERIHLDGRTFYIDHNSKITQWEDPRLQNPAITGPAVPYSREFKQKYDYFRKKLKKPADIPNRFEMKLHRNNIFEESYRRIMSVKRPDVLKARLWIEFESEKGLDYGGVAREWFFLLSKEMFNPYYGLFEYSATDNYTLQINPNSGLCNEDHLSYFTFIGRVAGLAVFHGKLLDGFFIRPFYKMMLGKQITLNDMESVDSEYYNSLKWILENDPTELDLMFCIDEENFGQTYQVDLKPNGSEIMVTNENKREYIDLVIQWRFVNRVQKQMNAFLEGFTELLPIDLIKIFDENELELLMCGLGDVDVNDWRQHSIYKNGYCPNHPVIQWFWKAVLLMDAEKRIRLLQFVTGTSRVPMNGFAELYGSNGPQLFTIEQWGSPEKLPRAHTCFNRLDLPPYETFEDLREKLLMAVENAQGFEGVD

SEQ ID NO: 34684 - protein, 911 aa, Homo sapiens
MATGLGEPVYGLSEDEGESRILRVKVVSGIDLAKKDIFGASDPYVKLSLYVADENRELALVQTKTIKKTLNPKWNEEFYFRVNPSNHRLLFEVFDENRLTRDDFLGQVDVPLSHLPTEDPTMERPYTFKDFLLRPRSHKSRVKGFLRLKMAYMPKNGGQDEENSDQRDDMEHGWEVVDSNDSASQHQEELPPPPLPPGWEEKVDNLGRTYYVNHNNRTTQWHRPSLMDVSSESDNNIRQINQEAAHRRFRSRRHISEDLEPEPSEGGDVPEPWETISEEVNIAGDSLGLALPPPPASPGSRTSPQELSEELSRRLQITPDSNGEQFSSLIQREPSSRLRSCSVTDAVAEQGHLPPLAEDGASGSATNSNNHLIEPQIRRPRSLSSPTVTLSAPLEGAKDSPVRRAVKDTLSNPQSPQPSPYNSPKPQHKVTQSFLPPGWEMRIAPNGRPFFIDHNTKTTTWEDPRLKFPVHMRSKTSLNPNDLGPLPPGWEERIHLDGRTFYIDHNSKITQWEDPRLQNPAITGPAVPYSREFKQKYDYFRKKLKKPADIPNRFEMKLHRNNIFEESYRRIMSVKRPDVLKARLWIEFESEKGLDYGGVAREWFFLLSKEMFNPYYGLFEYSATDNYTLQINPNSGLCNEDHLSYFTFIGRVAGLAVFHGKLLDGFFIRPFYKMMLGKQITLNDMESVDSEYYNSLKWILENDPTELDLMFCIDEENFGQTYQVDLKPNGSEIMVTNENKREYIDLVIQWRFVNRVQKQMNAFLEGFTELLPIDLIKIFDENELELLMCGLGDVDVNDWRQHSIYKNGYCPNHPVIQWFWKAVLLMDAEKRIRLLQFVTGTSRVPMNGFAELYGSNGPQLFTIEQWGSPEKLPRAHTCFNRLDLPPYETFEDLREKLLMAVENAQGFEGVD

SEQ ID NO: 34685 - protein, 871 aa, Homo sapiens
MATGLGEPVYGLSEDEGESRILRVKVVSGIDLAKKDIFGASDPYVKLSLYVADENRELALVQTKTIKKTLNPKWNEEFYFRVNPSNHRLLFEVFDENRLTRDDFLGQVDVPLSHLPTEDPTMERPYTFKDFLLRPRSHKSRVKGFLRLKMAYMPKNGGQDEENSDQRDDMEHGWEVVDSNDSASQHQEELPPPPLPPGWEEKVDNLGRTYYVNHNNRTTQWHRPSLMDVSSESDNNIRQINQEAAHRRFRSRRHISEDLEPEPSEGGDVPEPWETISEEVNIAGDSLGLALPPPPASPGSRTSPQELSEELSRRLQITPDSNGEQFSSLIQREPSSRLRSCSVTDAVAEQGHLPPGAKDSPVRRAVKDTLSNPQSPQPSPYNSPKPQHKVTQSFLPPGWEMRIAPNGRPFFIDHNTKTTTWEDPRLKFPVHMRSKTSLNPNDLGPLPPGWEERIHLDGRTFYIDHNSKITQWEDPRLQNPAITGPAVPYSREFKQKYDYFRKKLKKPADIPNRFEMKLHRNNIFEESYRRIMSVKRPDVLKARLWIEFESEKGLDYGGVAREWFFLLSKEMFNPYYGLFEYSATDNYTLQINPNSGLCNEDHLSYFTFIGRVAGLAVFHGKLLDGFFIRPFYKMMLGKQITLNDMESVDSEYYNSLKWILENDPTELDLMFCIDEENFGQTYQVDLKPNGSEIMVTNENKREYIDLVIQWRFVNRVQKQMNAFLEGFTELLPIDLIKIFDENELELLMCGLGDVDVNDWRQHSIYKNGYCPNHPVIQWFWKAVLLMDAEKRIRLLQFVTGTSRVPMNGFAELYGSNGPQLFTIEQWGSPEKLPRAHTCFNRLDLPPYETFEDLREKLLMAVENAQGFEGVD

SEQ ID NO: 34686 - protein, 854 aa, Homo sapiens
MERPYTFKDFLLRPRSHKSRVKGFLRLKMAYMPKNGGQDEENSDQRDDMEHGWEVVDSNDSASQHQEELPPPPLPPGWEEKVDNLGRTYYVNHNNRTTQWHRPSLMDVSSESDNNIRQINQEAAHRRFRSRRHISEDLEPEPSEGGDVPEPWETISEEVNIAGDSLGLALPPPPASPGSRTSPQELSEELSRRLQITPDSNGEQFSSLIQREPSSRLRSCSVTDAVAEQGHLPPPSAPAGRARSSTVTGGEEPTPSVAYVHTTPGLPSGWEERKDAKGRTYYVNHNNRTTTWTRPIMQLAEDGASGSATNSNNHLIEPQIRRPRSLSSPTVTLSAPLEGAKDSPVRRAVKDTLSNPQSPQPSPYNSPKPQHKVTQSFLPPGWEMRIAPNGRPFFIDHNTKTTTWEDPRLKFPVHMRSKTSLNPNDLGPLPPGWEERIHLDGRTFYIDHNSKITQWEDPRLQNPAITGPAVPYSREFKQKYDYFRKKLKKPADIPNRFEMKLHRNNIFEESYRRIMSVKRPDVLKARLWIEFESEKGLDYGGVAREWFFLLSKEMFNPYYGLFEYSATDNYTLQINPNSGLCNEDHLSYFTFIGRVAGLAVFHGKLLDGFFIRPFYKMMLGKQITLNDMESVDSEYYNSLKWILENDPTELDLMFCIDEENFGQTYQVDLKPNGSEIMVTNENKREYIDLVIQWRFVNRVQKQMNAFLEGFTELLPIDLIKIFDENELELLMCGLGDVDVNDWRQHSIYKNGYCPNHPVIQWFWKAVLLMDAEKRIRLLQFVTGTSRVPMNGFAELYGSNGPQLFTIEQWGSPEKLPRAHTCFNRLDLPPYETFEDLREKLLMAVENAQGFEGVD

SEQ ID NO: 34687 - protein, 955 aa, Homo sapiens
MATGLGEPVYGLSEDEGESRILRVKVVSGIDLAKKDIFGASDPYVKLSLYVADENRELALVQTKTIKKTLNPKWNEEFYFRVNPSNHRLLFEVFDENRLTRDDFLGQVDVPLSHLPTEDPTMERPYTFKDFLLRPRSHKSRVKGFLRLKMAYMPKNGGQDEENSDQRDDMEHGWEVVDSNDSASQHQEELPPPPLPPGWEEKVDNLGRTYYVNHNNRTTQWHRPSLMDVSSESDNNIRQINQEAAHRRFRSRRHISEDLEPEPSEGGDVPEPWETISEEVNIAGDSLGLALPPPPASPGSRTSPQELSEELSRRLQITPDSNGEQFSSLIQREPSSRLRSCSVTDAVAEQGHLPPPSVAYVHTTPGLPSGWEERKDAKGRTYYVNHNNRTTTWTRPIMQLAEDGASGSATNSNNHLIEPQIRRPRSLSSPTVTLSAPLEGAKDSPVRRAVKDTLSNPQSPQPSPYNSPKPQHKVTQSFLPPGWEMRIAPNGRPFFIDHNTKTTTWEDPRLKFPVHMRSKTSLNPNDLGPLPPGWEERIHLDGRTFYIDHNSKITQWEDPRLQNPAITGPAVPYSREFKQKYDYFRKKLKKPADIPNRFEMKLHRNNIFEESYRRIMSVKRPDVLKARLWIEFESEKGLDYGGVAREWFFLLSKEMFNPYYGLFEYSATDNYTLQINPNSGLCNEDHLSYFTFIGRVAGLAVFHGKLLDGFFIRPFYKMMLGKQITLNDMESVDSEYYNSLKWILENDPTELDLMFCIDEENFGQTYQVDLKPNGSEIMVTNENKREYIDLVIQWRFVNRVQKQMNAFLEGFTELLPIDLIKIFDENELELLMCGLGDVDVNDWRQHSIYKNGYCPNHPVIQWFWKAVLLMDAEKRIRLLQFVTGTSRVPMNGFAELYGSNGPQLFTIEQWGSPEKLPRAHTCFNRLDLPPYETFEDLREKLLMAVENAQGFEGVD

SEQ ID NO: 34688 - protein, 947 aa, Homo sapiens
MRRLAFEQGESRILRVKVVSGIDLAKKDIFGASDPYVKLSLYVADENRELALVQTKTIKKTLNPKWNEEFYFRVNPSNHRLLFEVFDENRLTRDDFLGQVDVPLSHLPTEDPTMERPYTFKDFLLRPRSHKSRVKGFLRLKMAYMPKNGGQDEENSDQRDDMEHGWEVVDSNDSASQHQEELPPPPLPPGWEEKVDNLGRTYYVNHNNRTTQWHRPSLMDVSSESDNNIRQINQEAAHRRFRSRRHISEDLEPEPSEGGDVPEPWETISEEVNIAGDSLGLALPPPPASPGSRTSPQELSEELSRRLQITPDSNGEQFSSLIQREPSSRLRSCSVTDAVAEQGHLPPPSVAYVHTTPGLPSGWEERKDAKGRTYYVNHNNRTTTWTRPIMQLAEDGASGSATNSNNHLIEPQIRRPRSLSSPTVTLSAPLEGAKDSPVRRAVKDTLSNPQSPQPSPYNSPKPQHKVTQSFLPPGWEMRIAPNGRPFFIDHNTKTTTWEDPRLKFPVHMRSKTSLNPNDLGPLPPGWEERIHLDGRTFYIDHNSKITQWEDPRLQNPAITGPAVPYSREFKQKYDYFRKKLKKPADIPNRFEMKLHRNNIFEESYRRIMSVKRPDVLKARLWIEFESEKGLDYGGVAREWFFLLSKEMFNPYYGLFEYSATDNYTLQINPNSGLCNEDHLSYFTFIGRVAGLAVFHGKLLDGFFIRPFYKMMLGKQITLNDMESVDSEYYNSLKWILENDPTELDLMFCIDEENFGQTYQVDLKPNGSEIMVTNENKREYIDLVIQWRFVNRVQKQMNAFLEGFTELLPIDLIKIFDENELELLMCGLGDVDVNDWRQHSIYKNGYCPNHPVIQWFWKAVLLMDAEKRIRLLQFVTGTSRVPMNGFAELYGSNGPQLFTIEQWGSPEKLPRAHTCFNRLDLPPYETFEDLREKLLMAVENAQGFEGVD

SEQ ID NO: 34689 - protein, 967 aa, Homo sapiens
MRRLAFEQGESRILRVKVVSGIDLAKKDIFGASDPYVKLSLYVADENRELALVQTKTIKKTLNPKWNEEFYFRVNPSNHRLLFEVFDENRLTRDDFLGQVDVPLSHLPTEDPTMERPYTFKDFLLRPRSHKSRVKGFLRLKMAYMPKNGGQDEENSDQRDDMEHGWEVVDSNDSASQHQEELPPPPLPPGWEEKVDNLGRTYYVNHNNRTTQWHRPSLMDVSSESDNNIRQINQEAAHRRFRSRRHISEDLEPEPSEGGDVPEPWETISEEVNIAGDSLGLALPPPPASPGSRTSPQELSEELSRRLQITPDSNGEQFSSLIQREPSSRLRSCSVTDAVAEQGHLPPPSAPAGRARSSTVTGGEEPTPSVAYVHTTPGLPSGWEERKDAKGRTYYVNHNNRTTTWTRPIMQLAEDGASGSATNSNNHLIEPQIRRPRSLSSPTVTLSAPLEGAKDSPVRRAVKDTLSNPQSPQPSPYNSPKPQHKVTQSFLPPGWEMRIAPNGRPFFIDHNTKTTTWEDPRLKFPVHMRSKTSLNPNDLGPLPPGWEERIHLDGRTFYIDHNSKITQWEDPRLQNPAITGPAVPYSREFKQKYDYFRKKLKKPADIPNRFEMKLHRNNIFEESYRRIMSVKRPDVLKARLWIEFESEKGLDYGGVAREWFFLLSKEMFNPYYGLFEYSATDNYTLQINPNSGLCNEDHLSYFTFIGRVAGLAVFHGKLLDGFFIRPFYKMMLGKQITLNDMESVDSEYYNSLKWILENDPTELDLMFCIDEENFGQTYQVDLKPNGSEIMVTNENKREYIDLVIQWRFVNRVQKQMNAFLEGFTELLPIDLIKIFDENELELLMCGLGDVDVNDWRQHSIYKNGYCPNHPVIQWFWKAVLLMDAEKRIRLLQFVTGTSRVPMNGFAELYGSNGPQLFTIEQWGSPEKLPRAHTCFNRLDLPPYETFEDLREKLLMAVENAQGFEGVD

SEQ ID NO: 34690 - protein, 834 aa, Homo sapiens
MERPYTFKDFLLRPRSHKSRVKGFLRLKMAYMPKNGGQDEENSDQRDDMEHGWEVVDSNDSASQHQEELPPPPLPPGWEEKVDNLGRTYYVNHNNRTTQWHRPSLMDVSSESDNNIRQINQEAAHRRFRSRRHISEDLEPEPSEGGDVPEPWETISEEVNIAGDSLGLALPPPPASPGSRTSPQELSEELSRRLQITPDSNGEQFSSLIQREPSSRLRSCSVTDAVAEQGHLPPPSVAYVHTTPGLPSGWEERKDAKGRTYYVNHNNRTTTWTRPIMQLAEDGASGSATNSNNHLIEPQIRRPRSLSSPTVTLSAPLEGAKDSPVRRAVKDTLSNPQSPQPSPYNSPKPQHKVTQSFLPPGWEMRIAPNGRPFFIDHNTKTTTWEDPRLKFPVHMRSKTSLNPNDLGPLPPGWEERIHLDGRTFYIDHNSKITQWEDPRLQNPAITGPAVPYSREFKQKYDYFRKKLKKPADIPNRFEMKLHRNNIFEESYRRIMSVKRPDVLKARLWIEFESEKGLDYGGVAREWFFLLSKEMFNPYYGLFEYSATDNYTLQINPNSGLCNEDHLSYFTFIGRVAGLAVFHGKLLDGFFIRPFYKMMLGKQITLNDMESVDSEYYNSLKWILENDPTELDLMFCIDEENFGQTYQVDLKPNGSEIMVTNENKREYIDLVIQWRFVNRVQKQMNAFLEGFTELLPIDLIKIFDENELELLMCGLGDVDVNDWRQHSIYKNGYCPNHPVIQWFWKAVLLMDAEKRIRLLQFVTGTSRVPMNGFAELYGSNGPQLFTIEQWGSPEKLPRAHTCFNRLDLPPYETFEDLREKLLMAVENAQGFEGVD

SEQ ID NO: 34691 - protein, 212 aa, Homo sapiens
MEISMPPPQIYVEKTLAIIKPDIVDKEEEIQDIILRSGFTIVQRRKLRLSPEQCSNFYVEKYGKMFFPNLTAYMSSGPLVAMILARHKAISYWLELLGPNNSLVAKETHPDSLRAIYGTDDLRNALHGSNDFAAAEREIRFMFPEVIVEPIPIGQAAKDYLNLHIMPTLLEGLTELCKQKPADPLIWLADWLLKNNPNKPKLCHHPIVEEPY

SEQ ID NO: 34692 - protein, 1896 aa, Homo sapiens
MPLPPRSLQVLLLLLLLLLLLPGMWAEAGLPRAGGGSQPPFRTFSASDWGLTHLVVHEQTGEVYVGAVNRIYKLSGNLTLLRAHVTGPVEDNEKCYPPPSVQSCPHGLGSTDNVNKLLLLDYAANRLLACGSASQGICQFLRLDDLFKLGEPHHRKEHYLSSVQEAGSMAGVLIAGPPGQGQAKLFVGTPIDGKSEYFPTLSSRRLMANEEDADMFGFVYQDEFVSSQLKIPSDTLSKFPAFDIYYVYSFRSEQFVYYLTLQLDTQLTSPDAAGEHFFTSKIVRLCVDDPKFYSYVEFPIGCEQAGVEYRLVQDAYLSRPGRALAHQLGLAEDEDVLFTVFAQGQKNRVKPPKESALCLFTLRAIKEKIKERIQSCYRGEGKLSLPWLLNKELGCINSPLQIDDDFCGQDFNQPLGGTVTIEGTPLFVDKDDGLTAVAAYDYRGRTVVFAGTRSGRIRKILVDLSNPGGRPALAYESVVAQEGSPILRDLVLSPNHQYLYAMTEKQVTRVPVESCVQYTSCELCLGSRDPHCGWCVLHSICSRRDACERADEPQRFAADLLQCVQLTVQPRNVSVTMSQVPLVLQAWNVPDLSAGVNCSFEDFTESESVLEDGRIHCRSPSAREVAPITRGQGDQRVVKLYLKSKETGKKFASVDFVFYNCSVHQSCLSCVNGSFPCHWCKYRHVCTHNVADCAFLEGRVNVSEDCPQILPSTQIYVPVGVVKPITLAARNLPQPQSGQRGYECLFHIPGSPARVTALRFNSSSLQCQNSSYSYEGNDVSDLPVNLSVVWNGNFVIDNPQNIQAHLYKCPALRESCGLCLKADPRFECGWCVAERRCSLRHHCAADTPASWMHARHGSSRCTDPKILKLSPETGPRQGGTRLTITGENLGLRFEDVRLGVRVGKVLCSPVESEYISAEQIVCEIGDASSVRAHDALVEVCVRDCSPHYRALSPKRFTFVTPTFYRVSPSRGPLSGGTWIGIEGSHLNAGSDVAVSVGGRPCSFSWRNSREIRCLTPPGQSPGSAPIIININRAQLTNPEVKYNYTEDPTILRIDPEWSINSGGTLLTVTGTNLATVREPRIRAKYGGIERENGCLVYNDTTMVCRAPSVANPVRSPPELGERPDELGFVMDNVRSLLVLNSTSFLYYPDPVLEPLSPTGLLELKPSSPLILKGRNLLPPAPGNSRLNYTVLIGSTPCTLTVSETQLLCEAPNLTGQHKVTVRAGGFEFSPGTLQVYSDSLLTLPAIVGIGGGGGLLLLVIVAVLIAYKRKSRDADRTLKRLQLQMDNLESRVALECKEAFAELQTDIHELTNDLDGAGIPFLDYRTYAMRVLFPGIEDHPVLKEMEVQANVEKSLTLFGQLLTKKHFLLTFIRTLEAQRSFSMRDRGNVASLIMTALQGEMEYATGVLKQLLSDLIEKNLESKNHPKLLLRRTESVAEKMLTNWFTFLLYKFLKECAGEPLFMLYCAIKQQMEKGPIDAITGEARYSLSEDKLIRQQIDYKTLTLNCVNPENENAPEVPVKGLDCDTVTQAKEKLLDAAYKGVPYSQRPKAADMDLEWRQGRMARIILQDEDVTTKIDNDWKRLNTLAHYQVTDGSSVALVPKQTSAYNISNSSTFTKSLSRYESMLRTASSPDSLRSRTPMITPDLESGTKLWHLVKNHDHLDQREGDRGSKMVSEIYLTRLLATKGTLQKFVDDLFETIFSTAHRGSALPLAIKYMFDFLDEQADKHQIHDADVRHTWKSNCLPLRFWVNVIKNPQFVFDIHKNSITDACLSVVAQTFMDSCSTSEHKLGKDSPSNKLLYAKDIPNYKSWVERYYADIAKMPAISDQDMSAYLAEQSRLHLSQFNSMSALHEIYSYITKYKDEILAALEKDEQARRQRLRSKLEQVVDTMALSS

SEQ ID NO: 34693 - protein, 354 aa, Homo sapiens
MDMMLLVQGACCSNQWLAAVLLSLCCLLPSCLPAGQSVDFPWAAVDNMMVRKGDTAVLRCYLEDGASKGAWLNRSSIIFAGGDKWSVDPRVSISTLNKRDYSLQIQNVDVTDDGPYTCSVQTQHTPRTMQVHLTVQVPPKIYDISNDMTVNEGTNVTLTCLATGKPEPSISWRHISPSAKPFENGQYLDIYGITRDQAGEYECSAENDVSFPDVRKVKVVVNFAPTIQEIKSGTVTPGRSGLIRCEGAGVPPPAFEWYKGEKKLFNGQQGIIIQNFSTRSILTVTNVTQEHFGNYTCVAANKLGTTNASLPLNPPSTAQYGITGSADVLFSCWYLVLTLSSFTSIFYLKNAILQ

SEQ ID NO: 34694 - protein, 226 aa, Homo sapiens
MQVHLTVQVPPKIYDISNDMTVNEGTNVTLTCLATGKPEPSISWRHISPSAKPFENGQYLDIYGITRDQAGEYECSAENDVSFPDVRKVKVVVNFAPTIQEIKSGTVTPGRSGLIRCEGAGVPPPAFEWYKGEKKLFNGQQGIIIQNFSTRSILTVTNVTQEHFGNYTCVAANKLGTTNASLPLNPPSTAQYGITGSADVLFSCWYLVLTLSSFTSIFYLKNAILQ

SEQ ID NO: 34695 - protein, 172 aa, Homo sapiens
MPGIVELPTLEELKVDEVKISSAVLKAAAHHYGAQCDKPNKEFMLCRWEEKDPRRCLEEGKLVNKCALDFFRQIKRHCAEPFTEYWTCIDYTGQQLFRHCRKQQAKFDECVLDKLGWVRPDLGELSKVTKVKTDRPLPENPYHSRPRPDPSPEIEGDLQPATHGSRFYFWTK

SEQ ID NO: 34696 - protein, 857 aa, Homo sapiens
MAKAKKVGARRKASGAPAGARGGPAKANSNPFEVKVNRQKFQILGRKTRHDVGLPGVSRARALRKRTQTLLKEYKERDKSNVFRDKRFGEYNSNMSPEEKMMKRFALEQQRHHEKKSIYNLNEDEELTHYGQSLADIEKHNDIVDSDSDAEDRGTLSAELTAAHFGGGGGLLHKKTQQEGEEREKPKSRKELIEELIAKSKQEKRERQAQREDALELTEKLDQDWKEIQTLLSHKTPKSENRDKKEKPKPDAYDMMVRELGFEMKAQPSNRMKTEAELAKEEQEHLRKLEAERLRRMLGKDEDENVKKPKHMSADDLNDGFVLDKDDRRLLSYKDGKMNVEEDVQEEQSKEASDPESNEEEGDSSGGEDTEESDSPDSHLDLESNVESEEENEKPAKEQRQTPGKGLISGKERAGKATRDELPYTFAAPESYEELRSLLLGRSMEEQLLVVERIQKCNHPSLAEGNKAKLEKLFGFLLEYVGDLATDDPPDLTVIDKLVVHLYHLCQMFPESASDAIKFVLRDAMHEMEEMIETKGRAALPGLDVLIYLKITGLLFPTSDFWHPVVTPALVCLSQLLTKCPILSLQDVVKGLFVCCLFLEYVALSQRFIPELINFLLGILYIATPNKASQGSTLVHPFRALGKNSELLVVSAREDVATWQQSSLSLRWASRLRAPTSTEANHIRLSCLAVGLALLKRCVLMYGSLPSFHAIMGPLQALLTDHLADCSHPQELQELCQSTLTEMESQKQLCRPLTCEKSKPVPLKLFTPRLVKVLEFGRKQGSSKEEQERKRLIHKHKREFKGAVREIRKDNQFLARMQLSEIMERDAERKRKVKQLFNSLATQEGEWKALKRKKFKK

SEQ ID NO: 34697 - protein, 806 aa, Homo sapiens
MAKAKKVGARRKASGAPAGARGGPAKANSNPFEVKVNRQKFQILGRKTRHDVGLPGVSRARALRKRTQTLLKEYKERDKSNVFRDKRFGEYNSNMSPEEKMMKRFALEQQRHHEKKSIYNLNEDEELTHYGQSLADIEKHNDIVDSDSDAEDRGTLSAELTAAHFGGGGGLLHKKTQQEGEEREKPKSRKELIEELIAKSKQEKRERQAQREDALELTEKLDQDWKEIQTLLSHKTPKSENRDKKEKPKPDAYDMMVRELGFEMKAQPSNRMKTEAELAKEEQEHLRKLEAERLRRMLGKDEDENVKKPKHMSADDLNDGFVLDKDDRRLLSYKDGKMNVEEDVQEEQSKEASDPESNEEEGDSSGGEDTEESDSPDSHLDLESNVESEEENEKPAKEQRQTPGKGLISGKERAGKATRDELPYTFAAPESYEELRSLLLGRSMEEQLLVVERIQKCNHPSLAEGNKAKLEKLFGFLLEYVGDLATDDPPDLTVIDKLVVHLYHLCQMFPESASDAIKFVLRDAMHEMEEMIETKGRAALPGLDVLIYLKITGLLFPTSDFWHPVVTPALVCLSQLLTKCPILSLQDVVKGLFVCCLFLEYVALSQRFIPELINFLLGILYIATPNKASQGSTLVHPFRALGKNSELLVVSAREDVATWQQSSLSLRWASRLRAPTSTEANHIRLSCLAVGLALLKRCVLMYGSLPSFHAIMGPLQALLTDHLADCSHPQELQELCQSTLTEMESQKQLCRPLTCEKSKPVPLKLFTPRLVSNSRPQVIHLPWPPNYRCEPQHPAKKVIFFRVIML

SEQ ID NO: 34698 - protein, 84 aa, Homo sapiens
MAARVGAFLKNAWDKEPVLVVSFVVGGLAVILPPLSPYFKYSVMINKATPYNYPVPVRDDGNMPDVPSHPQDPQGPSLEWLKKL

SEQ ID NO: 34699 - protein, 375 aa, Homo sapiens
MDELQDVQLTEIKPLLNDKNGTRNFQDFDCQEHDIETTHGVVHVTIRGLPKGNRPVILTYHDIGLNHKSCFNAFFNFEDMQEITQHFAVCHVDAPGQQEGAPSFPTGYQYPTMDELAEMLPPVLTHLSLKSIIGIGVGAGAYILSRFALNHPELVEGLVLINVDPCAKGWIDWAASKLSGLTTNVVDIILAHHFGQEELQANLDLIQTYRMHIAQDINQDNLQLFLNSYNGRRDLEIERPILGQNDNKSKTLKCSTLLVVGDNSPAVEAVVECNSRLNPINTTLLKMADCGGLPQVVQPGKLTEAFKYFLQGMGYIPSASMTRLARSRTHSTSSSLGSGESPFSRSVTSNQSDGTQESCESPDVLDRHQTMEVSC

SEQ ID NO: 34700 - protein, 363 aa, Homo sapiens
MDELQDVQLTEIKPLLNDKEHDIETTHGVVHVTIRGLPKGNRPVILTYHDIGLNHKSCFNAFFNFEDMQEITQHFAVCHVDAPGQQEGAPSFPTGYQYPTMDELAEMLPPVLTHLSLKSIIGIGVGAGAYILSRFALNHPELVEGLVLINVDPCAKGWIDWAASKLSGLTTNVVDIILAHHFGQEELQANLDLIQTYRMHIAQDINQDNLQLFLNSYNGRRDLEIERPILGQNDNKSKTLKCSTLLVVGDNSPAVEAVVECNSRLNPINTTLLKMADCGGLPQVVQPGKLTEAFKYFLQGMGYIPSASMTRLARSRTHSTSSSLGSGESPFSRSVTSNQSDGTQESCESPDVLDRHQTMEVSC

SEQ ID NO: 34701 - protein, 286 aa, Homo sapiens
MDELQDVQLTEIKPLLNDKNGTRNFQDFDCQEHDIETTHGVVHVTIGVGAGAYILSRFALNHPELVEGLVLINVDPCAKGWIDWAASKLSGLTTNVVDIILAHHFGQEELQANLDLIQTYRMHIAQDINQDNLQLFLNSYNGRRDLEIERPILGQNDNKSKTLKCSTLLVVGDNSPAVEAVVECNSRLNPINTTLLKMADCGGLPQVVQPGKLTEAFKYFLQGMGYIPSASMTRLARSRTHSTSSSLGSGESPFSRSVTSNQSDGTQESCESPDVLDRHQTMEVSC

SEQ ID NO: 34702 - protein, 800 aa, Homo sapiens
MKARRNKKQIPSFRKLIKTSKVKLENKLKNKQFKQQSTLKKYRKEQRKLRQAVKDAVSKKPIPLENPKEKRPGKRIEREEEEEEEALPLDMMDEDDLQLMKDLGQRVSFLTRDLSSSEPVHAKKRKHERIIDKYEKIPRTLQTAPEKELIHLLPIKDKSGIIPQTREKPVTDSNKDEEDQEEERELEEEIIEDPIQELTIEEHLIERKKKLQEKKMHIAALASAILSDPENNIKKLKELRSMLMEQDPDVAVTVRKLVIVSLMELFKDITPSYKIRPLTEAEKSTKTRKETQKLREFEEGLVSQYKFYLENLEQMVKDWKQRKLKKSNVVSLKAYKGLAEVAVKSLCELLVALPHFNFHNNIIVLIVPLMNDMSKLISEMCCEAVKKLFKQDKLGQASLGVIKVISGFVKGRNYEVRPEMLKTFLCLRIKEVEVKKDTEDINKPKKFMTFKEKRKSLSRMQRKWKKAEEKLERELREAEASESTEKKLKLHTETLNIVFVTYFRILKKAQRSPLLPAVLEGLAKFAHLINVEFFDDLLVVLHTLIESGDLSYQESLHCVQTAFHILSGQGDVLNIDPLKFYTHLYKTLFKLHAGATNEGVEIVLQCLDVMLTKRRKQVSQQRALAFIKRLCTLALHVLPNSSIGILATTRILMHTFPKTDLLLDSESQGSGVFLPELDEPEYCNAQNTALWELHALRRHYHPIVQRFAAHLIAGAPSEGSGALKPELSRRSATELFEAYSMAEMTFNPPVESSNPKIKGKFLQGDSFLNEDLNQLIKRYSSEVATESPLDFTKYLKTSLH

SEQ ID NO: 34703 - protein, 75 aa, Homo sapiens
MNPSEMQRKGPPQRWCLQVYPTAPKRQRPSRTGHDDDGGFVEKKRGKCGEKQERSDCYCVCVERSRHRRLHFVLY

SEQ ID NO: 34704 - protein, 1116 aa, Homo sapiens
MAADLNLEWISLPRSWTYGITRGGRVFFINEEAKSTTWLHPVTGEAVVTGHRRQSTDLPTGWEEAYTFEGARYYINHNERKVTCKHPVTGQPSQDNCIFVVNEQTVATMTSEEKKERPISMINEASNYNVTSDYAVHPMSPVGRTSRASKKVHNFGKRSNSIKRNPNAPVVRRGWLYKQDSTGMKLWKKRWFVLSDLCLFYYRDEKEEGILGSILLPSFQIALLTSEDHINRKYAFKAAHPNMRTYYFCTDTGKEMELWMKAMLDAALVQTEPVKRVDKITSENAPTKETNNIPNHRVLIKPEIQNNQKNKEMSKIEEKKALEAEKYGFQKDGQDRPLTKINSVKLNSLPSEYESGSACPAQTVHYRPINLSSSENKIVNVSLADLRGGNRPNTGPLYTEADRVIQRTNSMQQLEQWIKIQKGRGHEEETRGVISYQTLPRNMPSHRAQIMARYPEGYRTLPRNSKTRPESICSVTPSTHDKTLGPGAEEKRRSMRDDTMWQLYEWQQRQFYNKQSTLPRHSTLSSPKTMVNISDQTMHSIPTSPSHGSIAAYQGYSPQRTYRSEVSSPIQRGDVTIDRRHRAHHPKHVYVPDRRSVPAGLTLQSVSPQSLQGKTLSQDEGRGTLYKYRPEEVDIDAKLSRLCEQDKVVHALEEKLQQLHKEKYTLEQALLSASQEIEMHADNPAAIQTVVLQRDDLQNGLLSTCRELSRATAELERAWREYDKLEYDVTVTRNQMQEQLDHLGEVQTESAGIQRAQIQKELWRIQDVMEGLSKHKQQRGTTEIGMIGSKPFSTVKYKNEGPDYRLYKSEPELTTVAEVDESNGEEKSEPVSEIETSVVKGSHFPVGVVPPRAKSPTPESSTIASYVTLRKTKKMMDLRTERPRSAVEQLCLAESTRPRMTVEEQMERIRRHQQACLREKKKGLNVIGASDQSPLQSPSNLRDNPFRTTQTRRRDDKELDTAIRENDVKPDHETPATEIVQLKETEPQNVDFSKELKKTENISYEMLFEPEPNGVNSVEMMDKERNKDKMPEDVTFSPQDETQTANHKPEEHPEENTKNSVDEQEETVISYESTPEVSRGNQTMAVKSLSPSPESSASPVPSTQPQLTEGSHFMCV

SEQ ID NO: 34705 - protein, 1174 aa, Homo sapiens
MAADLNLEWISLPRSWTYGITRGGRVFFINEEAKSTTWLHPVTGEAVVTGHRRQSTDLPTGWEEAYTFEGARYYINHNERKVTCKHPVTGQPSQDNCIFVVNEQTVATMTSEEKKERPISMINEASNYNVTSDYAVHPMSPVGRTSRASKKVHNFGKRSNSIKRNPNAPVVRRGWLYKQDSTGMKLWKKRWFVLSDLCLFYYRDEKEEGILGSILLPSFQIALLTSEDHINRKYAFKAAHPNMRTYYFCTDTGKEMELWMKAMLDAALVQTEPVKRVDKITSENAPTKETNNIPNHRVLIKPEIQNNQKNKEMSKIEEKKALEAEKYGFQKDGQDRPLTKINSVKLNSLPSEYESGSACPAQTVHYRPINLSSSENKIVNVSLADLRGGNRPNTGPLYTEADRVIQRTNSMQQLEQWIKIQKGRGHEEETRGVISYQTLPRNMPSHRAQIMARYPEGYRTLPRNSKTRPESICSVTPSTHDKTLGPGAEEKRRSMRDDTMWQLYEWQQRQFYNKQSTLPRHSTLSSPKTMVNISDQTMHSIPTSPSHGSIAAYQGYSPQRTYRSEVSSPIQRGDVTIDRRHRAHHPKHVYVPDRRSVPAGLTLQSVSPQSLQGKTPEELTLLLIKLRRQQAELSSIREHTLAQLMQLKLEAHSPKNEILSHHLQRNTIYLDHQLSQDEGRGTLYKYRPEEVDIDAKLSRLCEQDKVVHALEEKLQQLHKEKYTLEQALLSASQEIEMHADNPAAIQTVVLQRDDLQNGLLSTCRELSRATAELERAWREYDKLEYDVTVTRNQMQEQLDHLGEVQTESAGIQRAQIQKELWRIQDVMEGLSKHKQQRGTTEIGMIGSKPFSTVKYKNEGPDYRLYKSEPELTTVAEVDESNGEEKSEPVSEIETSVVKGSHFPVGVVPPRAKSPTPESSTIASYVTLRKTKKMMDLRTERPRSAVEQLCLAESTRPRMTVEEQMERIRRHQQACLREKKKGLNVIGASDQSPLQSPSNLRDNPFRTTQTRRRDDKELDTAIRENDVKPDHETPATEIVQLKETEPQNVDFSKELKKTENISYEMLFEPEPNGVNSVEMMDKERNKDKMPEDVTFSPQDETQTANHKPEEHPEENTKNSVDEQEETVISYESTPEVSRGNQTMAVKSLSPSPESSASPVPSTQPQLTEGSHFMCV

SEQ ID NO: 34706 - protein, 650 aa, Homo sapiens
MAADLNLEWISLPRSWTYGITRGGRVFFINEEAKSTTWLHPVTGEAVVTGHRRQSTDLPTGWEEAYTFEGARYYINHNERKVTCKHPVTGQPSQDNCIFVVNEQTVATMTSEEKKERPISMINEASNYNVTSDYAVHPMSPVGRTSRASKKVHNFGKRSNSIKRNPNAPVVRRGWLYKQDSTGMKLWKKRWFVLSDLCLFYYRDEKEEGILGSILLPSFQIALLTSEDHINRKYAFKAAHPNMRTYYFCTDTGKEMELWMKAMLDAALVQTEPVKRVDKITSENAPTKETNNIPNHRVLIKPEIQNNQKNKEMSKIEEKKALEAEKYGFQKDGQDRPLTKINSVKLNSLPSEYESGSACPAQTVHYRPINLSSSENKIVNVSLADLRGGNRPNTGPLYTEADRVIQRTNSMQQLEQWIKIQKGRGHEEETRGVISYQTLPRNMPSHRAQIMARYPEGYRTLPRNSKTRPESICSVTPSTHDKTLGPGAEEKRRSMRDDTMWQLYEWQQRQFYNKQSTLPRHSTLSSPKTMVNISDQTMHSIPTSPSHGSIAAYQGYSPQRTYRSEVSSPIQRGDVTIDRRHRAHHPKHVYVPDRRSVPAGLTLQSVSPQSLQGKTWGREKVATATGAAEAVASDTHLPRTGSSSPSLLCV

SEQ ID NO: 34707 - protein, 1179 aa, Homo sapiens
MAADLNLEWISLPRSWTYGITRGGRVFFINEEAKSTTWLHPVTGEAVVTGHRRQSTDLPTGWEEAYTFEGARYYINHNERKVTCKHPVTGQPSQDNCIFVVNEQTVATMTSEEKKERPISMINEASNYNVTSDYAVHPMSPVGRTSRASKKVHNFGKRSNSIKRNPNAPVVRRGWLYKQDSTGMKLWKKRWFVLSDLCLFYYRDEKEEGILGSILLPSFQIALLTSEDHINRKYAFKAAHPNMRTYYFCTDTGKEMELWMKAMLDAALVQTEPVKRVDKITSENAPTKETNNIPNHRVLIKPEIQNNQKNKEMSKIEEKKALEAEKYGFQKDGQDRPLTKINSVKLNSLPSEYESGSACPAQTVHYRPINLSSSENKIVNVSLADLRGGNRPNTGPLYTEADRVIQRTNSMQQLEQWIKIQKGRGHEEETRGVISYQTLPRNMPSHRAQIMARYPEGYRTLPRNSKTRPESICSVTPSTHDKTLGPGAEEKRRSMRDDTMWQLYEWQQRQFYNKQSTLPRHSTLSSPKTMVNISDQTMHSIPTSPSHGSIAAYQGYSPQRTYRSEVSSPIQRGDVTIDRRHRAHHPKHVYVPDRRSVPAGLTLQSVSPQSLQGKTLSQDEGRGTLYKYRPEEVDIDAKLSRLCEQDKVVHALEEKLQQLHKEKYTLEQALLSASQEIEMHADNPAAIQTVVLQRDDLQNGLLSTCRELSRATAELERAWREYDKLEYDVTVTRNQMQEQLDHLGEVQTESAGIQRAQIQKELWRIQDVMEGLSKHKQQRGTTEIGMIGSKPFSTVKYKNEEEEVVPPRPPLPRSYDFTEQPPIIPPLPSDSSSLLCYSRGPVHLPEEKKMYQVQGYPRNGSHCGPDYRLYKSEPELTTVAEVDESNGEEKSEPVSEIETSVVKGSHFPVGVVPPRAKSPTPESSTIASYVTLRKTKKMMDLRTERPRSAVEQLCLAESTRPRMTVEEQMERIRRHQQACLREKKKGLNVIGASDQSPLQSPSNLRDNPFRTTQTRRRDDKELDTAIRENDVKPDHETPATEIVQLKETEPQNVDFSKELKKTENISYEMLFEPEPNGVNSVEMMDKERNKDKMPEDVTFSPQDETQTANHKPEEHPEENTKNSVDEQEETVISYESTPEVSRGNQTMAVKSLSPSPESSASPVPSTQPQLTEGSHFMCV

SEQ ID NO: 34708 - protein, 1060 aa, Homo sapiens
MAADLNLEWISLPRSWTYGITRGGRVFFINEEAKSTTWLHPVTGEAVVTGHRRQSTDLPTGWEEAYTFEGARYYINHNERKVTCKHPVTGQPSQDNCIFVVNEQTVATMTSEEKKERPISMINEASNYNVTSDYAVHPMSPVGRTSRASKKVHNFGKRSNSIKRNPNAPVVRRGWLYKQDSTGMKLWKKRWFVLSDLCLFYYRDEKEEGILGSILLPSFQIALLTSEDHINRKYAFKAAHPNMRTYYFCTDTGKEMELWMKAMLDAALVQTEPVKRVDKITSENAPTKETNNIPNHRVLIKPEIQNNQKNKEMSKIEEKKALEAEKYGFQKDGQDRPLTKINSVKLNSLPSEYESGSACPAQTVHYRPINLSSSENKIVNVSLADLRGGNRPNTGPLYTEADRVIQRTNSMQQLEQWIKIQKGRGHEEETRGVISYQTLPRNMPSHRAQIMARYPEGYRTLPRNSKTRPESICSVTPSTHDKTLGPGAEEKRRSMRDDTMWQLYEWQQRQFYNKQSTLPRHSTLSSPKTMVNISDQTMHSIPTSPSHGSIAAYQGYSPQRTYRSEVSSPIQRGDVTIDRRHRAHHPKHVYVPDRRSVPAGLTLQSVSPQSLQGKTLSQDEGRGTLYKYRPEEVDIDAKLSRLCEQDKVVHALEEKLQQLHKEKYTLEQALLSASQEIEMHADNPAAIQTVVLQRDDLQNGLLSTCRELSRATAELERAWREYDKLEYDVTVTRNQMQEQLDHLGEVQTESAGIQRAQIQKELWRIQDVMEGLSKHKQQRGTTEIGSHFPVGVVPPRAKSPTPESSTIASYVTLRKTKKMMDLRTERPRSAVEQLCLAESTRPRMTVEEQMERIRRHQQACLREKKKGLNVIGASDQSPLQSPSNLRDNPFRTTQTRRRDDKELDTAIRENDVKPDHETPATEIVQLKETEPQNVDFSKELKKTENISYEMLFEPEPNGVNSVEMMDKERNKDKMPEDVTFSPQDETQTANHKPEEHPEENTKNSVDEQEETVISYESTPEVSRGNQTMAVKSLSPSPESSASPVPSTQPQLTEGSHFMCV

SEQ ID NO: 34709 - protein, 1282 aa, Homo sapiens
MAADLNLEWISLPRSWTYGITRGGRVFFINEEAKSTTWLHPVTGEAVVTGHRRQSTDLPTGWEEAYTFEGARYYINHNERKVTCKHPVTGQPSQDNCIFVVNEQTVATMTSEEKKERPISMINEASNYNVTSDYAVHPMSPVGRTSRASKKVHNFGKRSNSIKRNPNAPVVRRGWLYKQDSTGMKLWKKRWFVLSDLCLFYYRDEKEEGILGSILLPSFQIALLTSEDHINRKYAFKAAHPNMRTYYFCTDTGKEMELWMKAMLDAALVQTEPVKRITFNFRVDKITSENAPTKETNNIPNHRVLIKPEIQNNQKNKEMSKIEEKKALEAEKYGFQKDGQDRPLTKINSVKLNSLPSEYESGSACPAQTVHYRPINLSSSENKIVNVSLADLRGGNRPNTGPLYTEADRVIQRTNSMQQLEQWIKIQKGRGHEEETRGVISYQTLPRNMPSHRAQIMARYPEGYRTLPRNSKTRPESICSVTPSTHDKTLGPGAEEKRRSMRDDTMWQLYEWQQRQFYNKQSTLPRHSTLSSPKTMVNISDQTMHSIPTSPSHGSIAAYQGYSPQRTYRSEVSSPIQRGDVTIDRRHRAHHPKHVYVPDRRSVPAGLTLQSVSPQSLQGKTPEELTLLLIKLRRQQAELSSIREHTLAQLMQLKLEAHSPKNEILSHHLQRNTIYLDHQMKENEPIITMVHTMIENSALRPQLYQQFLRQKSKISLYCLSQDEGRGTLYKYRPEEVDIDAKLSRLCEQDKVVHALEEKLQQLHKEKYTLEQALLSASQEIEMHADNPAAIQTVVLQRDDLQNGLLSTCRELSRATAELERAWREYDKLEYDVTVTRNQMQEQLDHLGEVQTESAGIQRAQIQKELWRIQDVMEGLSKHKQQRGTTEIGMIGSKPFSTVKYKNEEEEVVPPRPPLPRSYDFTEQPPIIPPLPSDSSSLLCYSRGPVHLPEEKKMYQVQGYPRNGSHCGPDYRLYKSEPELTTVAEVDESNGEEKSEPVSEIETSVVKGSHFPVGVVPPRAKSPTPESSTIASYVTLRKTKKMMDLRTERPRSAVEQLCLAESTRPRMTVEEQMERIRRHQQACLREKKKGLNVIGASDQSPLQSPSNLRDNPFRTTQTRRRDDKELDTAIRENDVKPDHETPATEIVQLKETEPQNVDFSKELKKTENISYEMLFEPEPNGVNSVEMMDKERNKDKMPEDVTFSPQDETQTANHKPEEHPEENTKNSVDEQEETVISYESTPEVSRGNQTMAVKSLSPSPESSASPVPSTQPQLTEGSHFMCV

SEQ ID NO: 34710 - protein, 76 aa, Homo sapiens
MAADLNLEWISLPRSWTYGITRGGRVFFINEEAKSTTWLHPVTGEAVVTGHRRQSTDLPTGWEEAYTFEGARYYIN

SEQ ID NO: 34711 - protein, 1098 aa, Homo sapiens
MTSEEKKERPISMINEASNYNVTSDYAVHPMSPVGRTSRASKKVHNFGKRSNSIKRNPNAPVVRRGWLYKQDSTGMKLWKKRWFVLSDLCLFYYRDEKEEGILGSILLPSFQIALLTSEDHINRKYAFKAAHPNMRTYYFCTDTGKEMELWMKAMLDAALVQTEPVKRVDKITSENAPTKETNNIPNHRVLIKPEIQNNQKNKEMSKIEEKKALEAEKYGFQKDGQDRPLTKINSVKLNSLPSEYESGSACPAQTVHYRPINLSSSENKIVNVSLADLRGGNRPNTGPLYTEADRVIQRTNSMQQLEQWIKIQKGRGHEEETRGVISYQTLPRNMPSHRAQIMARYPEGYRTLPRNSKTRPESICSVTPSTHDKTLGPGAEEKRRSMRDDTMWQLYEWQQRQFYNKQSTLPRHSTLSSPKTMVNISDQTMHSIPTSPSHGSIAAYQGYSPQRTYRSEVSSPIQRGDVTIDRRHRAHHPKHVYVPDRRSVPAGLTLQSVSPQSLQGKTMKENEPIITMVHTMIENSALRPQLYQQLSQDEGRGTLYKYRPEEVDIDAKLSRLCEQDKVVHALEEKLQQLHKEKYTLEQALLSASQEIEMHADNPAAIQTVVLQRDDLQNGLLSTCRELSRATAELERAWREYDKLEYDVTVTRNQMQEQLDHLGEVQTESAGIQRAQIQKELWRIQDVMEGLSKHKQQRGTTEIGMIGSKPFSTVKYKNEEEEVVPPRPPLPRSYDFTEQPPIIPPLPSDSSSLLCYSRGPVHLPEEKKMYQVQGYPRNGSHCGPDYRLYKSEPELTTVAEVDESNGEEKSEPVSEIETSVVKGSHFPVGVVPPRAKSPTPESSTIASYVTLRKTKKMMDLRTERPRSAVEQLCLAESTRPRMTVEEQMERIRRHQQACLREKKKGLNVIGASDQSPLQSPSNLRDNPFRTTQTRRRDDKELDTAIRENDVKPDHETPATEIVQLKETEPQNVDFSKELKKTENISYEMLFEPEPNGVNSVEMMDKERNKDKMPEDVTFSPQDETQTANHKPEEHPEENTKNSVDEQEETVISYESTPEVSRGNQTMAVKSLSPSPESSASPVPSTQPQLTEGSHFMCV

SEQ ID NO: 34712 - protein, 1434 aa, Homo sapiens
MEDHMFGVQQIQPNVISVRLFKRKVGGLGFLVKERVSKPPVIISDLIRGGAAEQSGLIQAGDIILAVNGRPLVDLSYDSALEVLRGIASETHVVLILRGPEGFTTHLETTFTGDGTPKTIRVTQPLGPPTKAVDLSHQPPAGKEQPLAVDGASGPGNGPQHAYDDGQEAGSLPHANGLAPRPPGQDPAKKATRVSLQGRGENNELLKEIEPVLSLLTSGSRGVKGGAPAKAEMKDMGIQVDRDLDGKSHKPLPLGVENDRVFNDLWGKGNVPVVLNNPYSEKEQPPTSGKQSPTKNGSPSKCPRFLKVKNWETEVVLTDTLHLKSTLETGCTEYICMGSIMHPSQHARRPEDVRTKGQLFPLAKEFIDQYYSSIKRFGSKAHMERLEEVNKEIDTTSTYQLKDTELIYGAKHAWRNASRCVGRIQWSKLQVFDARDCTTAHGMFNYICNHVKYATNKGNLRSAITIFPQRTDGKHDFRVWNSQLIRYAGYKQPDGSTLGDPANVQFTEICIQQGWKPPRGRFDVLPLLLQANGNDPELFQIPPELVLEVPIRHPKFEWFKDLGLKWYGLPAVSNMLLEIGGLEFSACPFSGWYMGTEIGVRDYCDNSRYNILEEVAKKMNLDMRKTSSLWKDQALVEINIAVLYSFQSDKVTIVDHHSATESFIKHMENEYRCRGGCPADWVWIVPPMSGSITPVFHQEMLNYRLTPSFEYQPDPWNTHVWKGTNGTPTKRRAIGFKKLAEAVKFSAKLMGQAMAKRVKATILYATETGKSQAYAKTLCEIFKHAFDAKVMSMEEYDIVHLEHETLVLVVTSTFGNGDPPENGEKFGCALMEMRHPNSVQEERKSYKVRFNSVSSYSDSQKSSGDGPDLRDNFESAGPLANVRFSVFGLGSRAYPHFCAFGHAVDTLLEELGGERILKMREGDELCGQEEAFRTWAKKVFKAACDVFCVGDDVNIEKANNSLISNDRSWKRNKFRLTFVAEAPELTQGLSNVHKKRVSAARLLSRQNLQSPKSSRSTIFVRLHTNGSQELQYQPGDHLGVFPGNHEDLVNALIERLEDAPPVNQMVKVELLEERNTALGVISNWTDELRLPPCTIFQAFKYYLDITTPPTPLQLQQFASLATSEKEKQRLLVLSKGLQEYEEWKWGKNPTIVEVLEEFPSIQMPATLLLTQLSLLQPRYYSISSSPDMYPDEVHLTVAIVSYRTRDGEGPIHHGVCSSWLNRIQADELVPCFVRGAPSFHLPRNPQVPCILVGPGTGIAPFRSFWQQRQFDIQHKGMNPCPMVLVFGCRQSKIDHIYREETLQAKNKGVFRELYTAYSREPDKPKKYVQDILQEQLAESVYRALKEQGGHIYVCGDVTMAADVLKAIQRIMTQQGKLSAEDAGVFISRMRDDNRYHEDIFGVTLRTYEVTNRLRSESIAFIEESKKDTDEVFSS

SEQ ID NO: 34713 - protein, 1329 aa, Homo sapiens
MEDHMFGVQQIQPNVISVRLFKRKVGGLGFLVKERVSKPPVIISDLIRGGAAEQSGLIQAGDIILAVNGRPLVDLSYDSALEVLRGIASETHVVLILRGPEGFTTHLETTFTGDGTPKTIRVTQPLGPPTKAVDLSHQPPAGKEQPLAVDGASGPGNGPQHAYDDGQEAGSLPHANGLAPRPPGQDPAKKATRVSLQGRGENNELLKEIEPVLSLLTSGSRGVKGGAPAKAEMKDMGIQVDRDLDGKSHKPLPLGVENDRVFNDLWGKGNVPVVLNNPYSEKEQPPTSGKQSPTKNGSPSKCPRFLKVKNWETEVVLTDTLHLKSTLETGCTEYICMGSIMHPSQHARRPEDVRTKGQLFPLAKEFIDQYYSSIKRFGSKAHMERLEEVNKEIDTTSTYQLKDTELIYGAKHAWRNASRCVGRIQWSKLQVFDARDCTTAHGMFNYICNHVKYATNKGNLRSAITIFPQRTDGKHDFRVWNSQLIRYAGYKQPDGSTLGDPANVQFTEEVAKKMNLDMRKTSSLWKDQALVEINIAVLYSFQSDKVTIVDHHSATESFIKHMENEYRCRGGCPADWVWIVPPMSGSITPVFHQEMLNYRLTPSFEYQPDPWNTHVWKGTNGTPTKRRAIGFKKLAEAVKFSAKLMGQAMAKRVKATILYATETGKSQAYAKTLCEIFKHAFDAKVMSMEEYDIVHLEHETLVLVVTSTFGNGDPPENGEKFGCALMEMRHPNSVQEERKSYKVRFNSVSSYSDSQKSSGDGPDLRDNFESAGPLANVRFSVFGLGSRAYPHFCAFGHAVDTLLEELGGERILKMREGDELCGQEEAFRTWAKKVFKAACDVFCVGDDVNIEKANNSLISNDRSWKRNKFRLTFVAEAPELTQGLSNVHKKRVSAARLLSRQNLQSPKSSRSTIFVRLHTNGSQELQYQPGDHLGVFPGNHEDLVNALIERLEDAPPVNQMVKVELLEERNTALGVISNWTDELRLPPCTIFQAFKYYLDITTPPTPLQLQQFASLATSEKEKQRLLVLSKGLQEYEEWKWGKNPTIVEVLEEFPSIQMPATLLLTQLSLLQPRYYSISSSPDMYPDEVHLTVAIVSYRTRDGEGPIHHGVCSSWLNRIQADELVPCFVRGAPSFHLPRNPQVPCILVGPGTGIAPFRSFWQQRQFDIQHKGMNPCPMVLVFGCRQSKIDHIYREETLQAKNKGVFRELYTAYSREPDKPKKYVQDILQEQLAESVYRALKEQGGHIYVCGDVTMAADVLKAIQRIMTQQGKLSAEDAGVFISRMRDDNRYHEDIFGVTLRTYEVTNRLRSESIAFIEESKKDTDEVFSS

SEQ ID NO: 34714 - protein, 1098 aa, Homo sapiens
MGSIMHPSQHARRPEDVRTKGQLFPLAKEFIDQYYSSIKRFGSKAHMERLEEVNKEIDTTSTYQLKDTELIYGAKHAWRNASRCVGRIQWSKLQVFDARDCTTAHGMFNYICNHVKYATNKGNLRSAITIFPQRTDGKHDFRVWNSQLIRYAGYKQPDGSTLGDPANVQFTEICIQQGWKPPRGRFDVLPLLLQANGNDPELFQIPPELVLEVPIRHPKFEWFKDLGLKWYGLPAVSNMLLEIGGLEFSACPFSGWYMGTEIGVRDYCDNSRYNILEEVAKKMNLDMRKTSSLWKDQALVEINIAVLYSFQSDKVTIVDHHSATESFIKHMENEYRCRGGCPADWVWIVPPMSGSITPVFHQEMLNYRLTPSFEYQPDPWNTHVWKGTNGTPTKRRAIGFKKLAEAVKFSAKLMGQAMAKRVKATILYATETGKSQAYAKTLCEIFKHAFDAKVMSMEEYDIVHLEHETLVLVVTSTFGNGDPPENGEKFGCALMEMRHPNSVQEERKSYKVRFNSVSSYSDSQKSSGDGPDLRDNFESAGPLANVRFSVFGLGSRAYPHFCAFGHAVDTLLEELGGERILKMREGDELCGQEEAFRTWAKKVFKAACDVFCVGDDVNIEKANNSLISNDRSWKRNKFRLTFVAEAPELTQGLSNVHKKRVSAARLLSRQNLQSPKSSRSTIFVRLHTNGSQELQYQPGDHLGVFPGNHEDLVNALIERLEDAPPVNQMVKVELLEERNTALGVISNWTDELRLPPCTIFQAFKYYLDITTPPTPLQLQQFASLATSEKEKQRLLVLSKGLQEYEEWKWGKNPTIVEVLEEFPSIQMPATLLLTQLSLLQPRYYSISSSPDMYPDEVHLTVAIVSYRTRDGEGPIHHGVCSSWLNRIQADELVPCFVRGAPSFHLPRNPQVPCILVGPGTGIAPFRSFWQQRQFDIQHKGMNPCPMVLVFGCRQSKIDHIYREETLQAKNKGVFRELYTAYSREPDKPKKYVQDILQEQLAESVYRALKEQGGHIYVCGDVTMAADVLKAIQRIMTQQGKLSAEDAGVFISRMRDDNRYHEDIFGVTLRTYEVTNRLRSESIAFIEESKKDTDEVFSS

SEQ ID NO: 34715 - protein, 407 aa, Homo sapiens
MEDHMFGVQQIQPNVISVRLFKRKVGGLGFLVKERVSKPPVIISDLIRGGAAEQSGLIQAGDIILAVNGRPLVDLSYDSALEVLRGIASETHVVLILRGPEGFTTHLETTFTGDGTPKTIRVTQPLGPPTKAVDLSHQPPAGKEQPLAVDGASGPGNGPQHAYDDGQEAGSLPHANGLAPRPPGQDPAKKATRVSLQGRGENNELLKEIEPVLSLLTSGSRGVKGGAPAKAEMKDMGIQVDRDLDGKSHKPLPLGVENDRVFNDLWGKGNVPVVLNNPYSEKEQMRKLRITEGFGVQRGSHNHPPPQENSPPQRMAAPPSVHASSRSRTGRLRWFSLTPSTLRAHWKRDALSTSAWAPSCILLSMQGGLKTSAQKDSSSLSPKSLLINTIHQLKDLAPKPTWKGWKR

SEQ ID NO: 34716 - protein, 1468 aa, Homo sapiens
MEDHMFGVQQIQPNVISVRLFKRKVGGLGFLVKERVSKPPVIISDLIRGGAAEQSGLIQAGDIILAVNGRPLVDLSYDSALEVLRGIASETHVVLILRGPEGFTTHLETTFTGDGTPKTIRVTQPLGPPTKAVDLSHQPPAGKEQPLAVDGASGPGNGPQHAYDDGQEAGSLPHANGLAPRPPGQDPAKKATRVSLQGRGENNELLKEIEPVLSLLTSGSRGVKGGAPAKAEMKDMGIQVDRDLDGKSHKPLPLGVENDRVFNDLWGKGNVPVVLNNPYSEKEQPPTSGKQSPTKNGSPSKCPRFLKVKNWETEVVLTDTLHLKSTLETGCTEYICMGSIMHPSQHARRPEDVRTKGQLFPLAKEFIDQYYSSIKRFGSKAHMERLEEVNKEIDTTSTYQLKDTELIYGAKHAWRNASRCVGRIQWSKLQVFDARDCTTAHGMFNYICNHVKYATNKGNLRSAITIFPQRTDGKHDFRVWNSQLIRYAGYKQPDGSTLGDPANVQFTEICIQQGWKPPRGRFDVLPLLLQANGNDPELFQIPPELVLEVPIRHPKFEWFKDLGLKWYGLPAVSNMLLEIGGLEFSACPFSGWYMGTEIGVRDYCDNSRYNILEEVAKKMNLDMRKTSSLWKDQALVEINIAVLYSFQSDKVTIVDHHSATESFIKHMENEYRCRGGCPADWVWIVPPMSGSITPVFHQEMLNYRLTPSFEYQPDPWNTHVWKGTNGTPTKRRAIGFKKLAEAVKFSAKLMGQAMAKRVKATILYATETGKSQAYAKTLCEIFKHAFDAKVMSMEEYDIVHLEHETLVLVVTSTFGNGDPPENGEKFGCALMEMRHPNSVQEERKYPEPLRFFPRKGPPLPNGDTEVHGLAAARDSQHRSYKVRFNSVSSYSDSQKSSGDGPDLRDNFESAGPLANVRFSVFGLGSRAYPHFCAFGHAVDTLLEELGGERILKMREGDELCGQEEAFRTWAKKVFKAACDVFCVGDDVNIEKANNSLISNDRSWKRNKFRLTFVAEAPELTQGLSNVHKKRVSAARLLSRQNLQSPKSSRSTIFVRLHTNGSQELQYQPGDHLGVFPGNHEDLVNALIERLEDAPPVNQMVKVELLEERNTALGVISNWTDELRLPPCTIFQAFKYYLDITTPPTPLQLQQFASLATSEKEKQRLLVLSKGLQEYEEWKWGKNPTIVEVLEEFPSIQMPATLLLTQLSLLQPRYYSISSSPDMYPDEVHLTVAIVSYRTRDGEGPIHHGVCSSWLNRIQADELVPCFVRGAPSFHLPRNPQVPCILVGPGTGIAPFRSFWQQRQFDIQHKGMNPCPMVLVFGCRQSKIDHIYREETLQAKNKGVFRELYTAYSREPDKPKKYVQDILQEQLAESVYRALKEQGGHIYVCGDVTMAADVLKAIQRIMTQQGKLSAEDAGVFISRMRDDNRYHEDIFGVTLRTYEVTNRLRSESIAFIEESKKDTDEVFSS

SEQ ID NO: 34717 - protein, 1153 aa, Homo sapiens
MACPWKFLFKTKFHQYAMNGEKDINNNVEKAPCATSSPVTQDDLQYHNLSKQQNESPQPLVETGKKSPESLVKLDATPLSSPRHVRIKNWGSGMTFQDTLHHKAKGILTCRSKSCLGSIMTPKSLTRGPRDKPTPPDELLPQAIEFVNQYYGSFKEAKIEEHLARVEAVTKEIETTGTYQLTGDELIFATKQAWRNAPRCIGRIQWSNLQVFDARSCSTAREMFEHICRHVRYSTNNGNIRSAITVFPQRSDGKHDFRVWNAQLIRYAGYQMPDGSIRGDPANVEFTQLCIDLGWKPKYGRFDVVPLVLQANGRDPELFEIPPDLVLEVAMEHPKYEWFRELELKWYALPAVANMLLEVGGLEFPGCPFNGWYMGTEIGVRDFCDVQRYNILEEVGRRMGLETHKLASLWKDQAVVEINIAVLHSFQKQNVTIMDHHSAAESFMKYMQNEYRSRGGCPADWIWLVPPMSGSITPVFHQEMLNYVLSPFYYYQVEAWKTHVWQDEKRRPKRREIPLKVLVKAVLFACMLMRKTMASRVRVTILFATETGKSEALAWDLGALFSCAFNPKVVCMDKYRLSCLEEERLLLVVTSTFGNGDCPGNGEKLKKSLFMLKELNNKFRYAVFGLGSSMYPRFCAFAHDIDQKLSHLGASQLTPMGEGDELSGQEDAFRSWAVQTFKAACETFDVRGKQHIQIPKLYTSNVTWDPHHYRLVQDSQPLDLSKALSSMHAKNVFTMRLKSRQNLQSPTSSRATILVELSCEDGQGLNYLPGEHLGVCPGNQPALVQGILERVVDGPTPHQTVRLEALDESGSYWVSDKRLPPCSLSQALTYFLDITTPPTQLLLQKLAQVATEEPERQRLEALCQPSEYSKWKFTNSPTFLEVLEEFPSLRVSAGFLLSQLPILKPRFYSISSSRDHTPTEIHLTVAVVTYHTRDGQGPLHHGVCSTWLNSLKPQDPVPCFVRNASGFHLPEDPSHPCILIGPGTGIAPFRSFWQQRLHDSQHKGVRGGRMTLVFGCRRPDEDHIYQEEMLEMAQKGVLHAVHTAYSRLPGKPKVYVQDILRQQLASEVLRVLHKEPGHLYVCGDVRMARDVAHTLKQLVAAKLKLNEEQVEDYFFQLKSQKRYHEDIFGAVFPYEAKKDRVAVQPSSLEMSAL

SEQ ID NO: 34718 - protein, 1114 aa, Homo sapiens
MACPWKFLFKTKFHQYAMNGEKDINNNVEKAPCATSSPVTQDDLQYHNLSKQQNESPQPLVETGKKSPESLVKLDATPLSSPRHVRIKNWGSGMTFQDTLHHKAKGILTCRSKSCLGSIMTPKSLTRGPRDKPTPPDELLPQAIEFVNQYYGSFKEAKIEEHLARVEAVTKEIETTGTYQLTGDELIFATKQAWRNAPRCIGRIQWSNLQVFDARSCSTAREMFEHICRHVRYSTNNGNIRSAITVFPQRSDGKHDFRVWNAQLCIDLGWKPNGRDPELFEIPPDLVLEVAMEHPKYEWFRELELKWYALPAVANMLLEVGGLEFPGCPFNGWYMGTEIGVRDFCDVQRYNILEEVGRRMGLETHKLASLWKDQAVVEINIAVLHSFQKQNVTIMDHHSAAESFMKYMQNEYRSRGGCPADWIWLVPPMSGSITPVFHQEMLNYVLSPFYYYQVEAWKTHVWQDEKRRPKRREIPLKVLVKAVLFACMLMRKTMASRVRVTILFATETGKSEALAWDLGALFSCAFNPKVVCMDKYRLSCLEEERLLLVVTSTFGNGDCPGNGEKLKKSLFMLKELNNKFRYAVFGLGSSMYPRFCAFAHDIDQKLSHLGASQLTPMGEGDELSGQEDAFRSWAVQTFKAACETFDVRGKQHIQIPKLYTSNVTWDPHHYRLVQDSQPLDLSKALSSMHAKNVFTMRLKSRQNLQSPTSSRATILVELSCEDGQGLNYLPGEHLGVCPGNQPALVQGILERVVDGPTPHQTVRLEALDESGSYWVSDKRLPPCSLSQALTYFLDITTPPTQLLLQKLAQVATEEPERQRLEALCQPSEYSKWKFTNSPTFLEVLEEFPSLRVSAGFLLSQLPILKPRFYSISSSRDHTPTEIHLTVAVVTYHTRDGQGPLHHGVCSTWLNSLKPQDPVPCFVRNASGFHLPEDPSHPCILIGPGTGIAPFRSFWQQRLHDSQHKGVRGGRMTLVFGCRRPDEDHIYQEEMLEMAQKGVLHAVHTAYSRLPGKPKVYVQDILRQQLASEVLRVLHKEPGHLYVCGDVRMARDVAHTLKQLVAAKLKLNEEQVEDYFFQLKSQKRYHEDIFGAVFPYEAKKDRVAVQPSSLEMSAL

SEQ ID NO: 34719 - protein, 824 aa, Homo sapiens
MDEDEKDRAKRASRNKSEKKRRDQFNVLIKELSSMLPGNTRKMDKTTVLEKVIGFLQKHNEVSAQTEICDIQQDWKPSFLSNEEFTQLMLEALDGFIIAVTTDGSIIYVSDSITPLLGHLPSDVMDQNLLNFLPEQEHSEVYKILSSHMLVTDSPSPEYLKSDSDLEFYCHLLRGSLNPKEFPTYEYIKFVGNFRSYNNVPSPSCNGFDNTLSRPCRVPLGKEVCFIATVRLATPQFLKEMCIVDEPLEEFTSRHSLEWKFLFLDHRAPPIIGYLPFEVLGTSGYDYYHIDDLELLARCHQHLMQFGKGKSCCYRFLTKGQQWIWLQTHYYITYHQWNSKPEFIVCTHSVVSYADVRVERRQELALEDPPSEALHSSALKDKGSSLEPRQHFNTLDVGASGLNTSHSPSASSRSSHKSSHTAMSEPTSTPTKLMAEASTPALPRSATLPQELPVPGLSQAATMPAPLPSPSSCDLTQQLLPQTVLQSTPAPMAQFSAQFSMFQTIKDQLEQRTRILQANIRWQQEELHKIQEQLCLVQDSNVQMFLQQPAVSLSFSSTQRPEAQQQLQQRSAAVTQPQLGAGPQLPGQISSAQVTSQHLLRESSVISTQGPKPMRSSQLMQSSGRSGSSLVSPFSSATAALPPSLNLTTPASTSQDASQCQPSPDFSHDRQLRLLLSQPIQPMMPGSCDARQPSEVSRTGRQVKYAQSQTVFQNPDAHPANSSSAPMPVLLMGQAVLHPSFPASQPSPLQPAQARQQPPQHYLQVQAPTSLHSEQQDSLLLSTYSQQPGTLGYPQPPPAQPQPLRPPRRVSSLSESSGLQQPPR

SEQ ID NO: 34720 - protein, 1036 aa, Homo sapiens
MKMASTRCKLARYLEDLEDVDLKKFKMHLEDYPPQKGCIPLPRGQTEKADHVDLATLMIDFNGEEKAWAMAVWIFAAINRRDLYEKAKRDEPKWGSDNARVSNPTVICQEDSIEEEWMGLLEYLSRISICKMKKDYRKKYRKYVRSRFQCIEDRNARLGESVSLNKRYTRLRLIKEHRSQQEREQELLAIGKTKTCESPVSPIKMELLFDPDDEHSEPVHTVVFQGAAGIGKTILARKMMLDWASGTLYQDRFDYLFYIHCREVSLVTQRSLGDLIMSCCPDPNPPIHKIVRKPSRILFLMDGFDELQGAFDEHIGPLCTDWQKAERGDILLSSLIRKKLLPEASLLITTRPVALEKLQHLLDHPRHVEILGFSEAKRKEYFFKYFSDEAQARAAFSLIQENEVLFTMCFIPLVCWIVCTGLKQQMESGKSLAQTSKTTTAVYVFFLSSLLQPRGGSQEHGLCAHLWGLCSLAADGIWNQKILFEESDLRNHGLQKADVSAFLRMNLFQKEVDCEKFYSFIHMTFQEFFAAMYYLLEEEKEGRTNVPGSRLKLPSRDVTVLLENYGKFEKGYLIFVVRFLFGLVNQERTSYLEKKLSCKISQQIRLELLKWIEVKAKAKKLQIQPSQLELFYCLYEMQEEDFVQRAMDYFPKIEINLSTRMDHMVSSFCIENCHRVESLSLGFLHNMPKEEEEEEKEGRHLDMVQCVLPSSSHAACSHGLVNSHLTSSFCRGLFSVLSTSQSLTELDLSDNSLGDPGMRVLCETLQHPGCNIRRLWLGRCGLSHECCFDISLVLSSNQKLVELDLSDNALGDFGIRLLCVGLKHLLCNLKKLWLVSCCLTSACCQDLASVLSTSHSLTRLYVGENALGDSGVAILCEKAKNPQCNLQKLGLVNSGLTSVCCSALSSVLSTNQNLTHLYLRGNTLGDKGIKLLCEGLLHPDCKLQVLELDNCNLTSHCCWDLSTLLTSSQSLRKLSLGNNDLGDLGVMMFCEVLKQQSCLLQNLGLSEMYFNYETKSALETLQEEKPELTVVFEPSW

SEQ ID NO: 34721 - protein, 922 aa, Homo sapiens
MKMASTRCKLARYLEDLEDVDLKKFKMHLEDYPPQKGCIPLPRGQTEKADHVDLATLMIDFNGEEKAWAMAVWIFAAINRRDLYEKAKRDEPKWGSDNARVSNPTVICQEDSIEEEWMGLLEYLSRISICKMKKDYRKKYRKYVRSRFQCIEDRNARLGESVSLNKRYTRLRLIKEHRSQQEREQELLAIGKTKTCESPVSPIKMELLFDPDDEHSEPVHTVVFQGAAGIGKTILARKMMLDWASGTLYQDRFDYLFYIHCREVSLVTQRSLGDLIMSCCPDPNPPIHKIVRKPSRILFLMDGFDELQGAFDEHIGPLCTDWQKAERGDILLSSLIRKKLLPEASLLITTRPVALEKLQHLLDHPRHVEILGFSEAKRKEYFFKYFSDEAQARAAFSLIQENEVLFTMCFIPLVCWIVCTGLKQQMESGKSLAQTSKTTTAVYVFFLSSLLQPRGGSQEHGLCAHLWGLCSLAADGIWNQKILFEESDLRNHGLQKADVSAFLRMNLFQKEVDCEKFYSFIHMTFQEFFAAMYYLLEEEKEGRTNVPGSRLKLPSRDVTVLLENYGKFEKGYLIFVVRFLFGLVNQERTSYLEKKLSCKISQQIRLELLKWIEVKAKAKKLQIQPSQLELFYCLYEMQEEDFVQRAMDYFPKIEINLSTRMDHMVSSFCIENCHRVESLSLGFLHNMPKEEEEEEKEGRHLDMVQCVLPSSSHAACSHGLGRCGLSHECCFDISLVLSSNQKLVELDLSDNALGDFGIRLLCVGLKHLLCNLKKLWLVNSGLTSVCCSALSSVLSTNQNLTHLYLRGNTLGDKGIKLLCEGLLHPDCKLQVLELDNCNLTSHCCWDLSTLLTSSQSLRKLSLGNNDLGDLGVMMFCEVLKQQSCLLQNLGLSEMYFNYETKSALETLQEEKPELTVVFEPSW

SEQ ID NO: 34722 - protein, 719 aa, Homo sapiens
MKMASTRCKLARYLEDLEDVDLKKFKMHLEDYPPQKGCIPLPRGQTEKADHVDLATLMIDFNGEEKAWAMAVWIFAAINRRDLYEKAKRDEPKWGSDNARVSNPTVICQEDSIEEEWMGLLEYLSRISICKMKKDYRKKYRKYVRSRFQCIEDRNARLGESVSLNKRYTRLRLIKEHRSQQEREQELLAIGKTKTCESPVSPIKMELLFDPDDEHSEPVHTVVFQGAAGIGKTILARKMMLDWASGTLYQDRFDYLFYIHCREVSLVTQRSLGDLIMSCCPDPNPPIHKIVRKPSRILFLMDGFDELQGAFDEHIGPLCTDWQKAERGDILLSSLIRKKLLPEASLLITTRPVALEKLQHLLDHPRHVEILGFSEAKRKEYFFKYFSDEAQARAAFSLIQENEVLFTMCFIPLVCWIVCTGLKQQMESGKSLAQTSKTTTAVYVFFLSSLLQPRGGSQEHGLCAHLWGLCSLAADGIWNQKILFEESDLRNHGLQKADVSAFLRMNLFQKEVDCEKFYSFIHMTFQEFFAAMYYLLEEEKEGRTNVPGSRLKLPSRDVTVLLENYGKFEKGYLIFVVRFLFGLVNQERTSYLEKKLSCKISQQIRLELLKWIEVKAKAKKLQIQPSQLELFYCLYEMQEEDFVQRAMDYFPKIEINLSTRMDHMVSSFCIENCHRVESLSLGFLHNMPKEEEEEEKEGRHLDMVQCVLPSSSHAACSHG

SEQ ID NO: 34723 - protein, 979 aa, Homo sapiens
MKMASTRCKLARYLEDLEDVDLKKFKMHLEDYPPQKGCIPLPRGQTEKADHVDLATLMIDFNGEEKAWAMAVWIFAAINRRDLYEKAKRDEPKWGSDNARVSNPTVICQEDSIEEEWMGLLEYLSRISICKMKKDYRKKYRKYVRSRFQCIEDRNARLGESVSLNKRYTRLRLIKEHRSQQEREQELLAIGKTKTCESPVSPIKMELLFDPDDEHSEPVHTVVFQGAAGIGKTILARKMMLDWASGTLYQDRFDYLFYIHCREVSLVTQRSLGDLIMSCCPDPNPPIHKIVRKPSRILFLMDGFDELQGAFDEHIGPLCTDWQKAERGDILLSSLIRKKLLPEASLLITTRPVALEKLQHLLDHPRHVEILGFSEAKRKEYFFKYFSDEAQARAAFSLIQENEVLFTMCFIPLVCWIVCTGLKQQMESGKSLAQTSKTTTAVYVFFLSSLLQPRGGSQEHGLCAHLWGLCSLAADGIWNQKILFEESDLRNHGLQKADVSAFLRMNLFQKEVDCEKFYSFIHMTFQEFFAAMYYLLEEEKEGRTNVPGSRLKLPSRDVTVLLENYGKFEKGYLIFVVRFLFGLVNQERTSYLEKKLSCKISQQIRLELLKWIEVKAKAKKLQIQPSQLELFYCLYEMQEEDFVQRAMDYFPKIEINLSTRMDHMVSSFCIENCHRVESLSLGFLHNMPKEEEEEEKEGRHLDMVQCVLPSSSHAACSHGLGRCGLSHECCFDISLVLSSNQKLVELDLSDNALGDFGIRLLCVGLKHLLCNLKKLWLVSCCLTSACCQDLASVLSTSHSLTRLYVGENALGDSGVAILCEKAKNPQCNLQKLGLVNSGLTSVCCSALSSVLSTNQNLTHLYLRGNTLGDKGIKLLCEGLLHPDCKLQVLELDNCNLTSHCCWDLSTLLTSSQSLRKLSLGNNDLGDLGVMMFCEVLKQQSCLLQNLGLSEMYFNYETKSALETLQEEKPELTVVFEPSW

SEQ ID NO: 34724 - protein, 979 aa, Homo sapiens
MKMASTRCKLARYLEDLEDVDLKKFKMHLEDYPPQKGCIPLPRGQTEKADHVDLATLMIDFNGEEKAWAMAVWIFAAINRRDLYEKAKRDEPKWGSDNARVSNPTVICQEDSIEEEWMGLLEYLSRISICKMKKDYRKKYRKYVRSRFQCIEDRNARLGESVSLNKRYTRLRLIKEHRSQQEREQELLAIGKTKTCESPVSPIKMELLFDPDDEHSEPVHTVVFQGAAGIGKTILARKMMLDWASGTLYQDRFDYLFYIHCREVSLVTQRSLGDLIMSCCPDPNPPIHKIVRKPSRILFLMDGFDELQGAFDEHIGPLCTDWQKAERGDILLSSLIRKKLLPEASLLITTRPVALEKLQHLLDHPRHVEILGFSEAKRKEYFFKYFSDEAQARAAFSLIQENEVLFTMCFIPLVCWIVCTGLKQQMESGKSLAQTSKTTTAVYVFFLSSLLQPRGGSQEHGLCAHLWGLCSLAADGIWNQKILFEESDLRNHGLQKADVSAFLRMNLFQKEVDCEKFYSFIHMTFQEFFAAMYYLLEEEKEGRTNVPGSRLKLPSRDVTVLLENYGKFEKGYLIFVVRFLFGLVNQERTSYLEKKLSCKISQQIRLELLKWIEVKAKAKKLQIQPSQLELFYCLYEMQEEDFVQRAMDYFPKIEINLSTRMDHMVSSFCIENCHRVESLSLGFLHNMPKEEEEEEKEGRHLDMVQCVLPSSSHAACSHGLVNSHLTSSFCRGLFSVLSTSQSLTELDLSDNSLGDPGMRVLCETLQHPGCNIRRLWLGRCGLSHECCFDISLVLSSNQKLVELDLSDNALGDFGIRLLCVGLKHLLCNLKKLWLVNSGLTSVCCSALSSVLSTNQNLTHLYLRGNTLGDKGIKLLCEGLLHPDCKLQVLELDNCNLTSHCCWDLSTLLTSSQSLRKLSLGNNDLGDLGVMMFCEVLKQQSCLLQNLGLSEMYFNYETKSALETLQEEKPELTVVFEPSW

SEQ ID NO: 34725 - protein, 1016 aa, Homo sapiens
MKMASTRCKLARYLEDLEDVDLKKFKMHLEDYPPQKGCIPLPRGQTEKADHVDLATLMIDFNGEEKAWAMAVWIFAAINRRDLYEKAKRDEPKWGSDNARVSNPTVICQEDSIEEEWMGLLEYLSRISICKMKKDYRKKYRKYVRSRFQCIEDRNARLGESVSLNKRYTRLRLIKEHRSQQEREQELLAIGKTKTCESPVSPIKMELLFDPDDEHSEPVHTVVFQGAAGIGKTILARKMMLDWASGTLYQDRFDYLFYIHCREVSLVTQRSLGDLIMSCCPDPNPPIHKIVRKPSRILFLMDGFDELQGAFDEHIGPLCTDWQKAERGDILLSSLIRKKLLPEASLLITTRPVALEKLQHLLDHPRHVEILGFSEAKRKEYFFKYFSDEAQARAAFSLIQENEVLFTMCFIPLVCWIVCTGLKQQMESGKSLAQTSKTTTAVYVFFLSSLLQPRGGSQEHGLCAHLWGLCSLAADGIWNQKILFEESDLRNHGLQKADVSAFLRMNLFQKEVDCEKFYSFIHMTFQEFFAAMYYLLEEEKEGRTNVPGSRLKLPSRDVTVLLENYGKFEKGYLIFVVRFLFGLVNQERTSYLEKKLSCKISQQIRLELLKWIEVKAKAKKLQIQPSQLELFYCLYEMQEEDFVQRAMDYFPKIEINLSTRMDHMVSSFCIENCHRVESLSLGFLHNMPKEEEEEEKEGRHLDMVQCVLPSSSHAACSHGLVNSHLTSSFCRGLFSVLSTSQSLTELDLSDNSLGDPGMRVLCETLQHPGCNIRRLCNQKLVELDLSDNALGDFGIRLLCVGLKHLLCNLKKLWLVSCCLTSACCQDLASVLSTSHSLTRLYVGENALGDSGVAILCEKAKNPQCNLQKLGLVNSGLTSVCCSALSSVLSTNQNLTHLYLRGNTLGDKGIKLLCEGLLHPDCKLQVLELDNCNLTSHCCWDLSTLLTSSQSLRKLSLGNNDLGDLGVMMFCEVLKQQSCLLQNLGLSEMYFNYETKSALETLQEEKPELTVVFEPSW

SEQ ID NO: 34726 - protein, 279 aa, Homo sapiens
MVDHLANTEINSQRIAAVESCFGASGQPLALPGRVLLGEGVLTKECRKKAKPRIFFLFNDILVYGSIVLNKRKYRSQHIIPLEEVTLELLPETLQAKNRWMIKTAKKSFVVSAASATERQEWISHIEECVRRQLRATGRPPSTEHAAPWIPDKATDICMRCTQTRFSALTRRHHCRKCGFVVCAECSRQRFLLPRLSPKPVRVCSLCYRELAAQQRQEEAEEQGAGSPGQPAHLARPICGASSGDDDDSDEDKEGSRDGDWPSSVEFYASGVAWSAFHS

SEQ ID NO: 34727 - protein, 498 aa, Homo sapiens
MAEDSESAASQQSLELDDQDTCGIDGDNEEETEHAKGSPGGYLGAKKKKKKQKRKKEKPNSGGTKSDSASDSQEIKIQQPSKNPSVPMQKLQDIQRAMELLSACQGPARNIDEAAKHRYQFWDTQPVPKLDEVITSHGAIEPDKDNVRQEPYSLPQGFMWDTLDLSDAEVLKELYTLLNENYVEDDDNMFRFDYSPEFLLWALRPPGWLLQWHCGVRVSSNKKLVGFISAIPANIRIYDSVKKMVEINFLCVHKKLRSKRVAPVLIREITRRVNLEGIFQAVYTAGVVLPKPIATCRYWHRSLNPRKLVEVKFSHLSRNMTLQRTMKLYRLPDVTKTSGLRPMEPKDIKSVRELINTYLKQFHLAPVMDEEEVAHWFLPREHIIDTFVVESPNGKLTDFLSFYTLPSTVMHHPAHKSLKAAYSFYNIHTETPLLDLMSDALILAKSKGFDVFNALDLMENKTFLEKLKFGIGDGNLQYYLYNWRCPGTDSEKVGLVLQ

SEQ ID NO: 34728 - protein, 335 aa, Homo sapiens
MEDSGKTFSSEEEEANYWKDLAMTYKQRAENTQEELREFQEGSREYEAELETQLQQIETRNRDLLSENNRLRMELETIKEKFEVQHSEGYRQISALEDDLAQTKAIKDQLQKYIRELEQANDDLERAKRATIMSLEDFEQRLNQAIERNAFLESELDEKENLLESVQRLKDEARDLRQELAVQQKQEKPRTPMPSSVEAERTDTAVQATGSVPSTPIAHRGPSSSLNTPGSFRRGLDDSTGGTPLTPAARISALNIVGDLLRKVGALESKLASCRNLVYDQSPNRTGGPASGRSSKNRDGGERRPSSTSVPLGDKGLDTSCRWLSKSTTRSSSSC

SEQ ID NO: 34729 - protein, 346 aa, Homo sapiens
MEDSGKTFSSEEEEANYWKDLAMTYKQRAENTQEELREFQEGSREYEAELETQLQQIETRNRDLLSENNRLRMELETIKEKFEVQHSEGYRQISALEDDLAQTKAIKDQLQKYIRELEQANDDLERAKRATIMSLEDFEQRLNQAIERNAFLESELDEKENLLESVQRLKDEARDLRQELAVQQKQEKPRTPMPSSVEAERTDTAVQATGSVPSTPIAHRGPSSSLNTPGSFRRGLDDSTGGTPLTPAARISALNIVGDLLRKVGALESKLASCRNLVYDQSPNRTGGPASGRSSKNRDGGERRPSSTSVPLGDKGLGKRLEFGKPPSHMSSSPLPSAQGVVKMLL

SEQ ID NO: 34730 - protein, 2471 aa, Homo sapiens
MPALRPALLWALLALWLCCAAPAHALQCRDGYEPCVNEGMCVTYHNGTGYCKCPEGFLGEYCQHRDPCEKNRCQNGGTCVAQAMLGKATCRCASGFTGEDCQYSTSHPCFVSRPCLNGGTCHMLSRDTYECTCQVGFTGKECQWTDACLSHPCANGSTCTTVANQFSCKCLTGFTGQKCETDVNECDIPGHCQHGGTCLNLPGSYQCQCPQGFTGQYCDSLYVPCAPSPCVNGGTCRQTGDFTFECNCLPGFEGSTCERNIDDCPNHRCQNGGVCVDGVNTYNCRCPPQWTGQFCTEDVDECLLQPNACQNGGTCANRNGGYGCVCVNGWSGDDCSENIDDCAFASCTPGSTCIDRVASFSCMCPEGKAGLLCHLDDACISNPCHKGALCDTNPLNGQYICTCPQGYKGADCTEDVDECAMANSNPCEHAGKCVNTDGAFHCECLKGYAGPRCEMDINECHSDPCQNDATCLDKIGGFTCLCMPGFKGVHCELEINECQSNPCVNNGQCVDKVNRFQCLCPPGFTGPVCQIDIDDCSSTPCLNGAKCIDHPNGYECQCATGFTGVLCEENIDNCDPDPCHHGQCQDGIDSYTCICNPGYMGAICSDQIDECYSSPCLNDGRCIDLVNGYQCNCQPGTSGVNCEINFDDCASNPCIHGICMDGINRYSCVCSPGFTGQRCNIDIDECASNPCRKGATCINGVNGFRCICPEGPHHPSCYSQVNECLSNPCIHGNCTGGLSGYKCLCDAGWVGINCEVDKNECLSNPCQNGGTCDNLVNGYRCTCKKGFKGYNCQVNIDECASNPCLNQGTCFDDISGYTCHCVLPYTGKNCQTVLAPCSPNPCENAAVCKESPNFESYTCLCAPGWQGQRCTIDIDECISKPCMNHGLCHNTQGSYMCECPPGFSGMDCEEDIDDCLANPCQNGGSCMDGVNTFSCLCLPGFTGDKCQTDMNECLSEPCKNGGTCSDYVNSYTCKCQAGFDGVHCENNINECTESSCFNGGTCVDGINSFSCLCPVGFTGSFCLHEINECSSHPCLNEGTCVDGLGTYRCSCPLGYTGKNCQTLVNLCSRSPCKNKGTCVQKKAESQCLCPSGWAGAYCDVPNVSCDIAASRRGVLVEHLCQHSGVCINAGNTHYCQCPLGYTGSYCEEQLDECASNPCQHGATCSDFIGGYRCECVPGYQGVNCEYEVDECQNQPCQNGGTCIDLVNHFKCSCPPGTRGLLCEENIDDCARGPHCLNGGQCMDRIGGYSCRCLPGFAGERCEGDINECLSNPCSSEGSLDCIQLTNDYLCVCRSAFTGRHCETFVDVCPQMPCLNGGTCAVASNMPDGFICRCPPGFSGARCQSSCGQVKCRKGEQCVHTASGPRCFCPSPRDCESGCASSPCQHGGSCHPQRQPPYYSCQCAPPFSGSRCELYTAPPSTPPATCLSQYCADKARDGVCDEACNSHACQWDGGDCSLTMENPWANCSSPLPCWDYINNQCDELCNTVECLFDNFECQGNSKTCKYDKYCADHFKDNHCDQGCNSEECGWDGLDCAADQPENLAEGTLVIVVLMPPEQLLQDARSFLRALGTLLHTNLRIKRDSQGELMVYPYYGEKSAAMKKQRMTRRSLPGEQEQEVAGSKVFLEIDNRQCVQDSDHCFKNTDAAAALLASHAIQGTLSYPLVSVVSESLTPERTQLLYLLAVAVVIILFIILLGVIMAKRKRKHGSLWLPEGFTLRRDASNHKRREPVGQDAVGLKNLSVQVSEANLIGTGTSEHWVDDEGPQPKKVKAEDEALLSEEDDPIDRRPWTQQHLEAADIRRTPSLALTPPQAEQEVDVLDVNVRGPDGCTPLMLASLRGGSSDLSDEDEDAEDSSANIITDLVYQGASLQAQTDRTGEMALHLAARYSRADAAKRLLDAGADANAQDNMGRCPLHAAVAADAQGVFQILIRNRVTDLDARMNDGTTPLILAARLAVEGMVAELINCQADVNAVDDHGKSALHWAAAVNNVEATLLLLKNGANRDMQDNKEETPLFLAAREGSYEAAKILLDHFANRDITDHMDRLPRDVARDRMHHDIVRLLDEYNVTPSPPGTVLTSALSPVICGPNRSFLSLKHTPMGKKSRRPSAKSTMPTSLPNLAKEAKDAKGSRRKKSLSEKVQLSESSVTLSPVDSLESPHTYVSDTTSSPMITSPGILQASPNPMLATAAPPAPVHAQHALSFSNLHEMQPLAHGASTVLPSVSQLLSHHHIVSPGSGSAGSLSRLHPVPVPADWMNRMEVNETQYNEMFGMVLAPAEGTHPGIAPQSRPPEGKHITTPREPLPPIVTFQLIPKGSIAQPAGAPQPQSTCPPAVAGPLPTMYQIPEMARLPSVAFPTAMMPQQDGQVAQTILPAYHPFPASVGKYPTPPSQHSYASSNAAERTPSHSGHLQGEHPYLTPSPESPDQWSSSSPHSASDWSDVTTSPTPGGAGGGQRGPGTHMSEPPHNNMQVYA

SEQ ID NO: 34731 - protein, 609 aa, Homo sapiens
MESTAYPLNLSLKEEEEEEEIQSRELEDGPADMQKVRICSEGGWVPALFDEVAIYFSDEEWEVLTEQQKALYREVMRMNYETVLSLEFPFPKPDMITRLEGEEESQNSDEWQLQGGTSAENEESDVKPPDWPNPMNATSQFPQPQHFDSFGLRLPRDITELPEWSEGYPFYMAMGFPGYDLSADDIAGKFQFSRGMRRSYDAGFKLMVVEYAESTNNCQAAKQFGVLEKNVRDWRKVKPQLQNAHAMRRAFRGPKNGRFALVDQRVAEYVRYMQAKGDPITREAMQLKALEIAQEMNIPEKGFKASLGWCRRMMRRYDLSLRHKVPVPQHLPEDLTEKLVTYQRSVLALRRAHDYEVAQMGNADETPICLEVPSRVTVDNQGEKPVLVKTPGREKLKITAMLGVLADGRKLPPYIILRGTYIPPGKFPSGMEIRCHRYGWMTEDLMQDWLEVVWRRRTGAVPKQRGMLILNGFRGHATDSVKNSMESMNTDMVIIPGGLTSQLQVLDVVVYKPLNDSVRAQYSNWLLAGNLALSPTGNAKKPPLGLFLEWVMVAWNSISSESIVQGFKKCHISSNLEEEDDVLWEIESELPGGGEPPKDCDTESMAESN

SEQ ID NO: 34732 - protein, 956 aa, Homo sapiens
NKSKKRRNRVSFLGVATIEPPKPIPLTWKTEKLVWVNQWPLPKQKLEALHLLANEQLEKGHIEPSFSPWNSPVFVIQKKSGKWRMLTDLRAVNAVIQPMGPLQPGLPSPAMIPKDWPLIIIDLKDCFFTIPLAEQDCEKFAFTIPAINNKEPATRFQWKVLPQGMLNSPTICQTFVGRALQPVRKKFSDCYIIHYIDDILCAAETKDKLIDCYTFLQAEVASAGLAIASDKIQTSTPFHYLGMQIENRKIKPQKIEIRKDTLKTLNDFQKLLGDINWIQPTLGIPTYAMSNLFSILRGDSDLNSKRILTPEATKEIKLVEEKIQSAQINRIDPLAPLQLLIFATAHSPTGIIIQNTDLVEWSFLPHSTVKTFTLYLDQIATLIGQTRLRIIKLCGNDPDKIVVPLTKEQVRQAFINSGAWQIGLANFVGIIDNHYPKTKIFQFLKLTTWILPKITRREPLENALTVFTDGSSNGKAAYTGPKERVIKTPYQSAQRAELVAVITVLQDFDQPINIISDSAYVVQATRVVETALIKYSMDDQLNQLFNLLQQTVRKRNFPFYITHIRAHTNLPGPLTKANEQADLLVSSALIKAQELHALTHVNAAGLKNKFDVTWKQAKDIVQHCTQCQVLHLPTQEAGVNPRGLCPNALWQMDVTHVPSFGRLSYVHVTVDTYSHFIWATCQTGESTSHVKKHLLSCFAVMGVPEKIKTDNGPGYCSKAFQKFLSQWKISHTTGIPYNSQGQAIVERTNRTLKTQLVKQKEGGDSKECTTPQMQLNLALYTLNFLNIYRNQTTTSAEQHLTGKKNSPHEGKLIWWKDNKNKTWEIGKVITWGRGFACVSPGENQLPVWIPTRHLKFYNEPIRDAKKSTSAETETPQSSTVDSQDEQNGDVRRTDEVAIHQEGRAADLGTTKEADAVSYKISREHKGDTNPREYAACSLDDCINGGKSPYACRSSCS

SEQ ID NO: 34733 - protein, 1117 aa, Homo sapiens
MGQTKSKIKSKYASYLSFIKILLKRGGVKVSTKNLIKLFQIIEQFCPWFPEQGTLDLKDWKRIGKELKQAGRKGNIIPLTVWNDWAIIKAALEPFQTEEDSISVSDAPGSGIIDCNEKTRKKSQKETESLHCEYVAEPVMAQSTQNVDYNQLQEVIYPETLKLEGKGPELVGPSESKPRGTSPLPAGQVPVTLQPQKQVKENKTQPPVAYQYWPPAELQYRPPPESQYGYPGMPPAPQGRAPYPQPPTRRLNPTAPPSRQGSELHEIIDKSRKEGDTEAWQFPVTLEPMPPGEGAQEGEPPTVEARYKSFSIKILKDMKEGVKQYGPNSPYMRTLLDSIAHGHRLIPYDWEILAKSSLSPSQFLQFKTWWIDGVQEQVRRNRAANPPVNIDADQLLGIGQNWSTISQQALMQNEAIEQVRAICLRAWEKIQDPGSTCPSFNTVRQGSKEPYPDFVARLQDVAQKSIADEKARKVIVELMAYENANPECQSAIKPLKGKVPAGSDVISEYVKACDGIGGAMHKAMLMAQAITGVVLGGQVRTFGGKCYNCGQIGHLKKNCPVLNKQNITIQATTTGREPPDLCPRCKKGKHWASQCRSKFDKNGQPLSGNEQRGQPQAPQQTGAFPIQPFVPQGFQGQQPPLSQVFQGISQLPQYNNCPPPQVAVQQVDLCTIQAVSLLPGEPPQKIPTGVYGPLPEGTVGLILGRSSLNLKGVQIHTSVVDSDYKGEIQLVISSSVPWSASPGDRIAQLLLLPYIKGGNSEIKRIGGLGSTDPTGKAAYWASQVSENRPVCKAIIQGKQFEGLVDTGADVSIIALNQWPKNWPKQKAVTGLVGIGTASEVYQSMEILHCLGPDNQESTVQPMITSIPLNLWGRDLLQQWGAEITMPAPLYSPTSQKIMTKRGYIPGKGLGKNEDGIKIPFEAKINQKREGIGYPFLGAATIEPPKPIPLTWKTEKPVWVNQWPLPKQKLEALHLLANEQLEKGHIEPSFSPWNSPVFVIQKKSGKWRMLTDLRAVNAVIQPMGPLQPGLPSPAMIPKDWPLIIIDLKDCFFTIPLAEQDCEKFAFTIPAINNKEPATRFQWKVLPQGMLNSPTICQTFVGRALQPVKVFRLLYYSLY

SEQ ID NO: 34734 - protein, 174 aa, Homo sapiens
MLRTESCRPRSPAGQVAAASPLLLLLLLLAWCAGACRGAPILPQGLQPEQQLQLWNEIDDTCSSFLSIDSQPQASNALEELCFMIMGMLPKPQEQDEKDNTKRFLFHYSKTQKLGKSNVVSSVVHPLLQLVPHLHERRMKRFRVDEEFQSPFASQSRGYFLFRPRNGRRSAGFI

SEQ ID NO: 34735 - protein, 740 aa, Homo sapiens
MEKLGVEPEEEGGGDDDEEDAEAWAMELADVGAAASSQGVHDQVLPTPNASSRVIVHVDLDCFYAQVEMISNPELKDKPLGVQQKYLVVTCNYEARKLGVKKLMNVRDAKEKCPQLVLVNGEDLTRYREMSYKVTELLEEFSPVVERLGFDENFVDLTEMVEKRLQQLQSDELSAVTVSGHVYNNQSINLLDVLHIRLLVGSQIAAEMREAMYNQLGLTGCAGVASNKLLAKLVSGVFKPNQQTVLLPESCQHLIHSLNHIKEIPGIGYKTAKCLEALGINSVRDLQTFSPKILEKELGISVAQRIQKLSFGEDNSPVILSGPPQSFSEEDSFKKCSSEVEAKNKIEELLASLLNRVCQDGRKPHTVRLIIRRYSSEKHYGRESRQCPIPSHVIQKLGTGNYDVMTPMVDILMKLFRNMVNVKMPFHLTLLSVCFCNLKALNTAKKGLIDYYLMPSLSTTSRSGKHSFKMKDTHMEDFPKDKETNRDFLPSGRIESTRTRESPLDTTNFSKEKDINEFPLCSLPEGVDQEVFKQLPVDIQEEILSGKSREKFQGKGSVSCPLHASRGVLSFFSKKQMQDIPINPRDHLSSSKQVSSVSPCEPGTSGFNSSSSSYMSSQKDYSYYLDNRLKDERISQGPKEPQGFHFTNSNPAVSAFHSFPNLQSEQLFSRNHTTDSHKQTVATDSHEGLTENREPDSVDEKITFPSDIDPQVFYELPEAVQKELLAEWKRAGSDFHIGHK

SEQ ID NO: 34736 - protein, 352 aa, Homo sapiens
MFAAATKSFVKQVGDGGRLVPVPSLSEADKYQPLSLVVKKKRCFLFPRYKFTSTPFTLKDILLGDREISAGISSYQLLNYEDESDVSLYGRRGNHIVNDVGINVAGSDSIAVKASFGIVTKHEVEVSTLLKEITTRKINFDHSLIRQSRSSRKAVLCVVMESIRTTRQCSLSVHAGIRGEAMRFHFMDEQNPKGRDKAIVFPAHTTIAFSVFELFIYLDGAFDLCVTSVSKGGFEREETATFALLYRLRNILFERNRRVMDVISRSQLYLDDLFSDYYDKPLSMTDISLKEGTHIRVNLLNHNIPKGPCILCGMGNFKRETVYGCFQCSVDGQKYVRLHAVPCFDIWHKRMK

SEQ ID NO: 34737 - protein, 642 aa, Homo sapiens
MIPNGYLMFEDENFIESSVAKLNALRKSGQFCDVRLQVCGHEMLAHRAVLACCSPYLFEIFNSDSDPHGISHVKFDDLNPEAVEVLLNYAYTAQLKADKELVKDVYSAAKKLKMDRVKQVCGDYLLSRMDVTSCISYRNFASCMGDSRLLNKVDAYIQEHLLQISEEEEFLKLPRLKLEVMLEDNVCLPSNGKLYTKVINWVQRSIWENGDSLEELMEEVQTLYYSADHKLLDGNLLDGQAEVFGSDDDHIQFVQKKPPRENGHKQISSSSTGCLSSPNATVQSPKHEWKIVASEKTSNNTYLCLAVLDGIFCVIFLHGRNSPQSSPTSTPKLSKSLSFEMQQDELIEKPMSPMQYARSGLGTAEMNGKLIAAGGYNREECLRTVECYNPHTDHWSFLAPMRTPRARFQMAVLMGQLYVVGGSNGHSDDLSCGEMYDSNIDDWIPVPELRTNRCNAGVCALNGKLYIVGGSDPYGQKGLKNCDVFDPVTKLWTSCAPLNIRRHQSAVCELGGYLYIIGGAESWNCLNTVERYNPENNTWTLIAPMNVARRGAGVAVLNGKLFVCGGFDGSHAISCVEMYDPTRNEWKMMGNMTSPRSNAGIATVGNTIYAVGGFDGNEFLNTVEVYNLESNEWSPYTKIFQF

SEQ ID NO: 34738 - protein, 504 aa, Homo sapiens
MSEKQMKEAFVSNLNGTTVLEITQGLCFPAFCILCRGFLIIFSQYLCSFSPTWKTRFLTDFVVLIVPMVATLTIWASFILLELLGVIIFGAGLLYQIYRRRTCYARLPFLKILEKFLNISLESEYNPAISCFRVITSAFTAIAILAVDFPLFPRRFAKTELYGTGAMDFGVGGFVFGSAMVCLEVRRRKYMEGSKLHYFTNSLYSVWPLVFLGIGRLAIIKSIGYQEHLTEYGVHWNFFFTIIVVKLITPLLLIIFPLNKSWIIALGITVLYQLALDFTSLKRLILYGTDGSGTRVGLLNANREGIISTLGYVAIHMAGVQTGLYMHKNRSHIKDLIKVACFLLLAAISLFISLYVVQVNVEAVSRRMANLAFCIWIVASSLILLSSLLLGDIILSFAKFLIKGALVPCSWKLIQSPVTNKKHSESLVPEAERMEPSLCLITALNRKQLIFFLLSNITTGLINLMVDTLHSSTLWALFVVNLYMFSNCLIVYVLYLQDKTVQFW

SEQ ID NO: 34739 - protein, 71 aa, Homo sapiens
MFLSLPTLTVLIPLVSLAGLFYSASVEENFPQGCTSTASLCFYSLLLPITIPVYVFFHLWTWMGIKLFRHN

SEQ ID NO: 34740 - protein, 579 aa, Homo sapiens
MQICGSSVASVAAGTSFQVLGPVCWQQLDLKMAVRVLWGGLSLLRVLWCLLPQTGYVHPDEFFQSPEVMAEDILGVQAARPWEFYPSSSCRSVLFPLLISGSTFWLLRLWEELGPWPGLVSGYALLVGPRLLLTALSFALDGAVYHLAPPMGADRWNALALLSGSYVTLVFYTRTFSNTIEGLLFTWLLVLVSSHVTWGPTRKEPAPGPRWRSWLLGGIVAAGFFNRPTFLAFAVVPLYLWGTRGATNPGLKSLTREALVLLPGAALTAAVFVATDSWYFSSPATSRNLVLTPVNFLHYNLNPQNLARHGTHARLTHLAVNGFLLFGVLHAQALQAAWQRLQVGLQASAQMGLLRALGARSLLSSPRSYLLLLYFMPLALLSAFSHQEARFLIPLLVPLVLLCSPQTQPVPWKGTVVLFNALGALLFGCLHQGGLVPGLEYLEQVVHAPVLPSTPTHYTLLFTHTYMPPRHLLHLPGLGAPVEVVDMGGTEDWALCQTLKSFTRQPACQVAGGPWLCRLFVVTPGTTRRAVEKCSFPFKNETLLFPHLTLEDPPALSSLLSGAWRDHLSLHIVELGEET

SEQ ID NO: 34741 - protein, 140 aa, Homo sapiens
MKGQEGIRGEGCTDPEIKASPQMWAARFRGMRSRFSPLFSQATEMGPRVSAGWCLSGGGRKVSSLQGDFPPGGFWALSNDSALSLPPLSLPHPHPLRPPGLGVNEFTQGLHPPLHPAASVFQTCFYRKPHYCSTLRPTTT

SEQ ID NO: 34742 - protein, 615 aa, Homo sapiens
MAQKKYLQAKLTQFLREDRIQLWKPPYTDENKKVGLALKDLAKQYSDRLECCENEVEKVIEEIRCKAIERGTGNDNYRTTGIATIEVFLPPRLKKDRKNLLETRLHITGRELRSKIAETFGLQENYIKIVINKKQLQLGKTLEEQGVAHNVKAMVLELKQSEEDARKNFQLEEEEQNEAKLKEKQIQRTKRGLEILAKRAAETVVDPEMTPYLDIANQTGRSIRIPPSERKALMLAMGYHEKGRAFLKRKEYGIALPCLLDADKYFCECCRELLDTVDNYAVLQLDIVWCYFRLEQLECLDDAEKKLNLAQKCFKNCYGENHQRLVHIKGNCGKEKVLFLRLYLLQGIRNYHSGNDVEAYEYLNKARQLFKELYIDPSKVDNLLQLGFTAQEARLGLRACDGNVDHAATHITNRREELAQIRKEEKEKKRRRLENIRFLKGMGYSTHAAQQVLHAASGNLDEALKILLSNPQMWWLNDSNPETDNRQESPSQENIDRLVYMGFDALVAEAALRVFRGNVQLAAQTLAHNGGSLPPELPLSPEDSLSPPATSPSDSAGTSSASTDEDMETEAVNEILEDIPEHEEDYLDSTLEDEEIIIAEYLSYVENRKSATKKN

SEQ ID NO: 34743 - protein, 601 aa, Homo sapiens
MAQKKYLQAKLTQFLREDRIQLWKPPYTDENKKVGLALKDLAKQYSDRLECCENEVEKVIEEIRCKAIERGTGNDNYRTTGIATIEVFLPPRLKKDRKNLLETRLHITGRELRSKIAETFGLQENYIKIVINKKQLQLGKTLEEQGVAHNVKAMVLELKQSEEDARKNFQLEEEEQNEAKLKEKQIQRTKRGLEILAKRAAETVVDPEMTPYLDIANQTGRSIRIPPSERKALMLAMGYHEKGRAFLKRKEYGIALPCLLDADKYFCECCRELLDTVDNYAVLQLDIVWCYFRLEQLECLDDAEKKLNLAQKCFKNCYGENHQRLVHIKGNCGKEKVLFLRLYLLQGIRNYHSGNDVEAYEYLNKARQLFKELYIDPSKVDNLLQLGFTAQEARLGLRACDGNVDHAATHITNRREELAQIRKEEKEKKRRRLENIRFLKGMGYSTHAAQQILLSNPQMWWLNDSNPETDNRQESPSQENIDRLVYMGFDALVAEAALRVFRGNVQLAAQTLAHNGGSLPPELPLSPEDSLSPPATSPSDSAGTSSASTDEDMETEAVNEILEDIPEHEEDYLDSTLEDEEIIIAEYLSYVENRKSATKKN

SEQ ID NO: 34744 - protein, 349 aa, Homo sapiens
MEAHNASAPFNFTLPPNFGKRPTDLALSVILVFMLFFIMLSLGCTMEFSKIKAHLWKPKGLAIALVAQYGIMPLTAFVLGKVFRLKNIEALAILVCGCSPGGNLSNVFSLAMKGDMNLSIVMTTCSTFCALGMMPLLLYIYSRGIYDGDLKDKVPYKGIVISLVLVLIPCTIGIVLKSKRPQYMRYVIKGGMIIILLCSVAVTVLSAINVGKSIMFAMTPLLIATSSLMPFIGFLLGYVLSALFCLNGRCRRTVSMETGCQNVQLCSTILNVAFPPEVIGPLFFFPLLYMIFQLGEGLLLIAIFWCYEKFKTPKDKTKMIYTAATTEETIPGALGNGTYKGEDCSPCTA

SEQ ID NO: 34745 - protein, 1304 aa, Homo sapiens
MQLKIMPKKKRLSAGRVPLILFLCQMISALEVPLDPKLLEDLVQPPTITQQSPKDYIIDPRENIVIQCEAKGKPPPSFSWTRNGTHFDIDKDPLVTMKPGTGTLIINIMSEGKAETYEGVYQCTARNERGAAVSNNIVVRPSRSPLWTKEKLEPITLQSGQSLVLPCRPPIGLPPPIIFWMDNSFQRLPQSERVSQGLNGDLYFSNVLPEDTREDYICYARFNHTQTIQQKQPISVKVISVDELNDTIAANLSDTEFYGAKSSRERPPTFLTPEGNASNKEELRGNVLSLECIAEGLPTPIIYWAKEDGMLPKNRTVYKNFEKTLQIIHVSEADSGNYQCIAKNALGAIHHTISVRVKAAPYWITAPQNLVLSPGEDGTLICRANGNPKPRISWLTNGVPIEIAPDDPSRKIDGDTIIFSNVQERSSAVYQCNASNEYGYLLANAFVNVLAEPPRILTPANTLYQVIANRPALLDCAFFGSPLPTIEWFKGAKGSALHEDIYVLHENGTLEIPVAQKDSTGTYTCVARNKLGMAKNEVHLEIKDPTWIVKQPEYAVVQRGSMVSFECKVKHDHTLSLTVLWLKDNRELPSDERFTVDKDHLVVADVSDDDSGTYTCVANTTLDSVSASAVLSVVAPTPTPAPVYDVPNPPFDLELTDQLDKSVQLSWTPGDDNNSPITKFIIEYEDAMHKPGLWHHQTEVSGTQTTAQLKLSPYVNYSFRVMAVNSIGKSLPSEASEQYLTKASEPDKNPTAVEGLGSEPDNLVITWKPLNGFESNGPGLQYKVSWRQKDGDDEWTSVVVANVSKYIVSGTPTFVPYLIKVQALNDMGFAPEPAVVMGHSGEDLPMVAPGNVRVNVVNSTLAEVHWDPVPLKSIRGHLQGYRIYYWKTQSSSKRNRRHIEKKILTFQGSKTHGMLPGLEPFSHYTLNVRVVNGKGEGPASPDRVFNTPEGVPSAPSSLKIVNPTLDSLTLEWDPPSHPNGILTEYTLKYQPINSTHELGPLVDLKIPANKTRWTLKNLNFSTRYKFYFYAQTSAGSGSQITEEAVTTVDEAGILPPDVGAGKVQAVNPRISNLTAAAAETYANISWEYEGPEHVNFYVEYGVAGSKEEWRKEIVNGSRSFFGLKGLMPGTAYKVRVGAVGDSGFVSSEDVFETGPAMASRQVDIATQGWFIGLMCAVALLILILLIVCFIRRNKGGKYPVKEKEDAHADPEIQPMKEDDGTFGEYSDAEDHKPLKKGSRTPSDRTVKKEDSDDSLVDYGEGVNGQFNEDGSFIGQYSGKKEKEPAEGNESSEAPSPVNAMNSFV

SEQ ID NO: 34746 - protein, 1236 aa, Homo sapiens
MQLKIMPKKKRLSAGRVPLILFLCQMISALEVPLDPKLLEDLVQPPTITQQSPKDYIIDPRENIVIQCEAKGKPPPSFSWTRNGTHFDIDKDPLVTMKPGTGTLIINIMSEGKAETYEGVYQCTARNERGAAVSNNIVVRPSRSPLWTKEKLEPITLQSGQSLVLPCRPPIGLPPPIIFWMDNSFQRLPQSERVSQGLNGDLYFSNVLPEDTREDYICYARFNHTQTIQQKQPISVKVISVDELNDTIAANLSDTEFYGAKSSRERPPTFLTPEGNASNKEELRGNVLSLECIAEGLPTPIIYWAKEDGMLPKNRTVYKNFEKTLQIIHVSEADSGNYQCIAKNALGAIHHTISVRVKAAPYWITAPQNLVLSPGEDGTLICRANGNPKPRISWLTNGVPIEIAPDDPSRKIDGDTIIFSNVQERSSAVYQCNASNEYGYLLANAFVNVLAEPPRILTPANTLYQVIANRPALLDCAFFGSPLPTIEWFKGAKGSALHEDIYVLHENGTLEIPVAQKDSTGTYTCVARNKLGMAKNEVHLEIKDPTWIVKQPEYAVVQRGSMVSFECKVKHDHTLSLTVLWLKDNRELPSDERFTVDKDHLVVADVSDDDSGTYTCVANTTLDSVSASAVLSVVAPTPTPAPVYDVPNPPFDLELTDQLDKSVQLSWTPGDDNNSPITKFIIEYEDAMHKPGLWHHQTEVSGTQTTAQLKLSPYVNYSFRVMAVNSIGKSLPSEASEQYLTKASEPDKNPTAVEGLGSEPDNLVITWKPLNGFESNGPGLQYKVSWRQKDGDDEWTSVVVANVSKYIVSGTPTFVPYLIKVQALNDMGFAPEPAVVMGHSGEDLPMVAPGNVRVNVVNSTLAEVHWDPVPLKSIRGHLQGYRIYYWKTQSSSKRNRRHIEKKILTFQGSKTHGMLPGLEPFSHYTLNVRVVNGKGEGPASPDRVFNTPEGVPSAPSSLKIVNPTLDSLTLEWDPPSHPNGILTEYTLKYQPINSTHELGPLVDLKIPANKTRWTLKNLNFSTRYKFYFYAQTSAGSGSQITEEAVTTVDEAGILPPDVGAGKVQAVNPRISNLTAAAAETYANISWEYEGPEHVNFYVEYGVAGSKEEWRKEIVNGSRSFFGLKGLMPGTAYKVRVGAVGDSGFVSSEDVFETGPAMASRQVDIATQGWFIGLMCAVALLILILLIVCFIRRNKGGKYPVKEKEDAHADPEIQPMKEDDGTFGEYRLFSFVSSASF

SEQ ID NO: 34747 - protein, 1180 aa, Homo sapiens
MQLKIMPKKKRLSAGRVPLILFLCQMISALEVPLDPKLLEDLVQPPTITQQSPKDYIIDPRENIVIQCEAKGKPPPSFSWTRNGTHFDIDKDPLVTMKPGTGTLIINIMSEGKAETYEGVYQCTARNERGAAVSNNIVVRPSRSPLWTKEKLEPITLQSGQSLVLPCRPPIGLPPPIIFWMDNSFQRLPQSERVSQGLNGDLYFSNVLPEDTREDYICYARFNHTQTIQQKQPISVKVISAKSSRERPPTFLTPEGNASNKEELRGNVLSLECIAEGLPTPIIYWAKEDGMLPKNRTVYKNFEKTLQIIHVSEADSGNYQCIAKNALGAIHHTISVRVKAAPYWITAPQNLVLSPGEDGTLICRANGNPKPRISWLTNGVPIEIAPDDPSRKIDGDTIIFSNVQERSSAVYQCNASNEYGYLLANAFVNVLAEPPRILTPANTLYQVIANRPALLDCAFFGSPLPTIEWFKGAKGSALHEDIYVLHENGTLEIPVAQKDSTGTYTCVARNKLGMAKNEVHLEIKDPTWIVKQPEYAVVQRGSMVSFECKVKHDHTLSLTVLWLKDNRELPSDERFTVDKDHLVVADVSDDDSGTYTCVANTTLDSVSASAVLSVVAPTPTPAPVYDVPNPPFDLELTDQLDKSVQLSWTPGDDNNSPITKFIIEYEDAMHKPGLWHHQTEVSGTQTTAQLKLSPYVNYSFRVMAVNSIGKSLPSEASEQYLTKASEPDKNPTAVEGLGSEPDNLVITWKPLNGFESNGPGLQYKVSWRQKDGDDEWTSVVVANVSKYIVSGTPTFVPYLIKVQALNDMGFAPEPAVVMGHSGEDLPMVAPGNVRVNVVNSTLAEVHWDPVPLKSIRGHLQGYRIYYWKTQSSSKRNRRHIEKKILTFQGSKTHGMLPGLEPFSHYTLNVRVVNGKGEGPASPDRVFNTPEGVPSAPSSLKIVNPTLDSLTLEWDPPSHPNGILTEYTLKYQPINSTHELGPLVDLKIPANKTRWTLKNLNFSTRYKFYFYAQTSAGSGSQITEEAVTTVDEAMASRQVDIATQGWFIGLMCAVALLILILLIVCFIRRNKGGKYPVKEKEDAHADPEIQPMKEDDGTFGEYSDAEDHKPLKKGSRTPSDRTVKKEDSDDSLVDYGEGVNGQFNEDGSFIGQYSGKKEKEPAEGNESSEAPSPVNAMNSFV

SEQ ID NO: 34748 - protein, 1183 aa, Homo sapiens
MQLKIMPKKKRLSAGRVPLILFLCQMISALEVPLDLVQPPTITQQSPKDYIIDPRENIVIQCEAKGKPPPSFSWTRNGTHFDIDKDPLVTMKPGTGTLIINIMSEGKAETYEGVYQCTARNERGAAVSNNIVVRPSRSPLWTKEKLEPITLQSGQSLVLPCRPPIGLPPPIIFWMDNSFQRLPQSERVSQGLNGDLYFSNVLPEDTREDYICYARFNHTQTIQQKQPISVKVISVDELNDTIAANLSDTEFYGAKSSRERPPTFLTPEGNASNKEELRGNVLSLECIAEGLPTPIIYWAKEDGMLPKNRTVYKNFEKTLQIIHVSEADSGNYQCIAKNALGAIHHTISVRVKAAPYWITAPQNLVLSPGEDGTLICRANGNPKPRISWLTNGVPIEIAPDDPSRKIDGDTIIFSNVQERSSAVYQCNASNEYGYLLANAFVNVLAEPPRILTPANTLYQVIANRPALLDCAFFGSPLPTIEWFKGAKGSALHEDIYVLHENGTLEIPVAQKDSTGTYTCVARNKLGMAKNEVHLEIKDPTWIVKQPEYAVVQRGSMVSFECKVKHDHTLSLTVLWLKDNRELPSDERFTVDKDHLVVADVSDDDSGTYTCVANTTLDSVSASAVLSVVDVPNPPFDLELTDQLDKSVQLSWTPGDDNNSPITKFIIEYEDAMHKPGLWHHQTEVSGTQTTAQLKLSPYVNYSFRVMAVNSIGKSLPSEASEQYLTKASEPDKNPTAVEGLGSEPDNLVITWKPLNGFESNGPGLQYKVSWRQKDGDDEWTSVVVANVSKYIVSGTPTFVPYLIKVQALNDMGFAPEPAVVMGHSGEDLPMVAPGNVRVNVVNSTLAEVHWDPVPLKSIRGHLQGYRIYYWKTQSSSKRNRRHIEKKILTFQGSKTHGMLPGLEPFSHYTLNVRVVNGKGEGPASPDRVFNTPEGVPSAPSSLKIVNPTLDSLTLEWDPPSHPNGILTEYTLKYQPINSTHELGPLVDLKIPANKTRWTLKNLNFSTRYKFYFYAQTSAGSGSQITEEAVTTVDEAMASRQVDIATQGWFIGLMCAVALLILILLIVCFIRRNKGGKYPVKEKEDAHADPEIQPMKEDDGTFGEYSDAEDHKPLKKGSRTPSDRTVKKEDSDDSLVDYGEGVNGQFNEDGSFIGQYSGKKEKEPAEGNESSEAPSPVNAMNSFV

SEQ ID NO: 34749 - protein, 1308 aa, Homo sapiens
MQLKIMPKKKRLSAGRVPLILFLCQMISALEVPLDPKLLEDLVQPPTITQQSPKDYIIDPRENIVIQCEAKGKPPPSFSWTRNGTHFDIDKDPLVTMKPGTGTLIINIMSEGKAETYEGVYQCTARNERGAAVSNNIVVRPSRSPLWTKEKLEPITLQSGQSLVLPCRPPIGLPPPIIFWMDNSFQRLPQSERVSQGLNGDLYFSNVLPEDTREDYICYARFNHTQTIQQKQPISVKVISVDELNDTIAANLSDTEFYGAKSSRERPPTFLTPEGNASNKEELRGNVLSLECIAEGLPTPIIYWAKEDGMLPKNRTVYKNFEKTLQIIHVSEADSGNYQCIAKNALGAIHHTISVRVKAAPYWITAPQNLVLSPGEDGTLICRANGNPKPRISWLTNGVPIEIAPDDPSRKIDGDTIIFSNVQERSSAVYQCNASNEYGYLLANAFVNVLAEPPRILTPANTLYQVIANRPALLDCAFFGSPLPTIEWFKGAKGSALHEDIYVLHENGTLEIPVAQKDSTGTYTCVARNKLGMAKNEVHLEIKDPTWIVKQPEYAVVQRGSMVSFECKVKHDHTLSLTVLWLKDNRELPSDERFTVDKDHLVVADVSDDDSGTYTCVANTTLDSVSASAVLSVVAPTPTPAPVYDVPNPPFDLELTDQLDKSVQLSWTPGDDNNSPITKFIIEYEDAMHKPGLWHHQTEVSGTQTTAQLKLSPYVNYSFRVMAVNSIGKSLPSEASEQYLTKASEPDKNPTAVEGLGSEPDNLVITWKPLNGFESNGPGLQYKVSWRQKDGDDEWTSVVVANVSKYIVSGTPTFVPYLIKVQALNDMGFAPEPAVVMGHSGEDLPMVAPGNVRVNVVNSTLAEVHWDPVPLKSIRGHLQGYRIYYWKTQSSSKRNRRHIEKKILTFQGSKTHGMLPGLEPFSHYTLNVRVVNGKGEGPASPDRVFNTPEGVPSAPSSLKIVNPTLDSLTLEWDPPSHPNGILTEYTLKYQPINSTHELGPLVDLKIPANKTRWTLKNLNFSTRYKFYFYAQTSAGSGSQITEEAVTTVDEAGILPPDVGAGKVQAVNPRISNLTAAAAETYANISWEYEGPEHVNFYVEYGVAGSKEEWRKEIVNGSRSFFGLKGLMPGTAYKVRVGAVGDSGFVSSEDVFETGPAMASRQVDIATQGWFIGLMCAVALLILILLIVCFIRRNKGGKYPVKEKEDAHADPEIQPMKEDDGTFGEYRSLESDAEDHKPLKKGSRTPSDRTVKKEDSDDSLVDYGEGVNGQFNEDGSFIGQYSGKKEKEPAEGNESSEAPSPVNAMNSFV

SEQ ID NO: 34750 - protein, 1192 aa, Homo sapiens
MQLKIMPKKKRLSAGRVPLILFLCQMISALEVPLDPKLLEDLVQPPTITQQSPKDYIIDPRENIVIQCEAKGKPPPSFSWTRNGTHFDIDKDPLVTMKPGTGTLIINIMSEGKAETYEGVYQCTARNERGAAVSNNIVVRPSRSPLWTKEKLEPITLQSGQSLVLPCRPPIGLPPPIIFWMDNSFQRLPQSERVSQGLNGDLYFSNVLPEDTREDYICYARFNHTQTIQQKQPISVKVISAKSSRERPPTFLTPEGNASNKEELRGNVLSLECIAEGLPTPIIYWAKEDGMLPKNRTVYKNFEKTLQIIHVSEADSGNYQCIAKNALGAIHHTISVRVKAAPYWITAPQNLVLSPGEDGTLICRANGNPKPRISWLTNGVPIEIAPDDPSRKIDGDTIIFSNVQERSSAVYQCNASNEYGYLLANAFVNVLAEPPRILTPANTLYQVIANRPALLDCAFFGSPLPTIEWFKGAKGSALHEDIYVLHENGTLEIPVAQKDSTGTYTCVARNKLGMAKNEVHLEIKDPTWIVKQPEYAVVQRGSMVSFECKVKHDHTLSLTVLWLKDNRELPSDERFTVDKDHLVVADVSDDDSGTYTCVANTTLDSVSASAVLSVVAPTPTPAPVYDVPNPPFDLELTDQLDKSVQLSWTPGDDNNSPITKFIIEYEDAMHKPGLWHHQTEVSGTQTTAQLKLSPYVNYSFRVMAVNSIGKSLPSEASEQYLTKASEPDKNPTAVEGLGSEPDNLVITWKPLNGFESNGPGLQYKVSWRQKDGDDEWTSVVVANVSKYIVSGTPTFVPYLIKVQALNDMGFAPEPAVVMGHSGEDLPMVAPGNVRVNVVNSTLAEVHWDPVPLKSIRGHLQGYRIYYWKTQSSSKRNRRHIEKKILTFQGSKTHGMLPGLEPFSHYTLNVRVVNGKGEGPASPDRVFNTPEGVPSAPSSLKIVNPTLDSLTLEWDPPSHPNGILTEYTLKYQPINSTHELGPLVDLKIPANKTRWTLKNLNFSTRYKFYFYAQTSAGSGSQITEEAVTTVDEAGILPPDVGAGKAMASRQVDIATQGWFIGLMCAVALLILILLIVCFIRRNKGGKYPVKEKEDAHADPEIQPMKEDDGTFGEYSDAEDHKPLKKGSRTPSDRTVKKEDSDDSLVDYGEGVNGQFNEDGSFIGQYSGKKEKEPAEGNESSEAPSPVNAMNSFV

SEQ ID NO: 34751 - protein, 713 aa, Homo sapiens
MATGQDRVVALVDMDCFFVQVEQRQNPHLRNKPCAVVQYKSWKGGGIIAVSYEARAFGVTRSMWADDAKKLCPDLLLAQVRESRGKANLTKYREASVEVMEIMSRFAVIERASIDEAYVDLTSAVQERLQKLQGQPISADLLPSTYIEGLPQGPTTAEETVQKEGMRKQGLFQWLDSLQIDNLTSPDLQLTVGAVIVEEMRAAIERETGFQCSAGISHNKVLAKLACGLNKPNRQTLVSHGSVPQLFSQMPIRKIRSLGGKLGASVIEILGIEYMGELTQFTESQLQSHFGEKNGSWLYAMCRGIEHDPVKPRQLPKTIGCSKNFPGKTALATREQVQWWLLQLAQELEERLTKDRNDNDRVATQLVVSIRVQGDKRLSSLRRCCALTRYDAHKMSHDAFTVIKNCNTSGIQTEWSPPLTMLFLCATKFSASAPSSSTDITSFLSSDPSSLPKVPVTSSEAKTQGSGPAVTATKKATTSLESFFQKAAERQKVKEASLSSLTAPTQAPMSNSPSKPSLPFQTSQSTGTEPFFKQKSLLLKQKQLNNSSVSSPQQNPWSNCKALPNSLPTEYPGCVPVCEGVSKLEESSKATPAEMDLAHNSQSMHASSASKSVLEVTQKATPNPSLLAAEDQVPCEKCGSLVPVWDMPEHMDYHFALELQKSFLQPHSSNPQVVSAVSHQGKRNPKSPLACTNKRPRPEGMQTLESFFKPLTH

SEQ ID NO: 34752 - protein, 414 aa, Homo sapiens
MATGQDRVVALVDMDCFFVQVEQRQNPHLRNKPCAVVQYKSWKGGGIIAVSYEARAFGVTRSMWADDAKKLCPDLLLAQVRESRGKANLTKYREASVEVMEIMSRFAVIERASIDEAYVDLTSAVQERLQKLQGQPISADLLPSTYIEGLPQGPTTAEETVQKEGMRKQGLFQWLDSLQIDNLTSPDLQLTVGAVIVEEMRAAIERETGFQCSAGISHNKVLAKLACGLNKPNRQTLVSHGSVPQLFSQMPIRKIRSLGGKLGASVIEILGIEYMGELTQFTESQLQSHFGEKNGSWLYAMCRGIEHDPVKPRQLPKTIGCSKNFPGKTALATREQVQWWLLQLAQELEERLTKDRNDNDRVATQLVVSIRVQGDKRLSSLRRCCALTRYDAHKMSHDAFTVIKNCNTSGIQTE

SEQ ID NO: 34753 - protein, 417 aa, Homo sapiens
MGRRRAPELYRAPFPLYALQVDPSTGLLIAAGGGGAAKTGIKNGVHFLQLELINGRLSASLLHSHDTETRATMNLALAGDILAAGQDAHCQLLRFQAHQQQGNKAEKAGSKEQGPRQRKGAAPAEKKCGAETQHEGLELRVENLQAVQTDFSSDPLQKVVCFNHDNTLLATGGTDGYVRVWKVPSLEKVLEFKAHEGEIEDLALGPDGKLVTVGRDLKASVWQKDQLVTQLHWQENGPTFSSTPYRYQACRFGQVPDQPAGLRLFTVQIPHKRLRQPPPCYLTAWDGSNFLPLRTKSCGHEVVSCLDVSESGTFLGLGTVTGSVAIYIAFSLQCLYYVREAHGIVVTDVAFLPEKGRGPELLGSHETALFSVAVDSRCQLHLLPSRRSVPVWLLLLLCVGLIIVTILLLQSAFPGFL

SEQ ID NO: 34754 - protein, 386 aa, Homo sapiens
MSALEKSMHLGRLPSRPPLPGSGGSQSGAKMRMGPGRKRDFSPVPWSQYFESMEDVEVENETGKDTFRVYKSGSEGPVLLLLHGGGHSALSWAVFTAAIISRVQCRIVALDLRSHGETKVKNPEDLSAETMAKDVGNVVEAMYGDLPPPIMLIGHSMGGAIAVHTASSNLVPSLLGLCMIDVVEGTAMDALNSMQNFLRGRPKTFKSLENAIEWSVKSGQIRNLESARVSMVGQVKQCEGITSPEGSKSIVEGIIEEEEEDEEGSESISKRKKEDDMETKKDHPYTWRIELAKTEKYWDGWFRGLSNLFLSCPIPKLLLLAGVDRLDKDLTIGQMQGKFQMQVLPQCGHAVHEDAPDKVAEAVATFLIRHRFAEPIGGFQCVFPGC

SEQ ID NO: 34755 - protein, 199 aa, Homo sapiens
MDALNSMQNFLRGRPKTFKSLENAIEWSVKSGQIRNLESARVSMVGQVKQCEGITSPEGSKSIVEGIIEEEEEDEEGSESISKRKKEDDMETKKDHPYTWRIELAKTEKYWDGWFRGLSNLFLSCPIPKLLLLAGVDRLDKDLTIGQMQGKFQMQVLPQCGHAVHEDAPDKVAEAVATFLIRHRFAEPIGGFQCVFPGC

SEQ ID NO: 34756 - protein, 161 aa, Homo sapiens
METKKDHPYTWRIELAKTEKYWDGWFRGLSNLFLSCPIPKLLLLAGVDRLDKDLTIGQMQGKFQMQVLPQCGHAVHEDAPDKVSLVLSDCKRTTVRITLDVTEDKSLSLSLHCLQQLLWSLCRCSSTSSPTSPWQLLMVLVLCICAEELLTLCYFIPGPCG

SEQ ID NO: 34757 - protein, 400 aa, Homo sapiens
MSALEKSMHLGRLPSRPPLPGSGGSQSGAKMRMGPGRKRDFSPVPWSQYFESMEDVEVENETGKDTFRVYKSGSEGPVLLLLHGGGHSALSWAVFTAAIISRVQCRIVALDLRSHGETKVKNPEDLSAETMAKDVGNVVEAMYGDLPPPIMLIGHSMGGAIAVHTASSNLVPSLLGLCMIDVVEGTAMDALNSMQNFLRGRPKTFKSLENAIEWSVKSGQIRNLESARVSMVGQVKQCEGITSPEGSKSIVEGIIEEEEEDEEGSESISKRKKEDDMEGLPSETQNLLLFLQTKKDHPYTWRIELAKTEKYWDGWFRGLSNLFLSCPIPKLLLLAGVDRLDKDLTIGQMQGKFQMQVLPQCGHAVHEDAPDKVAEAVATFLIRHRFAEPIGGFQCVFPGC

SEQ ID NO: 34758 - protein, 392 aa, Homo sapiens
MLLILLSVALLALSSAQNLNEDVSQEESPSLIAGNPQGPSPQGGNKPQGPPPPPGKPQGPPPQGGNKPQGPPPPGKPQGPPPQGDKSRSPRSPPGKPQGPPPQGGNQPQGPPPPPGKPQGPPPQGGNKPQGPPPPGKPQGPPPQGDKSQSPRSPPGKPQGPPPQGGNQPQGPPPPPGKPQGPPPQGGNKPQGPPPPGKPQGPPPQGDKSQSPRSPPGKPQGPPPQGGNQPQGPPPPPGKPQGPPQQGGNRPQGPPPPGKPQGPPPQGDKSRSPQSPPGKPQGPPPQGGNQPQGPPPPPGKPQGPPPQGGNKPQGPPPPGKPQGPPAQGGSKSQSARSPPGKPQGPPQQEGNNPQGPPPPAGGNPQQPQAPPAGQPQGPPRPPQGGRPSRPPQ

SEQ ID NO: 34759 - protein, 382 aa, Homo sapiens
MRSPLCWLLPLLILASVAQGQPTRRPRPGTGPGRRPRPRPRPTPSFPQPDEPAEPTDLPPPLPPGPPSIFPDCPRECYCPPDFPSALYCDSRNLRKVPVIPPRIHYLYLQNNFITELPVESFQNATGLRWINLDNNRIRKIDQRVLEKLPGLVFLYMEKNQLEEVPSALPRNLEQLRLSQNHISRIPPGVFSKLENLLLLDLQHNRLSDGVFKPDTFHGLKNLMQLNLAHNILRKMPPRVPTAIHQLYLDSNKIETIPNGYFKSFPNLAFIRLNYNKLTDRGLPKNSFNISNLLVLHLSHNRISSVPAINNRLEHLYLNNNSIEKINGTQICPNDLVAFHDFSSDLENVPHLRYLRLDGNYLKPPIPLDLMMCFRLLQSVVI

SEQ ID NO: 34760 - protein, 474 aa, Homo sapiens
MSLQAPSRLLELAGQSLLRNQFLTIFTLDELPREVFPLMFMEAFSMRRFEALKLMVQAWPFLRLPLGSLMKTPHLETLQAVLRGLDTLVAQKVRPRRWKLQVLDLRDVDENFWTIWSGARVLSCSPEAMSKRQTVEDCPRMGERQPLKVFIDLCLKESTLDECLSYLFGWIHYRRGLVHLCCSKVQNYSMPTSSFRNLLERIYPDSIQELEVWKKCSLNKTGKFAPYLSQMSNLRELFLAFGYERELYVSVQWPCIPDLDSPFLCLYYPQMLYIKKISNIKEHLEHLLRYLKNPLGAFIFSDAYLTDRDMECLSQYPSLSQLKELRLIHILMWTTNLEPLGVLLEKVAATLKTLVLKDCRIQDPQLRVLLPALSHCSQLTTFNFHGNETSMNALKDLLRHTRGLSKLGLELYPAPLESLDYKGHVNWEILTPIRAELMRTLREVRQPKRIFFGPVPCPNCGSWPSEKVDFHLCS

SEQ ID NO: 34761 - protein, 433 aa, Homo sapiens
MPDYLGADQRKTKEDEKDDKPIRALDEGDIALLKTYGQSTYSRQIKQVEDDIQQLLKKINELTGIKESDTGLAPPALWDLAADKQTLQSEQPLQVARCTKIINADSEDPKYIINVKQFAKFVVDLSDQVAPTDIEEGMRVGVDRNKYQIHIPLPPKIDPTVTMMQVEEKPDVTYSDVGGCKEQIEKLREVVETPLLHPERFVNLGIEPPKGVLLFGPPGTGKTLCARAVANRTDACFIRVIGSELVQKYVGEGARMVRELFEMARTKKACLIFFDEIDAIGGARFDDGAGGDNEVQRTMLELINQLDGFDPRGNIKVLMATNRPDTLDPALMRPGRLDRKIEFSLPDLEGRTHIFKIHARSMSVERDIRFELLARLCPNSTGAEIRSVCTEAGMFAIRARRKIATEKDFLEAVNKVIKSYAKFSATPRYMTYN

SEQ ID NO: 34762 - protein, 296 aa, Homo sapiens
MRVGVDRNKYQIHIPLPPKIDPTVTMMQVEEKPDVTYSDVGGCKEQIEKLREVVETPLLHPERFVNLGIEPPKGVLLFGPPGTGKTLCARAVANRTDACFIRVIGSELVQKYVGEGARMVRELFEMARTKKACLIFFDEIDAIGGARFDDGAGGDNEVQRTMLELINQLDGFDPRGNIKVLMATNRPDTLDPALMRPGRLDRKIEFSLPDLEGRTHIFKIHARSMSVERDIRFELLARLCPNSTGAEIRSVCTEAGMFAIRARRKIATEKDFLEAVNKVIKSYAKFSATPRYMTYN

SEQ ID NO: 34763 - protein, 478 aa, Homo sapiens
MKMSIRIPPRLLELAGRSLLRDQALAVSTLEELPTELFPPLFMEAFSRRRCEALKLMVQAWPFRRLPLRPLIKMPCLEAFQAVLDGLDALLTQGVRPRRWKLQVLDLQDVCENFWMVWSEAMAHGCFLNAKRNKKPVQDCPRMRGRQPLTVFVELWLKNRTLDEYLTCLLLWVKQRRDLLHLCCKKLKILGMPFRNIRSILKMVNLDCIQEVEVNCKWILPILTQFTPYLGHLRNLQKLVLSHMDVSRYVSPEQKKEIVTQFTTQFLKLRCLQKLYMNSVSFLEGHLDQLLSCLKTSLKVLTITNCVLLESDLKHLSQCPSISQLKTLDLSGIRLTNYSLVPLQILLEKVAATLEYLDLDDCGIIDSQVNAILPALSRCFELNTFSFCGNPICMATLENLLSHTIILKNLCLELYPAPQESYGADGTLCWSRFAQIRAELMKKVRHLRHPKRILFCTDNCPDHGDRSFYDLEADQYCC

SEQ ID NO: 34764 - protein, 483 aa, Homo sapiens
MSLQAPPRLLELAEQSLLRDRALAIPTLEELPRELFPPLFMEAFTRRCCETLTTMVQAWPFTCLPLGSLMKSCNLEIFRAVLEGLDALLAQKVRPRRWKLQVLDLRNVDENFWGIWSGASALSPEALSKRRTAGNCPRPGGQQPLMVILDLCFKNGTLDECLTHFLEWGKQRKGLLHVCCKELQIFGIAIHRIIEVLNTVELDCIQEVEVCCPWELSILIRFAPYLGQMRNLRKLVLFNIHVSACIPLDRKEQFVIQFTSQFLKLDYFQKLYMHSVSFLEGHLDQLLRCLQAPLETVVMTECLLSESDLKHLSWCPSIRQLKELDLRGITLTHFSPEPLSVLLEQAEATLQTLDLEDCGIVDSQLSAILPALSRCSQLSTFSFCGNLISMAALENLLRHTVGLSKLSLELYPAPLESYDAQGALCWGRFSQLGAELMKTLRDLRQPKIIVFSTVPCPRCGIRASYDLEPSHCLLNACCQGGFI

SEQ ID NO: 34765 - protein, 474 aa, Homo sapiens
MSIQAPPRLLELAGQSLLRDQALSISAMEELPRVLYLPLFMEAFRRRHFQTLTVMVQAWPFTCLPLGSLMKTLHLETLKALLEGLHMLLTQKDRPRRRKLQVLDLRDVDENFWARWPGAWALSCFPETMSKRQTAEDRPRMGEHQPLKVFIDICLKEIPQDECLRYLFQWVYQRRGLVHLCCSKLVNYLTPIKHLRKSLKIIYLNSIQELEIHNMSWPRLIRKLRCYLKEMKTLGKLVFSRCHHSTSDNELEGRLVTKFSSVFLGLEHLQLLKIKLITFFSGHLEQLIRCLQNPLENLELTYGYLLEEDVKCLSQYPSLGYLKHLNLSYVLLFRISLEPLGALLEKIAASLETLILEGCQIHYSQLSAILPGLSRCSQLTTFYFGRNCMSMGALKDLLRHTSGLSKLSLETYPAPEESLNSLVRVNWEIFTPLRAELMCTLREVRQPKRIFIGPTPCPSCGSSLSEELELHLCC

SEQ ID NO: 34766 - protein, 426 aa, Homo sapiens
MSIQAPPRLLELAGQSLLRDQALSISAMEELPRVLYLPLFMEAFRRRHFQTLTVMVQAWPFTCLPLGSLMKTLHLETLKALLEGLHMLLTQKDRPRRWKLQVLDLRDVDENFWARWPGAWALSCFPETMSKRQTAEDCPRMGEHQPLKVFIDICLKEIPQDECLRYLFQWVYQRRGLVHLCCSKLVNYLTPIKHLRKSLKIIYLNSIQQLEIRNMSWPRLIRKLRCYLKEMKNLRKLVFSRCLQNPLENLELTYGYLLEEDMKCLSQYPSLGYLKHLNLSYVLLFRISLEPLGALLEKIAASLETLILEGCQIHYSQLSAILPGLSHCSQLTTFYFGRNCMSMGALKDLLCHTSGLSKLSLETYPAPEESLNSLVRVDWEIFALLRAELMCTLREVRQPKRIFIGPTPCPSCGSSPSEELELHLCC

SEQ ID NO: 34767 - protein, 478 aa, Homo sapiens; identical to SEQ ID NO: 1575

SEQ ID NO: 34768 - protein, 1037 aa, Homo sapiens
MWRCGGRQGLCVLRRLSGGHAHHRAWRWNSNRACERALQYKLGDKIHGFTVNQVTSVPELFLTAVKLTHDDTGARYLHLAREDTNNLFSVQFRTTPMDSTGVPHILEHTVLCGSQKYPCRDPFFKMLNRSLSTFMNAFTASDYTLYPFSTQNPKDFQNLLSVYLDATFFPCLRELDFWQEGWRLEHENPSDPQTPLVFKGVVFNEMKGAFTDNERIFSQHLQNRLLPDHTYSVVSGGDPLCIPELTWEQLKQFHATHYHPSNARFFTYGNFPLEQHLKQIHEEALSKFQKIEPSTVVPAQTPWDKPREFQITCGPDSFATDPSKQTTISVSFLLPDITDTFEAFTLSLLSSLLTSGPNSPFYKALIESGLGTDFSPDVGYNGYTREAYFSVGLQGIAEKDIETVRSLIDRTIDEVVEKGFEDDRIEALLHKIEIQMKHQSTSFGLMLTSYIASCWNHDGDPVELLKLGNQLAKFRQCLQENPKFLQEKVKQYFKNNQHKLTLSMRPDDKYHEKQAQVEATKLKQKVEALSPGDRQQIYEKGLELRSQQSKPQDASCLPALKVSDIEPTIPVTELDVVLTAGDIPVQYCAQPTNGMVYFRAFSSLNTLPEELRPYVPLFCSVLTKLGCGLLDYREQAQQIELKTGGMSASPHVLPDDSHMDTYEQGVLFSSLCLDRNLPDMMQLWSEIFNNPCFEEEEHFKVLVKMTAQELANGIPDSGHLYASIRAGRTLTPAGDLQETFSGMDQVRLMKRIAEMTDIKPILRKLPRIKKHLLNGDNMRCSVNATPQQMPQTEKAVEDFLRSIGRSKKERRPVRPHTVEKPVPSSSGGDAHVPHGSQVIRKLVMEPTFKPWQMKTHFLMPFPVNYVGECIRTVPYTDPDHASLKILARLMTAKFLHTEIREKGGAYGGGAKLSHNGIFTLYSYRDPNTIETLQSFGKAVDWAKSGKFTQQDIDEAKLSVFSTVDAPVAPSDKGMDHFLYGLSDEMKQAHREQLFAVSHDKLLAVSDRYLGTGKSTHGLAILGPENPKIAKDPSWIIQ

SEQ ID NO: 34769 - protein, 1038 aa, Homo sapiens
MWRCGGRQGLCVLRRLSGGHAHHRAWRWNSNRACERALQYKLGDKIHGFTVNQVTSVPELFLTAVKLTHDDTGARYLHLAREDTNNLFSVQFRTTPMDSTGVPHILEHTVLCGSQKYPCRDPFFKMLNRSLSTFMNAFTASDYTLYPFSTQNPKDFQNLLSVYLDATFFPCLRELDFWQEGWRLEHENPSDPQTPLVFKGVVFNEMKGAFTDNERIFSQHLQNRLLPDHTYSVVSGGDPLCIPELTWEQLKQFHATHYHPSNARFFTYGNFPLEQHLKQIHEEALSKFQKIEPSTVVPAQTPWDKPREFQITCGPDSFATDPSKQTTISVSFLLPDITDTFEAFTLSLLSSLLTSGPNSPFYKALIESGLGTDFSPDVGYNGYTREAYFSVGLQGIAEKDIETVRSLIDRTIDEVVEKGFEDDRIEALLHKIEIQMKHQSTSFGLMLTSYIASCWNHDGDPVELLKLGNQLAKFRQCLQENPKFLQEKVKQYFKNNQHKLTLSMRPDDKYHEKQAQVEATKLKQKVEALSPGDRQQIYEKGLELRSQQSKPQDASCLPALKVSDIEPTIPVTELDVVLTAGDIPVQYCAQPTNGMVYFRAFSSLNTLPEELRPYVPLFCSVLTKLGCGLLDYREQAQQIELKTGGMSASPHVLPDDSHMDTYEQVGVLFSSLCLDRNLPDMMQLWSEIFNNPCFEEEEHFKVLVKMTAQELANGIPDSGHLYASIRAGRTLTPAGDLQETFSGMDQVRLMKRIAEMTDIKPILRKLPRIKKHLLNGDNMRCSVNATPQQMPQTEKAVEDFLRSIGRSKKERRPVRPHTVEKPVPSSSGGDAHVPHGSQVIRKLVMEPTFKPWQMKTHFLMPFPVNYVGECIRTVPYTDPDHASLKILARLMTAKFLHTEIREKGGAYGGGAKLSHNGIFTLYSYRDPNTIETLQSFGKAVDWAKSGKFTQQDIDEAKLSVFSTVDAPVAPSDKGMDHFLYGLSDEMKQAHREQLFAVSHDKLLAVSDRYLGTGKSTHGLAILGPENPKIAKDPSWIIQ

SEQ ID NO: 34770 - protein, 939 aa, Homo sapiens
MRNVALRRAAGPVCAEAAERRVTSVPELFLTAVKLTHDDTGARYLHLAREDTNNLFSVQFRTTPMDSTGVPHILEHTVLCGSQKYPCRDPFFKMLNRSLSTFMNAFTASDYTLYPFSTQNPKDFQNLLSVYLDATFFPCLRELDFWQEGWRLEHENPSDPQTPLVFKGVVFNEMKGAFTDNERIFSQHLQNRLLPDHTYSVVSGGDPLCIPELTWEQLKQFHATHYHPSNARFFTYGNFPLEQHLKQIHEEALSKFQKIEPSTVVPAQTPWDKPREFQITCGPDSFATDPSKQTTISVSFLLPDITDTFEAFTLSLLSSLLTSGPNSPFYKALIESGLGTDFSPDVGYNGYTREAYFSVGLQGIAEKDIETVRSLIDRTIDEVVEKGFEDDRIEALLHKIEIQMKHQSTSFGLMLTSYIASCWNHDGDPVELLKLGNQLAKFRQCLQENPKFLQEKVKQYFKNNQHKLTLSMRPDDKYHEKQAQVEATKLKQKVEALSPGDRQQIYEKGLELRSQQSKPQDASCLPALKVSDIEPTIPVTELDVVLTAGDIPVQYCAQPTNGMVYFRAFSSLNTLPEELRPYVPLFCSVLTNPCFEEEEHFKVLVKMTAQELANGIPDSGHLYASIRAGRTLTPAGDLQETFSGMDQVRLMKRIAEMTDIKPILRKLPRIKKHLLNGDNMRCSVNATPQQMPQTEKAVEDFLRSIGRSKKERRPVRPHTVEKPVPSSSGGDAHVPHGSQVIRKLVMEPTFKPWQMKTHFLMPFPVNYVGECIRTVPYTDPDHASLKILARLMTAKFLHTEIREKGGAYGGGAKLSHNGIFTLYSYRDPNTIETLQSFGKAVDWAKSGKFTQQDIDEAKLSVFSTVDAPVAPSDKGMDHFLYGLSDEMKQAHREQLFAVSHDKLLAVSDRYLGTGKSTHGLAILGPENPKIAKDPSWIIQ

SEQ ID NO: 34771 - protein, 474 aa, Homo sapiens
MSLQSPSRLLELAGQSLLRNQFLTIFILDELPREVFPLMFMEASSMRHFEALKLMVQAWPFLRLPLGSLMKTPHLETLQAVLKGLDTLLAQKLRPRRWKLQVLDLRDVDGNFWTIWSGARALSCSPEAMSKRQTVEDYPRTGEHQPLKVFIDLCQKESTLDECLSYLCRWIHYRRGLVHLCCNKVQNYSMPTSSFRNLLKRVYPDSIQELEIKRKCSLNKTGKFAPYLSQMSNLRKLFLAFGYDDELYVSGQQQFVPDLDCPFLCLYYPQMLYIRKISNIKEHLEHLLRCLKNPLGTFIFCHAYLADQDMECLSQYPSLSQLKELHLIHILMWTTNLEPLGALLEKVAATLEILTLKDCQIQDSQLRVLLPALSRCSQLTTFYFRGNETSTNALKDLLCHTGGLSKLGLELYPAPLECLDNRGHVNWEILAPIRAELMCTLREVRQPKRIFFGPIPCPSCGSWPSEKVDFHLCS

SEQ ID NO: 34772 - protein, 479 aa, Homo sapiens
MSFQAPRRLLELAGQSLLRDQALAISVLDELPRELFPPLFVEAFTSRRCEVLKVMVQAWPFPCLPLGSLMKTPDLEILHYVVDGIDCLLAQKVRPRRWKLQVLEMRDVDENFWTIWSGARLLSCSPEAMSKRQTVEDCPRTGEKQPLKVFMDVCLKEKFMDEDLSFFSGWVQHRRGSVHLCCTKVVNYSMSILNFRNILETVYPDSIQVLEIWNMCWLCMIVEFSRYLSQMRNLRKLFISDGCRYLLSSDSQEQLVAEFSSVLLRLENLQMLYVRRVCFFRGHLDQLIRCLRSPLETLALTYGFLEEEDLKCLPRYPSLSQLKQLNLSHGALRFIRLEPLRALLEKVAATLQTLFLVDCGIGYSKLRVILPALSRCSNLTTFCFHGNDTSMDALKDLLRHTGRLSNLSLETYPAPRESLDNRGRVILELLTPLQAELMRILREVREPKRIFFGPVSCPCCGTSPTEQLESNFCLWGRPA

SEQ ID NO: 34773 - protein, 236 aa, Homo sapiens
MLPDCLSAEGELRCRRLLAGATARLRARPASAAVLVPLCSVRGVPALLYTLRSSRLTGRHKGDVSFPGGKCDPADQDVVHTALRETREELGLAVPEEHVWGLLRPVYDPQKATVVPVLAGVGPLDPQSLRPNSEEVDEVFALPLAHLLQTQNQGYTHFCRGGHFRYTLPVFLHGPHRVWGLTAVITEFALQLLAPGTYQPRLAGLTCSGAEGLARPKQPLASPCQASSTPGLNKGL

SEQ ID NO: 34774 - protein, 140 aa, Homo sapiens
MLPDCLSAEGELRCRRLLAGATARLRARPASAAVLVPLCSVRGVPALLYTLRSSRLTGRHKGDVSFPGGKCDPADQDVVHTALRETREELGLAVPEEHVWGLLRPVYDPQKATVVPVLAGVGPLDPQSLRPNSEEVSWGI

SEQ ID NO: 34775 - protein, 375 aa, Homo sapiens
MSSSLRPGPSRWRRAASIVLAAGWSRPETATPPSRPPPAEGFRLLLLQRSPHQGFMPGAHVFSGGVLDAADRSADWLGLFAPHHGPPRFGLGPAPFSRTAFPSLPDTDDHKTDNTGTLPEDVAFRICAVREAFEEAGVLLLRPRTSPPGPAPGPGLALEPPPGLASWRDRVRQDPRHFLRLCAHLDCTPDIWALHNWSAWLTPFLRGTTRRFDTAFFLCCLREPPPVYPDLAEVVGYQWSSPSEATESFLSKEIWLPPPQFYEVRRLANFASLSDLHKFCLGRALEGLERWLPIILLTADGMVHLLPGDELYLEDSDFLENLMSTEKKTEEIMKEGKQFHRIVTYHRHLYDIHVTVQPKYKHVYPKNSVVRKSHL

SEQ ID NO: 34776 - protein, 596 aa, Homo sapiens
MTSPSPRIQIISTDSAVASPQRIQIVTDQQTGQKIQIVTAVDASGSPKQQFILTSPDGAGTGKVILASPETSSAKQLIFTTSDNLVPGRIQIVTDSASVERLLGKTDVQRPQVVEYCVVCGDKASGRHYGAVSCEGCKGFFKRSVRKNLTYSCRSNQDCIINKHHRNRCQFCRLKKCLEMGMKMESVQSERKPFDVQREKPSNCAASTEKIYIRKDLRSPLIATPTFVADKDGARQTGLLDPGMLVNIQQPLIREDGTVLLATDSKAETSQGALGTLANVVTSLANLSESLNNGDTSEIQPEDQSASEITRAFDTLAKALNTTDSSSSPSLADGIDTSGGGSIHVISRDQSTPIIEVEGPLLSDTHVTFKLTMPSPMPEYLNVHYICESASRLLFLSMHWARSIPAFQALGQDCNTSLVRACWNELFTLGLAQCAQVMSLSTILAAIVNHLQNSIQEDKLSGDRIKQVMEHIWKLQEFCNSMAKLDIDGYEYAYLKAIVLFSPDHPGLTSTSQIEKFQEKAQMELQDYVQKTYSEDTYRLARILVRLPALRLMSSNITEELFFTGLIGNVSIDSIIPYILKMETAEYNGQITGASL

SEQ ID NO: 34777 - protein, 615 aa, Homo sapiens
MTSPSPRIQIISTDSAVASPQRIQGSEPASGPLSVFTSLNKEKIVTDQQTGQKIQIVTAVDASGSPKQQFILTSPDGAGTGKVILASPETSSAKQLIFTTSDNLVPGRIQIVTDSASVERLLGKTDVQRPQVVEYCVVCGDKASGRHYGAVSCEGCKGFFKRSVRKNLTYSCRSNQDCIINKHHRNRCQFCRLKKCLEMGMKMESVQSERKPFDVQREKPSNCAASTEKIYIRKDLRSPLIATPTFVADKDGARQTGLLDPGMLVNIQQPLIREDGTVLLATDSKAETSQGALGTLANVVTSLANLSESLNNGDTSEIQPEDQSASEITRAFDTLAKALNTTDSSSSPSLADGIDTSGGGSIHVISRDQSTPIIEVEGPLLSDTHVTFKLTMPSPMPEYLNVHYICESASRLLFLSMHWARSIPAFQALGQDCNTSLVRACWNELFTLGLAQCAQVMSLSTILAAIVNHLQNSIQEDKLSGDRIKQVMEHIWKLQEFCNSMAKLDIDGYEYAYLKAIVLFSPDHPGLTSTSQIEKFQEKAQMELQDYVQKTYSEDTYRLARILVRLPALRLMSSNITEELFFTGLIGNVSIDSIIPYILKMETAEYNGQITGASL

SEQ ID NO: 34778 - protein, 98 aa, Homo sapiens
MPLIYMNIMLAFTISLLGMLVYRSHLMSSLLCLEGMMLSLFIMATLMTLNTHSLLANIVPIAMLVFAACEAAVGLALLVSISNTYGLDYVHNLNLLQC

SEQ ID NO: 34779 - protein, 198 aa, Homo sapiens
MASGNARIGKPAPDFKATAVVDGAFKEVKLSDYKGKYVVLFFYPLDFTFVCPTEIIAFSNRAEDFRKLGCEVLGVSVDSQFTHLAWINTPRKEGGLGPLNIPLLADVTRRLSEDYGVLKTDEGIAYRGLFIIDGKGVLRQITVNDLPVGRSVDEALRLVQAFQYTDEHGEVCPAGWKPGSDTIKPNVDDSKEYFSKHN

SEQ ID NO: 34780 - protein, 142 aa, Homo sapiens
MASGNARIGKPAPDFKATAVVDGAFKEVKLSDYKGKYVVLFFYPLDFTFVCPTEIIAFSNRAEDFRKLGCEVLGVSVDSQFTHLAWYEQGPKREVAAKLTPSGPSSVASWPLLNLWNLRFPIVKIMETLPPKSLRMMTVISI

SEQ ID NO: 34781 - protein, 318 aa, Homo sapiens
MPNIKIFSGSSHQDLSQKIADRLGLELGKVVTKKFSNQETCVEIDESVRGEDVYIVQSGCGEINDSLMELLIMINACKIASASRVTAVIPCFPYARQDKKDKSRSPISAKLVANMLSIAGADHIITMDLHASQIQGFFDIPVDNLYAEPTVLKWIRENIPEWKNCIIVSPDAGGAKRVTSIADQLNVDFALIHKERKKANEVDCIVLVGDVNDRVAILVDDMADTCVTICLAADKLLSAGATRVYAILTHGIFSGPAISRINTACFEAVVVTNTIPQDEKMKHCSKIRVIDISMILAEAIRRTHNGESVSYLFSHVPL

SEQ ID NO: 34782 - protein, 600 aa, Homo sapiens [sequence omitted]

SEQ ID NO: 34783 - protein, 492 aa, Homo sapiens
MKMTFYGHFVAGEDQESIQPLLRHYRAFGVSAILDYGVEEDLSPEEAEHKEMESCTSAAERDGSGTNKRDKQYQAHRAFGDRRNGVISARTYFYANEAKCDSHMETFLRCIEASGRVSDDGFIAIKLTALGRPQFLLQFSEVLAKWRCFFHQMAVEQGQAGLAAMDTKLEVAVLQESVAKLGIASRAEIEDWFTAETLGVSGTMDLLDWSSLIDSRTKLSKHLVVPNAQTGQLEPLLSRFTEEEELQMTRMLQRMDVLAKKATEMGVRLMVDAEQTYFQPAISRLTLEMQRKFNVEKPLIFNTYQCYLKDAYDNVTLDVELARREGWCFGAKLVRGAYLAQERARAAEIGYEDPINPTYEATNAMYHRCLDYVLEELKHNAKAKVMVASHNEDTVRFALRRMEELGLHPADHQVYFGQLLGMCDQISFPLGQAGYPVYKYVPYGPVMEVLPYLSRRALENSSLMKGTHRERQLLWLELLRRLRTGNLFHRPA

SEQ ID NO: 34784 - protein, 516 aa, Homo sapiens [sequence omitted]

SEQ ID NO: 34785 - protein, 303 aa, Homo sapiens
MDPEVTLLLQCPGGGLPQEQIQAELSPAHDRRPLPGGDEAITAIWETRLKAQPWLFDAPKFRLHSATLAPIGSRGPQLLLRLGLTSYRDFLGTNWSSSAAWLRQQGATDWGDTQAYLADPLGVGAALATADDFLVFLRRSRQVAEAPGLVDVPGGHPEPQALCPGGSPQHQDLAGQLVVHELFSSVLQEICDEVNLPLLTLSQPLLLGIARNETSAGRASAEFYVQCSLTSEQVRKHYLSGGPEAHESTGIFFVETQNVQRLLETEMWAELCPSAKGAIILYNRVQGSPTGAALGSPALLPPL

SEQ ID NO: 34786 - protein, 213 aa, Homo sapiens
MDPEVTLLLQCPGGGLPQEQIQAELSPAHDRRPLPGGDEAITAIWETRLKAQPWLFDAPKFRLHSATLAPIGSRGPQLLLRLGLTSYRDFLGTNWSSSAAWLRQQGATDWGDTQAYLADPLGVGAALATADDFLVFLRRSRQVAEAPGLVDVPGGHPEPQVRFQAGHKDPDSSRELQLSTLPILPALVSPSLKGKLAWYFSGSLLRAVHLPPH

SEQ ID NO: 34787 - protein, 270 aa, Homo sapiens
MDPEVTLLLQCPGGGLPQEQIQAELSPAHDRRPLPGGDEAITAIWETRLKAQPWLFDAPKFRLHSATLAPIGSRGPQLLLRLGLTSYRDFLGTNWSSSAAWLRQQGATDWGDTQAYLADPLGVGAALATADDFLVFLRRSRQVAEAPGLVDVPGGHPEPQVNLPLLTLSQPLLLGIARNETSAGRASAEFYVQCSLTSEQVRKHYLSGGPEAHESTGIFFVETQNVQRLLETEMWAELCPSAKGAIILYNRVQGSPTGAALGSPALLPPL

SEQ ID NO: 34788 - protein, 1365 aa, Homo sapiens
MEFSIKQSPLSVQSVVKCIKMKQAPEILGSANGKTPSCEVNRECSVFLSKAQLSSSLQEGVMQKFNGHDALPFIPADKLKDLTSRVFNGEPGAHDAKLRFESQEMKGIGTPPNTTPIKNGSPEIKLKITKTYMNGKPLFESSICGDSAADVSQSEENGQKPENKARRNRKRSIKYDSLLEQGLVEAALVSKISSPSDKKIPAKKESCPNTGRDKDHLLKYNVGDLVWSKVSGYPWWPCMVSADPLLHSYTKLKGQKKSARQYHVQFFGDAPERAWIFEKSLVAFEGEGQFEKLCQESAKQAPTKAEKIKLLKPISGKLRAQWEMGIVQAEEAASMSVEERKAKFTFLYVGDQLHLNPQVAKEAGIAAESLGEMAESSGVSEEAAENPKSVREECIPMKRRRRAKLCSSAETLESHPDIGKSTPQKTAEADPRRGVGSPPGRKKTTVSMPRSRKGDAASQFLVFCQKHRDEVVAEHPDASGEEIEELLRSQWSLLSEKQRARYNTKFALVAPVQAEEDSGNVNGKKRNHTKRIQDPTEDAEAEDTPRKRLRTDKHSLRKRDTITDKTARTSSYKAMEAASSLKSQAATKNLSDACKPLKKRNRASTAASSALGFSKSSSPSASLTENEVSDSPGDEPSESPYESADETQTEVSVSSKKSERGVTAKKEYVCQLCEKPGSLLLCEGPCCGAFHLACLGLSRRPEGRFTCSECASGIHSCFVCKESKTDVKRCVVTQCGKFYHEACVKKYPLTVFESRGFRCPLHSCVSCHASNPSNPRPSKGKMMRCVRCPVAYHSGDACLAAGCSVIASNSIICTAHFTARKGKRHHAHVNVSWCFVCSKGGSLLCCESCPAAFHPDCLNIEMPDGSWFCNDCRAGKKLHFQDIIWVKLGNYRWWPAEVCHPKNVPPNIQKMKHEIGEFPVFFFGSKDYYWTHQARVFPYMEGDRGSRYQGVRGIGRVFKNALQEAEARFREIKLQREARETQESERKPPPYKHIKVNKPYGKVQIYTADISEIPKCNCKPTDENPCGFDSECLNRMLMFECHPQVCPAGEFCQNQCFTKRQYPETKIIKTDGKGWGLVAKRDIRKGEFVNEYVGELIDEEECMARIKHAHENDITHFYMLTIDKDRIIDAGPKGNYSRFMNHSCQPNCETLKWTVNGDTRVGLFAVCDIPAGTELTFNYNLDCLGNEKTVCRCGASNCSGFLGDRPKTSTTLSSEEKGKKTKKKTRRRRAKGEGKRQSEDECFRCGDGGQLVLCDRKFCTKAYHLSCLGLGKRPFGKWECPWHHCDVCGKPSTSFCHLCPNSFCKEHQDGTAFSCTPDGRSYCCEHDLGAASVRSTKTEKPPPEPGKPKGKRRRRRGWRRVTEGK

SEQ ID NO: 34789 - protein, 713 aa, Homo sapiens
MAGSFCWRMLGLVSKVGNRARCFSSMAASEEELLDFSGSELQFNSCSLHLSLHPFFNFLLGIHSCFVCKESKTDVKRCVVTQCGKFYHEACVKKYPLTVFESRGFRCPLHSCVSCHASNPSNPRPSKGKMMRCVRCPVAYHSGDACLAAGCSVIASNSIICTAHFTARKGKRHHAHVNVSWCFVCSKGGSLLCCESCPAAFHPDCLNIEMPDGSWFCNDCRAGKKLHFQDIIWVKLGNYRWWPAEVCHPKNVPPNIQKMKHEIGEFPVFFFGSKDYYWTHQARVFPYMEGDRGSRYQGVRGIGRVFKNALQEAEARFREIKLQREARETQESERKPPPYKHIKVNKPYGKVQIYTADISEIPKCNCKPTDENPCGFDSECLNRMLMFECHPQVCPAGEFCQNQCFTKRQYPETKIIKTDGKGWGLVAKRDIRKGEFVNEYVGELIDEEECMARIKHAHENDITHFYMLTIDKDRIIDAGPKGNYSRFMNHSCQPNCETLKWTVNGDTRVGLFAVCDIPAGTELTFNYNLDCLGNEKTVCRCGASNCSGFLGDRPKTSTTLSSEEKGKKTKKKTRRRRAKGEGKRQSEDECFRCGDGGQLVLCDRKFCTKAYHLSCLGLGKRPFGKWECPWHHCDVCGKPSTSFCHLCPNSFCKEHQDGTAFSCTPDGRSYCCEHDLGAASVRSTKTEKPPPEPGKPKGKRRRRRGWRRVTEGK

SEQ ID NO: 34790 - protein, 647 aa, Homo sapiens
MEFSIKQSPLSVQSVVKCIKMKQAPEILGSANGKTPSCEVNRECSVFLSKAQLSSSLQEGVMQKFNGHDALPFIPADKLKDLTSRVFNGEPGAHDAKLRFESQEMKGIGTPPNTTPIKNGSPEIKLKITKTYMNGKPLFESSICGDSAADVSQSEENGQKPENKARRNRKRSIKYDSLLEQGLVEAALVSKISSPSDKKIPAKKESCPNTGRDKDHLLKYNVGDLVWSKVSGYPWWPCMVSADPLLHSYTKLKGQKKSARQYHVQFFGDAPERAWIFEKSLVAFEGEGQFEKLCQESAKQAPTKAEKIKLLKPISGKLRAQWEMGIVQAEEAASMSVEERKAKFTFLYVGDQLHLNPQVAKEAGIAAESLGEMAESSGVSEEAAENPKSVREECIPMKRRRRAKLCSSAETLESHPDIGKSTPQKTAEADPRRGVGSPPGRKKTTVSMPRSRKGDAASQFLVFCQKHRDEVVAEHPDASGEEIEELLRSQWSLLSEKQRARYNTKFALVAPVQAEEDSGNVNGKKRNHTKRIQDPTEDAEAEDTPRKRLRTDKHSLRKRDTITDKTARTSSYKAMEAASSLKSQAATKNLSDACKPLKKRNRASTAASSALGFSKSSSPSASLTENELLWEPTPVKLDLNPAALYCT

SEQ ID NO: 34791 - protein, 584 aa, Homo sapiens
MMRCVRCPVAYHSGDACLAAGCSVIASNSIICTAHFTARKGKRHHAHVNVSWCFVCSKGGSLLCCESCPAAFHPDCLNIEMPDGSWFCNDCRAGKKLHFQDIIWVKLGNYRWWPAEVCHPKNVPPNIQKMKHEIGEFPVFFFGSKDYYWTHQARVFPYMEGDRGSRYQGVRGIGRVFKNALQEAEARFREIKLQREARETQESERKPPPYKHIKVNKPYGKVQIYTADISEIPKCNCKPTDENPCGFDSECLNRMLMFECHPQVCPAGEFCQNQCFTKRQYPETKIIKTDGKGWGLVAKRDIRKGEFVNEYVGELIDEEECMARIKHAHENDITHFYMLTIDKDRIIDAGPKGNYSRFMNHSCQPNCETLKWTVNGDTRVGLFAVCDIPAGTELTFNYNLDCLGNEKTVCRCGASNCSGFLGDRPKTSTTLSSEEKGKKTKKKTRRRRAKGEGKRQSEDECFRCGDGGQLVLCDRKFCTKAYHLSCLGLGKRPFGKWECPWHHCDVCGKPSTSFCHLCPNSFCKEHQDGTAFSCTPDGRSYCCEHDLGAASVRSTKTEKPPPEPGKPKGKRRRRRGWRRVTEGK

SEQ ID NO: 34792 - protein, 629 aa, Homo sapiens
MEFSIKQSPLSVQSVVKCIKMKQAPEILGSANGKTPSCEVNRECSVFLSKAQLSSSLQEGVMQKFNGHDALPFIPADKLKDLTSRVFNGEPGAHDAKLRFESQEMKGIGTPPNTTPIKNGSPEIKLKITKTYMNGKPLFESSICGDSAADVSQSEENGQKPENKARRNRKRSIKYDSLLEQGLVEAALVSKISSPSDKKIPAKKESCPNTGRDKDHLLKYNVGDLVWSKVSGYPWWPCMVSADPLLHSYTKLKGQKKSARQYHVQFFGDAPERAWIFEKSLVAFEGEGQFEKLCQESAKQAPTKAEKIKLLKPISGKLRAQWEMGIVQAEEAASMSVEERKAKFTFLYVGDQLHLNPQVAKEAGIAAESLGEMAESSGVSEEAAENPKSVREECIPMKRRRRAKLCSSAETLESHPDIGKSTPQKTAEADPRRGVGSPPGRKKTTVSMPRSRKGDAASQFLVFCQKHRDEVVAEHPDASGEEIEELLRSQWSLLSEKQRARYNTKFALVAPVQAEEDSGNVNGKKRNHTKRIQDPTEDAEAEDTPRKRLRTDKHSLRKRDTITDKTARTSSYKAMEAASSLKSQAATKNLSDACKPLKKRNRASTAASSALGFSKSSSPSASLTENEVK

SEQ ID NO: 34793 - protein, 484 aa, Homo sapiens
MEFSIKQSPLSVQSVVKCIKMKQAPEILGSANGKTPSCEVNRECSVFLSKAQLSSSLQEGVMQKFNGHDALPFIPADKLKDLTSRVFNGEPGAHDAKLRFESQEMKGIGTPPNTTPIKNGSPEIKLKITKTYMNGKPLFESSICGDSAADVSQSEENGQKPENKARRNRKRSIKYDSLLEQGLVEAALVSKISSPSDKKIPAKKESCPNTGRDKDHLLKYNVGDLVWSKVSGYPWWPCMVSADPLLHSYTKLKGQKKSARQYHVQFFGDAPERAWIFEKSLVAFEGEGQFEKLCQESAKQAPTKAEKIKLLKPISGKLRAQWEMGIVQAEEAASMSVEERKAKFTFLYVGDQLHLNPQVAKEAGIAAESLGEMAESSGVSEEAAENPKSVREECIPMKRRRRAKLCSSAETLESHPDIGKSTPQKTAEADPRRGVGSPPGRKKTTVSMPRSRKGDAASQFLVFCQKHRDEVSTKLCFMLASFRI

SEQ ID NO: 34794 - protein, 273 aa, Homo sapiens
MEFSIKQSPLSVQSVVKCIKMKQAPEILGSANGKTPSCEVNRECSVFLSKAQLSSSLQEGVMQKFNGHDALPFIPADKLKDLTSRVFNGEPGAHDAKLRFESQEMKGIGTPPNTTPIKNGSPEIKLKITKTYMNGKPLFESSICGDSAADVSQSEENGQKPENKARRNRKRSIKYDSLLEQGLVEAALVSKISSPSDKKIPAKKESCPNTGRDKDHLLKYNVGDLVWSKVSGYPWWPCMVSADPLLHSYTKLKGIFKSKKFEHLKTSQIVLKD

SEQ ID NO: 34795 - protein, 454 aa, Homo sapiens
MTWRAAASTCAALLILLWALTTEGDLKVEMMAGGTQITPLNDNVTIFCNIFYSQPLNITSMGITWFWKSLTFDKEVKVFEFFGDHQEAFRPGAIVSPWRLKSGDASLRLPGIQLEEAGEYRCEVVVTPLKAQGTVQLEVVASPASRLLLDQVGMKENEDKYMCESSGFYPEAINITWEKQTQKFPHPIEISEDVITGPTIKNMDGTFNVTSCLKLNSSQEDPGTVYQCVVRHASLHTPLRSNFTLTAARHSLSETEKTDNFSIHWWPISFIGVGLVLLIVLIPWKKICNKSSSAYTPLKCILKHWNSFDTQTLKKEHLIFFCTRAWPSYQLQDGEAWPPEGSVNINTIQQLDVFCRQEGKWSEVPYVQAFFALRDNPDLCQCCRIDPALLTVTSGKSIDDNSTKSEKQTPREHSDAVPDAPILPVSPIWEPPPATTSTTPVLSSQPPTLLLPLQ

SEQ ID NO: 34796 - protein, 256 aa, Homo sapiens
MAAAVGRLLRASVARHVSAIPWGISATAALRPAACGRTSLTNLLCSGSSQAKLFSTSSSCHAPAVTQHAPYFKGTAVVNGEFKDLSLDDFKGKYLVLFFYPLDFTFVCPTEIVAFSDKANEFHDVNCEVVAVSVDSHFSHLAWINTPRKNGGLGHMNIALLSDLTKQISRDYGVLLEGSGLALRGLFIIDPNGVIKHLSVNDLPVGRSVEETLRLVKAFQYVETHGEVCPANWTPDSPTIKPSPAASKEYFQKVNQ

SEQ ID NO: 34797 - protein, 238 aa, Homo sapiens
MAAAVGRLLRASVARHVSAIPWGISATAALRPAACGRTSLTNLLCSGSSQAPYFKGTAVVNGEFKDLSLDDFKGKYLVLFFYPLDFTFVCPTEIVAFSDKANEFHDVNCEVVAVSVDSHFSHLAWINTPRKNGGLGHMNIALLSDLTKQISRDYGVLLEGSGLALRGLFIIDPNGVIKHLSVNDLPVGRSVEETLRLVKAFQYVETHGEVCPANWTPDSPTIKPSPAASKEYFQKVNQ

SEQ ID NO: 34798 - protein, 181 aa, Homo sapiens; identical to SEQ ID NO: 29620

SEQ ID NO: 34799 - protein, 361 aa, Homo sapiens
METGAAELYDQALLGILQHVGNVQDFLRVLFGFLYRKTDFYRLLRHPSDRMGFPPGAAQALVLQVFKTFDHMARQDDEKRRQELEEKIRRKEEEEAKTVSAAAAEKEPVPVPVQEIEIDSTTELDGHQEVEKVQPPGPVKEMAHGSQEAEAPGAVAGAAEVPREPPILPRIQEQFQKNPDSYNGAVRENYTWSQDYTDLEVRVPVPKHVVKGKQVSVALSSSSIRVAMLEENGERVLMEGKLTHKINTESSLWSLEPGKCVLVNLSKVGEYWWNAILEGEEPIDIDKINKERSMATVDEEEQAVLDRLTFDYHQKLQGKPQSHELKVHEMLKKGWDAEGSPFRGQRFDPAMFNISPGAVQF

SEQ ID NO: 34800 - protein, 598 aa, Homo sapiens; identical to SEQ ID NO: 185

SEQ ID NO: 34801 - protein, 535 aa, Homo sapiens
MDNYSTGYDVKPPCLYQMPLSGQQSSIKVEDIQMHNYQQHSHLPPQSEEMMPHSGSVYYKPSSPPTPTTPGFQVQHSPMWDDPGSLHNFHQNYVATTHMIEQRKTPVSRLSLFSFKQSPPGTPVSSCQMRFDGPLHVPMNPEPAGSHHVVDGQTFAVPNPIRKPASMGFPGLQIGHASQLLDTQVPSPPSRGSPSNEGLCAVCGDNAACQHYGVRTCEGCKGFFKRTVQKNAKYVCLANKNCPVDKRRRNRCQYCRFQKCLAVGMVKEVVRTDSLKGRRGRLPSKPKSPQEPSPPSPPVSLISALVRAHVDSNPAMTSLDYSRFQANPDYQMSGDDTQHIQQFYDLLTGSMEIIRGWAEKIPGFADLPKADQDLLFESAFLELFVLRLAYRSNPVEGKLIFCNGVVLHRLQCVRGFGEWIDSIVEFSSNLQNMNIDISAFSCIAALAMVTERHGLKEPKRVEELQNKIVNCLKDHVTFNNGGLNRPNYLSKLLGKLPELRTLCTQGLQRIFYLKLEDLVPPPAIIDKLFLDTLPF

SEQ ID NO: 34802 - protein, 346 aa, Homo sapiens
MALLKVKFDQKKRVKLAQGLWLMNWFSVLAGIIIFSLGLFLKIELRKRSDVMNNSESHFVPNSLIGMGVLSCVFNSLAGKICYDALDPAKYARWKPWLKPYLAICVLFNIILFLVALCCFLLRGSLENTLGQGLKNGMKYYRDTDTPGRCFMKKTIDMLQIEFKCCGNNGFRDWFEIQWISNRYLDFSSKEVKDRIKSNVDGRYLVDGVPFSCCNPSSPRPCIQYQITNNSAHYSYDHQTEELNLWVRGCRAALLSYYSSLMNSMGVVTLLIWLFEVTITIGLRYLQTSLDGVSNPEESESESEGWLLEKSVPETWKAFLESVKKLGKGNQVEAEGAGAGQAPEAG

SEQ ID NO: 34803 - protein, 744 aa, Homo sapiens
MAGRSMQAARCPTDELSLTNCAVVNEKDFQSGQHVIVRTSPNHRYTFTLKTHPSVVPGSIAFSLPQRKWAGLSIGQEIEVSLYTFDKAKQCIGTMTIEIDFLQKKSIDSNPYDTDKMAAEFIQQFNNQAFSVGQQLVFSFNEKLFGLLVKDIEAMDPSILKGEPATGKRQKIEVGLVVGNSQVAFEKAENSSLNLIGKAKTKENRQSIINPDWNFEKMGIGGLDKEFSDIFRRAFASRVFPPEIVEQMGCKHVKGILLYGPPGCGKTLLARQIGKMLNAREPKVVNGPEILNKYVGESEANIRKLFADAEEEQRRLGANSGLHIIIFDEIDAICKQRGSMAGSTGVHDTVVNQLLSKIDGVEQLNNILVIGMTNRPDLIDEALLRPGRLEVKMEIGLPDEKGRLQILHIHTARMRGHQLLSADVDIKELAVETKNFSGAELEGLVRAAQSTAMNRHIKASTKVEVDMEKAESLQVTRGDFLASLENDIKPAFGTNQEDYASYIMNGIIKWGDPVTRVLDDGELLVQQTKNSDRTPLVSVLLEGPPHSGKTALAAKIAEESNFPFIKICSPDKMIGFSETAKCQAMKKIFDDAYKSQLSCVVVDDIERLLDYVPIGPRFSNLVLQALLVLLKKAPPQGRKLLIIGTTSRKDVLQEMEMLNAFSTTIHVPNIATGEQLLEALELLGNFKDKERTTIAQQVKGKKVWIGIKKLLMLIEMSLQMDPEYRVRKFLALLREEGASPLDFD

SEQ ID NO: 34804 - protein, 644 aa, Homo sapiens
MTIEIDFLQKKSIDSNPYDTDKMAAEFIQQFNNQAFSVGQQLVFSFNEKLFGLLVKDIEAMDPSILKGEPATGKRQKIEVGLVVGNSQVAFEKAENSSLNLIGKAKTKENRQSIINPDWNFEKMGIGGLDKEFSDIFRRAFASRVFPPEIVEQMGCKHVKGILLYGPPGCGKTLLARQIGKMLNAREPKVVNGPEILNKYVGESEANIRKLFADAEEEQRRLGANSGLHIIIFDEIDAICKQRGSMAGSTGVHDTVVNQLLSKIDGVEQLNNILVIGMTNRPDLIDEALLRPGRLEVKMEIGLPDEKGRLQILHIHTARMRGHQLLSADVDIKELAVETKNFSGAELEGLVRAAQSTAMNRHIKASTKVEVDMEKAESLQVTRGDFLASLENDIKPAFGTNQEDYASYIMNGIIKWGDPVTRVLDDGELLVQQTKNSDRTPLVSVLLEGPPHSGKTALAAKIAEESNFPFIKICSPDKMIGFSETAKCQAMKKIFDDAYKSQLSCVVVDDIERLLDYVPIGPRFSNLVLQALLVLLKKAPPQGRKLLIIGTTSRKDVLQEMEMLNAFSTTIHVPNIATGEQLLEALELLGNFKDKERTTIAQQVKGKKVWIGIKKLLMLIEMSLQMDPEYRVRKFLALLREEGA

SEQ ID NO: 34805 - protein, 558 aa, Homo sapiens
MAIPGRQYGLILPKKTQQLHPVLQKPSVFGNDSDDDDETSVSESLQREAAKKQAMKQTKLEIQKALAEDATVYEYDSIYDEMQKKKEENNPKLLLGKDRKPKYIHNLLKAVEIRKKEQEKRMEKKIQREREMEKGEFDDKEAFVTSAYKKKLQERAEEEEREKRAAALEACLDVTKQKDLSGFYRHLLNQAVGEEEVPKCSFREARSGIKEEKSRGFSNEVSSKNRIPQEKCILQTDVKVEENPDADSDFDAKSSADDEIEETRVNCRREKVIETPENDFKHHRSQNHSRSPSEERGHSTRHHTKGSRTSRGHEKREDQHQQKQSRDQENHYTDRDYRKERDSHRHREASHRDSHWKRHEQEDKPRARDQRERSDRVWKREKDREKYSQREQERDRQQNDQNRPSEKGEKEEKSKAKEEHMKVRKERYENNDKYRDREKREVGVQSSERNQDRKESSPNSRAKDKFLDQERSNKMRNMAKDKERNQEKPSNSESSLGAKHRLTEEGQEKGKEQERPPEAVSKFAKRNNEETVMSARDRYLARQMARVNAKTYIEKEDD

SEQ ID NO: 34806 - protein, 925 aa, Homo sapiens
MDRSGFGEISSPVIREAEVTRTARKQSAQKRVLLQASQDENFGNTTPRNQVIPRTPSSFRQPFTPTSRSLLRQPDISCILGTGGKSPRLTQSSGFFGNLSMVTNLDDSNWAAAFSSQRSGLFTNTEPHSITEDVTISAVMLREDDPGEAASMSMFSDFLQSFLKHSSSTVFDLVEEYENICGSQVNILSKIVSRATPGLQKFSKTASMLWLLQQEMVTWRLLASLYRDRIQSALEEESVFAVTAVNASEKTVVEALFQRDSLVRQSQLVVDWLESIAKDEIGEFSDNIEFYAKSVYWENTLHTLKQRQLTSYVGSVRPLVTELDPDAPIRQKMPLDDLDREDEVRLLKYLFTLIRAGMTEEAQRLCKRCGQAWRAATLEGWKLYHDPNVNGGTELEPVEGNPYRRIWKISCWRMAEDELFNRYERAIYAALSGNLKQLLPVCDTWEDTVWAYFRVMVDSLVEQEIQTSVATLDETEELPREYLGANWTLEKVFEELQATDKKRVLEENQEHYHIVQKFLILGDIDGLMDEFSKWLSKSRNNLPGHLLRFMTHLILFFRTLGLQTKEEVSIEVLKTYIQLLIREKHTNLIAFYTCHLPQDLAVAQYALFLESVTEFEQRHHCLELAKEADLDVATITKTVVENIRKKDNGEFSHHDLAPALDTGTTEEDRLKIDVIDWLVFDPAQRAEALKQGNAIMRKFLASKKHEAAKEVFVKIPQDSIAEIYNQCEEQGMESPLPAEDDNAIREHLCIRAYLEAHETFNEWFKHMNSVPQKPALIPQPTFTEKVAHEHKEKKYEMDFGIWKGHLDALTADVKEKMYNVLLFVDGGWMVDVREDAKEDHERTHQMVLLRKLCLPMLCFLLHTILHSTGQYQECLQLADMVSSERHKLYLVFSKEELRKLLQKLRESSLMLLDQGLDPLGYEIQL

SEQ ID NO: 34807 - protein, 896 aa, Homo sapiens
MKILVILHQETRLSLELLAHFDSLVLSTNLLFIVTPTSRSLLRQPDISCILGTGGKSPRLTQSSGFFGNLSMVTNLDDSNWAAAFSSQRSGLFTNTEPHSITEDVTISAVMLREDDPGEAASMSMFSDFLQSFLKHSSSTVFDLVEEYENICGSQVNILSKIVSRATPGLQKFSKTASMLWLLQQEMVTWRLLASLYRDRIQSALEEESVFAVTAVNASEKTVVEALFQRDSLVRQSQLVVDWLESIAKDEIGEFSDNIEFYAKSVYWENTLHTLKQRQLTSYVGSVRPLVTELDPDAPIRQKMPLDDLDREDEVRLLKYLFTLIRAGMTEEAQRLCKRCGQAWRAATLEGWKLYHDPNVNGGTELEPVEGNPYRRIWKISCWRMAEDELFNRYERAIYAALSGNLKQLLPVCDTWEDTVWAYFRVMVDSLVEQEIQTSVATLDETEELPREYLGANWTLEKVFEELQATDKKRVLEENQEHYHIVQKFLILGDIDGLMDEFSKWLSKSRNNLPGHLLRFMTHLILFFRTLGLQTKEEVSIEVLKTYIQLLIREKHTNLIAFYTCHLPQDLAVAQYALFLESVTEFEQRHHCLELAKEADLDVATITKTVVENIRKKDNGEFSHHDLAPALDTGTTEEDRLKIDVIDWLVFDPAQRAEALKQGNAIMRKFLASKKHEAAKEVFVKIPQDSIAEIYNQCEEQGMESPLPAEDDNAIREHLCIRAYLEAHETFNEWFKHMNSVPQKPALIPQPTFTEKVAHEHKEKKYEMDFGIWKGHLDALTADVKEKMYNVLLFVDGGWMVDVREDAKEDHERTHQMVLLRKLCLPMLCFLLHTILHSTGQYQECLQLADMVSSERHKLYLVFSKEELRKLLQKLRESSLMLLDQGLDPLGYEIQL

SEQ ID NO: 34808 - protein, 686 aa, Homo sapiens
MSMFSDFLQSFLKHSSSTVFDLVEEYENICGSQVNILSKIVSRATPGLQKFSKTASMLWLLQQEMVTWRLLASLYRDRIQSALEEESVFAVTAVNASEKTVVEALFQRDSLVRQSQLVVDWLESIAKDEIGEFSDNIEFYAKSVYWENTLHTLKQRQLTSYVGSVRPLVTELDPDAPIRQKMPLDDLDREDEVRLLKYLFTLIRAGMTEEAQRLCKRCGQAWRAATLEGWKLYHDPNVNGGTELEPVEGNPYRRIWKISCWRMAEDELFNRYERAIYAALSGNLKQLLPVCDTWEDTVWAYFRVMVDSLVEQEIQTSVATLDETEELPREYLGANWTLEKVFEELQATDKKRVLEENQEHYHIVQKFLILGDIDGLMDEFSKWLSKSRNNLPGHLLRFMTHLILFFRTLGLQTKEEVSIEVLKTYIQEDRLKIDVIDWLVFDPAQRAEALKQGNAIMRKFLASKKHEAAKEVFVKIPQDSIAEIYNQCEEQGMESPLPAEDDNAIREHLCIRAYLEAHETFNEWFKHMNSVPQKPALIPQPTFTEKVAHEHKEKKYEMDFGIWKGHLDALTADVKEKMYNVLLFVDGGWMVDVREDAKEDHERTHQMVLLRKLCLPMLCFLLHTILHSTGQYQECLQLADMVSSERHKLYLVFSKEELRKLLQKLRESSLMLLDQGLDPLGYEIQL

SEQ ID NO: 34809 - protein, 1475 aa, Homo sapiens
MASGAGGVGGGGGGKIRTRRCHQGPIKPYQQGRQQHQGILSRVTESVKNIVPGWLQRYFNKNEDVCSCSTDTSEVPRWPENKEDHLVYADEESSNITDGRITPEPAVSNTEEPSTTSTASNYPDVLTRPSLHRSHLNFSMLESPALHCQPSTSSAFPIGSSGFSLVKEIKDSTSQHDDDNISTTSGFSSRASDKDITVSKNTSLPPLWSPEAERSHSLSQHTATSSKKPAFNLSAFGTLSPSLGNSSILKTSQLGDSPFYPGKTTYGGAAAAVRQSKLRNTPYQAPVRRQMKAKQLSAQSYGVTSSTARRILQSLEKMSSPLADAKRIPSIVSSPLNSPLDRSGIDITDFQAKREKVDSQYPPVQRLMTPKPVSIATNRSVYFKPSLTPSGEFRKTNQRIDNKCSTGYEKNMTPGQNREQRESGFSYPNFSLPAANGLSSGVGGGGGKMRRERTRFVASKPLEEEEMEVPVLPKISLPITSSSLPTFNFSSPEITTSSPSPINSSQALTNKVQMTSPSSTGSPMFKFSSPIVKSTEANVLPPSSIGFTFSVPVAKTAELSGSSSTLEPIISSSAHHVTTVNSTNCKKTPPEDCEGPFRPAEILKEGSVLDILKSPGFASPKIDSVAAQPTATSPVVYTRPAISSFSSSGIGFGESLKAGSSWQCDTCLLQNKVTDNKCIACQAAKLSPRDTAKQTGIETPNKSGKTTLSASGTGFGDKFKPVIGTWDCDTCLVQNKPEAIKCVACETPKPGTCVKRALTLTVVSESAETMTASSSSCTVTTGTLGFGDKFKRPIGSWECSVCCVSNNAEDNKCVSCMSEKPGSSVPASSSSTVPVSLPSGGSLGLEKFKKPEGSWDCELCLVQNKADSTKCLACESAKPGTKSGFKGFDTSSSSSNSAASSSFKFGVSSSSSGPSQTLTSTGNFKFGDQGGFKIGVSSDSGSINPMSEGFKFSKPIGDFKFGVSSESKPEEVKKDSKNDNFKFGLSSGLSNPVSLTPFQFGVSNLGQEEKKEELPKSSSAGFSFGTGVINSTPAPANTIVTSENKSSFNLGTIETKSASVAPFTCKTSEAKKEEMPATKGGFSFGNVEPASLPSASVFVLGRTEEKQQEPVTSTSLVFGKKADNEEPKCQPVFSFGNSEQTKDENSSKSTFSFSMTKPSEKESEQPAKATFAFGAQTSTTADQGAAKPVFSFLNNSSSSSSTPATSAGGGIFGSSTSSSNPPVATFVFGQSSNPVSSSAFGNTAESSTSQSLLFSQDSKLATTSSTGTAVTPFVFGPGASSNNTTTSGFGFGATTTSSSAGSSFVFGTGPSAPSASPAFGANQTPTFGQSQGASQPNPPGFGSISSSTALFPTGSQPAPPTFGTVSSSSQPPVFGQQPSQSAFGSGTTPNSSSAFQFGSSTTNFNFTNNSPSGVFTFGANSSTPAASAQPSGSGGFPFNQSPAAFTVGSNGKNVFSSSGTSFSGRKIKTAVRRRK

SEQ ID NO: 34810 - protein, 1433 aa, Homo sapiens
MASGAGGVGGGGGGKIRTRRCHQGPIKPYQQGRQQHQGILSRVTESVKNIVPGWLQRYFNKNEDVCSCSTDTSEVPRWPENKEDHLVYADEESSNITDGRITPEPAVSNTEEPSTTSTASNYPDVLTRPSLHRSHLNFSMLESPALHCQPSTSSAFPIGSSGFSLVKEIKDSTSQHDDDNISTTSGFSSRASDKDITVSKNTSLPPLWSPEAERSHSLSQHTATSSKKPAFNLSAFGTLSPSLGNSSILKTSQLGDSPFYPGKTTYGGAAAAVRQSKLRNTPYQAPVRRQMKAKQLSAQSYGVTSSTARRILQSLEKMSSPLADAKRIPSIVSSPLNSPLDRSGIDITDFQAKREKVDSQYPPVQRLMTPKPVSIATNRSVYFKPSLTPSGEFRKTNQRIDNKCSTGYEKNMTPGQNREQRESGFSYPNFSLPAANGLSSGVGGGGGKMRRERTRFVASKPLEEEEMEVPVLPKISLPITSSSLPTFNFSSPEITTSSPSPINSSQALTNKVQMTSPSSTGSPMFKFSSPIVKSTEANVLPPSSIGFTFSVPVAKTAELSGSSSTLEPIISSSGFASPKIDSVAAQPTATSPVVYTRPAISSFSSSGIGFGESLKAGSSWQCDTCLLQNKVTDNKCIACQAAKLSPRDTAKQTGIETPNKSGKTTLSASGTGFGDKFKPVIGTWDCDTCLVQNKPEAIKCVACETPKPGTCVKRALTLTVVSESAETMTASSSSCTVTTGTLGFGDKFKRPIGSWECSVCCVSNNAEDNKCVSCMSEKPGSSVPASSSSTVPVSLPSGGSLGLEKFKKPEGSWDCELCLVQNKADSTKCLACESAKPGTKSGFKGFDTSSSSSNSAASSSFKFGVSSSSSGPSQTLTSTGNFKFGDQGGFKIGVSSDSGSINPMSEGFKFSKPIGDFKFGVSSESKPEEVKKDSKNDNFKFGLSSGLSNPVSLTPFQFGVSNLGQEEKKEELPKSSSAGFSFGTGVINSTPAPANTIVTSENKSSFNLGTIETKSASVAPFTCKTSEAKKEEMPATKGGFSFGNVEPASLPSASVFVLGRTEEKQQEPVTSTSLVFGKKADNEEPKCQPVFSFGNSEQTKDENSSKSTFSFSMTKPSEKESEQPAKATFAFGAQTSTTADQGAAKPVFSFLNNSSSSSSTPATSAGGGIFGSSTSSSNPPVATFVFGQSSNPVSSSAFGNTAESSTSQSLLFSQDSKLATTSSTGTAVTPFVFGPGASSNNTTTSGFGFGATTTSSSAGSSFVFGTGPSAPSASPAFGANQTPTFGQSQGASQPNPPGFGSISSSTALFPTGSQPAPPTFGTVSSSSQPPVFGQQPSQSAFGSGTTPNSSSAFQFGSSTTNFNFTNNSPSGVFTFGANSSTPAASAQPSGSGGFPFNQSPAAFTVGSNGKNVFSSSGTSFSGRKIKTAVRRRK

SEQ ID NO: 34811 - protein, 1506 aa, Homo sapiens
MASGAGGVGGGGGGKIRTRRCHQGPIKPYQQGRQQHQGILSRVTESVKNIVPGWLQRYFNKNEDVCSCSTDTSEVPRWPENKEDHLVYADEESSNITDGRITPEPAVSNTEEPSTTSTASNYPDVLTRPSLHRSHLNFSMLESPALHCQPSTSSAFPIGSSGFSLVKEIKDSTSQHDDDNISTTSGFSSRASDKDITVSKNTSLPPLWSPEAERSHSLSQHTATSSKKPAFNLSAFGTLSPSLGNSSILKTSQLGDSPFYPGKTTYGGAAAAVRQSKLRNTPYQAPVRRQMKAKQLSAQSYGVTSSTARRILQSLEKMSSPLADAKRIPSIVSSPLNSPLDRSGIDITDFQAKREKVDSQYPPVQRLMTPKPVSIATNRSVYFKPSLTPSGEFRKTNQRIDNKCSTGYEKNMTPGQNREQRESGFSYPNFSLPAANGLSSGVGGGGGKMRRERTRFVASKPLEEERQGLTVLPKLISSSCAQAIIPSWPLKVLRLQEMEVPVLPKISLPITSSSLPTFNFSSPEITTSSPSPINSSQALTNKVQMTSPSSTGSPMFKFSSPIVKSTEANVLPPSSIGFTFSVPVAKTAELSGSSSTLEPIISSSAHHVTTVNSTNCKKTPPEDCEGPFRPAEILKEGSVLDILKSPGFASPKIDSVAAQPTATSPVVYTRPAISSFSSSGIGFGESLKAGSSWQCDTCLLQNKVTDNKCIACQAAKLSPRDTAKQTGIETPNKSGKTTLSASGTGFGDKFKPVIGTWDCDTCLVQNKPEAIKCVACETPKPGTCVKRALTLTVVSESAETMTASSSSCTVTTGTLGFGDKFKRPIGSWECSVCCVSNNAEDNKCVSCMSEKPGSSVPASSSSTVPVSLPSGGSLGLEKFKKPEGSWDCELCLVQNKADSTKCLACESAKPGTKSGFKGFDTSSSSSNSAASSSFKFGVSSSSSGPSQTLTSTGNFKFGDQGGFKIGVSSDSGSINPMSEGFKFSKPIGDFKFGVSSESKPEEVKKDSKNDNFKFGLSSGLSNPVSLTPFQFGVSNLGQEEKKEELPKSSSAGFSFGTGVINSTPAPANTIVTSENKSSFNLGTIETKSASVAPFTCKTSEAKKEEMPATKGGFSFGNVEPASLPSASVFVLGRTEEKQQEPVTSTSLVFGKKADNEEPKCQPVFSFGNSEQTKDENSSKSTFSFSMTKPSEKESEQPAKATFAFGAQTSTTADQGAAKPVFSFLNNSSSSSSTPATSAGGGIFGSSTSSSNPPVATFVFGQSSNPVSSSAFGNTAESSTSQSLLFSQDSKLATTSSTGTAVTPFVFGPGASSNNTTTSGFGFGATTTSSSAGSSFVFGTGPSAPSASPAFGANQTPTFGQSQGASQPNPPGFGSISSSTALFPTGSQPAPPTFGTVSSSSQPPVFGQQPSQSAFGSGTTPNSSSAFQFGSSTTNFNFTNNSPSGVFTFGANSSTPAASAQPSGSGGFPFNQSPAAFTVGSNGKNVFSSSGTSFSGRKIKTAVRRRK

SEQ ID NO: 34812 - protein, 469 aa, Homo sapiens
MSIFPKISLRPEVENYLKEGFMNKEIVTALGKQEAERKFETLLKHLSHPPSFTTVRVNTHLASVQHVKNLLLDELQKQFNGLSVPILQHPDLQDVLLIPVIGPRKNIKKQQCEAIVGAQCGNAVLRGAHVYAPGIVSASQFMKAGDVISVYSDIKGKCKKGAKEFDGTKVFLGNGISELSRKEIFSGLPELKGMGIRMTEPVYLSPSFDSVLPRYLFLQNLPSALVSHVLNPQPGEKILDLCAAPGGKTTHIAALMHDQGEVIALDKIFNKVEKIKQNALLLGLNSIRAFCFDGTKAVKLDMVEDTEGEPPFLPESFDRILLDAPCSGMGQRPNMACTWSVKEVASYQPLQRKLFTAAVQLLKPEGVLVYSTCTITLAENEEQVAWALTKFPCLQLQPQEPQIGGEGMRGAGLSCEQLKQLQRFDPSAVPLPDTDMDSLREARREDMLRLANKDSIGFFIAKFVKCKST

SEQ ID NO: 34813 - protein, 1133 aa, Homo sapiens
MVKLSIVLTPQFLSHDQGQLTKELQQHVKSVTCPCEYLRKVINTLADHHHRGTDFGGSPWLHVIIAFPTSYKVVITLWIVYLWVSLLKTIFWSRNGHDGSTDVQQRAWRSNRRRQEGLRSICMHTKKRVSSFRGNKIGLKDVITLRRHVETKVRAKIRKRKVTTKINHHDKINGKRKTARKQKMFQRAQELRRRAEDYHKCKIPPSARKALCNWVRMAAAEHRHSSGLPYWPYLTAETLKNRMGHQPPPPTQQHSITDNSLSLKTPPECLLTPLPPSADDNLKTPPECVLTPLPPSADDNLKTPPECVLTPLPPSADDNLKTPPECLLTPLPPSADDNLKTPPECLLTPLPPSALPSAPPSADDNLKTRAECLLHPLPPSADDNLKTPSERQLTPLPPSAPPSADDNIKTPAERLRGPLPPSADDNLKTPSERQLTPLPPSAPPSADDNIKTPAERLRGPLPPSADDNLKTPSERQLTPLPPSAPPSADDNIKTPAERLRGPLPPSADDNLKTPSERQLTALPPSADDNIKTPAERLRGPLPPSADDNLKTPSERQLTPLPPSAPPSADDNIKTPAFHPQRMISRHLPSVSSLPFHPQLHPQQMIISRYLLSVCGFRFHHQPMIISRHLPSVSSLPFHPQLHPQQMIISRHLPSVCGGRFHPERMIISRHLPSVSSLPFHPQLHPQQMIISRHLPSVCGGRFHPQQMIISRHLPSVSSLPFHPQLHPQQMIISRHLPSVCGGRFHPQRMIISRHLPSVSSLPFHPQLHPQQMIISRHLPSVCGGRFHPQQMIISRHLPSVSSLPFHPQLHPQQMIISRHLPSVCGGRFHPQRMIISRHLPSVSSLPFHPQLHPQQMIISRHLPSVCGERLRGPLPPSADDNLKTPSERQLTPLPPSAPPSADDNIKTPAERLRGPLPPSADDNLKTPSERQLTPLPPSAPPSADDNIKTPAERLRGPLPPSADDNLKTPSERQLTPLPPSAPPSADDNIKTPAERLRGPLPPSADDNLKTPPLATQEAEAEKPRKPKRQRAAEMEPPPEPKRRRVGDVEPSRKPKRRRAADVEPSSPEPKRRRVGDVEPSRKPKRRRAADVEPSSPEPKRRRVGDVEPSRKPKRRRAADVEPSLPEPKRRRLS

SEQ ID NO: 34814 - protein, 1216 aa, Homo sapiens
MGHLPTGIHGARRLLPLLWLFVLFKNATAFHVTVQDDNNIVVSLEASDVISPASVYVVKITGESKNYFFEFEEFNSTLPPPVIFKASYHGLYYIITLVVVNGNVVTKPSRSITVLTKPLPVTSVSIYDYKPSPETGVLFEIHYPEKYNVFTRVNISYWEGKDFRTMLYKDFFKGKTVFNHWLPGMCYSNITFQLVSEATFNKSTLVEYSGVSHEPKQHRTAPYPPQNISVRIVNLNKNNWEEQSGNFPEESFMRSQDTIGKEKLFHFTEETPEIPSGNISSGWPDFNSSDYETTSQPYWWDSASAAPESEDEFVSVLPMEYENNSTLSETEKSTSGSFSFFPVQMILTWLPPKPPTAFDGFHIHIEREENFTEYLMVDEEAHEFVAELKEPGKYKLSVTTFSSSGSCETRKSQSAKSLSFYISPSGEWIEELTEKPQHVSVHVLSSTTALMSWTSSQENYNSTIVSVVSLTCQKQKESQRLEKQYCTQVNSSKPIIENLVPGAQYQVVIYLRKGPLIGPPSDPVTFAIVPTGIKDLMLYPLGPTAVVLSWTRPYLGVFRKYVVEMFYFNPATMTSEWTTYYEIAATVSLTASVRIANLLPAWYYNFRVTMVTWGDPELSCCDSSTISFITAPVAPEITSVEYFNSLLYISWTYGDDTTDLSHSRMLHWMVVAEGKKKIKKSVTRNVMTAILSLPPGDIYNLSVTACTERGSNTSMLRLVKLEPAPPKSLFAVNKTQTSVTLLWVEEGVADFFEVFCQQVGSSQKTKLQEPVAVSSHVVTISSLLPATAYNCSVTSFSHDSPSVPTFIAVSTMVTEMNPNVVVISVLAILSTLLIGLLLVTLIILRKKHLQMARECGAGTFVNFASLERDGKLPYNWRRSIFAFLTLLPSCLWTDYLLAFYINPWSKNGLKKRKLTNPVQLDDFDAYIKDMAKDSDYKFSLQFEELKLIGLDIPHFAADLPLNRCKNRYTNILPYDFSRVRLVSMNEEEGADYINANYIPGYNSPQEYIATQGPLPETRNDFWKMVLQQKSQIIVMLTQCNEKRRVKCDHYWPFTEEPIAYGDITVEMISEEEQDDWACRHFRINYADEMQDVMHFNYTAWPDHGVPTANAAESILQFVHMVRQQATKSKGPMIIHCSAGVGRTGTFIALDRLLQHIRDHEFVDILGLVSEMRSYRMSMVQTEEQYIFIHQCVQLMWMKKKQQFCISDVIYENVSKS

SEQ ID NO: 34815 - protein, 1188 aa, Homo sapiens
MGHLPTGIHGARRLLPLLWLFVLFKNATAFHVTVQDDNNIVVSLEASDVISPASVYVVKITGESKNYFFEFEEFNSTLPPPVIFKASYHGLYYIITLVVVNGNVVTKPSRSITVLTKPLPVTSVSIYDYKPSPETGVLFEIHYPEKYNVFTRVNISYWEGKDFRTMLYKDFFKGKTVFNHWLPGMCYSNITFQLVSEATFNKSTLVEYSGVSHEPKQHRTAPYPPQNISVRIVNLNKNNWEEQSGNFPEESFMRSQDTIGKEKLFHFTEETPEIPSGNISSGWPDFNSSDYETTSQPYWWDSASAAPESEDEFVSVLPMEYENNSTLSETEKSTSGSFSFFPVQMILTWLPPKPPTAFDGFHIHIEREENFTEYLMVDEEAHEFVAELKEPGKYKLSVTTFSSSGSCETRKSQSAKSLSFYISPSGEWIEELTEKPQHVSVHVLSSTTALMSWTSSQENYNSTIVSVVSLTCQKQKESQRLEKQYCTQVNSSKPIIENLVPGAQYQVVIYLRKGPLIGPPSDPVTFAIVPTGIKDLMLYPLGPTAVVLSWTRPYLGVFRKYVVEMFYFNPATMTSEWTTYYEIAATVSLTASVRIANLLPAWYYNFRVTMVTWGDPELSCCDSSTISFITAPVAPEITSVEYFNSLLYISWTYGDDTTDLSHSRMLHWMVVAEGKKKIKKSVTRNVMTAILSLPPGDIYNLSVTACTERGSNTSMLRLVKLEPAPPKSLFAVNKTQTSVTLLWVEEGVADFFEVFCQQVGSSQKTKLQEPVAVSSHVVTISSLLPATAYNCSVTSFSHDSPSVPTFIAVSTMVTEMNPNVVVISVLAILSTLLIGLLLVTLIILRKKHLQMARECGAGTFVNFASLERDGKLPYNWSKNGLKKRKLTNPVQLDDFDAYIKDMAKDSDYKFSLQFEELKLIGLDIPHFAADLPLNRCKNRYTNILPYDFSRVRLVSMNEEEGADYINANYIPGYNSPQEYIATQGPLPETRNDFWKMVLQQKSQIIVMLTQCNEKRRVKCDHYWPFTEEPIAYGDITVEMISEEEQDDWACRHFRINYADEMQDVMHFNYTAWPDHGVPTANAAESILQFVHMVRQQATKSKGPMIIHCSAGVGRTGTFIALDRLLQHIRDHEFVDILGLVSEMRSYRMSMVQTEEQYIFIHQCVQLMWMKKKQQFCISDVIYENVSKS

SEQ ID NO: 34816 - protein, 405 aa, Homo sapiens
MVTEMNPNVVVISVLAILSTLLIGLLLVTLIILRKKHLQMARECGAGTFVNFASLERDGKLPYNWRRSIFAFLTLLPSCLWTDYLLAFYINPWSKNGLKKRKLTNPVQLDDFDAYIKDMAKDSDYKFSLQFEELKLIGLDIPHFAADLPLNRCKNRYTNILPYDFSRVRLVSMNEEEGADYINANYIPGYNSPQEYIATQGPLPETRNDFWKMVLQQKSQIIVMLTQCNEKRRVKCDHYWPFTEEPIAYGDITVEMISEEEQDDWACRHFRINYADEMQDVMHFNYTAWPDHGVPTANAAESILQFVHMVRQQATKSKGPMIIHCSAGVGRTGTFIALDRLLQHIRDHEFVDILGLVSEMRSYRMSMVQTEEQYIFIHQCVQLMWMKKKQQFCISDVIYENVSKS

SEQ ID NO: 34817 - protein, 377 aa, Homo sapiens
MVTEMNPNVVVISVLAILSTLLIGLLLVTLIILRKKHLQMARECGAGTFVNFASLERDGKLPYNWSKNGLKKRKLTNPVQLDDFDAYIKDMAKDSDYKFSLQFEELKLIGLDIPHFAADLPLNRCKNRYTNILPYDFSRVRLVSMNEEEGADYINANYIPGYNSPQEYIATQGPLPETRNDFWKMVLQQKSQIIVMLTQCNEKRRVKCDHYWPFTEEPIAYGDITVEMISEEEQDDWACRHFRINYADEMQDVMHFNYTAWPDHGVPTANAAESILQFVHMVRQQATKSKGPMIIHCSAGVGRTGTFIALDRLLQHIRDHEFVDILGLVSEMRSYRMSMVQTEEQYIFIHQCVQLMWMKKKQQFCISDVIYENVSKS

SEQ ID NO: 34818 - protein, 597 aa, Homo sapiens
MGHLPTGIHGARRLLPLLWLFVLFKNATAFHVTVQDDNNIVVSLEASDVISPASVYVVKITGESKNYFFEFEEFNSTLPPPVIFKASYHGLYYIITLVVVNGNVVTKPSRSITVLTKPLPVTSVSIYDYKPSPETGVLFEIHYPEKYNVFTRVNISYWEGKDFRTMLYKDFFKGKTVFNHWLPGMCYSNITFQLVSEATFNKSTLVEYSGVSHEPKQHRTAPYPPQNISVRIVNLNKNNWEEQSGNFPEESFMRSQDTIGKEKLFHFTEETPEIPSGNISSGWPDFNSSDYETTSQPYWWDSASAAPESEDEFVSVLPMEYENNSTLSETEKSTSGSFSFFPVQMILTWLPPKPPTAFDGFHIHIEREENFTEYLMVDEEAHEFVAELKEPGKYKLSVTTFSSSGSCETRKSQSAKSLSFYISPSGEWIEELTEKPQHVSVHVLSSTTALMSWTSSQENYNSTIVSVVSLTCQKQKESQRLEKQYCTQVNSSKPIIENLVPGAQYQVVIYLRKGPLIGPPSDPVTFAIVPTGIKDLMLYPLGPTAVVLSWTRPYLGVFRKYVVEMFYFNPATMTSEWTTYYEIAATVSLTASVVIFP

SEQ ID NO: 34819 - protein, 359 aa, Homo sapiens
MALGNHSTITEFLLLGLSADPNIRALLFVLFLGIYLLTIMENLMLLLMIRADSCLHKPMYFFLSHLSFVDLCFSSVIVPKMLENLLSQRKTISVEGCLAQVFFVFVTAGTEACLLSGMAYDRHAAICRPLLYGQIMGKQLYMHLVWGSWGLGFLDALINVLLAVNMVFCEAKIIHHYSYEMPSLLPLSCSDISRSLIALLCSTLLHGLGNFLLVFLSYTRIISTILSISSTSGRSKAFSTCSAHLTAVTLYYGSGLLRHLMPNSGSPIELIFSVQYTVVTPMLNSLIYSLKNKEVKGERSLRDSSHLPQLHKGQARWKRPAFTEGRREPGHPELSIPVTPQPQGACACSALRAAPTALP

SEQ ID NO: 34820 - protein, 670 aa, Homo sapiens
MEGERRAYSKEVHQRINKQLEEIRRLEEVRGDLQVQISAAQNQVKRLRDSQRLENMDRLLKGRAQVQAEIEELQEQTRALDKQIQEWETRIFTHSKNVRSPGFILDQKVKIRRRIRILENQLDRVTCHFDNQLVRNAALREELDLLRIDRNRYLNVDRKLKKEIHHLHHLVSTLILSSTSAYAVREEAKAKMGLLRERAEKEEAQSEMEAQVLQRQILHLEQLHHFLKLKNNDRQPDPDVLEKREKQAGEVAEGVWKTSQERLVLCYEDALNKLSQLMGESDPDLLVQKYLEIEERNFAEFNFINEQNLELEHVQEEIKEMQEALVSARASKDDQHLLQEQQQKVLQQRMDKVHSEAERLEARFQDVRGQLEKLKADIQLLFTKAHCDSSMIDDLLGVKTSMGDRDMGLFLSLIEKRLVELLTVQAFLHAQSFTSLADAALLVLGQSLEDLPKKMAPLQPPDTLEDPPGFEASDDYPMSREELLSQVEKLVELQEQAEAQRQKDLAAAAAKLDGTLSVDLASTQRAGSSTVLVPTRHPHAIPGSILSHKTSRDRGSLGHVTFGGLSSSTGHLPSHITHGDPNTGHVTFGSTSASSGGHVTFRPVSASSYLGSTGYVGSSRGGENTEGGVESGGTASDSSGGLGSSRDHVSSTGPASSTGPGSSTSKDSRG

SEQ ID NO: 34821 - protein, 463 aa, Homo sapiens
MEAQVLQRQILHLEQLHHFLKLKNNDRQPDPDVLEKREKQAGEVAEGVWKTSQERLVLCYEDALNKLSQLMGESDPDLLVQKYLEIEERNFAEFNFINEQNLELEHVQEEIKEMQEALVSARASKDDQHLLQEQQQKVLQQRMDKVHSEAERLEARFQDVRGQLEKLKADIQLLFTKAHCDSSMIDDLLGVKTSMGDRDMGLFLSLIEKRLVELLTVQAFLHAQSFTSLADAALLVLGQSLEDLPKKMAPLQPPDTLEDPPGFEASDDYPMSREELLSQVEKLVELQEQAEAQRQKDLAAAAAKLDGTLSVDLASTQRAGSSTVLVPTRHPHAIPGSILSHKTSRDRGSLGHVTFGGLSSSTGHLPSHITHGDPNTGHVTFGSTSASSGGHVTFRPVSASSYLGSTGYVGSSRGGENTEGGVESGGTASDSSGGLGSSRDHVSSTGPASSTGPGSSTSKDSRG

SEQ ID NO: 34822 - protein, 539 aa, Homo sapiens
MEGERRAYSKEVHQRINKQLEEIRRLEEVRGDLQVQISAAQNQVKRLRDSQRLENMDRLLKGRAQVQAEIEELQEQTRALDKQIQEWETRIFTHSKNVRSPGFILDQKVKIRRRIRILENQLDRVTCHFDNQLVRNAALREELDLLRIDRNRYLNVDRKLKKEIHHLHHLVSTLILSSTSAYAVREEAKAKMGLLRERAEKEEAQSEMEAQVLQRQILHLEQLHHFLKLKNNDRQPDPDVLEKREKQAGEVAEGVWKTSQERLVLCYEDALNKLSQLMGESDPDLLVQKYLEIEERNFAEFNFINEQNLELEHVQEEIKEMQEALVSARASKDDQHLLQEQQQKVLQQRMDKVHSEAERLEARFQDVRGQLEKLKADIQLLFTKAHCDSSMIDDLLGVKTSMGDRDMGLFLSLIEKRLVELLTVQAFLHAQSFTSLADAALLVLGQSLEDLPKKMAPLQPPDTLEDPPGFEASDDYPMSREELLSQVEKLVRVGPAGVGPGLSVCRGPVHLPCRWSSRSRRRRSARRTWPPPPRSWTAP

SEQ ID NO: 34823 - protein, 212 aa, Homo sapiens
MASLFSGRILIRNNSDQDELDTEAEVSRRLENRLVLLFFGAGACPQCQAFVPILKDFFVRLTDEFYVLRAAQLALVYVSQDSTEEQQDLFLKDMPKKWLFLPFEDDLRRDLGRQFSVERLPAVVVLKPDGDVLTRDGADEIQRLGTACFANWQEAAEVLDRNFQLPEDLEDQEPRSLTECLRRHKYRVEKAARGGRDPGGGGGEEGGAGGLF

SEQ ID NO: 34824 - protein, 360 aa, Homo sapiens
MERNHNPDNCNVLNFFFADKKNKRRNFGQIVSDVGRICYSVSLSLGEPTTMGRNNLTRPSEFILLGLSSRPEDQKPLFAVFLPIYLITVIGNLLIILAIRSDTRLQTPMYFFLSILSFVDICYVTVIIPKMLVNFLSETKTISYSECLTQMYFFLAFGNTDSYLLAAMAIDRYVAICNPFHYITIMSHRCCVLLLVLSFCIPHFHSLLHILLTNQLIFCASNVIHHFFCDDQPVLKLSCSSHFVKEITVMTEGLAVIMTPFSCIIISYLRILITVLKIPSAAGKRKAFSTCGSHLTVVTLFYGSISYLYFQPLSNYTVKDQIATIIYTVLTPMLNPFIYSLRNKDMKQGLAKLMHRMKCQ

SEQ ID NO: 34825 - protein, 335 aa, Homo sapiens
MPAVLGFEGSANKIGVGVVRDGKVLANPRRTYVTPPGTGFLPGDTARHHRAVILDLLQEALTESGLTSQDIDCIAYTKGPGMGAPLVSVAVVARTVAQLWNKPLVGVNHCIGHIEMGRLITGATSPTVLYVSGGNTQVIAYSEHRYRIFGETIDIAVGNCLDRFARVLKISNDPSPGYNIEQMAKRGKKLVELPYTVKGMDVSFSGILSFIEDVAHRMLATGECTPEDLCFSLQETVFAMLVEITERAMAHCGSQEALIVGGVGCNVRLQEMMATMCQERGARLFATDERFCIDNGAMIAQAGWEMFRAGHRTPLSDSGVTQRYRTDEVEVTWRD

SEQ ID NO: 34826 - protein, 319 aa, Homo sapiens
MEPGNDTQISEFLLLGFSQEPGLQPFLFGLFLSMYLVTVLGNLLIILATISDSHLHTPMYFFLSNLSFADICVTSTTIPKMLMNIQTQNKVITYIACLMQMYFFILFAGFENFLLSVMAYDRFVAICHPLHYMVIMNPHLCGLLVLASWTMSALYSLLQILMVVRLSFCTALEIPHFFCELNQVIQLACSDSFLNHMVIYFTVALLGGGPLTGILYSYSKIISSIHAISSAQGKYKAFSTCASHLSVVSLFYGAILGVYLSSAATRNSHSSATASVMYTVVTPMLNPFIYSLRNKDIKRALGIHLLWGTMKGQFFKKCP

SEQ ID NO: 34827 - protein, 312 aa, Homo sapiens
MERDKPVSVSEFLLLGLSRQPQQQHLLFVFFLSMYLATVLGNLLIILAISIDSRLHTPMYFFLSNMSFVDNCFSTTVPKMLANHILRTQTISFSGCLMQMYFISELADMDNFLLAVMAYDRFVAVCRPLHYTAKMIHQLCALLVTGSWVVANSNALLHTLLMARLSFCADNTIPHIFCDVTPLLKLSCSDTHLSEVMILTEAALVTITPFLCLLASYMHITCVVLRVPSTKGRWKAFSTCGSHLAVVLLFYGTIMSPYFRTSSSHSAQRDIAAAVRFTVVTPVMNPLIYSLRNKDIKGALVKVVAVKFFSVQ

SEQ ID NO: 34828 - protein, 313 aa, Homo sapiens
MNWENESSPKEFILLGFSDRAWLQMPLFVVLLISYTITIFGNVSIMMVCILDPKLHTPMYFFLTNLSILDLCYTTTTVPHMLVNIGCNKKTISYAGCVAHLIIFLALGATECLLLAVMSFDRYVAVCRPLHYVVIMNYWFCLRMAAFSWLIGFGNSVLQSSLTLNMPRCGHQEVDHFFCEVPALLKLSCADTKPIEAELFFFSVLILLIPVTLILISYGFIAQAVLKIRSAEGRQKAFGTCGSHMIVVSLFYGTAIYMYLQPPSSTSKDWGKMVSLFYGIITSMLNSLIYSLRNKDMKEAFKRLMPRIFFCKK

SEQ ID NO: 34829 - protein, 324 aa, Homo sapiens
MGMSNLTRLSEFILLGLSSRSEDQRPLFALFLIIYLVTLMGNLLIILAIHSDPRLQNPMYFFLSILSFADICYTTVIVPKMLVNFLSEKKTISYAECLAQMYFFLVFGNIDSYLLAAMAINRCVAICNPFHYVTVMNRRCCVLLLAFPITFSYFHSLLHVLLVNRLTFCTSNVIHHFFCDVNPVLKLSCSSTFVNEIVAMTEGLASVMAPFVCIIISYLRILIAVLKIPSAAGKHKAFSTCSSHLTVVILFYGSISYVYLQPLSSYTVKDRIATINYTVLTSVLNPFIYSLRNKDMKRGLQKLINKIKSQMSRFSTKTNKICGP

SEQ ID NO: 34830 - protein, 348 aa, Homo sapiens [sequence omitted]

SEQ ID NO: 34831 - protein, 856 aa, Homo sapiens
MKPRPAGFVDNKLKQRVIQYLTSNKCGKYVDIGVLASDLQRVYSIDYGRRKRNAFRIQVEKVFSIISSEKELKNLTELEDEHLAKRARQGEEDNEYTESYSDDDSSMEDYPDPQSANHMNSSLLSLYRKGNPDSVSNTPEMEQRETTSSTPRISSKTGSIPLKTPAKDSEGGWFIDKTPSVKKDSFFLDLSCEKSNPKKPITEIQDSKDSSLLESDMKRKGKLKNKGSKRKKEDLQEVDGEIEAVLQKKAKARGLEFQISNVKFEDVGGNDMTLKEVCKMLIHMRHPEVYHHLGVVPPRGVLLHGPPGCGKTLLAHAIAGELDLPILKVAAPEIVSGVSGESEQKLRELFEQAVSNAPCIIFIDEIDAITPKREVASKDMERRIVAQLLTCMDDLNNVAATARVLVIGATNRPDSLDPALRRAGRFDREICLGIPDEASRERILQTLCRKLRLPQAFDFCHLAHLTPGFVGADLMALCREAAMCAVNRVLMKLQEQQKKNPEMEDLPSKGVQEERLGTEPTSETQDELQRLLGLLRDQDPLSEEQMQGLCIELNDFIVALSSVQPSAKREGFVTVPNVTWADIGALEDIREELTMAILAPVRNPDQFKALGLVTPAGVLLAGPPGCGKTLLAKAVANESGLNFISVKGPELLNMYVGESERAVRQVFQRAKNSAPCVIFFDEVDALCPRRSDRETGASVRVVNQLLTEMDGLEARQQVFIMAATNRPDIIDPAILRPGRLDKTLFVGLPPPADRLAILKTITKNGTKPPLDADVNLEAIAGDLRCDCYTGADLSALVREASICALRQEMARQKSGNEKGELKVSHKHFEEAFKKVRSSISKKDQIMYERLQESLSR

SEQ ID NO: 34832 - protein, 750 aa, Homo sapiens
MEDYPDPQSANHMNSSLLSLYRKGNPDSVSNTPEMEQRETTSSTPRISSKTGSIPLKTPAKDSEGGWFIDKTPSVKKDSFFLDLSCEKSNPKKPITEIQDSKDSSLLESDMKRKGKLKNKGSKRKKEDLQEVDGEIEAVLQKKAKARGLEFQISNVKFEDVGGNDMTLKEVCKMLIHMRHPEVYHHLGVVPPRGVLLHGPPGCGKTLLAHAIAGELDLPILKVAAPEIVSGVSGESEQKLRELFEQAVSNAPCIIFIDEIDAITPKREVASKDMERRIVAQLLTCMDDLNNVAATARVLVIGATNRPDSLDPALRRAGRFDREICLGIPDEASRERILQTLCRKLRLPQAFDFCHLAHLTPGFVGADLMALCREAAMCAVNRVLMKLQEQQKKNPEMEDLPSKGVQEERLGTEPTSETQDELQRLLGLLRDQDPLSEEQMQGLCIELNDFIVALSSVQPSAKREGFVTVPNVTWADIGALEDIREELTMAILAPVRNPDQFKALGLVTPAGVLLAGPPGCGKTLLAKAVANESGLNFISVKGPELLNMYVGESERAVRQVFQRAKNSAPCVIFFDEVDALCPRRSDRETGASVRVVNQLLTEMDGLEARQQVFIMAATNRPDIIDPAILRPGRLDKTLFVGLPPPADRLAILKTITKNGTKPPLDADVNLEAIAGDLRCDCYTGADLSALVREASICALRQEMARQKSGNEKGELKVSHKHFEEAFKKVRSSISKKDQIMYERLQESLSR

SEQ ID NO: 34833 - protein, 659 aa, Homo sapiens
MEDYPDPQDSKDSSLLESDMKRKGKLKNKGSKRKKEDLQEVDGEIEAVLQKKAKARGLEFQISNVKFEDVGGNDMTLKEVCKMLIHMRHPEVYHHLGVVPPRGVLLHGPPGCGKTLLAHAIAGELDLPILKVAAPEIVSGVSGESEQKLRELFEQAVSNAPCIIFIDEIDAITPKREVASKDMERRIVAQLLTCMDDLNNVAATARVLVIGATNRPDSLDPALRRAGRFDREICLGIPDEASRERILQTLCRKLRLPQAFDFCHLAHLTPGFVGADLMALCREAAMCAVNRVLMKLQEQQKKNPEMEDLPSKGVQEERLGTEPTSETQDELQRLLGLLRDQDPLSEEQMQGLCIELNDFIVALSSVQPSAKREGFVTVPNVTWADIGALEDIREELTMAILAPVRNPDQFKALGLVTPAGVLLAGPPGCGKTLLAKAVANESGLNFISVKGPELLNMYVGESERAVRQVFQRAKNSAPCVIFFDEVDALCPRRSDRETGASVRVVNQLLTEMDGLEARQQVFIMAATNRPDIIDPAILRPGRLDKTLFVGLPPPADRLAILKTITKNGTKPPLDADVNLEAIAGDLRCDCYTGADLSALVREASICALRQEMARQKSGNEKGELKVSHKHFEEAFKKVRSSISKKDQIMYERLQESLSR

SEQ ID NO: 34834 - protein, 667 aa, Homo sapiens
MKRKGKLKNKGSKRKKEDLQEVDGEIEAVLQKKAKARGLEFQISNVKFEDVGGNDMTLKEVCKMLIHMRHPEVYHHLGVVPPRGVLLHGPPGCGKTLLAHAIAGAECSGMITAHCSFDFSGSNDPPASASQELDLPILKVAAPEIVSGVSGESEQKLRELFEQAVSNAPCIIFIDEIDAITPKREVASKDMERRIVAQLLTCMDDLNNVAATARVLVIGATNRPDSLDPALRRAGRFDREICLGIPDEASRERILQTLCRKLRLPQAFDFCHLAHLTPGFVGADLMALCREAAMCAVNRVLMKLQEQQKKNPEMEDLPSKGVQEERLGTEPTSETQDELQRLLGLLRDQDPLSEEQMQGLCIELNDFIVALSSVQPSAKREGFVTVPNVTWADIGALEDIREELTMAILAPVRNPDQFKALGLVTPAGVLLAGPPGCGKTLLAKAVANESGLNFISVKGPELLNMYVGESERAVRQVFQRAKNSAPCVIFFDEVDALCPRRSDRETGASVRVVNQLLTEMDGLEARQQVFIMAATNRPDIIDPAILRPGRLDKTLFVGLPPPADRLAILKTITKNGTKPPLDADVNLEAIAGDLRCDCYTGADLSALVREASICALRQEMARQKSGNEKGELKVSHKHFEEAFKKVRSSISKKDQIMYERLQESLSR

SEQ ID NO: 34835 - protein, 765 aa, Homo sapiens
MKPRPAGFVDNKLKQRVIQYLTSNKCGKYVDIGVLASDLQRVYSIDYGRRKRNAFRIQVEKVFSIISSEKELKNLTELEDEHLAKRARQGEEDNEYTESYSDDDSSMEDYPDPQDSKDSSLLESDMKRKGKLKNKGSKRKKEDLQEVDGEIEAVLQKKAKARGLEFQISNVKFEDVGGNDMTLKEVCKMLIHMRHPEVYHHLGVVPPRGVLLHGPPGCGKTLLAHAIAGELDLPILKVAAPEIVSGVSGESEQKLRELFEQAVSNAPCIIFIDEIDAITPKREVASKDMERRIVAQLLTCMDDLNNVAATARVLVIGATNRPDSLDPALRRAGRFDREICLGIPDEASRERILQTLCRKLRLPQAFDFCHLAHLTPGFVGADLMALCREAAMCAVNRVLMKLQEQQKKNPEMEDLPSKGVQEERLGTEPTSETQDELQRLLGLLRDQDPLSEEQMQGLCIELNDFIVALSSVQPSAKREGFVTVPNVTWADIGALEDIREELTMAILAPVRNPDQFKALGLVTPAGVLLAGPPGCGKTLLAKAVANESGLNFISVKGPELLNMYVGESERAVRQVFQRAKNSAPCVIFFDEVDALCPRRSDRETGASVRVVNQLLTEMDGLEARQQVFIMAATNRPDIIDPAILRPGRLDKTLFVGLPPPADRLAILKTITKNGTKPPLDADVNLEAIAGDLRCDCYTGADLSALVREASICALRQEMARQKSGNEKGELKVSHKHFEEAFKKVRSSISKKDQIMYERLQESLSR

SEQ ID NO: 34836 - protein, 436 aa, Homo sapiens
MSSRKSKSNSLIHTECLSQVQRILRERFCRQSPHSNLFGVQVQYKHLSELLKRTALHGESNSVLIIGPRGSGKTMLINHALKELMEIEEVSENVLQVHLNGLLQINDKIALKEITRQLNLENVVGDKVFGSFAENLSFLLEALKKGDRTSSCPVIFILDEFDLFAHHKNQTLLYNLFDISQSAQTPIAVIGLTCRLDILELLEKRVKSRFSHRQIHLMNSFGFPQYVKIFKEQLSLPAEFPDKVFAEKWNENVQYLSEDRSVQEVLQKHFNISKNLRSLHMLLMLALNRVTASHPFMTAVDLMEASQLCSMDSKANIVHGLSVLEICLIIAMKHLNDIYEEEPFNFQMVYNEFQKFVQRKAHSVYNFEKPVVMKAFEHLQQLELIKPMERTSGNSQREYQLMKLLLDNTQIMNALQKYPNCPTDVRQWATSSLSWL

SEQ ID NO: 34837 - protein, 352 aa, Homo sapiens
MEIEEVSENVLQVHLNGLLQINDKIALKEITRQLNLENVVGDKVFGSFAENLSFLLEALKKGDRTSSCPVIFILDEFDLFAHHKNQTLLYNLFDISQSAQTPIAVIGLTCRLDILELLEKRVKSRFSHRQIHLMNSFGFPQYVKIFKEQLSLPAEFPDKVFAEKWNENVQYLSEDRSVQEVLQKHFNISKNLRSLHMLLMLALNRVTASHPFMTAVDLMEASQLCSMDSKANIVHGLSVLEICLIIAMKHLNDIYEEEPFNFQMVYNEFQKFVQRKAHSVYNFEKPVVMKAFEHLQQLELIKPMERTSGNSQREYQLMKLLLDNTQIMNALQKYPNCPTDVRQWATSSLSWL

SEQ ID NO: 34838 - protein, 362 aa, Homo sapiens
MLINHALKELMEIEEVSENVLQVHLNGLLQINDKIALKEITRQLNLENVVGDKVFGSFAENLSFLLEALKKGDRTSSCPVIFILDEFDLFAHHKNQTLLYNLFDISQSAQTPIAVIGLTCRLDILELLEKRVKSRFSHRQIHLMNSFGFPQYVKIFKEQLSLPAEFPDKVFAEKWNENVQYLSEDRSVQEVLQKHFNISKNLRSLHMLLMLALNRVTASHPFMTAVDLMEASQLCSMDSKANIVHGLSVLEICLIIAMKHLNDIYEEEPFNFQMVYNEFQKFVQRKAHSVYNFEKPVVMKAFEHLQQLELIKPMERTSGNSQREYQLMKLLLDNTQIMNALQKYPNCPTDVRQWATSSLSWL

SEQ ID NO: 34839 - protein, 307 aa, Homo sapiens
MGQHNLTVLTEFILMELTRRPELQIPLFGVFLVIYLITVVGNLTMIILTKLDSHLHTPMYFSIRHLAFVDLGNSTVICPKVLANFVVDRNTISYYACAAQLAFFLMFIISEFFILSAMAYDRYVAICNPLLYYVIMSQRLCHVLVGIQYLYSTFQALMFTIKIFTLTFCGSNVISHFYCDDVPLLPMLCSNAQEIELLSILFSVFNLISSFLIVLVSYMLILLAICQMHSAEGRKKAFSTCGSHLTVVVVFYGSLLFMYMQPNSTHFFDTDKMASVFYTLVIPMLNPLIYSLRNEEVKNAFYKLFEN

SEQ ID NO: 34840 - protein, 316 aa, Homo sapiens
MEAANESSEGISFVLLGLTTSPGQQRPLFVLFLLLYVASLLGNGLIVAAIQASPALHAPMYFLLAHLSFADLCFASVTVPKMLANLLAHDHSISLAGCLTQMYFFFALGVTDSCLLAAMAYDCYVAIRHPLPYATRMSRAMCAALVGMAWLVSHVHSLLYILLMARLSFCASHQVPHFFCDHQPLLRLSCSDTHHIQLLIFTEGAAVVVTPFLLILASYGAIAAAVLQLPSASGRLRAVSTCGSHLAVVSLFYGTVIAVYFQATSRREAEWGRVATVMYTVVTPMLNPIIYSLWNRDVQGALRALLIGRRISASDS

SEQ ID NO: 34841 - protein, 312 aa, Homo sapiens
MDEANHSVVSEFVFLGLSDSRKIQLLLFLFFSVFYVSSLMGNLLIVLTVTSDPRLQSPMYFLLANLSIINLVFCSSTAPKMIYDLFRKHKTISFGGCVVQIFFIHAVGGTEMVLLIAMAFDRYVAICKPLHYLTIMNPQRCILFLVISWIIGIIHSVIQLAFVVDLLFCGPNELDSFFCDLPRFIKLACIETYTLGFMVTANSGFISLASFLILIISYIFILVTVQKKSSGGIFKAFSMLSAHVIVVVLVFGPLIFFYIFPFPTSHLDKFLAIFDAVITPVLNPVIYTFRNKEMMVAMRRRCSQFVNYSKIF

SEQ ID NO: 34842 - protein, 303 aa, Homo sapiens
MTEFIFLVLSPNQEVQRVCFVIFLFLYTAIVLGNFLIVLTVMTSRSLGSPMYFFLSYLSFMEICYSSATAPKLISDLLAERKVISWWGCMAQLFFLHFFGGTEIFLLTVMAYDHYVAICKPLSYTTIMNWQVCTVLVGIAWVGGFMHSFAQILLIFHLLFCGPNVINHYFCDLVPLLKLACSDTFLIGLLIVANGGTLSVISFGVLLASYMVILLHLRTWSSEGWCKALSTCGSHFAVVILFFGPCVFNSLRPSTTLPIDKMVAVFYTVITAILNPVIYSLRNAEMRKAMKRLWIRTLRLNEK

SEQ ID NO: 34843 - protein, 318 aa, Homo sapiens
MDKINQTFVREFILLGLSGYPKLEIIFFALILVMYVVILIGNGVLIIASILDSRLHMPMYFFLGNLSFLDICYTTSSIPSTLVSLISKKRNISFSGCAVQMFFGFAMGSTECFLLGMMAFDRYVAICNPLRYPIIMNKVVYVLLTSVSWLSGGINSTVQTSLAMRWPFCGNNIINHFLCEILAVLKLACSDISVNIVTLAVSNIAFLVLPLLVIFFSYMFILYTILRTNSATGRHKAFSTCSAHLTVVIIFYGTIFFMYAKPKSQDLLGKDNLQATEGLVSMFYGVVTPMLNPIIYSLRNKDVKAAIKYLLSRKAINQ

SEQ ID NO: 34844 - protein, 315 aa, Homo sapiens
MLSPNHTIVTEFILLGLTDDPVLEKILFGVFLAIYLITLAGNLCMILLIRTNSQLQTPMYFFLGHLSFVDICYSSNVTPNMLHNFLSEQKTISYAGCFTQCLLFIALVITEFYFLASMALDRYVAICSPLHYSSRMSKNICISLVTVPYMYGFLNGLSQTLLTFHLSFCGSLEINHFYCADPPLIMLACSDTRVKKMAMFVVAGFTLSSSLFIILLSYLFIFAAIFRIRSAEGRHKAFSTCASHLTIVTLFYGTLFCMYVRPPSEKSVEESKIIAVFYTFLSPMLNPLIYSLRNRDVILAIQQMIRGKSFCKIAV

SEQ ID NO: 34845 - protein, 1025 aa, Homo sapiens
MVAMAEAEAGVAVEVRGLPPAVPDELLTLYFENRRRSGGGPVLSWQRLGCGGVLTFREPADAERVLAQADHELHGAQLSLRPAPPRAPARLLLQGLPPGTTPQRLEQHVQALLRASGLPVQPCCALASPRPDRALVQLPKPLSEADVRVLEEQAQNLGLEGTLVSLARVPQARAVRVVGDGASVDLLLLELYLENERRSGGGPLEDLQRLPGPLGTVASFQQWQVAERVLQQEHRLQGSELSLVPHYDILEPEELAENTSGGDHPSTQGPRATKHALLRTGGLVTALQGAGTVTMGSGEEPGQSGASLRTGPMVQGRGIMTTGSGQEPGQSGTSLRTGPMGSLGQAEQVSSMPMGSLEHEGLVSLRPVGLQEQEGPMSLGPVGSAGPVETSKGLLGQEGLVEIAMDSPEQEGLVGPMEITMGSLEKAGPVSPGCVKLAGQEGLVEMVLLMEPGAMRFLQLYHEDLLAGLGDVALLPLEGPDMTGFRLCGAQASCQAAEEFLRSLLGSISCHVLCLEHPGSARFLLGPEGQHLLQGLEAQFQCVFGTERLATATLDTGLEEVDPTEALPVLPGNAHTLWTPDSTGGDQEDVSLEEVRELLATLEGLDLDGEDWLPRELEEEGPQEQPEEEVTPGHEEEEPVAPSTVAPRWLEEEAALQLALHRSLEPQGQVAEQEEAAALRQALTLSLLEQPPLEAEEPPDGGTDGKAQLVVHSAFEQDVEELDRALRAALEVHVQEETVGPWRRTLPAELRARLERCHGVSVALRGDCTILRGFGAHPARAARHLVALLAGPWDQSLAFPLAASGPTLAGQTLKGPWNNLERLAENTGEFQEVVRAFYDTLDAARSSIRVVRVERVSHPLLQQQYELYRERLLQRCERRPVEQVLYHGTTAPAVPDICAHGFNRSFCGRNATVYGKGVYFARRASLSVQDRYSPPNADGHKAVFVARVLTGDYGQGRRGLRAPPLRGPGHVLLRYDSAVDCICQPSIFVIFHDTQALPTHLITCEHVPRASPDDPSGLPGRSPDT

SEQ ID NO: 34846 - protein, 149 aa, Homo sapiens
MVDDAGAAESQRGKQTPAHSLEQLRRLPLPPPQIRIRPWWFPVQELRDPLVFYLEAWLADELFGPDRAIIPEMEWTSQALLTVDIVDSGNLVEITVFGRPRVQNRVKSMLLCLAWFHREHRARAEKMKHLEKNLKAHASDPHSPQDPVA

SEQ ID NO: 34847 - protein, 315 aa, Homo sapiens
MEAMKLLNQSQVSEFILLGLTSSQDVEFLLFALFSVIYVVTVLGNLLIIVTVFNTPNLNTPMYFLLGNLSFVDMTLASFATPKVILNLLKKQKVISFAGCFTQIFLLHLLGGVEMVLLVSMAFDRYVAICKPLHYMTIMNKKVCVLLVVTSWLLGLLHSGFQIPFAVNLPFCGPNVVDSIFCDLPLVTKLACIDIYFVQVVIVANSGIISLSCFIILLISYSLILITIKNHSPTGQSKARSTLTAHITVVILFFGPCIFIYIWPFGNHSVDKFLAVFYTIITPILNPIIYTLRNKEMKISMKKLWRAFVNSREDT

SEQ ID NO: 34848 - protein, 906 aa, Homo sapiens
MQHIFAFFCTGFLGAVVGANFPNNIQIGGLFPNQQSQEHAAFRFALSQLTEPPKLLPQIDIVNISDSFEMTYRFCSQFSKGVYAIFGFYERRTVNMLTSFCGALHVCFITPSFPVDTSNQFVLQLRPELQDALISIIDHYKWQKFVYIYDADRGLSVLQKVLDTAAEKNWQVTAVNILTTTEEGYRMLFQDLEKKKERLVVVDCESERLNAILGQIIKLEKNGIGYHYILANLGFMDIDLNKFKESGANVTGFQLVNYTDTIPAKIMQQWKNSDARDHTRVDWKRPKYTSALTYDGVKVMAEAFQSLRRQRIDISRRGNAGDCLANPAVPWGQGIDIQRALQQVRFEGLTGNVQFNEKGRRTNYTLHVIEMKHDGIRKIGYWNEDDKFVPAATDAQAGGDNSSVQNRTYIVTTILEDPYVMLKKNANQFEGNDRYEGYCVELAAEIAKHVGYSYRLEIVSDGKYGARDPDTKAWNGMVGELVYGRADVAVAPLTITLVREEVIDFSKPFMSLGISIMIKKPQKSKPGVFSFLDPLAYEIWMCIVFAYIGVSVVLFLVSRFSPYEWHSEEFEEGRDQTTSDQSNEFGIFNSLWFSLGAFMQQGCDISPRSLSGRIVGGVWWFFTLIIISSYTANLAAFLTVERMVSPIESAEDLAKQTEIAYGTLEAGSTKEFFRRSKIAVFEKMWTYMKSAEPSVFVRTTEEGMIRVRKSKGKYAYLLESTMNEYIEQRKPCDTMKVGGNLDSKGYGIATPKGSALRNPVNLAVLKLNEQGLLDKLKNKWWYDKGECGSGGGDSKDKTSALSLSNVAGVFYILIGGLGLAMLVALIEFCYKSRSESKRMKGFCLIPQQSINEAIRTSTLPRNSGAGASSGGSGENGRVVSHDFPKSMQSIPCMSHSSGMPLGATGL

SEQ ID NO: 34849 - protein, 906 aa, Homo sapiens
MQHIFAFFCTGFLGAVVGANFPNNIQIGGLFPNQQSQEHAAFRFALSQLTEPPKLLPQIDIVNISDSFEMTYRFCSQFSKGVYAIFGFYERRTVNMLTSFCGALHVCFITPSFPVDTSNQFVLQLRPELQDALISIIDHYKWQKFVYIYDADRGLSVLQKVLDTAAEKNWQVTAVNILTTTEEGYRMLFQDLEKKKERLVVVDCESERLNAILGQIIKLEKNGIGYHYILANLGFMDIDLNKFKESGANVTGFQLVNYTDTIPAKIMQQWKNSDARDHTRVDWKRPKYTSALTYDGVKVMAEAFQSLRRQRIDISRRGNAGDCLANPAVPWGQGIDIQRALQQVRFEGLTGNVQFNEKGRRTNYTLHVIEMKHDGIRKIGYWNEDDKFVPAATDAQAGGDNSSVQNRTYIVTTILEDPYVMLKKNANQFEGNDRYEGYCVELAAEIAKHVGYSYRLEIVSDGKYGARDPDTKAWNGMVGELVYGRADVAVAPLTITLVREEVIDFSKPFMSLGISIMIKKPQKSKPGVFSFLDPLAYEIWMCIVFAYIGVSVVLFLVSRFSPYEWHSEEFEEGRDQTTSDQSNEFGIFNSLWFSLGAFMQQGCDISPRSLSGRIVGGVWWFFTLIIISSYTANLAAFLTVERMVSPIESAEDLAKQTEIAYGTLEAGSTKEFFRRSKIAVFEKMWTYMKSAEPSVFVRTTEEGMIRVRKSKGKYAYLLESTMNEYIEQRKPCDTMKVGGNLDSKGYGIATPKGSALRGPVNLAVLKLSEQGVLDKLKSKWWYDKGECGSKDSGSKDKTSALSLSNVAGVFYILIGGLGLAMLVALIEFCYKSRSESKRMKGFCLIPQQSINEAIRTSTLPRNSGAGASSGGSGENGRVVSHDFPKSMQSIPCMSHSSGMPLGATGL

SEQ ID NO: 34850 - protein, 826 aa, Homo sapiens
MQHIFAFFCTGFLGAVVGANFPNNIQIGGLFPNQQSQEHAAFRFALSQLTEPPKLLPQIDIVNISDSFEMTYRCLSVLQKVLDTAAEKNWQVTAVNILTTTEEGYRMLFQDLEKKKERLVVVDCESERLNAILGQIIKLEKNGIGYHYILANLGFMDIDLNKFKESGANVTGFQLVNYTDTIPAKIMQQWKNSDARDHTRVDWKRPKYTSALTYDGVKVMAEAFQSLRRQRIDISRRGNAGDCLANPAVPWGQGIDIQRALQQVRFEGLTGNVQFNEKGRRTNYTLHVIEMKHDGIRKIGYWNEDDKFVPAATDAQAGGDNSSVQNRTYIVTTILEDPYVMLKKNANQFEGNDRYEGYCVELAAEIAKHVGYSYRLEIVSDGKYGARDPDTKAWNGMVGELVYGRADVAVAPLTITLVREEVIDFSKPFMSLGISIMIKKPQKSKPGVFSFLDPLAYEIWMCIVFAYIGVSVVLFLVSRFSPYEWHSEEFEEGRDQTTSDQSNEFGIFNSLWFSLGAFMQQGCDISPRSLSGRIVGGVWWFFTLIIISSYTANLAAFLTVERMVSPIESAEDLAKQTEIAYGTLEAGSTKEFFRRSKIAVFEKMWTYMKSAEPSVFVRTTEEGMIRVRKSKGKYAYLLESTMNEYIEQRKPCDTMKVGGNLDSKGYGIATPKGSALRNPVNLAVLKLNEQGLLDKLKNKWWYDKGECGSGGGDSKDKTSALSLSNVAGVFYILIGGLGLAMLVALIEFCYKSRSESKRMKGFCLIPQQSINEAIRTSTLPRNSGAGASSGGSGENGRVVSHDFPKSMQSIPCMSHSSGMPLGATGL

SEQ ID NO: 34851 - protein, 837 aa, Homo sapiens
MTYRFCSQFSKGVYAIFGFYERRTVNMLTSFCGALHVCFITPSFPVDTSNQFVLQLRPELQDALISIIDHYKWQKFVYIYDADRGLSVLQKVLDTAAEKNWQVTAVNILTTTEEGYRMLFQDLEKKKERLVVVDCESERLNAILGQIIKLEKNGIGYHYILANLGFMDIDLNKFKESGANVTGFQLVNYTDTIPAKIMQQWKNSDARDHTRVDWKRPKYTSALTYDGVKVMAEAFQSLRRQRIDISRRGNAGDCLANPAVPWGQGIDIQRALQQVRFEGLTGNVQFNEKGRRTNYTLHVIEMKHDGIRKIGYWNEDDKFVPAATDAQAGGDNSSVQNRTYIVTTILEDPYVMLKKNANQFEGNDRYEGYCVELAAEIAKHVGYSYRLEIVSDGKYGARDPDTKAWNGMVGELVYGRADVAVAPLTITLVREEVIDFSKPFMSLGISIMIKKPQKSKPGVFSFLDPLAYEIWMCIVFAYIGVSVVLFLVSRFSPYEWHSEEFEEGRDQTTSDQSNEFGIFNSLWFSLGAFMQQGCDISPRSLSGRIVGGVWWFFTLIIISSYTANLAAFLTVERMVSPIESAEDLAKQTEIAYGTLEAGSTKEFFRRSKIAVFEKMWTYMKSAEPSVFVRTTEEGMIRVRKSKGKYAYLLESTMNEYIEQRKPCDTMKVGGNLDSKGYGIATPKGSALRNPVNLAVLKLNEQGLLDKLKNKWWYDKGECGSGGGDSKDKTSALSLSNVAGVFYILIGGLGLAMLVALIEFCYKSRSESKRMKGFCLIPQQSINEAIRTSTLPRNSGAGASSGGSGENGRVVSHDFPKSMQSIPCMSHSSGMPLGATGL

SEQ ID NO: 34852 - protein, 916 aa, Homo sapiens
MCCSTHLFQPLQLAGGLEWPWSNLLCFLTPVKLHPEVWGLFPNQQSQEHAAFRFALSQLTEPPKLLPQIDIVNISDSFEMTYRFCSQFSKGVYAIFGFYERRTVNMLTSFCGALHVCFITPSFPVDTSNQFVLQLRPELQDALISIIDHYKWQKFVYIYDADRGLSVLQKVLDTAAEKNWQVTAVNILTTTEEGYRMLFQDLEKKKERLVVVDCESERLNAILGQIIKLEKNGIGYHYILANLGFMDIDLNKFKESGANVTGFQLVNYTDTIPAKIMQQWKNSDARDHTRVDWKRPKYTSALTYDGVKVMAEAFQSLRRQRIDISRRGNAGDCLANPAVPWGQGIDIQRALQQVRFEGLTGNVQFNEKGRRTNYTLHVIEMKHDGIRKIGYWNEDDKFVPAATDAQAGGDNSSVQNRTYIVTTILEDPYVMLKKNANQFEGNDRYEGYCVELAAEIAKHVGYSYRLEIVSDGKYGARDPDTKAWNGMVGELVYGRADVAVAPLTITLVREEVIDFSKPFMSLGISIMIKKPQKSKPGVFSFLDPLAYEIWMCIVFAYIGVSVVLFLVSRFSPYEWHSEEFEEGRDQTTSDQSNEFGIFNSLWFSLGAFMQQGCDISPRSLSGRIVGGVWWFFTLIIISSYTANLAAFLTVERMVSPIESAEDLAKQTEIAYGTLEAGSTKEFFRRSKIAVFEKMWTYMKSAEPSVFVRTTEEGMIRVRKSKGKYAYLLESTMNEYIEQRKPCDTMKVGGNLDSKGYGIATPKGSALRNPVNLAVLKLNEQGLLDKLKNKWWYDKGECGSGGGDSKDKTSALSLSNVAGVFYILIGGLGLAMLVALIEFCYKSRSESKRMKGFCLIPQQSINEAIRTSTLPRNSGAGASSGGSGENGRVVSHDFPKSMQSIPCMSHSSGMPLGATGL

SEQ ID NO: 34853 - protein, 916 aa, Homo sapiens
MCCSTHLFQPLQLAGGLEWPWSNLLCFLTPVKLHPEVWGLFPNQQSQEHAAFRFALSQLTEPPKLLPQIDIVNISDSFEMTYRFCSQFSKGVYAIFGFYERRTVNMLTSFCGALHVCFITPSFPVDTSNQFVLQLRPELQDALISIIDHYKWQKFVYIYDADRGLSVLQKVLDTAAEKNWQVTAVNILTTTEEGYRMLFQDLEKKKERLVVVDCESERLNAILGQIIKLEKNGIGYHYILANLGFMDIDLNKFKESGANVTGFQLVNYTDTIPAKIMQQWKNSDARDHTRVDWKRPKYTSALTYDGVKVMAEAFQSLRRQRIDISRRGNAGDCLANPAVPWGQGIDIQRALQQVRFEGLTGNVQFNEKGRRTNYTLHVIEMKHDGIRKIGYWNEDDKFVPAATDAQAGGDNSSVQNRTYIVTTILEDPYVMLKKNANQFEGNDRYEGYCVELAAEIAKHVGYSYRLEIVSDGKYGARDPDTKAWNGMVGELVYGRADVAVAPLTITLVREEVIDFSKPFMSLGISIMIKKPQKSKPGVFSFLDPLAYEIWMCIVFAYIGVSVVLFLVSRFSPYEWHSEEFEEGRDQTTSDQSNEFGIFNSLWFSLGAFMQQGCDISPRSLSGRIVGGVWWFFTLIIISSYTANLAAFLTVERMVSPIESAEDLAKQTEIAYGTLEAGSTKEFFRRSKIAVFEKMWTYMKSAEPSVFVRTTEEGMIRVRKSKGKYAYLLESTMNEYIEQRKPCDTMKVGGNLDSKGYGIATPKGSALRGPVNLAVLKLSEQGVLDKLKSKWWYDKGECGSKDSGSKDKTSALSLSNVAGVFYILIGGLGLAMLVALIEFCYKSRSESKRMKGFCLIPQQSINEAIRTSTLPRNSGAGASSGGSGENGRVVSHDFPKSMQSIPCMSHSSGMPLGATGL

SEQ ID NO: 34854 - protein, 622 aa, Homo sapiens
MAAAPRAGRRRGQPLLALLLLLLAPLPPGAPPGADAYFPEERWSPESPLQAPRVLIALLARNAAHALPTTLGALERLRHPRERTALWVATDHNMDNTSTVLREWLVAVKSLYHSVEWRPAEEPRSYPDEEGPKHWSDSRYEHVMKLRQAALKSARDMWADYILFVDADNLILNPDTLSLLIAENKTVVAPMLDSRAAYSNFWCGMTSQGYYKRTPAYIPIRKRDRRGCFAVPMVHSTFLIDLRKAASRNLAFYPPHPDYTWSFDDIIVFAFSCKQAEVQMYVCNKEEYGFLPVPLRAHSTLQDEAESFMHVQLEVMVKHPPAEPSRFISAPTKTPDKMGFDEVFMINLRRRQDRRERMLRALQAQEIECRLVEAVDGKAMNTSQVEALGIQMLPGYRDPYHGRPLTKGELGCFLSHYNIWKEVVDRGLQKSLVFEDDLRFEIFFKRRLMNLMRDVEREGLDWDLIYVGRKRMQVEHPEKAVPRVRNLVEADYSYWTLAYVISLQGARKLLAAEPLSKMLPVDEFLPVMFDKHPVSEYKAHFSLRNLHAFSVEPLLIYPTHYTGDDGYVSDTETSVVWNNEHVKTDWDRAKSQKMREQQALSREAKNSDVLQSPLDSAARDEL

SEQ ID NO: 34855 - protein, 1007 aa, Homo sapiens
MEVFPFLLVLSVWWSRTWDSANADSIIHIGAIFDESAKKDDEVFRTAVGDLNQNEEILQTEKITFSVTFVDGNNPFQAVQEACELMNQGILALVSSIGCTSAGSLQSLADAMHIPHLFIQRSTAGTPRSGCGLTRSNRNDDYTLSVRPPVYLHDVILRVVTEYAWQKFIIFYDSEYDIRGIQEFLDKVSQQGMDVALQKVENNINKMITTLFDTMRIEELNRYRDTLRRAILVMNPATAKSFITEVVETNLVAFDCHWIIINEEINDVDVQELVRRSIGRLTIIRQTFPVPQNISQRCFRGNHRISSTLCDPKDPFAQNMEISNLYIYDTVLLLANAFHKKLEDRKWHSMASLSCIRKNSKPWQGGRSMLETIKKGGVSGLTGELEFGENGGNPNVHFEILGTNYGEELGRGVRKLGCWNPVTGLNGSLTDKKLENNMRGVVLRVVTVLEEPFVMVSENVLGKPKKYQGFSIDVLDALSNYLGFNYEIYVAPDHKYGSPQEDGTWNGLVGELVFKRADIGISALTITPDRENVVDFTTRYMDYSVGVLLRRAEKTVDMFACLAPFDLSLWACIAGTVLLVGLLVYLLNWLNPPRLQMGSMTSTTLYNSMWFVYGSFVQQGGEVPYTTLATRMMMGAWWLFALIVISSYTANLAAFLTITRIESSIQSLQDLSKQTEIPYGTVLDSAVYEHVRMKGLNPFERDSMYSQMWRMINRSNGSENNVLESQAGIQKVKYGNYAFVWDAAVLEYVAINDPDCSFYTIGNTVADRGYGIALQHGSPYRDVFSQRILELQQNGDMDILKHKWWPKNGQCDLYSSVDTKQKGGALDIKSFAGVFCILAAGIVLSCFIAMLETWWNKRKGSRVPSKEDDKEIDLEHLHRRVNSLCTDDDSPHKQFSTSSIDLTPLDIDTLPTRQALEQISDFRNTHITTTTFIPEQIQTLSRTLSAKAASGFTFGNVPEHRTGPFRHRAPNGGFFRSPIKTMSSIPYQPTPTLGLNLGNDPDRGTSI

SEQ ID NO: 34856 - protein, 912 aa, Homo sapiens
MEVFPFLLVLSVWWSRTWDSANADSIIHIGAIFDESAKKDDEVFRTAVGDLNQNEEILQTEKITFSVTFVDGNNPFQAVQEDIRGIQEFLDKVSQQGMDVALQKVENNINKMITTLFDTMRIEELNRYRDTLRRAILVMNPATAKSFITEVVETNLVAFDCHWIIINEEINDVDVQELVRRSIGRLTIIRQTFPVPQNISQRCFRGNHRISSTLCDPKDPFAQNMEISNLYIYDTVLLLANAFHKKLEDRKWHSMASLSCIRKNSKPWQGGRSMLETIKKGGVSGLTGELEFGENGGNPNVHFEILGTNYGEELGRGVRKLGCWNPVTGLNGSLTDKKLENNMRGVVLRVVTVLEEPFVMVSENVLGKPKKYQGFSIDVLDALSNYLGFNYEIYVAPDHKYGSPQEDGTWNGLVGELVFKRADIGISALTITPDRENVVDFTTRYMDYSVGVLLRRAEKTVDMFACLAPFDLSLWACIAGTVLLVGLLVYLLNWLNPPRLQMGSMTSTTLYNSMWFVYGSFVQQGGEVPYTTLATRMMMGAWWLFALIVISSYTANLAAFLTITRIESSIQSLQDLSKQTEIPYGTVLDSAVYEHVRMKGLNPFERDSMYSQMWRMINRSNGSENNVLESQAGIQKVKYGNYAFVWDAAVLEYVAINDPDCSFYTIGNTVADRGYGIALQHGSPYRDVFSQRILELQQNGDMDILKHKWWPKNGQCDLYSSVDTKQKGGALDIKSFAGVFCILAAGIVLSCFIAMLETWWNKRKGSRVPSKEDDKEIDLEHLHRRVNSLCTDDDSPHKQFSTSSIDLTPLDIDTLPTRQALEQISDFRNTHITTTTFIPEQIQTLSRTLSAKAASGFTFGNVPEHRTGPFRHRAPNGGFFRSPIKTMSSIPYQPTPTLGLNLGNDPDRGTSI

SEQ ID NO: 34857 - protein, 902 aa, Homo sapiens
MRIISRQIVLLFSGFWGLAMGAFPSSVQIGGLFIRNTDQEYTAFRLAIFLHNTSPNASEAPFNLVPHVDNIETANSFAVTNAFCSQYSRGVFAIFGLYDKRSVHTLTSFCSALHISLITPSFPTEGESQFVLQLRPSLRGALLSLLDHYEWNCFVFLYDTDRGYSILQAIMEKAGQNGWHVSAICVENFNDVSYRQLLEELDRRQEKKFVIDCEIERLQNILEQIVSVGKHVKGYHYIIANLGFKDISLERFIHGGANVTGFQLVDFNTPMVIKLMDRWKKLDQREYPGSETPPKYTSALTYDGVLVMAETFRSLRRQKIDISRRGNAGDCLANPAAPWGQGIDMERTLKQVRIQGLTGNVQFDHYGRRVNYTMDVFELKSTGPRKVGYWNDMDKLVLIQDVPTLGNDTAAIENRTVVVTTIMESPYVMYKKNHEMFEGNDKYEGYCVDLASEIAKHIGIKYKIAIVPDGKYGARDADTKIWNGMVGELVYGKAEIAIAPLTITLVREEVIDFSKPFMSLGISIMIKKPQKSKPGVFSFLDPLAYEIWMCIVFAYIGVSVVLFLVSRFSPYEWHTEEPEDGKEGPSDQPPNEFGIFNSLWFSLGAFMQQGCDISPRSLSGRIVGGVWWFFTLIIISSYTANLAAFLTVERMVSPIESAEDLAKQTEIAYGTLDSGSTKEFFRRSKIAVYEKMWTYMRSAEPSVFTRTTAEGVARVRKSKGKFAFLLESTMNEYIEQRKPCDTMKVGGNLDSKGYGVATPKGSSLRTPVNLAVLKLSEAGVLDKLKNKWWYDKGECGPKDSGSKDKTSALSLSNVAGVFYILVGGLGLAMLVALIEFCYKSRAEAKRMKLTFSEAIRNKARLSITGSVGENGRVLTPDCPKAVHTGTAIRQSSGLAVIASDLP

SEQ ID NO: 34858 - protein, 433 aa, Homo sapiens
MRIISRQIVLLFSGFWGLAMGAFPSSVQIGGLFIRNTDQEYTAFRLAIFLHNTSPNASEAPFNLVPHVDNIETANSFAVTNAFCSQYSRGVFAIFGLYDKRSVHTLTSFCSALHISLITPSFPTEGESQFVLQLRPSLRGALLSLLDHYEWNCFVFLYDTDRGYSILQAIMEKAGQNGWHVSAICVENFNDVSYRQLLEELDRRQEKKFVIDCEIERLQNILEQIVSVGKHVKGYHYIIANLGFKDISLERFIHGGANVTGFQLVDFNTPMVIKLMDRWKKLDQREYPGSETPPKYTSALTYDGVLVMAETFRSLRRQKIDISRRGNAGDCLANPAAPWGQGIDMERTLKQVRIQGLTGNVQFDHYGRRVNYTMDVFELKSTGPRKVGYWNDMDKLVLIQDVPTLGNDTAAIENRTVVVTTIMPLMKNPILRN

SEQ ID NO: 34859 - protein, 653 aa, Homo sapiens
MEVAMVSAESSGCNSHMPYGYAAQARARERERLAHSRAAAAAAVAAATAAVEGSGGSGGGSHHHHQSRGACTSHDPQSSRGSRRRRRQRSEKKKAHYRQSSFPHCSDLMPSGSEEKILRELSEEEEDEEEEEEEEEEGRFYYSEDDHGDECSYTDLLPQDEGGGGYSSVRYSDCCERVVINVSGLRFETQMKTLAQFPETLLGDPEKRTQYFDPLRNEYFFDRNRPSFDAILYYYQSGGRLKRPVNVPFDIFTEEVKFYQLGEEALLKFREDEGFVREEEDRALPENEFKKQIWLLFEYPESSSPARGIAIVSVLVILISIVIFCLETLPEFRDDRDLVMALSAGGHGGLLNDTSAPHLENSGHTIFNDPFFIVETVCIVWFSFEFVVRCFACPSQALFFKNIMNIIDIVSILPYFITLGTDLAQQQGGGNGQQQQAMSFAILRIIRLVRVFRIFKLSRHSKGLQILGHTLRASMRELGLLIFFLFIGVILFSSAVYFAEADEPTTHFQSIPDAFWWAVVTMTTVGYGDMKPITVGGKIVGSLCAIAGVLTIALPVPVIVSNFNYFYHRETENEEQTQLTQNAVSCPYLPSNLLKKFRSSTSSSLGDKSEYLEMEEGVKESLCAKEEKCQGKGDDSETDKNNCSNAKAVETDV

SEQ ID NO: 34860 - protein, 330 aa, Homo sapiens; identical to SEQ ID NO: 274

SEQ ID NO: 34861 - protein, 217 aa, Homo sapiens
MVSRRPLSTPGRELTHGQGGWLLHHPGQPELPRGLLHLCQGHRGNSLDRRSQGGPHLSGAVGEEIRPSMNRKLSDHPPTLPLQQHQHQPQPPQYAPAPQQLQQPPQQRYLQHHHFHQERRGGSLDINDGHCGTGLGSEMNAALMHRRHTDPVQLQAAGRVRWARALYDFEALEDDELGFHSGEVVEVLDSSNPSWWTGRLHNKLGLFPANYVAPMTR

SEQ ID NO: 34862 - protein, 337 aa, Homo sapiens
MTNNSGSKAELVVGGKYKLVRKIGSGSFGDVYLGITTTNGEDVAVKLESQKVKHPQLLYESKLYTILQGGVGIPHMHWYGQEKDNNVLVMDLLGPSLEDLFNFCSRRFTMKTVLMLADQMISRIEYVHTKNFLHRDIKPDNFLMGTGRHCNKLFLIDFGLAKKYRDNRTRQHIPYREDKHLIGTVRYASINAHLGIEQSRRDDMESLGYVFMYFNRTSLPWQGLRAMTKKQKYEKISEKKMSTPVEVLCKGFPAEFAMYLNYCRGLRFEEVPDYMYLRQLFRILFRTLNHQYDYTFDWTMLKQKAAQQAASSSGQGQQAQTQTGKQTEKNKNNVKDN

SEQ ID NO: 34863 - protein, 1064 aa, Homo sapiens
MASESETLNPSARIMTFYPTMEEFRNFSRYIAYIESQGAHRAGLAKVVPPKEWKPRASYDDIDDLVIPAPIQQLVTGQSGLFTQYNIQKKAMTVREFRKIANSDKYCTPRYSEFEELERKYWKNLTFNPPIYGADVNGTLYEKHVDEWNIGRLRTILDLVEKESGITIEGVNTPYLYFGMWKTSFAWHTEDMDLYSINYLHFGEPKSWYSVPPEHGKRLERLAKGFFPGSAQSCEAFLRHKMTLISPLMLKKYGIPFDKVTQEAGEFMITFPYGYHAGFNHGFNCAESTNFATRRWIEYGKQAVLCSCRKDMVKISMDVFVRKFQPERYKLWKAGKDNTVIDHTLPTPEAAEFLKESELPPRAGNEEECPEEDMEGVEDGEEGDLKTSLAKHRIGTKRHRVCLEIPQEVSQSELFPKEDLSSEQYEMTECPAALAPVRPTHSSVRQVEDGLTFPDYSDSTEVKFEELKNVKLEEEDEEEEQAAAALDLSVNPASVGGRLVFSGSKKKSSSSLGSGSSRDSISSDSETSEPLSCRAQGQTGVLTVHSYAKGDGRVTVGEPCTRKKGSAARSFSERELAEVADEYMFSLEENKKSKGRRQPLSKLPRHHPLVLQECVSDDETSEQLTPEEEAEETEAWAKPLSQLWQNRPPNFEAEKEFNETMAQQAPHCAVCMIFQTYHQVEFGGFNQNCGNASDLAPQKQRTKPLIPEMCFTSTGCSTDINLSTPYLEEDGTSILVSCKKCSVRVHASCYGVPPAKASEDWMCSRCSANALEEDCCLCSLRGGALQRANDDRWVHVSCAVAILEARFVNIAERSPVDVSKIPLPRFKLKCIFCKKRRKRTAGCCVQCSHGRCPTAFHVSCAQAAGVMMQPDDWPFVVFITCFRHKIPNLERAKGALQSITAGQKVISKHKNGRFYQCEVVRLTTETFYEVNFDDGSFSDNLYPEDIVSQDCLQFGPPAEGEVVQVRWTDGQVYGAKFVASHPIQMYQVEFEDGSQLVVKRDDVYTLDEELPKRVKSRLSVASDMRFNEIFTEKEVKQEKKRQRVINSRYREDYIEPALYRAIME

SEQ ID NO: 34864 - protein, 481 aa, Homo sapiens
MFSLEENKKSKGRRQPLSKLPRHHPLVLQECVSDDETSEQLTPEEEAEETEAWAKPLSQLWQNRPPNFEAEKEFNETMAQQAPHCAVCMIFQTYHQVEFGGFNQNCGNASDLAPQKQRTKPLIPEMCFTSTGCSTDINLSTPYLEEDGTSILVSCKKCSVRVHASCYGVPPAKASEDWMCSRCSANALEEDCCLCSLRGGALQRANDDRWVHVSCAVAILEARFVNIAERSPVDVSKIPLPRFKLKCIFCKKRRKRTAGCCVQCSHGRCPTAFHVSCAQAAGVMMQPDDWPFVVFITCFRHKIPNLERAKGALQSITAGQKVISKHKNGRFYQCEVVRLTTETFYEVNFDDGSFSDNLYPEDIVSQDCLQFGPPAEGEVVQVRWTDGQVYGAKFVASHPIQMYQVEFEDGSQLVVKRDDVYTLDEELPKRVKSRLSVASDMRFNEIFTEKEVKQEKKRQRVINSRYREDYIEPALYRAIME

SEQ ID NO: 34865 - protein, 337 aa, Homo sapiens
MASSSGSKAEFIVGGKYKLVRKIGSGSFGDIYLAINITNGEEVAVKLESQKARHPQLLYESKLYKILQGGVGIPHIRWYGQEKDYNVLVMDLLGPSLEDLFNFCSRRFTMKTVLMLADQMISRIEYVHTKNFIHRDIKPDNFLMGIGRHCNKLFLIDFGLAKKYRDNRTRQHIPYREDKNLTGTARYASINAHLGIEQSRRDDMESLGYVLMYFNRTSLPWQGLKAATKKQKYEKISEKKMSTPVEVLCKGFPAEFAMYLNYCRGLRFEEAPDYMYLRQLFRILFRTLNHQYDYTFDWTMLKQKAAQQAASSSGQGQQAQTPTGKQTDKTKSNMKGF

SEQ ID NO: 34866 - protein, 365 aa, Homo sapiens
MASSSGSKAEFIVGGKYKLVRKIGSGSFGDIYLAINITNGEEVAVKLESQKARHPQLLYESKLYKILQGGVGIPHIRWYGQEKDYNVLVMDLLGPSLEDLFNFCSRRFTMKTVLMLADQMISRIEYVHTKNFIHRDIKPDNFLMGIGRHCNKCLESPVGKRKRSMTVSTSQDPSFSGLNQLFLIDFGLAKKYRDNRTRQHIPYREDKNLTGTARYASINAHLGIEQSRRDDMESLGYVLMYFNRTSLPWQGLKAATKKQKYEKISEKKMSTPVEVLCKGFPAEFAMYLNYCRGLRFEEAPDYMYLRQLFRILFRTLNHQYDYTFDWTMLKQKAAQQAASSSGQGQQAQTPTGKQTDKTKSNMKGF

SEQ ID NO: 34867 - protein, 325 aa, Homo sapiens
MASSSGSKAEFIVGGKYKLVRKIGSGSFGDIYLAINITNGEEVAVKLESQKARHPQLLYESKLYKILQGGVGIPHIRWYGQEKDYNVLVMDLLGPSLEDLFNFCSRRFTMKTVLMLADQMISRIEYVHTKNFIHRDIKPDNFLMGIGRHCNKLFLIDFGLAKKYRDNRTRQHIPYREDKNLTGTARYASINAHLGIEQSRRDDMESLGYVLMYFNRTSLPWQGLKAATKKQKYEKISEKKMSTPVEVLCKGFPAEFAMYLNYCRGLRFEEAPDYMYLRQLFRILFRTLNHQYDYTFDWTMLKQKAAQQAASSSGQGQQAQTPTGF

SEQ ID NO: 34868 - protein, 747 aa, Homo sapiens
MSKLKSSESVRVVVRCRPMNGKEKAASYDKVVDVDVKLGQVSVKNPKGTAHEMPKTFTFDAVYDWNAKQFELYDETFRPLVDSVLQGFNGTIFAYGQTGTGKTYTMEGIRGDPEKRGVIPNSFDHIFTHISRSQNQQYLVRASYLEIYQEEIRDLLSKDQTKRLELKERPDTGVYVKDLSSFVTKSVKEIEHVMNVGNQNRSVGATNMNEHSSRSHAIFVITIECSEVGLDGENHIRVGKLNLVDLAGSERQAKTGAQGERLKEATKINLSLSALGNVISALVDGKSTHIPYRDSKLTRLLQDSLGGNAKTVMVANVGPASYNVEETLTTLRYANRAKNIKNKPRVNEDPKDALLREFQEEIARLKAQLEKRSIGRRKRREKRREGGGSGGGGEEEEEEGEEGEEEGDDKDDYWREQQEKLEIEKRAIVEDHSLVAEEKMRLLKEKEKKMEDLRREKDAAEMLGAKIKAMESKLLVGGKNIVDHTNEQQKILEQKRQEIAEQKRREREIQQQMESRDEETLELKETYSSLQQEVDIKTKKLKKLFSKLQAVKAEIHDLQEEHIKERQELEQTQNELTRELKLKHLIIENFIPLEEKSKIMNRAFFDEEEDHWKLHPITRLENQQMMKRPVSAVGYKRPLSQHARMSMMIRPEARYRAENIVLLELDMPSRTTRDYEGPAIAPKVQAALDAALQDEDEIQVDASSFESTANKKSKARPKSGRKSGSSSSSSGTPASQLYPQSRGLVPK

SEQ ID NO: 34869 - protein, 373 aa, Homo sapiens
MVANVGPASYNVEETLTTLRYANRAKNIKNKPRVNEDPKDALLREFQEEIARLKAQLEKRSIEEKMRLLKEKEKKMEDLRREKDAAEMLGAKIKAMESKLLVGGKNIVDHTNEQQKILEQKRQEIAEQKRREREIQQQMESRDEETLELKETYSSLQQEVDIKTKKLKKLFSKLQAVKAEIHDLQEEHIKERQELEQTQNELTRELKLKHLIIENFIPLEEKSKIMNRAFFDEEEDHWKLHPITRLENQQMMKRPVSAVGYKRPLSQHARMSMMIRPEARYRAENIVLLELDMPSRTTRDYEGPAIAPKVQAALDAALQDEDEIQVDASSFESTANKKSKARPKSGRKSGSSSSSSGTPASQLYPQSRGLVPK

SEQ ID NO: 34870 - protein, 635 aa, Homo sapiens
MISSVCVSSYRGRKSGNKPPSKTCLKEEMAKGEASEKIIINVGGTRHETYRSTLRTLPGTRLAWLADPDGGGRPETDGGGVGSSGSSGGGGCEFFFDRHPGVFAYVLNYYRTGKLHCPADVCGPLFEEELTFWGIDETDVEPCCWMTYRQHRDAEEALDIFESPDGGGSGAGPSDEAGDDERELALQRLGPHEGGAGHGAGSGGCRGWQPRMWALFEDPYSSRAARVVAFASLFFILVSITTFCLETHEAFNIDRNVTEILRVGNITSVHFRREVETEPILTYIEGVCVLWFTLEFLVRIVCCPDTLDFVKNLLNIIDFVAILPFYLEVGLSGLSSKAARDVLGFLRVVRFVRILRIFKLTRHFVGLRVLGHTLRASTNEFLLLIIFLALGVLIFATMIYYAERIGARPSDPRGNDHTDFKNIPIGFWWAVVTMTTLGYGDMYPKTWSGMLVGALCALAGVLTIAMPVPVIVNNFGMYYSLAMAKQKLPKKRKKHVPRPAQLESPMYCKSEETSPRDSTCSDTSPPAREEGMIERKRADSKQNGDANAVLSDEEGAGLTQPLASSPTPEERRALRRSTTRDRNKKAAACFLLSTGDYACADGSVRKGTFVLRDLPLQHSPEAACPPTAGTLFLPH

SEQ ID NO: 34871 - protein, 582 aa, Homo sapiens
MISSVCVSSYRGRKSGNKPPSKTCLKEEMAKGEASEKIIINVGGTRHETYRSTLRTLPGTRLAWLADPDGGGRPETDGGGVGSSGSSGGGGCEFFFDRHPGVFAYVLNYYRTGKLHCPADVCGPLFEEELTFWGIDETDVEPCCWMTYRQHRDAEEALDIFESPDGGGSGAGPSDEAGDDERELALQRLGPHEGGAGHGAGSGGCRGWQPRMWALFEDPYSSRAARVVAFASLFFILVSITTFCLETHEAFNIDRNVTEILRVGNITSVHFRREVETEPILTYIEGVCVLWFTLEFLVRIVCCPDTLDFVKNLLNIIDFVAILPFYLEVGLSGLSSKAARDVLGFLRVVRFVRILRIFKLTRHFVGLRVLGHTLRASTNEFLLLIIFLALGVLIFATMIYYAERIGARPSDPRGNDHTDFKNIPIGFWWAVVTMTTLGYGDMYPKTWSGMLVGALCALAGVLTIAMPVPVIVNNFGMYYSLAMAKQKLPKKRKKHVPRPAQLESPMYCKSEETSPRDSTCSDTSPPAREEGMIERKRAGEIRGWEGKSLFPQWPREFPNGPQTLGFGMCFVWGFPKHKDVPL

SEQ ID NO: 34872 - protein, 626 aa, Homo sapiens
MISSVCVSSYRGRKSGNKPPSKTCLKEEMAKGEASEKIIINVGGTRHETYRSTLRTLPGTRLAWLADPDGGGRPETDGGGVGSSGSSGGGGCEFFFDRHPGVFAYVLNYYRTGKLHCPADVCGPLFEEELTFWGIDETDVEPCCWMTYRQHRDAEEALDIFESPDGGGSGAGPSDEAGDDERELALQRLGPHEGGAGHGAGSGGCRGWQPRMWALFEDPYSSRAARVVAFASLFFILVSITTFCLETHEAFNIDRNVTEILRVGNITSVHFRREVETEPILTYIEGVCVLWFTLEFLVRIVCCPDTLDFVKNLLNIIDFVAILPFYLEVGLSGLSSKAARDVLGFLRVVRFVRILRIFKLTRHFVGLRVLGHTLRASTNEFLLLIIFLALGVLIFATMIYYAERIGARPSDPRGNDHTDFKNIPIGFWWAVVTMTTLGYGDMYPKTWSGMLVGALCALAGVLTIAMPVPVIVNNFGMYYSLAMAKQKLPKKRKKHVPRPAQLESPMYCKSEETSPRDSTCSDTSPPAREEGMIERKRADSKQNGDANAVLSDEEGAGLTQPLASSPTPEERRALRRSTTRDRNKKAAACFLLSTGDYACADGSVRKETCQDALSSNYAQAEVLTLS

SEQ ID NO: 34873 - protein, 1544 aa, Homo sapiens
MEAATTLHPGPRPALPLGGPGPLGEFLPPPECPVFEPSWEEFADPFAFIHKIRPIAEQTGICKVRPPPDWQPPFACDVDKLHFTPRIQRLNELEAQTRVKLNFLDQIAKYWELQGSTLKIPHVERKILDLFQLNKLVAEEGGFAVVCKDRKWTKIATKMGFAPGKAVGSHIRGHYERILNPYNLFLSGDSLRCLQKPNLTTDTKDKEYKPHDIPQRQSVQPSETCPPARRAKRMRAEAMNIKIEPEETTEARTHNLRRRMGCPTPKCENEKEMKSSIKQEPIERKDYIVENEKEKPKSRSKKATNAVDLYVCLLCGSGNDEDRLLLCDGCDDSYHTFCLIPPLHDVPKGDWRCPKCLAQECSKPQEAFGFEQAARDYTLRTFGEMADAFKSDYFNMPVHMVPTELVEKEFWRLVSTIEEDVTVEYGADIASKEFGSGFPVRDGKIKLSPEEEEYLDSGWNLNNMPVMEQSVLAHITADICGMKLPWLYVGMCFSSFCWHIEDHWSYSINYLHWGEPKTWYGVPGYAAEQLENVMKKLAPELFVSQPDLLHQLVTIMNPNTLMTHEVPVYRTNQCAGEFVITFPRAYHSGFNQGFNFAEAVNFCTVDWLPLGRQCVEHYRLLHRYCVFSHDEMICKMASKADVLDVVVASTVQKDMAIMIEDEKALRETVRKLGVIDSERMDFELLPDDERQCVKCKTTCFMSAISCSCKPGLLVCLHHVKELCSCPPYKYKLRYRYTLDDLYPMMNALKLRAESYNEWALNVNEALEAKINKKKSLVSFKALIEESEMKKFPDNDLLRHLRLVTQDAEKCASVAQQLLNGKRQTRYRSGGGKSQNQLTVNELRQFVTQLYALPCVLSQTPLLKDLLNRVEDFQQHSQKLLSEETPSAAELQDLLDVSFEFDVELPQLAEMRIRLEQARWLEEVQQACLDPSSLTLDDMRRLIDLGVGLAPYSAVEKAMARLQELLTVSEHWDDKAKSLLKARPRHSLNSLATAVKEIEEIPAYLPNGAALKDSVQRARDWLQDVEGLQAGGRVPVLDTLIELVTRGRSIPVHLNSLPRLETLVAEVQAWKECAVNTFLTENSPYSLLEVLCPRCDIGLLGLKRKQRKLKEPLPNGKKKSTKLESLSDLERALTESKETASAMATLGEARLREMEALQSLRLANEGKLLSPLQDVDIKICLCQKAPAAPMIQCELCRDAFHTSCVAVPSISQGLRIWLCPHCRRSEKPPLEKILPLLASLQRIRVRLPEGDALRYMIERTVNWQHRAQQLLSSGNLKFVQDRVGSGLLYSRWQASAGQVSDTNKVSQPPGTTSFSLPDDWDNRTSYLHSPFSTGRSCIPLHGVSPEVNELLMEAQLLQVSLPEIQELYQTLLAKPSPAQQTDRSSPVRPSSEKNDCCRGKRDGINSLERKLKRRLEREGLSSERWERVKKMRTPKKKKIKLSHPKDMNNFKLERERSYELVRSAETHSLPSDTSYSEQEDSEDEDAICPAVSCLQPEGDEVDWVQCDGSCNQWFHQVCVGVSPEMAEKEDYICVRCTVKDAPSRK

SEQ ID NO: 34874 - protein, 1580 aa, Homo sapiens
MEAATTLHPGPRPALPLGGPGPLGEFLPPPECPVFEPSWEEFADPFAFIHKIRPIAEQTGICKVRPPPDWQPPFACDVDKLHFTPRIQRLNELEAQTRVKLNFLDQIAKYWELQGSTLKIPHVERKILDLFQLNKLVAEEGGFAVVCKDRKWTKIATKMGFAPGKAVGSHIRGHYERILNPYNLFLSGDSLRCLQKPNLTTDTKDKEYKPHDIPQRQSVQPSETCPPARRAKRMRAERQSLAVLPRLECSGAILAHCNLRLLDSSNSSASASQAMNIKIEPEETTEARTHNLRRRMGCPTPKCENEKEMKSSIKQEPIERKDYIVENEKEKPKSRSKKATNAVDLYVCLLCGSGNDEDRLLLCDGCDDSYHTFCLIPPLHDVPKGDWRCPKCLAQECSKPQEAFGFEQAARDYTLRTFGEMADAFKSDYFNMPVHMVPTELVEKEFWRLVSTIEEDVTVEYGADIASKEFGSGFPVRDGKIKLSPEEEEYLDSGWNLNNMPVMEQSVLAHITADICGMKLPWLYVGMCFSSFCWHIEDHWSYSINYLHWGEPKTWYGVPGYAAEQLENVMKKLAPELFVSQPDLLHQLVTIMNPNTLMTHEVPVYRTNQCAGEFVITFPRAYHSGFNQGFNFAEAVNFCTVDWLPLGRQCVEHYRLLHRYCVFSHDEMICKMASKADVLDVVVASTVQKDMAIMIEDEKALRETVRKLGVIDSERMDFELLPDDERQCVKCKTTCFMSAISCSCKPGLLVCLHHVKELCSCPPYKYKLRYRYTLDDLYPMMNALKLRAESYNEWALNVNEALEAKINKKKSLVSFKALIEESEMKKFPDNDLLRHLRLVTQDAEKCASVAQQLLNGKRQTRYRSGGGKSQNQLTVNELRQFVTQLYALPCVLSQTPLLKDLLNRVEDFQQHSQKLLSEETPSAAELQDLLDVSFEFDVELPQLAEMRIRLEQARWLEEVQQACLDPSSLTLDDMRRLIDLGVGLAPYSAVEKAMARLQELLTVSEHWDDKAKSLLKARPRHSLNSLATAVKEIEEIPAYLPNGAALKDSVQRARDWLQDVEGLQAGGRVPVLDTLIELVTRGRSIPVHLNSLPRLETLVAEVQAWKECAVNTFLTENSPYSLLEVLCPRCDIGLLGLKRKQRKLKEPLPNGKKKSTKLESLSDLERALTESKETASAMATLGEARLREMEALQSLRLANEGKLLSPLQDVDIKICLCQKAPAAPMIQCELCRDAFHTSCVAVPSISQGLRIWLCPHCRRSEKPPLEKILPLLASLQRIRVRLPEGDALRYMIERTVNWQHRAQQLLSSGNLKFVQDRVGSGLLYSRWQASAGQVSDTNKVSQPPGTTSFSLPDDWDNRTSYLHSPFSTGRSCIPLHGVSPEVNELLMEAQLLQVSLPEIQELYQTLLAKPSPAQQTDRSSPVRPSSEKNDCCRGKRDGINSLERKLKRRLEREGLSSERWERVKKMRTPKKKKIKLSHPKDMNNFKLERERSYELVRSAETHSLPSDTSYSEQEDSEDEDAICPAVSCLQPEGDEVDWVQCDGSCNQWFHQVCVGVSPEMAEKEDYICVRCTVKDAPSRK

SEQ ID NO: 34875 - protein, 537 aa, Homo sapiens
MGGAGILLLLLAGAGVVVAWRPPKGKCPLRCSCSKDSALCEGSPDLPVSFSPTLLSLSLVRTGVTQLKAGSFLRIPSLHLLLFTSNSFSVIEDDAFAGLSHLQYLFIEDNEIGSISKNALRGLRSLTHLSLANNHLETLPRFLFRGLDTLTHVDLRGNPFQCDCRVLWLLQWMPTVNASVGTGACAGPASLSHMQLHHLDPKTFKCRAIELSWFQTVGESALSVEPFSYQGEPHIVLAQPFAGRCLILSWDYSLQRFRPEEELPAASVVSCKPLVLGPSLFVLAARLWGGSQLWARPSPGLRLAPTQTLAPRRLLRPNDAELLWLEGQPCFVVADASKAGSTTLLCRDGPGFYPHQSLHAWHRDTDAEALELDGRPHLLLASASQRPVLFHWTGGRFERRTDIPEAEDVYATRHFQAGGDVFLCLTRYIGDSMVMRWDGSMFRLLQQLPSRGAHVFQPLLIARDQLAILGSDFAFSQVLRLEPDKGLLEPLQELGPPALVAPRAFAHITMAGRRFLFAACFKGPTQIYQHHEIDLSA

SEQ ID NO: 34876 - protein, 261 aa, Homo sapiens
MGGAGILLLLLAGAGVVVAWRPPKGKCPLRCSCSKDSALCEGSPDLPVSFSPTLLSLSLVRTGVTQLKAGSFLRIPSLHLLLFTSNSFSVIEDDAFAGLSHLQYLFIEDNEIGSISKNALRGLRSLTHLSLANNHLETLPRFLFRGLDTLTHVDLRGNPFQCDCRVLWLLQWMPTVNASVGTGACAGPASLSHMQLHHLDPKTFKCRAIGGGLSRWGGRREIWGKGCQGQEARLTPCPAISRSGKTLSKQHCLPEPQFSHL

SEQ ID NO: 34877 - protein, 724 aa, Homo sapiens
MLLFVEQVASKGTGLNPNAKVWQEIAPGNTDATPVTHGTESSWHEIAATSGAHPEGNAELSEDICKEYEVMYSSSCETTRNTTGIEESTDGMILGPEDLSYQIYDVSGESNSAVSTEDLKECLKKQLEFCFSRENLSKDLYLISQMDSDQFIPIWTVANMEEIKKLTTDPDLILEVLRSSPMVQVDEKGEKVRPSHKRCIVILREIPETTPIEEVKGLFKSENCPKVISCEFAHNSNWYITFQSDTDAQQAFKYLREEVKTFQGKPIMARIKAINTFFAKNGYRLMDSSIYSHPIQTQAQYASPVFMQPVYNPHQQYSVYSIVPQSWSPNPTPYFETPLAPFPNGSFVNGFNSPGSYKTNAAAMNMGRPFQKNRVKPQFRSSGGSEHSTEGSVSLGDGQLNRYSSRNFPAERHNPTVTGHQEQTYLQKETSTLQVEQNGDYGRGRRTLFRGRRRREDDRISRPHPSTAESKAPTPKFDLLASNFPPLPGSSSRMPGELVLENRMSDVVKGVYKEKDNEELTISCPVPADEQTECTSAQQLNMSTSSPCAAELTALSTTQQEKDLIEDSSVQKDGLNQTTIPVSPPSTTKPSRASTASPCNNNINAATAVALQEPRKLSYAEVCQKPPKEPSSVLVQPLRELRSNVVSPTKNEDNGAPENSVEKPHEKPEARASKDYSGFRGNIIPRGAAGKIREQRRQFSHRAIPQGVTRRNGKEQYVPPRSPK

SEQ ID NO: 34878 - protein, 605 aa, Homo sapiens
MLLFVEVASKGTGLNPNAKVWQEIAPGNTDATPVTHGTESSWHEIAATSGAHPEGNAELSEDICKEYEVMYSSSCETTRNTTGIEESTDGMILGPSHKRCIVILREIPETTPIEEVKGLFKSENCPKVISCEFAHNSNWYITFQSDTDAQQAFKYLREEVKTFQGKPIMARIKAINTFFAKNGYRLMDSSIYSHPIQTQAQYASPVFMQPVYNPHQQYSVYSIVPQSWSPNPTPYFETPLAPFPNGSFVNGFNSPGSYKTNAAAMNMGRPFQKNRVKPQFRSSGGSEHSTEGSVSLGDGQLNRYSSRNFPAERHNPTVTGHQEQTYLQKETSTLQVEQNGDYGRGRRTLFRGRRRREDDRISRPHPSTAESKAPTPKFDLLASNFPPLPGSSSRMPGELVLENRMSDVVKGVYKEKDNEELTISCPVPADEQTECTSAQQLNMSTSSPCAAELTALSTTQQEKDLIEDSSVQKDGLNQTTIPVSPPSTTKPSREPRKLSYAEVCQKPPKEPSSVLVQPLRELRSNVVSPTKNEDNGAPENSVEKPHEKPEARASKDYSGFRGNIIPRGAAGKIREQRRQFSHRAIPQGVTRRNGKEQYVPPRSPK

SEQ ID NO: 34879 - protein, 723 aa, Homo sapiens
MLLFVEVASKGTGLNPNAKVWQEIAPGNTDATPVTHGTESSWHEIAATSGAHPEGNAELSEDICKEYEVMYSSSCETTRNTTGIEESTDGMILGPEDLSYQIYDVSGESNSAVSTEDLKECLKKQLEFCFSRENLSKDLYLISQMDSDQFIPIWTVANMEEIKKLTTDPDLILEVLRSSPMVQVDEKGEKVRPSHKRCIVILREIPETTPIEEVKGLFKSENCPKVISCEFAHNSNWYITFQSDTDAQQAFKYLREEVKTFQGKPIMARIKAINTFFAKNGYRLMDSSIYSHPIQTQAQYASPVFMQPVYNPHQQYSVYSIVPQSWSPNPTPYFETPLAPFPNGSFVNGFNSPGSYKTNAAAMNMGRPFQKNRVKPQFRSSGGSEHSTEGSVSLGDGQLNRYSSRNFPAERHNPTVTGHQEQTYLQKETSTLQVEQNGDYGRGRRTLFRGRRRREDDRISRPHPSTAESKAPTPKFDLLASNFPPLPGSSSRMPGELVLENRMSDVVKGVYKEKDNEELTISCPVPADEQTECTSAQQLNMSTSSPCAAELTALSTTQQEKDLIEDSSVQKDGLNQTTIPVSPPSTTKPSRASTASPCNNNINAATAVALQEPRKLSYAEVCQKPPKEPSSVLVQPLRELRSNVVSPTKNEDNGAPENSVEKPHEKPEARASKDYSGFRGNIIPRGAAGKIREQRRQFSHRAIPQGVTRRNGKEQYVPPRSPK

SEQ ID NO: 34880 - protein, 730 aa, Homo sapiens
MLLFVEQVASKGTGLNPNAKVWQEIAPGNTDATPVTHGTESSWHEIAATSGAHPEVSVFNTGNAELSEDICKEYEVMYSSSCETTRNTTGIEESTDGMILGPEDLSYQIYDVSGESNSAVSTEDLKECLKKQLEFCFSRENLSKDLYLISQMDSDQFIPIWTVANMEEIKKLTTDPDLILEVLRSSPMVQVDEKGEKVRPSHKRCIVILREIPETTPIEEVKGLFKSENCPKVISCEFAHNSNWYITFQSDTDAQQAFKYLREEVKTFQGKPIMARIKAINTFFAKNGYRLMDSSIYSHPIQTQAQYASPVFMQPVYNPHQQYSVYSIVPQSWSPNPTPYFETPLAPFPNGSFVNGFNSPGSYKTNAAAMNMGRPFQKNRVKPQFRSSGGSEHSTEGSVSLGDGQLNRYSSRNFPAERHNPTVTGHQEQTYLQKETSTLQVEQNGDYGRGRRTLFRGRRRREDDRISRPHPSTAESKAPTPKFDLLASNFPPLPGSSSRMPGELVLENRMSDVVKGVYKEKDNEELTISCPVPADEQTECTSAQQLNMSTSSPCAAELTALSTTQQEKDLIEDSSVQKDGLNQTTIPVSPPSTTKPSRASTASPCNNNINAATAVALQEPRKLSYAEVCQKPPKEPSSVLVQPLRELRSNVVSPTKNEDNGAPENSVEKPHEKPEARASKDYSGFRGNIIPRGAAGKIREQRRQFSHRAIPQGVTRRNGKEQYVPPRSPK

SEQ ID NO: 34881 - protein, 653 aa, Homo sapiens
MLLFVEQVASKGTGLNPNAKVWQEIAPGNTDATPVTHGTESSWHEIAATSGAHPEGNAELSEDICKEYEVMYSSSCETTRNTTGIEESTDGMILGPEDLSYQIYDVSGESNSAVSTEDLKECLKKQLEFCFSRENLSKDLYLISQMDSDQFIPIWTVANMEEIKKLTTDPDLILEVLRSSPMVQVDEKGEKVRPSHKRCIVILREIPETTPIEEVKGLFKSENCPKVISCEFAHNSNWYITFQSDTDAQQAFKYLREEVKTFQGKPIMAPFPNGSFVNGFNSPGSYKTNAAAMNMGRPFQKNRVKPQFRSSGGSEHSTEGSVSLGDGQLNRYSSRNFPAERHNPTVTGHQEQTYLQKETSTLQVEQNGDYGRGRRTLFRGRRRREDDRISRPHPSTAESKAPTPKFDLLASNFPPLPGSSSRMPGELVLENRMSDVVKGVYKEKDNEELTISCPVPADEQTECTSAQQLNMSTSSPCAAELTALSTTQQEKDLIEDSSVQKDGLNQTTIPVSPPSTTKPSRASTASPCNNNINAATAVALQEPRKLSYAEVCQKPPKEPSSVLVQPLRELRSNVVSPTKNEDNGAPENSVEKPHEKPEARASKDYSGFRGNIIPRGAAGKIREQRRQFSHRAIPQGVTRRNGKEQYVPPRSPK

SEQ ID NO: 34882 - protein, 653 aa, Homo sapiens
MLLFVEQVASKGTGLNPNAKVWQEIAPGNTDATPVTHGTESSWHEIAATSGAHPEGNAELSEDICKEYEVMYSSSCETTRNTTGIEESTDGMILGPEDLSYQIYDVSGESNSAVSTEDLKECLKKQLEFCFSRENLSKDLYLISQMDSDQFIPIWTVANMEEIKKLTTDPDLILEVLRSSPMVQVDEKGEKVRPSHKRCIVILREIPETTPIEEVKGLFKSENCPKVISCEFAHNSNWYITFQSDTDAQQAFKYLREEVKTFQGKPIMARIKAINTFFAKNGYRLMDSSIYSHPIQTQAQYASPVFMQPVYNPHQQYSVYSIVPQSWSPNPTPYFETPLAPFPNGSFVNGFNSPGSYKTNAAAMNMGRPFQKNRRTLFRGRRRREDDRISRPHPSTAESKAPTPKFDLLASNFPPLPGSSSRMPGELVLENRMSDVVKGVYKEKDNEELTISCPVPADEQTECTSAQQLNMSTSSPCAAELTALSTTQQEKDLIEDSSVQKDGLNQTTIPVSPPSTTKPSRASTASPCNNNINAATAVALQEPRKLSYAEVCQKPPKEPSSVLVQPLRELRSNVVSPTKNEDNGAPENSVEKPHEKPEARASKDYSGFRGNIIPRGAAGKIREQRRQFSHRAIPQGVTRRNGKEQYVPPRSPK

SEQ ID NO: 34883 - protein, 445 aa, Homo sapiens
MLLFVEQVASKGTGLNPNAKVWQEIAPGNTDATPVTHGTESSWHEIAATSGAHPEGNAELSEDICKEYEVMYSSSCETTRNTTGIEESTDGMILGPEDLSYQIYDVSGESNSAVSTEDLKECLKKQLEFCFSRENLSKDLYLISQMDSDQFIPIWTVANMEEIKKLTTDPDLILEVLRSSPMVQVDEKGEKVRPSHKRCIVILREIPETTPIEEVKGLFKSENCPKVISCEFAHNSNWYITFQSDTDAQQAFKYLREEVKTFQGKPIMARIKAINTFFAKNGYRLMDSSIYSHPIQTQAQYASPVFMQPVYNPHQQYSVYSIVPQSWSPNPTPYFETPLAPFPNGSFVNGFNSPGSYKTNAAAMNMGRPFQKNRVKPQFRSSGGSEHSTEGSVSLGDGQLNRYSSRNFPAERHNPTVTGHQEQTYLQKETSTLQVEQNGDYGRGR

SEQ ID NO: 34884 - protein, 4861 aa, Homo sapiens
MATMIPPVKLKWLEHLNSSWITEDSESIATREGVAVLYSKLVSNKEVVPLPQQVLCLKGPQLPDFERESLSSDEQDHYLDALLSSQLALAKMVCSDSPFAGALRKRLLVLQRVFYALSNKYHDKGKVKQQQHSPESSSGSADVHSVSERPRSSTDALIEMGVRTGLSLLFALLRQSWMMPVSGPGLSLCNDVIHTAIEVVSSLPPLSLANESKIPPMGLDCLSQVTTFLKGVTIPNSGADTLGRRLASELLLGLAAQRGSLRYLLEWIEMALGASAVVHTMEKGKLLSSQEGMISFDCFMTILMQMRRSLGSSADRSQWREPTRTSDGLCSLYEAALCLFEEVCRMASDYSRTCASPDSIQTGDAPIVSETCEVYVWGSNSSHQLVEGTQEKILQPKLAPSFSDAQTIEAGQYCTFVISTDGSVRACGKGSYGRLGLGDSNNQSTLKKLTFEPHRSIKKVSSSKGSDGHTLAFTTEGEVFSWGDGDYGKLGHGNSSTQKYPKLIQGPLQGKVVVCVSAGYRHSAAVTEDGELYTWGEGDFGRLGHGDSNSRNIPTLVKDISNVGEVSCGSSHTIALSKDGRTVWSFGGGDNGKLGHGDTNRVYKPKVIEALQGMFIRKVCAGSQSSLALTSTGQVYAWGCGACLGCGSSEATALRPKLIEELAATRIVDVSIGDSHCLALSHDNEVYAWGNNSMGQCGQGNSTGPITKPKKVSGLDGIAIQQISAGTSHSLAWTALPRDRQVVAWHRPYCVDLEESTFSHLRSFLERYCDKINSEIPPLPFPSSREHHSFLKLCLKLLSNHLALALAGGVATSILGRQAGPLRNLLFRLMDSTVPDEIQEVVIETLSVGATMLLPPLRERMELLHSLLPQGPDRWESLSKGQRMQLDIILTSLQDHTHVASLLGYSSPSDAADLSSVCTGYGNLSDQPYGTQSCHPDTHLAEILMKTLLRNLGFYTDQAFGELEKNSDKFLLGTSSSENSQPAHLHELLCSLQKQLLAFCHINNISENSSSVALLHKHLQLLLPHATDIYSRSANLLKESPWNGSVGEKLRDVIYVSAAGSMLCQIVNSLLLLPVSVARPLLSYLLDLLPPLDCLNRLLPAADLLEDQELQWPLHGGPELIDPAGLPLPQPAQSWVWLVDLERTIALLIGRCLGGMLQGSPVSPEEQDTAYWMKTPLFSDGVEMDTPQLDKCMSCLLEVALSGNEEQKPFDYKLRPEIAVYVDLALGCSKEPARSLWISMQDYAVSKDWDSATLSNESLLDTVSRFVLAALLKHTNLLSQACGESRYQPGKHLSEVYRCVYKVRSRLLACKNLELIQTRSSSRDRWISENQDSADVDPQEHSFTRTIDEEAEMEEQAERDREEGHPEPEDEEEEREHEVMTAGKIFQCFLSAREVARSRDRDRMNSGAGSGARADDPPPQSQQERRVSTDLPEGQDVYTAACNSVIHRCALLILGVSPVIDELQKRREEGQLQQPSTSASEGGGLMTRSESLTAESRLVHTSPNYRLIKSRSESDLSQPESDEEGYALSGRRNVDLDLAASHRKRGPMHSQLESLSDSWARLKHSRDWLCNSSYSFESDFDLTKSLGVHTLIENVVSFVSGDVGNAPGFKEPEESMSTSPQASIIAMEQQQLRAELRLEALHQILVLLSGMEEKGSISLAGSRLSSGFQSSTLLTSVRLQFLAGCFGLGTVGHTGGKGESGRLHHYQDGIRAAKRNIQIEIQVAVHKIYQQLSATLERALQANKHHIEAQQRLLLVTVFALSVHYQPVDVSLAISTGLLNVLSQLCGTDTMLGQPLQLLPKTGVSQLSTALKVASTRLLQILAITTGTYADKLSPKVVQSLLDLLCSQLKNLLSQTGVLHMASFGEGEQEDGEEEEKKVDSSGETEKKDFRAALRKQHAAELHLGDFLVFLRRVVSSKAIQSKMASPKWTEVLLNIASQKCSSGIPLVGNLRTRLLALHVLEAVLPACESGVEDDQMAQIVERLFSLLSDCMWETPIAQAKHAIQIKEKEQEIKLQKQGELEEEDENLPIQEVSFDPEKAQCCLVENGQILTHGSGGKGYGLASTGVTSGCYQWKFYIVKENRGNEGTCVGVSRWPVHDFNHRTTSDMWLYRAYSGNLYHNGEQTLTLSSFTQGDFITCVLDMEARTISFGKNGEEPKLAFEDVDAAELYPCVMFYSSNPGEKVKICDMQMRGTPRDLLPGDPICSPVAAVLAEATIQLIRILHRTDRWTYCINKKMMERLHKIKICIKESGQKLKKSRSVQSREENEMREEKESKEEEKGKHTRHGLADLSELQLRTLCIEVWPVLAVIGGVDAGLRVGGRCVHKQTGRHATLLGVVKEGSTSAKVQWDEAEITISFPTFWSPSDTPLYNLEPCEPLPFDVARFRGLTASVLLDLTYLTGVHEDMGKQSTKRHEKKHRHESEEKGDVEQKPESESALDMRTGLTSDDVKSQSTTSSKSENEIASFSLDPTLPSVESQHQITEGKRKNHEHMSKNHDVAQSEIRAVQLSYLYLGAMKSLSALLGCSKYAELLLIPKVLAENGHNSDCASSPVVHEDVEMRAALQFLMRHMVKRAVMRSPIKRALGLADLERAQAMIYKLVVHGLLEDQFGGKIKQEIDQQAEESDPAQQAQTPVTTSPSASSTTSFMSSSLEDTTTATTPVTDTETVPASESPGVMPLSLLRQMFSSYPTTTVLPTRRAQTPPISSLPTSPSDEVGRRQSLTSPDSQSARPANRTALSDPSSRLSTSPPPPAIAVPLLEMGFSLRQIAKAMEATGARGEADAQNITVLAMWMIEHPGHEDEEEPQSGSTADSRPGAAVLGSGGKSNDPCYLQSPGDIPSADAAEMEEGFSESPDNLDHTENAASGSGPSARGRSAVTRRHKFDLAARTLLARAAGLYRSVQAHRNQSRREGISLQQDPGALYDFNLDEELEIDLDDEAMEAMFGQDLTSDNDILGMWIPEVLDWPTWHVCESEDREEVVVCELCECSVVSFNQHMKRNHPGCGRSANRQGYRSNGSYVDGWFGGECGSGNPYYLLCGTCREKYLAMKTKSKSTSSERYKGQAPDLIGKQDSVYEEDWDMLDVDEDEKLTGEEEFELLAGPLGLNDRRIVPEPVQFPDSDPLGASVAMVTATNSMEETLMQIGCHGSVEKSSSGRITLGEQAAALANPHDRVVALRRVTAAAQVLLARTMVMRALSLLSVSGSSCSLAAGLESLGLTDIRTLVRLMCLAAAGRAGLSTSPSAMASTSERSRGGHSKANKPISCLAYLSTAVGCLASNAPSAAKLLVQLCTQNLISAATGVNLTTVDDSIQRKFLPSFLRGIAEENKLVTSPNFVVTQALVALLADKGAKLRPNYDKSEVEKKGPLELANALAACCLSSRLSSQHRQWAAQQLVRTLAAHDRDNQTTLQTLADMGGDLRKCSFIKLEAHQNRVMTCVWCNKKGLLATSGNDGTIRVWNVTKKQYSLQQTCVFNRLEGDAEESLGSPSDPSFSPVSWSISGKYLAGALEKMVNIWQVNGGKGLVDIQPHWVSALAWPEEGPATAWSGESPELLLVGRMDGSLGLIEVVDVSTMHRRELEHCYRKDVSVTCIAWFSEDRPFAVGYFDGKLLLGTKEPLEKGGIVLIDAHKDTLISMKWDPTGHILMTCAKEDSVKLWGSISGCWCCLHSLCHPSIVNGIAWCRLPGKGSKLQLLMATGCQSGLVCVWRIPQDTTQTNVTSAEGWWEQESNCQDGYRKSSGAKCVYQLRGHITPVRTVAFSSDGLALVSGGLGGLMNIWSLRDGSVLQTVVIGSGAIQTTVWIPEVGVAACSNRSKDVLVVNCTAEWAAANHVLATCRTALKQQGVLGLNMAPCMRAFLERLPMMLQEQYAYEKPHVVCGDQLVHSPYMQCLASLAVGLHLDQLLCNPPVPPHHQNCLPDPASWNPNEWAWLECFSTTIKAAEALTNGAQFPESFTVPDLEPVPEDELVFLMDNSKWINGMDEQIMSWATSRPEDWHLGGKCDVYLWGAGRHGQLAEAGRNVMVPAAAPSFSQAQQVICGQNCTFVIQANGTVLACGEGSYGRLGQGNSDDLHVLTVISALQGFVVTQLVTSCGSDGHSMALTESGEVFSWGDGDYGKLGHGNSDRQRRPRQIEALQGEEVVQMSCGFKHSAVVTSDGKLFTFGNGDYGRLGLGNTSNKKLPERVTALEGYQIGQVACGLNHTLAVSADGSMVWAFGDGDYGKLGLGNSTAKSSPQKIDVLCGIGIKKVACGTQFSVALTKDGHVYTFGQDRLIGLPEGRARNHNRPQQIPVLAGVIIEDVAVGAEHTLALASNGDVYAWGSNSEGQLGLGHTNHVREPTLVTGLQGKNVRQISAGRCHSAAWTAPPVPPRAPGVSVPLQLGLPDTVPPQYGALREVSIHTVRARLRLLYHFSDLMYSSWRLLNLSPNNQNSTSHYNAGTWGIVQGQLRPLLAPRVYTLPMVRSIGKTMVQGKNYGPQITVKRISTRGRKCKPIFVQIARQVVKLNASDLRLPSRAWKVKLVGEGADDAGGVFDDTITEMCQELETGIVDLLIPSPNATAEVGYNRDRFLFNPSACLDEHLMQFKFLGILMGVAIRTKKPLDLHLAPLVWKQLCCVPLTLEDLEEVDLLYVQTLNSILHIEDSGITEESFHEMIPLDSFVGQSADGKMVPIIPGGNSIPLTFSNRKEYVERAIEYRLHEMDRQVAAVREGMSWIVPVPLLSLLTAKQLEQMVCGMPEISVEVLKKVVRYREVDEQHQLVQWFWHTLEEFSNEERVLFMRFVSGRSRLPANTADISQRFQIMKVDRPYDSLPTSQTCFFQLRLPPYSSQLVMAERLRYAINNCRSIDMDNYMLSRNVDNAEGSDTDY

SEQ ID NO: 34885 - protein, 1088 aa, Homo sapiens
MRPKTFPATTYSGNSRQRLQEIREGLKQPSKSSVQGLPAGPNSDTSLDAKVLGSKDATRQQQQMRATPKFGPYQKALREIRYSLLPFANESGTSAAAEVNRQMLQELVNAGCDQEMAGRALKQTGSRSIEAALEYISKMGYLDPRNEQIVRVIKQTSPGKGLMPTPVTRRPSFEGTGDSFASYHQLSGTPYEGPSFGADGPTALEEMPRPYVDYLFPGVGPHGPGHQHQHPPKGYGASVEAAGAHFPLQGAHYGRPHLLVPGEPLGYGVQRSPSFQSKTPPETGGYASLPTKGQGGPPGAGLAFPPPAAGLYVPHPHHKQAGPAAHQLHVLGSRSQVFASDSPPQSLLTPSRNSLNVDLYELGSTSVQQWPAATLARRDSLQKPGLEAPPRAHVAFRPDCPVPSRTNSFNSHQPRPGPPGKAEPSLPAPNTVTAVTAAHILHPVKSVRVLRPEPQTAVGPSHPAWVPAPAPAPAPAPAPAAEGLDAKEEHALALGGAGAFPLDVEYGGPDRRCPPPPYPKHLLLRSKSEQYDLDSLCAGMEQSLRAGPNEPEGGDKSRKSAKGDKGGKDKKQIQTSPVPVRKNSRDEEKRESRIKSYSPYAFKFFMEQHVENVIKTYQQKVNRRLQLEQEMAKAGLCEAEQEQMRKILYQKESNYNRLKRAKMDKSMFVKIKTLGIGAFGEVCLACKVDTHALYAMKTLRKKDVLNRNQVAHVKAERDILAEADNEWVVKLYYSFQDKDSLYFVMDYIPGGDMMSLLIRMEVFPEHLARFYIAELTLAIESVHKMGFIHRDIKPDNILIDLDGHIKLTDFGLCTGFRWTHNSKYYQKGSHVRQDSMEPSDLWDDVSNCRCGDRLKTLEQRARKQHQRCLAHSLVGTPNYIAPEVLLRKGYTQLCDWWSVGVILFEMLVGQPPFLAPTPTETQLKVINWENTLHIPAQVKLSPEARDLITKLCCSADHRLGRNGADDLKAHPFFSAIDFSSDIRKQPAPYVPTISHPMDTSNFDPVDEESPWNDASEGSTKAWDTLTSPNNKHPEHAFYEFTFRRFFDDNGYPFRCPKPSGAEASQAESSDLESSDLVDQTEGCQPVYV

SEQ ID NO: 34886 - protein, 336 aa, Homo sapiens
MSQPSGGRAPGTRIYSWSCPTVMSPGEKLDPIPDSFILQPPVFHPVVPYVTTIFGGLHAGKMVMLQGVVPLDAHRFQVDFQCGCSLCPRPDIAFHFNPRFHTTKPHVICNTLHGGRWQREARWPHLALRRGSSFLILFLFGNEEVKVSVNGQHFLHFRYRLPLSHVDTLGIFGDILVEAVGFLNINPFVEGSREYPAGHPFLLMSPRLEVPCSHALPQGLSPGQVIIVRGLVLQEPKHFTVSLRDQAAHAPVTLRASFADRTLAWISRWGQKKLISAPFLFYPQRFFEVLLLFQEGGLKLALNGQGLGATSMNQQALEQLRELRISGSVQLYCVHS

SEQ ID NO: 34887 - protein, 275 aa, Homo sapiens
MVMLQGVVPLDAHRFQVDFQCGCSLCPRPDIAFHFNPRFHTTKPHVICNTLHGGRWQREARWPHLALRRGSSFLILFLFGNEEVKVSVNGQHFLHFRYRLPLSHVDTLGIFGDILVEAVGFLNINPFVEGSREYPAGHPFLLMSPRLEVPCSHALPQGLSPGQVIIVRGLVLQEPKHFTVSLRDQAAHAPVTLRASFADRTLAWISRWGQKKLISAPFLFYPQRFFEVLLLFQEGGLKLALNGQGLGATSMNQQALEQLRELRISGSVQLYCVHS

SEQ ID NO: 34888 - protein, 327 aa, Homo sapiens
MSQPSGGRAPGTRIYSWSCPTVMSPGEKLDPIPDSFILQPPVFHPVVPYVTTIFGGLHAGKMVMLQGVVPLDAHRFQVDFQCGCSLCPRPDIAFHFNPRFHTTKPHVICNTLHGGRWQREARWPHLALRRGSSFLILFLFGNEEVKVSVNGQHFLHFRYRLPLSHVDTLGIFGDILVEAVGFLNINPFVEGSREYPAGHEVPCSHALPQGLSPGQVIIVRGLVLQEPKHFTVSLRDQAAHAPVTLRASFADRTLAWISRWGQKKLISAPFLFYPQRFFEVLLLFQEGGLKLALNGQGLGATSMNQQALEQLRELRISGSVQLYCVHS

SEQ ID NO: 34889 - protein, 266 aa, Homo sapiens
MVMLQGVVPLDAHRFQVDFQCGCSLCPRPDIAFHFNPRFHTTKPHVICNTLHGGRWQREARWPHLALRRGSSFLILFLFGNEEVKVSVNGQHFLHFRYRLPLSHVDTLGIFGDILVEAVGFLNINPFVEGSREYPAGHEVPCSHALPQGLSPGQVIIVRGLVLQEPKHFTVSLRDQAAHAPVTLRASFADRTLAWISRWGQKKLISAPFLFYPQRFFEVLLLFQEGGLKLALNGQGLGATSMNQQALEQLRELRISGSVQLYCVHS

SEQ ID NO: 34890 - protein, 314 aa, Homo sapiens
MSPGEKLDPIPDSFILQPPVFHPVVPYVTTIFGGLHAGKMVMLQGVVPLDAHRFQVDFQCGCSLCPRPDIAFHFNPRFHTTKPHVICNTLHGGRWQREARWPHLALRRGSSFLILFLFGNEEVKVSVNGQHFLHFRYRLPLSHVDTLGIFGDILVEAVGFLNINPFVEGSREYPAGHPFLLMSPRLEVPCSHALPQGLSPGQVIIVRGLVLQEPKHFTVSLRDQAAHAPVTLRASFADRTLAWISRWGQKKLISAPFLFYPQRFFEVLLLFQEGGLKLALNGQGLGATSMNQQALEQLRELRISGSVQLYCVHS

SEQ ID NO: 34891 - protein, 315 aa, Homo sapiens
MSPGEKLDPIPDSFILQPPVFHPVVPYVTTIFGGLHAGKMVMLQGVVPLDAHSRFQVDFQCGCSLCPRPDIAFHFNPRFHTTKPHVICNTLHGGRWQREARWPHLALRRGSSFLILFLFGNEEVKVSVNGQHFLHFRYRLPLSHVDTLGIFGDILVEAVGFLNINPFVEGSREYPAGHPFLLMSPRLEVPCSHALPQGLSPGQVIIVRGLVLQEPKHFTVSLRDQAAHAPVTLRASFADRTLAWISRWGQKKLISAPFLFYPQRFFEVLLLFQEGGLKLALNGQGLGATSMNQQALEQLRELRISGSVQLYCVHS

SEQ ID NO: 34892 - protein, 337 aa, Homo sapiens
MSQPSGGRAPGTRIYSWSCPTVMSPGEKLDPIPDSFILQPPVFHPVVPYVTTIFGGLHAGKMVMLQGVVPLDAHSRFQVDFQCGCSLCPRPDIAFHFNPRFHTTKPHVICNTLHGGRWQREARWPHLALRRGSSFLILFLFGNEEVKVSVNGQHFLHFRYRLPLSHVDTLGIFGDILVEAVGFLNINPFVEGSREYPAGHPFLLMSPRLEVPCSHALPQGLSPGQVIIVRGLVLQEPKHFTVSLRDQAAHAPVTLRASFADRTLAWISRWGQKKLISAPFLFYPQRFFEVLLLFQEGGLKLALNGQGLGATSMNQQALEQLRELRISGSVQLYCVHS

SEQ ID NO: 34893 - protein, 262 aa, Homo sapiens; identical to SEQ ID NO: 277

SEQ ID NO: 34894 - protein, 233 aa, Homo sapiens
MEEAILVPCVLGLLLLPILAMLMALCVHCHRLPGSYDSTSSDSLYPRGIQFKRPHTVAPWPPAYPPVTSYPPLSQPDLLPIPRSPQPLGGSHRTPSSRRDSDGANSVASYENEEPACEDADEDEDDYHNPGYLVVLPDSTPATSTAAPSAPALSTPGIRDSAFSMESIDDYVNVPESGESAEASLDGSREYVNVSQELHPGAAKTEPAALSSQEAEEVEEEGAPDYENLQELN

SEQ ID NO: 34895 - protein, 269 aa, Homo sapiens
MEATAASWQVAVPVLGGASRPLGPRGAASLLRAPLQMEEAILVPCVLGLLLLPILAMLMALCVHCHRLPGSYDSTSSDSLYPRGIQFKRPHTVAPWPPAYPPVTSYPPLSQPDLLPIPRSPQPLGGSHRTPSSRRDSDGANSVASYENEEPACEDADEDEDDYHNPGYLVVLPDSTPATSTAAPSAPALSTPGIRDSAFSMESIDDYVNVPESGESAEASLDGSREYVNVSQELHPGAAKTEPAALSSQEAEEVEEEGAPDYENLQELN

SEQ ID NO: 34896 - protein, 232 aa, Homo sapiens
MEEAILVPCVLGLLLLPILAMLMALCVHCHRLPGSYDSTSSDSLYPRGIQFKRPHTVAPWPPAYPPVTSYPPLSQPDLLPIPSPQPLGGSHRTPSSRRDSDGANSVASYENEEPACEDADEDEDDYHNPGYLVVLPDSTPATSTAAPSAPALSTPGIRDSAFSMESIDDYVNVPESGESAEASLDGSREYVNVSQELHPGAAKTEPAALSSQEAEEVEEEGAPDYENLQELN

SEQ ID NO: 34897 - protein, 261 aa, Homo sapiens
MEEAILVPCVLGLLLLPILAMLMALCVHCHRLPGSYDSTSSDSLYPRGIQFKRPHTVAPWPPAYPPVTSYPPLSQPDLLPIPSPQPLGGSHRTPSSRRDSDGANSVASYENEGASGIRGAQAGWGVWGPSWTRLTPVSLPPEPACEDADEDEDDYHNPGYLVVLPDSTPATSTAAPSAPALSTPGIRDSAFSMESIDDYVNVPESGESAEASLDGSREYVNVSQELHPGAAKTEPAALSSQEAEEVEEEGAPDYENLQELN

SEQ ID NO: 34898 - protein, 142 aa, Homo sapiens
MSFLTVPYKLPVSLSVGSCVIIKGTLIDSSINEPQLQVDFYTEMNEDSEIAFHLRVHLGRRVVMNSREFGIWMLEENLHYVPFEDGKPFDLRIYVCLNEYEVKVNGEYIYAFVHRIPPSYVKMIQVWRDVSLDSVLVNNGRR

SEQ ID NO: 34899 - protein, 330 aa, Homo sapiens
MAFLPSWVCVLVGSFSASLAGTSNLSETEPPLWKESPGQLSDYRVENSMYIINPWVYLERMGMYKIILNQTARYFAKFAPDNEQNILWGLPLQYGWQYRTGRLADPTRRTNCGYESGDHMCISVDSWWADLNYFLSSLPFLAAVDSGVMGISSDQVRLLPPPKNERKFCYDVSSCRSSFPETMNKWNTFYQYLQSPFSKFDDLLKYLWAAHTSTLADNIKSFEDRYDYYSKAEAHFERSWVLAVDHLAAVLFPTTLIRSYKFQKGMPPRILLNTDVAPFISDFTAFQNVVLVLLNMLDNVDKSIGYLCTEKSNVYRDHSESSSRSYGNNS

SEQ ID NO: 34900 - protein, 398 aa, Homo sapiens
MDGVTPTLSTIRGRTLESSTLHVTPRSLDRNKDQITNIFSGFAGLLAILLVVAVFCILWNWNKRKKRQVPYLRVTVMPLLTLPQTRQRAKNIYDILPWRQEDLGRHESRSMRIFSTESLLSRNSESPEHVPSQAGNAFQEHTAHIHATEYAVGIYDNAMVPQMCGNLTPSAHCINVRASRDCASISSEDSHDYVNVPTAEEIAETLASTKSPSRNLFVLPSTQKLEFTEERDEGCGDAGDCTSLYSPGAEDSDSLSNGEGSSQISNDYVNMTGLDLSAIQERQLWVAFQCCRDYENVPAADPSGSQQQAEKDVPSSNIGHVEDKTDDPGTHVQCVKRTFLASGDYADFQPFTQSEDSQMKHREEMSNEDSSDYENVLTAKLGGRDSEQGPGTQLLPDE

SEQ ID NO: 34901 - protein, 322 aa, Homo sapiens
MPLLTLPQTRQRAKNIYDILPWRQEDLGRHESRSMRIFSTESLLSRNSESPEHVPSQAGNAFQEHTAHIHATEYAVGIYDNAMVPQMCGNLTPSAHCINVRASRDCASISSEDSHDYVNVPTAEEIAETLASTKSPSRNLFVLPSTQKLEFTEERDEGCGDAGDCTSLYSPGAEDSDSLSNGEGSSQISNDYVNMTGLDLSAIQERQLWVAFQCCRDYENVPAADPSGSQQQAEKDVPSSNIGHVEDKTDDPGTHVQCVKRTFLASGDYADFQPFTQSEDSQMKHREEMSNEDSSDYENVLTAKLGGRDSEQGPGTQLLPDE

SEQ ID NO: 34902 - protein, 382 aa, Homo sapiens
MRSHFLQWALATSRNKDQITNIFSGFAGLLAILLVVAVFCILWNWNKRKKRQVPYLRVTVMPLLTLPQTRQRAKNIYDILPWRQEDLGRHESRSMRIFSTESLLSRNSESPEHVPSQAGNAFQEHTAHIHATEYAVGIYDNAMVPQMCGNLTPSAHCINVRASRDCASISSEDSHDYVNVPTAEEIAETLASTKSPSRNLFVLPSTQKLEFTEERDEGCGDAGDCTSLYSPGAEDSDSLSNGEGSSQISNDYVNMTGLDLSAIQERQLWVAFQCCRDYENVPAADPSGSQQQAEKDVPSSNIGHVEDKTDDPGTHVQCVKRTFLASGDYADFQPFTQSEDSQMKHREEMSNEDSSDYENVLTAKLGGRDSEQGPGTQLLPDE

SEQ ID NO: 34903 - protein, 135 aa, Homo sapiens
MACGLVASNLNLKPGECLRVRGEVAPDAKSFVLNLGKDSNNLCLHFNPRFNAHGDANTIVCNSKDGGAWGTEQREAVFPFQPGSVAEVCITFDQANLTVKLPDGYEFKFPNRLNLEAINYMAADGDFKIKCVAFD

SEQ ID NO: 34904 - protein, 1165 aa, Homo sapiens
MICQKFCVVLLHWEFIYVITAFNLSYPITPWRFKLSCMPPNSTYDYFLLPAGLSKNTSNSNGHYETAVEPKFNSSGTHFSNLSKTTFHCCFRSEQDRNCSLCADNIEGKTFVSTVNSLVFQQIDANWNIQCWLKGDLKLFICYVESLFKNLFRNYNYKVHLLYVLPEVLEDSPLVPQKGSFQMVHCNCSVHECCECLVPVPTAKLNDTLLMCLKITSGGVIFQSPLMSVQPINMVKPDPPLGLHMEITDDGNLKISWSSPPLVPFPLQYQVKYSENSTTVIREADKIVSATSLLVDSILPGSSYEVQVRGKRLDGPGIWSDWSTPRVFTTQDVIYFPPKILTSVGSNVSFHCIYKKENKIVPSKEIVWWMNLAEKIPQSQYDVVSDHVSKVTFFNLNETKPRGKFTYDAVYCCNEHECHHRYAELYVIDVNINISCETDGYLTKMTCRWSTSTIQSLAESTLQLRYHRSSLYCSDIPSIHPISEPKDCYLQSDGFYECIFQPIFLLSGYTMWIRINHSLGSLDSPPTCVLPDSVVKPLPPSSVKAEITINIGLLKISWEKPVFPENNLQFQIRYGLSGKEVQWKMYEVYDAKSKSVSLPVPDLCAVYAVQVRCKRLDGLGYWSNWSNPAYTVVMDIKVPMRGPEFWRIINGDTMKKEKNVTLLWKPLMKNDSLCSVQRYVINHHTSCNGTWSEDVGNHTKFTFLWTEQAHTVTVLAINSIGASVANFNLTFSWPMSKVNIVQSLSAYPLNSSCVIVSWILSPSDYKLMYFIIEWKNLNEDGEIKWLRISSSVKKYYIHDHFIPIEKYQFSLYPIFMEGVGKPKIINSFTQDDIEKHQSDAGLYVIVPVIISSSILLLGTLLISHQRMKKLFWEDVPNPKNCSWAQGLNFQKPETFEHLFIKHTASVTCGPLLLEPETISEDISVDTSWKNKDEMMPTTVVSLLSTTDLEKGSVCISDQFNSVNFSEAEGTEVTYEDESQRQPFVKYATLISNSKPSETGEEQGLINSSVTKCFSSKNSPLKDSFSNSSWEIEAQAFFILSDQHPNIISPHLTFSEGLDELLKLEGNFPEENNDKKSIYYLGVTSIKKRESGVLLTDKSRVSCPFPAPCLFTDIRVLQDSCSHFVENNINLGTSSKKTFASYMPQFQTCSTQTHKIMENKMCDLTV

SEQ ID NO: 34905 - protein, 896 aa, Homo sapiens
MICQKFCVVLLHWEFIYVITAFNLSYPITPWRFKLSCMPPNSTYDYFLLPAGLSKNTSNSNGHYETAVEPKFNSSGTHFSNLSKTTFHCCFRSEQDRNCSLCADNIEGKTFVSTVNSLVFQQIDANWNIQCWLKGDLKLFICYVESLFKNLFRNYNYKVHLLYVLPEVLEDSPLVPQKGSFQMVHCNCSVHECCECLVPVPTAKLNDTLLMCLKITSGGVIFQSPLMSVQPINMVKPDPPLGLHMEITDDGNLKISWSSPPLVPFPLQYQVKYSENSTTVIREADKIVSATSLLVDSILPGSSYEVQVRGKRLDGPGIWSDWSTPRVFTTQDVIYFPPKILTSVGSNVSFHCIYKKENKIVPSKEIVWWMNLAEKIPQSQYDVVSDHVSKVTFFNLNETKPRGKFTYDAVYCCNEHECHHRYAELYVIDVNINISCETDGYLTKMTCRWSTSTIQSLAESTLQLRYHRSSLYCSDIPSIHPISEPKDCYLQSDGFYECIFQPIFLLSGYTMWIRINHSLGSLDSPPTCVLPDSVVKPLPPSSVKAEITINIGLLKISWEKPVFPENNLQFQIRYGLSGKEVQWKMYEVYDAKSKSVSLPVPDLCAVYAVQVRCKRLDGLGYWSNWSNPAYTVVMDIKVPMRGPEFWRIINGDTMKKEKNVTLLWKPLMKNDSLCSVQRYVINHHTSCNGTWSEDVGNHTKFTFLWTEQAHTVTVLAINSIGASVANFNLTFSWPMSKVNIVQSLSAYPLNSSCVIVSWILSPSDYKLMYFIIEWKNLNEDGEIKWLRISSSVKKYYIHDHFIPIEKYQFSLYPIFMEGVGKPKIINSFTQDDIEKHQSDAGLYVIVPVIISSSILLLGTLLISHQRMKKLFWEDVPNPKNCSWAQGLNFQKRTDIL

SEQ ID NO: 34906 - protein, 958 aa, Homo sapiens
MICQKFCVVLLHWEFIYVITAFNLSYPITPWRFKLSCMPPNSTYDYFLLPAGLSKNTSNSNGHYETAVEPKFNSSGTHFSNLSKTTFHCCFRSEQDRNCSLCADNIEGKTFVSTVNSLVFQQIDANWNIQCWLKGDLKLFICYVESLFKNLFRNYNYKVHLLYVLPEVLEDSPLVPQKGSFQMVHCNCSVHECCECLVPVPTAKLNDTLLMCLKITSGGVIFQSPLMSVQPINMVKPDPPLGLHMEITDDGNLKISWSSPPLVPFPLQYQVKYSENSTTVIREADKIVSATSLLVDSILPGSSYEVQVRGKRLDGPGIWSDWSTPRVFTTQDVIYFPPKILTSVGSNVSFHCIYKKENKIVPSKEIVWWMNLAEKIPQSQYDVVSDHVSKVTFFNLNETKPRGKFTYDAVYCCNEHECHHRYAELYVIDVNINISCETDGYLTKMTCRWSTSTIQSLAESTLQLRYHRSSLYCSDIPSIHPISEPKDCYLQSDGFYECIFQPIFLLSGYTMWIRINHSLGSLDSPPTCVLPDSVVKPLPPSSVKAEITINIGLLKISWEKPVFPENNLQFQIRYGLSGKEVQWKMYEVYDAKSKSVSLPVPDLCAVYAVQVRCKRLDGLGYWSNWSNPAYTVVMDIKVPMRGPEFWRIINGDTMKKEKNVTLLWKPLMKNDSLCSVQRYVINHHTSCNGTWSEDVGNHTKFTFLWTEQAHTVTVLAINSIGASVANFNLTFSWPMSKVNIVQSLSAYPLNSSCVIVSWILSPSDYKLMYFIIEWKNLNEDGEIKWLRISSSVKKYYIHDHFIPIEKYQFSLYPIFMEGVGKPKIINSFTQDDIEKHQSDAGLYVIVPVIISSSILLLGTLLISHQRMKKLFWEDVPNPKNCSWAQGLNFQKMLEGSMFVKSHHHSLISSTQGHKHCGRPQGPLHRKTRDLCSLVYLLTLPPLLSYDPAKSPSVRNTQE

SEQ ID NO: 34907 - protein, 906 aa, Homo sapiens
MICQKFCVVLLHWEFIYVITAFNLSYPITPWRFKLSCMPPNSTYDYFLLPAGLSKNTSNSNGHYETAVEPKFNSSGTHFSNLSKTTFHCCFRSEQDRNCSLCADNIEGKTFVSTVNSLVFQQIDANWNIQCWLKGDLKLFICYVESLFKNLFRNYNYKVHLLYVLPEVLEDSPLVPQKGSFQMVHCNCSVHECCECLVPVPTAKLNDTLLMCLKITSGGVIFQSPLMSVQPINMVKPDPPLGLHMEITDDGNLKISWSSPPLVPFPLQYQVKYSENSTTVIREADKIVSATSLLVDSILPGSSYEVQVRGKRLDGPGIWSDWSTPRVFTTQDVIYFPPKILTSVGSNVSFHCIYKKENKIVPSKEIVWWMNLAEKIPQSQYDVVSDHVSKVTFFNLNETKPRGKFTYDAVYCCNEHECHHRYAELYVIDVNINISCETDGYLTKMTCRWSTSTIQSLAESTLQLRYHRSSLYCSDIPSIHPISEPKDCYLQSDGFYECIFQPIFLLSGYTMWIRINHSLGSLDSPPTCVLPDSVVKPLPPSSVKAEITINIGLLKISWEKPVFPENNLQFQIRYGLSGKEVQWKMYEVYDAKSKSVSLPVPDLCAVYAVQVRCKRLDGLGYWSNWSNPAYTVVMDIKVPMRGPEFWRIINGDTMKKEKNVTLLWKPLMKNDSLCSVQRYVINHHTSCNGTWSEDVGNHTKFTFLWTEQAHTVTVLAINSIGASVANFNLTFSWPMSKVNIVQSLSAYPLNSSCVIVSWILSPSDYKLMYFIIEWKNLNEDGEIKWLRISSSVKKYYIHDHFIPIEKYQFSLYPIFMEGVGKPKIINSFTQDDIEKHQSDAGLYVIVPVIISSSILLLGTLLISHQRMKKLFWEDVPNPKNCSWAQGLNFQKKMPGTKELLGGGWLT

SEQ ID NO: 34908 - protein, 839 aa, Homo sapiens
MICQKFCVVLLHWEFIYVITAFNLSYPITPWRFKLSCMPPNSTYDYFLLPAGLSKNTSNSNGHYETAVEPKFNSSGTHFSNLSKTTFHCCFRSEQDRNCSLCADNIEGKTFVSTVNSLVFQQIDANWNIQCWLKGDLKLFICYVESLFKNLFRNYNYKVHLLYVLPEVLEDSPLVPQKGSFQMVHCNCSVHECCECLVPVPTAKLNDTLLMCLKITSGGVIFQSPLMSVQPINMVKPDPPLGLHMEITDDGNLKISWSSPPLVPFPLQYQVKYSENSTTVIREADKIVSATSLLVDSILPGSSYEVQVRGKRLDGPGIWSDWSTPRVFTTQDVIYFPPKILTSVGSNVSFHCIYKKENKIVPSKEIVWWMNLAEKIPQSQYDVVSDHVSKVTFFNLNETKPRGKFTYDAVYCCNEHECHHRYAELYVIDVNINISCETDGYLTKMTCRWSTSTIQSLAESTLQLRYHRSSLYCSDIPSIHPISEPKDCYLQSDGFYECIFQPIFLLSGYTMWIRINHSLGSLDSPPTCVLPDSVVKPLPPSSVKAEITINIGLLKISWEKPVFPENNLQFQIRYGLSGKEVQWKMYEVYDAKSKSVSLPVPDLCAVYAVQVRCKRLDGLGYWSNWSNPAYTVVMDIKVPMRGPEFWRIINGDTMKKEKNVTLLWKPLMKNDSLCSVQRYVINHHTSCNGTWSEDVGNHTKFTFLWTEQAHTVTVLAINSIGASVANFNLTFSWPMSKVNIVQSLSAYPLNSSCVIVSWILSPSDYKLMYFIIEWKNLNEDGEIKWLRISSSVKKYYIHDHFIPIEKYQFSLYPIFMEGVGKPKIINSFTQDDIEKHQSD

SEQ ID NO: 34909 - protein, 323 aa, Homo sapiens
MAYVPAPGYQPTYNPTLPYYQPIPGGLNVGMSVYIQGVASEHMKRFFVNFVVGQDPGSDVAFHFNPRFDGWDKVVFNTLQGGKWGSEERKRSMPFKKGAAFELVFIVLAEHYKVVVNGNPFYEYGHRLPLQMVTHLQVDGDLQLQSINFIGGQPLRPQGPPMMPPYPGPGHCHQQLNSLPTMEGPPTFNPPVPYFGRLQGGLTARRTIIIKGYVPPTGKSFAINFKVGSSGDIALHINPRMGNGTVVRNSLLNGSWGSEEKKITHNPFGPGQFFDLSIRCGLDRFKVYANGQHLFDFAHRLSAFQRVDTLEIQGDVTLSYVQI

SEQ ID NO: 34910 - protein, 78 aa, Homo sapiens
MRPCIWIHVHLKPPCRLVELLPFSSALQGLSHLSLGTTLPVILPERNEEQNLQELSHNADKYQMGDCCKEEIDDSIFY

SEQ ID NO: 34911 - protein, 136 aa, Homo sapiens
MSNVPHKSSLPEGIRPGTVLRIRGLVPPNASRFHVNLLCGEEQGSDAALHFNPRLDTSEVVFNSKEQGSWGREERGPGVPFQRGQPFEVLIIASDDGFKAVVGDAQYHHFRHRLPLARVRLVEVGGDVQLDSVRIF

SEQ ID NO: 34912 - protein, 356 aa, Homo sapiens
MAFSGCQAPYLSPAVPFSGTIQGGLQDGFQITVNGAVLSCSGTRFAVDFQTGFSGNDIAFHFNPRFEDGGYVVCNTRQKGTWGPEERKMHMPFQKGMPFDLCFLVQSSDFKVMVNGSLFVQYFHRVPFHRVDTISVNGSVQLSYISFQNPRAVPVQPAFSTVPFSQPVCFPPRPRGRRQKPPSVRPANPAPITQTVIHTVQSASGQMFSQTPAIPPMMYPHPAYPMPFITTIPGGLYPSKSIILSGTVLPSAQRFHINLCSGSHIAFHMNPRFDENAVVRNTQINNSWGSEERSLPRKMPFVRGQSFSVWILCEAHCLKVAVDGQHVFEYYHRLRNLPTINKLEVGGDIQLTHVQT

SEQ ID NO: 34913 - protein, 304 aa, Homo sapiens
MKRAHPEYSSSDSELDETIEVEKESADENGNLSSALGSMSPTTSSQILARKRRRGIIEKRRRDRINNSLSELRRLVPSAFEKQGSAKLEKAEILQMTVDHLKMLHTAGGKGYFDAHALAMDYRSLGFRECLAEVARYLSIIEGLDASDPLRVRLVSHLNNYASQREAASGAHAGLGHIPWGTVFGHHPHIAHPLLLPQNGHGNAGTTASPTEPHHQGRLGSAHPEAPALRAPPSGSLGPVLPVVTSASKLSPPLLSSVASLSAFPFSFGSFHLLSPNALSPSAPTQAANLGKPYRPWGTEIGAF

SEQ ID NO: 34914 - protein, 308 aa, Homo sapiens
MKRAHPEYSSSDSELDETIEVEKESADENGNLSSALGSMSPTTSSQILARKRRRGIIEKRRRDRINNSLSELRRLVPSAFEKQVMEQGSAKLEKAEILQMTVDHLKMLHTAGGKGYFDAHALAMDYRSLGFRECLAEVARYLSIIEGLDASDPLRVRLVSHLNNYASQREAASGAHAGLGHIPWGTVFGHHPHIAHPLLLPQNGHGNAGTTASPTEPHHQGRLGSAHPEAPALRAPPSGSLGPVLPVVTSASKLSPPLLSSVASLSAFPFSFGSFHLLSPNALSPSAPTQAANLGKPYRPWGTEIGAF

SEQ ID NO: 34915 - protein, 347 aa, Homo sapiens
MLHTTQLYQHVPETRWPIVYSPRYNITFMGLEKLHPFDAGKWGKVINFLKEEKLLSDSMLVEAREASEEDLLVVHTRRYLNELKWSFAVATITEIPPVIFLPNFLVQRKVLRPLRTQTGGTIMAGKLAVERGWAINVGGGFHHCSSDRGGGFCAYADITLAIKFLFERVEGISRATIIDLDAHQGNGHERDFMDDKRVYIMDVYNRHIYPGDRFAKQAIRRKVELEWGTEDDEYLDKVERNIKKSLQEHLPDVVVYNAGTDILEGDRLGGLSISPAGIVKRDELVFRMVRGRRVPILMVTSGGYQKRTARIIADSILNLFGLGLIGPESPSVSAQNSDTPLLPPAVP

SEQ ID NO: 34916 - protein, 296 aa, Homo sapiens
MGLEKLHPFDAGKWGKVINFLKEEKLLSDSMLVEAREASEEDLLVVHTRRYLNELKRKVLRPLRTQTGGTIMAGKLAVERGWAINVGGGFHHCSSDRGGGFCAYADITLAIKFLFERVEGISRATIIDLDAHQGNGHERDFMDDKRVYIMDVYNRHIYPGDRFAKQAIRRKVELEWGTEDDEYLDKVERNIKKSLQEHLPDVVVYNAGTDILEGDRLGGLSISPAGIVKRDELVFRMVRGRRVPILMVTSGGYQKRTARIIADSILNLFGLGLIGPESPSVSAQNSDTPLLPPAVP

SEQ ID NO: 34917 - protein, 228 aa, Homo sapiens
MAAPPQPVTHLIFDMDGLLLDTERLYSVVFQEICNRYDKKYSWDVKSLVMGKKALEAAQIIIDVLQLPMSKEELVEESQTKLKEVFPTAALMPGAEKLIIHLRKHGIPFALATSSGSASFDMKTSRHKEFFSLFSHIVLGDDPEVQHGKPDPDIFLACAKRFSPPPAMEKCLVFEDAPNGVEAALAAGMQVVMVPDGNLSRDLTTKATLVLNSLQDFQPELFGLPSYE

SEQ ID NO: 34918 - protein, 185 aa, Homo sapiens
MAAPPQPVTHLIFDMDGLLLDTERLYSVVFQEICNRYDKKYSWDVKSLVMGAEKLIIHLRKHGIPFALATSSGSASFDMKTSRHKEFFSLFSHIVLGDDPEVQHGKPDPDIFLACAKRFSPPPAMEKCLVFEDAPNGVEAALAAGMQVVMVPDGNLSRDLTTKATLVLNSLQDFQPELFGLPSYE

SEQ ID NO: 34919 - protein, 208 aa, Homo sapiens
MAAPPQPVTHLIFDMDGLLLDTERLYSVVFQEICNRYDKKYSWDVKSLVMGKKALEAAQIIIDVLQLPMSKEELVEESQTKLKEVFPTAALMPGAEKLIIHLRKHGIPFALATSSGSASFDMKTSRHKEFFSLFSHIVLGDDPEVQHGKPDPDIFLACAKRFSPPPAMEKSSIHRPRLLTAQKCQGCRDPFSALLLLCNQLLLCSDDT

SEQ ID NO: 34920 - protein, 251 aa, Homo sapiens
MAAPPQPVTHLIFDMDGLLLGYTGSIVAAASGESSRGLQSRWTDTERLYSVVFQEICNRYDKKYSWDVKSLVMGKKALEAAQIIIDVLQLPMSKEELVEESQTKLKEVFPTAALMPGAEKLIIHLRKHGIPFALATSSGSASFDMKTSRHKEFFSLFSHIVLGDDPEVQHGKPDPDIFLACAKRFSPPPAMEKCLVFEDAPNGVEAALAAGMQVVMVPDGNLSRDLTTKATLVLNSLQDFQPELFGLPSYE

SEQ ID NO: 34921 - protein, 690 aa, Homo sapiens
MNLRSVFTVEQQRILQRYYENGMTNQSKNCFQLILQCAQETKLDFSVVRTWVGNKRRKMSSKNSESGTATTGTSLSAPDITVRNVVNIARPSSQQSSWTSANNDVIVTGIYSPASSSSRQGTNKHTDTQITEAHKIPIQKTATKNDTEFQLHIPVQRQVAHCKNASLLLGEKTIILSRQTSVLNAGNSVFNHAKKNYGNSSVQASEMTVPQKPSVCHRPCKIEPVGIQRSYKPEHTGPALHNLCGQKPTIRDPYCRTQNLEIREVFSLAVSDYPQRILGGNAPQKPSSAEGNCLSIAMETGDAEDEYAREEELASMRAQIPSYSRFYESGSSLRAENQSTTLPGPGRNMPNSQMVNIRDMSDNVLYQNRNYHLTPRTSLHTASSTMYSNTNPLRSNFSPHFASSNQLRLSQNQNNYQISGNLTVPWITGCSRKRALQDRTQFSDRDLATLKKYWDNGMTSLGSVCREKIEAVATELNVDCEIVRTWIGNRRRKYRLMGIEVPPPRGGPADFSEQPESGSLSALTPGEEAGPEVGEDNDRNDEVSICLSEGSSQEEPNEVVPNDARAHKEEDHHAVTTDNVKIEIIDDEESDMISNSEVEQVNSFLDYKNEEVKFIENELEIQKQKYFKLQTFVRSLILAMKADDKEQQQALLSDLPPELEEMDFNHASLEPDDTSFSVSSLSEKNVSESL

SEQ ID NO: 34922 - protein, 632 aa, Homo sapiens
MSSKNSESGTATTGTSLSAPDITVRNVVNIARPSSQQSSWTSANNDVIVTGIYSPASSSSRQGTNKHTDTQITEAHKIPIQKTATKNDTEFQLHIPVQRQVAHCKNASLLLGEKTIILSRQTSVLNAGNSVFNHAKKNYGNSSVQASEMTVPQKPSVCHRPCKIEPVGIQRSYKPEHTGPALHNLCGQKPTIRDPYCRTQNLEIREVFSLAVSDYPQRILGGNAPQKPSSAEGNCLSIAMETGDAEDEYAREEELASMRAQIPSYSRFYESGSSLRAENQSTTLPGPGRNMPNSQMVNIRDMSDNVLYQNRNYHLTPRTSLHTASSTMYSNTNPLRSNFSPHFASSNQLRLSQNQNNYQISGNLTVPWITGCSRKRALQDRTQFSDRDLATLKKYWDNGMTSLGSVCREKIEAVATELNVDCEIVRTWIGNRRRKYRLMGIEVPPPRGGPADFSEQPESGSLSALTPGEEAGPEVGEDNDRNDEVSICLSEGSSQEEPNEVVPNDARAHKEEDHHAVTTDNVKIEIIDDEESDMISNSEVEQVNSFLDYKNEEVKFIENELEIQKQKYFKLQTFVRSLILAMKADDKEQQQALLSDLPPELEEMDFNHASLEPDDTSFSVSSLSEKNVSESL

SEQ ID NO: 34923 - protein, 348 aa, Homo sapiens
MSDLGAVISLLLWGRQLFALYSGNDVTDISDDRFPKPPEIANGYVEHLFRYQCKNYYRLRTEGDGVYTLNDKKQWINKAVGDKLPECEAVCGKPKNPANPVQRILGGHLDAKGSFPWQAKMVSHHNLTTGATLINEQWLLTTAKNLFLNHSENATAKDIAPTLTLYVGKKQLVEIEKVVLHPNYHQVDIGLIKLKQKVLVNERVMPICLPSKNYAEVGRVGYVSGWGQSDNFKLTDHLKYVMLPVADQYDCITHYEGSTCPKWKAPKSPVGVQPILNEHTFCVGMSKYQEDTCYGDAGSAFAVHDLEEDTWYAAGILSFDKSCAVAEYGVYVKVTSIQHWVQKTIAEN

SEQ ID NO: 34924 - protein, 385 aa, Homo sapiens
MHVCVCVCVCVYMPVCVDACMCCEAGRPAFRSFLFSLCSDLGAVISLLLWGRQLFALYSGNDVTDISDDRFPKPPEIANGYVEHLFRYQCKNYYRLRTEGDGVYTLNDKKQWINKAVGDKLPECEAVCGKPKNPANPVQRILGGHLDAKGSFPWQAKMVSHHNLTTGATLINEQWLLTTAKNLFLNHSENATAKDIAPTLTLYVGKKQLVEIEKVVLHPNYHQVDIGLIKLKQKVLVNERVMPICLPSKNYAEVGRVGYVSGWGQSDNFKLTDHLKYVMLPVADQYDCITHYEGSTCPKWKAPKSPVGVQPILNEHTFCVGMSKYQEDTCYGDAGSAFAVHDLEEDTWYAAGILSFDKSCAVAEYGVYVKVTSIQHWVQKTIAEN

SEQ ID NO: 34925 - protein, 449 aa, Homo sapiens
MMLGTEGGEGFVVKVRGLPWSCSADEVQRFFSDCKIQNGAQGIRFIYTREGRPSGEAFVELESEDEVKLALKKDRETMGHRYVEVFKSNNVEMDWVLKHTGPNSPDTANDGFVRLRGLPFGCSKEEIVQFFSGLEIVPNGITLPVDFQGRSTGEAFVQFASQEIAEKALKKHKERIGHRYIEIFKSSRAEVRTHYDPPRKLMAMQRPGPYDRPGAGRGYNSIGRGAGFERMRRGAYGGGYGGYDDYNGYNDGYGFGSDRFGRDLNYCFSGMSDHRYGDGGSTFQSTTGHCVHMRGLPYRATENDIYNFFSPLNPVRVHIEIGPDGRVTGEADVEFATHEDAVAAMSKDKANMQHRYVELFLNSTAGASGGAYEHRYVELFLNSTAGASGGAYGSQMMGGMGLSNQSSYGGPASQQLSGGYGGGYGGQSSMSGYDQVLQENSSDFQSNIA

SEQ ID NO: 34926 - protein, 420 aa, Homo sapiens
MLSSFPVVLLETMSHYTDEPRFTIEQIDLLQRLRRTGMTKHEILHALETLDRLDQEHSDKFGRRSSYGGSSYGNSTNNVPASSSTATASTQTQHSGMSPSPSNSYDTSPQPCTTNQNGRENNERLSTSNGKMSPTRYHANSMGQRSYSFEASEEDLDVDDKVEELMRRDSSVIKEEIKAFLANRRISQAVVAQVTGISQSRISHWLLQQGSDLSEQKKRAFYRWYQLEKTNPGATLSMRPAPIPIEDPEWRQTPPPVSATSGTFRLRRGSRFTWRKECLAVMESYFNENQYPDEAKREEIANACNAVIQKPGKKLSDLERVTSLKVYNWFANRRKEIKRRANIEAAILESHGIDVQSPGGHSNSDDVDGNDYSEQDDSTSHSDHQDPISLAVEMAAVNHTILALARQGANEIKTEALDDD

SEQ ID NO: 34927 - protein, 405 aa, Homo sapiens
MLSSFPVVLLETMSHYTDEPRFTIEQIDLLQRLRRTGMTKHEILHALETLDRLDQEHSDKFGRRSSYGGSSYGNSTNNVPASSSTATASTQTQHSGMSPSPSNSYDTSPQPCTTNQNGRENNERLSTSNGKMSPTRYHANSMGQRSYSFEASEEDLDVDDKVEELMRRDSSVIKEEIKAFLANRRISQAVVAQVTGISQSRISHWLLQQGSDLSEQKKRAFYRWYQLEKTNPGATLSMRPAPIPIEDPEWRQTPPPVSATSGTFRLRRGSRFTWRKECLAVMESYFNENQYPDEAKREEIANACNAVIQKPGKKLSDLERVTSLKVYNWFANRRKEIKRRANIAAILESHGIDVQSPGGHSNSDDVDGNDYSEQDTWQVRNGEEEEGRSSEGGREAEKVEEERRI

SEQ ID NO: 34928 - protein, 418 aa, Homo sapiens
MLSSFPVVLLETMSHYTDEPRFTIEQIDLLQRLRRTGMTKHEILHALETLDRLDQEHSDKFGRRSSYGGSSYGNSTNNVPASSSTATASTQTQHSGMSPSPSNSYDTSPQPCTTNQNGRENNERLSTSNGKMSPTRYHANSMGQRSYSFEASEEDLDVDDKVEELMRRDSSVIKEEIKAFLANRRISQAVVAQVTGISQSRISHWLLQQGSDLSEQKKRAFYRWYQLEKTNPGATLSMRPAPIPIEDPEWRQTPPPVSATSGTFRLRRGSRFTWRKECLAVMESYFNENQYPDEAKREEIANACNAVIQKPGKKLSDLERVTSLKVYNWFANRRKEIKRRANIAILESHGIDVQSPGGHSNSDDVDGNDYSEQDDSTSHSDHQDPISLAVEMAAVNHTILALARQGANEIKTEALDDD

SEQ ID NO: 34929 - protein, 304 aa, Homo sapiens
MLSSFPVVLLETMSHYTDEPRFTIEQIDLLQRLRRTGMTKHEILHALETLDRLDQEHSDKFGRRSSYGGSSYGNSTNNVPASSSTATASTQTQHSGMSPSPSNSYDTSPQPCTTNQNGRENNERLSTSNGKMSPTRYHANSMGQRSYSFEASEEDLDVDDKVEELMRRDSSVIKEEIKAFLANRRISQAVVAQVTGISQSRISHWLLQQGSDLSEQKKRAFYRWYQLEKTNPGATLSMRPAPIPIEDPEWRQTPPPVSATSGTFRLRRGSRFTWRKECLAVMERNTWSPERRMEENKWKLLSAG

SEQ ID NO: 34930 - protein, 443 aa, Homo sapiens
MLSSFPVVLLETMSHYTDEPRFTIEQIDLLQRLRRTGMTKHEILHALETLDRLDQEHSDKFGRRSSYGGSSYGNSTNNVPASSSTATASTQTQHSGMSPSPSNSYDTSPQPCTTNQNGRENNERLSTSNGKMSPTRYHANSMGQRSYSFEASEEDLDVDDKVEELMRRDSSVIKEEIKAFLANRRISQAVVAQVTGISQSRISHWLLQQGSDLSEQKKRAFYRWYQLEKTNPGATLSMRPAPIPIEDPEWRQTPPPVSATSGTFRLRRGSRFTWRKECLAVMESYFNENQYPDEAKREEIANACNAVIQKPGKKLSDLERVTSLKVYNWFANRRKEIKRRANIAAILESHGIDVQSPGGHSNSDDVDGNDYSEQDTWQVRNGEEEEGRSSEGGREAEKDDSTSHSDHQDPISLAVEMAAVNHTILALARQGANEIKTEALDDD

SEQ ID NO: 34931 - protein, 182 aa, Homo sapiens
MSGRSVPHAHPATAEYEFANPSRLGEQRFGEGLLPEEILTPTLYHGYYVRPRAAPAGEGSRAGASELRLSEGKFQAFLDVSHFTPDEVTVRTVDNLLEVSARHPQRLDRHGFVSREFCRTYVLPADVDPWRVRAALSHDGILNLEAPRGGRHLDTEVNEVYISLLPAPPDPEEEEEAAIVEP

SEQ ID NO: 34932 - protein, 463 aa, Homo sapiens
METEQPEETFPNTETNGEFGKRPAEDMEEEQAFKRSRNTDEMVELRILLQSKNAGAVIGKGGKNIKALRTDYNASVSVPDSSGPERILSISADIETIGEILKKIIPTLEEGLQLPSPTATSQLPLESDAVECLNYQHYKGSDFDCELRLLIHQSLAGGIIGVKGAKIKELRENTQTTIKLFQECCPHSTDRVVLIGGKPDRVVECIKIILDLISESPIKGRAQPYDPNFYDETYDYGGFTMMFDDRRGRPVGFPMRGRGGFDRMPPGRGGRPMPPSRRDYDDMSPRRGPPPPPPGRGGRGGSRARNLPLPPPPPPRGGDLMAYDRRGRPGDRYDGMVGFSADETWDSAIDTWSPSEWQMAYEPQGGSGYDYSYAGGRGSYGDLGGPIITTQVTIPKDLAGSIIGKGGQRIKQIRHESGASIKIDEPLEGSEDRIITITGTQDQIQNAQYLLQNSVKQYSGKFF

SEQ ID NO: 34933 - protein, 464 aa, Homo sapiens
METEQPEETFPNTETNGEFGKRPAEDMEEEQAFKRSRNTDEMVELRILLQSKNAGAVIGKGGKNIKALRTDYNASVSVPDSSGPERILSISADIETIGEILKKIIPTLEEGLQLPSPTATSQLPLESDAVECLNYQHYKGSDFDCELRLLIHQSLAGGIIGVKGAKIKELRENTQTTIKLFQECCPHSTDRVVLIGGKPDRVVECIKIILDLISESPIKGRAQPYDPNFYDETYDYGGFTMMFDDRRGRPVGFPMRGRGGFDRMPPGRGGRPMPPSRRDYDDMSPRRGPPPPPPGRGGRGGSRARNLPLPPPPPPRGGDLMAYDRRGRPGDRYDGMVGFSADETWDSAIDTWSPSEWQMAYEPQGGSGYDYSYAGGRGSYGDLGGPIITTQVTIPKDLAGSIIGKGGQRIKQIRHESGASIKIDEPLEGSEDRIITITGTQDQIQNAQYLLQNSVKQYADVEGF

SEQ ID NO: 34934 - protein, 440 aa, Homo sapiens
METEQPEETFPNTETNGEFGKRPAEDMEEEQAFKRSRNTDEMVELRILLQSKNAGAVIGKGGKNIKALRTDYNASVSVPDSSGPERILSISADIETIGEILKKIIPTLEEYQHYKGSDFDCELRLLIHQSLAGGIIGVKGAKIKELRENTQTTIKLFQECCPHSTDRVVLIGGKPDRVVECIKIILDLISESPIKGRAQPYDPNFYDETYDYGGFTMMFDDRRGRPVGFPMRGRGGFDRMPPGRGGRPMPPSRRDYDDMSPRRGPPPPPPGRGGRGGSRARNLPLPPPPPPRGGDLMAYDRRGRPGDRYDGMVGFSADETWDSAIDTWSPSEWQMAYEPQGGSGYDYSYAGGRGSYGDLGGPIITTQVTIPKDLAGSIIGKGGQRIKQIRHESGASIKIDEPLEGSEDRIITITGTQDQIQNAQYLLQNSVKQYADVEGF

SEQ ID NO: 34935 - protein, 592 aa, Homo sapiens
MRVLCAFPEAMPSSNSRPPACLAPGALYLALLLHLSLSSQAGDRRPLPVDRAAGLKEKTLILLDVSTKNPVRTVNENFLSLQLDPSIIHDGWLDFLSSKRLVTLARGLSPAFLRFGGKRTDFLQFQNLRNPAKSRGGPGPDYYLKNYEDDIVRSDVALDKQKGCKIAQHPDVMLELQREKAAQMHLVLLKEQFSNTYSNLILTARSLDKLYNFADCSGLHLIFALNALRRNPNNSWNSSSALSLLKYSASKKYNISWELGNEPNNYRTMHGRAVNGSQLGKDYIQLKSLLQPIRIYSRASLYGPNIGRPRKNVIALLDGFMKVAGSTVDAVTWQHCYIDGRVVKVMDFLKTRLLDTLSDQIRKIQKVVNTYTPGKKIWLEGVVTTSAGGTNNLSDSYAAGFLWLNTLGMLANQGIDVVIRHSFFDHGYNHLVDQNFNPLPDYWLSLLYKRLIGPKVLAVHVAGLQRKPRPGRVIRDKLRIYAHCTNHHNHNYVRGSITLFIINLHRSRKKIKLAGTLRDKLVHQYLLQPYGQEGLKSKSVQLNGQPLVMVDDGTLPELKPRPLRAGRTLVIPPVTMGFYVVKNVNALACRYR

SEQ ID NO: 34936 - protein, 548 aa, Homo sapiens
MRVLCAFPEAMPSSNSRPPACLAPGALYLALLLHLSLSSQAGDRRPLPVDRAAGLKEKTLILLDVSTKNPVRTVNENFLSLQLDPSIIHDGWLDFLSSKRLVTLARGLSPAFLRFGGKRTDFLQFQNLRNPAKSRGGPGPDYYLKNYEDDIVRSDVALDKQKGCKIAQHPDVMLELQREKAAQMHLVLLKEQFSNTYSNLILTARSLDKLYNFADCSGLHLIFALNALRRNPNNSWNSSSALSLLKYSASKKYNISWELGNEPNNYRTMHGRAVNGSQLGKDYIQLKSLLQPIRIYSRASLYGPNIGRPRKNVIALLDGFMKVAGSTVDAVTWQHCYIDGRVVKVMDFLKTRLLDTLSDQIRKIQKVVNTYTPGKKIWLEGVVTTSAGGTNNLSDSYAAGFLWLNTLGMLANQGIDVVIRHSFFDHGYNHLVDQNFNPLPDYWLSLLYKRLIGPKVLAVHVAGLQRKPRPGRVIRDKLRIYAHCTNHHNHNYVRGSITLFIINLHRSRKKIKLAGTLRDKLVHQYLLQPYGQEGLKSKTQRCQYCGII

SEQ ID NO: 34937 - protein, 534 aa, Homo sapiens
MRVLCAFPEAMPSSNSRPPACLAPGALYLALLLHLSLSSQAGDRRPLPVDRAAGLKEKTLILLDVSTKNPVRTVNENFLSLQLDPSIIHDGWLDFLSSKRLVTLARGLSPAFLRFGGKRTDFLQFQNLRNPAKSRGGPGPDYYLKNYEDDIVRSDVALDKQKGCKIAQHPDVMLELQREKAAQMHLVLLKEQFSNTYSNLILTEPNNYRTMHGRAVNGSQLGKDYIQLKSLLQPIRIYSRASLYGPNIGRPRKNVIALLDGFMKVAGSTVDAVTWQHCYIDGRVVKVMDFLKTRLLDTLSDQIRKIQKVVNTYTPGKKIWLEGVVTTSAGGTNNLSDSYAAGFLWLNTLGMLANQGIDVVIRHSFFDHGYNHLVDQNFNPLPDYWLSLLYKRLIGPKVLAVHVAGLQRKPRPGRVIRDKLRIYAHCTNHHNHNYVRGSITLFIINLHRSRKKIKLAGTLRDKLVHQYLLQPYGQEGLKSKSVQLNGQPLVMVDDGTLPELKPRPLRAGRTLVIPPVTMGFYVVKNVNALACRYR

SEQ ID NO: 34938 - protein, 480 aa, Homo sapiens
MRVLCAFPEAMPSSNSRPPACLAPGALYLALLLHLSLSSQAGDRRPLPVDRAAGLKEKTLILLDVSTKNPVRTVNENFLSLQLDPSIIHDGWLDFLSSKRLVTLARGLSPAFLRFGGKRTDFLQFQNLRNPAKSRGGPGPDYYLKNYEDEPNNYRTMHGRAVNGSQLGKDYIQLKSLLQPIRIYSRASLYGPNIGRPRKNVIALLDGFMKVAGSTVDAVTWQHCYIDGRVVKVMDFLKTRLLDTLSDQIRKIQKVVNTYTPGKKIWLEGVVTTSAGGTNNLSDSYAAGFLWLNTLGMLANQGIDVVIRHSFFDHGYNHLVDQNFNPLPDYWLSLLYKRLIGPKVLAVHVAGLQRKPRPGRVIRDKLRIYAHCTNHHNHNYVRGSITLFIINLHRSRKKIKLAGTLRDKLVHQYLLQPYGQEGLKSKSVQLNGQPLVMVDDGTLPELKPRPLRAGRTLVIPPVTMGFYVVKNVNALACRYR

SEQ ID NO: 34939 - protein, 170 aa, Homo sapiens
MSHRTSSTFRAERSFHSSSSSSSSSTSSSASRALPAQDPPMEKALSMFSDDFGSFMRPHSEPLAFPARPGGAGNIKTLGDAYEFAVDVRDFSPEDIIVTTSNNHIEVRAEKLAADGTVMNTFAHKCQLPEDVDPTSVTSALREDGSLTIRARRHPHTEHVQQTFRTEIKI

SEQ ID NO: 34940 - protein, 175 aa, Homo sapiens
MSHRTSSTFRAERSFHSSSSSSSSSTSSSASRALPAQDPPMEKALSMFSDDFGSFMRPHSEPLAFPAAHPTARPGGAGNIKTLGDAYEFAVDVRDFSPEDIIVTTSNNHIEVRAEKLAADGTVMNTFAHKCQLPEDVDPTSVTSALREDGSLTIRARRHPHTEHVQQTFRTEIKI

SEQ ID NO: 34941 - protein, 68 aa, Homo sapiens
MSHRTSSTFRAERSFHSSSSSSSSSTSSSASRALPAQDPPMEKALSMFSDDFGSFMRPHSEPLAFPAK

SEQ ID NO: 34942 - protein, 159 aa, Homo sapiens
MQRVGNTFSNESRVASRCPSVGLAERNRVATMPVRLLRDSPAAQEDNDHARDGFQMKLDAHGFAPEELVVQVDGQWLMVTGQQQLDVRDPERVSYRMSQKVHRKMLPSNLSPTAMTCCLTPSGQLWVRGQCVALALPEAQTGPSPRLGSLGSKASNLTR

SEQ ID NO: 34943 - protein, 146 aa, Homo sapiens
MAPSRLQLGLRAAYSGISSVAGFSIFLVWTVVYRQPGTAAMGGLAGVLALWVLVTHVMYMQDYWRTWLKGLRGFFFVGVLFSAVSIAAFCTFLVLAITRHQSLTDPTSYYLSSVWSFISFKWAFLLSLYAHRYRADFADISILSDF

SEQ ID NO: 34944 - protein, 89 aa, Homo sapiens
MYMQDYWRTWLKGLRGFFFVGVLFSAVSIAAFCTFLVLAITRHQSLTDPTSYYLSSVWSFISFKWAFLLSLYAHRYRADFADISILSDF

SEQ ID NO: 34945 - protein, 5635 aa, Homo sapiens
MISWEVVHTVFLFALLYSSLAQDASPQSEIRAEEIPEGASTLAFVFDVTGSMYDDLVQVIEGASKILETSLKRPKRPLFNFALVPFHDPEIGPVTITTDPKKFQYELRELYVQGGGDCPEMSIGAIKIALEISLPGSFIYVFTDARSKDYRLTHEVLQLIQQKQSQVVFVLTGDCDDRTHIGYKVYEEIASTSSGQVFHLDKKQVNEVLKWVEEAVQASKVHLLSTDHLEQAVNTWRIPFDPSLKEVTVSLSGPSPMIEIRNPLGKLIKKGFGLHELLNIHNSAKVVNVKEPEAGMWTVKTSSSGRHSVRITGLSTIDFRAGFSRKPTLDFKKTVSRPVQGIPTYVLLNTSGISTPARIDLLELLSISGSSLKTIPVKYYPHRKPYGIWNISDFVPPNEAFFLKVTGYDKDDYLFQRVSSVSFSSIVPDAPKVTMPEKTPGYYLQPGQIPCSVDSLLPFTLSFVRNGVTLGVDQYLKESASVNLDIAKVTLSDEGFYECIAVSSAGTGRAQTFFDVSEPPPVIQVPNNVTVTPGERAVLTCLIISAVDYNLTWQRNDRDVRLAEPARIRTLANLSLELKSVKFNDAGEYHCMVSSEGGSSAASVFLTVQEPPKVTVMPKNQSFTGGSEVSIMCSATGYPKPKIAWTVNDMFIVGSHRYRMTSDGTLFIKNAAPKDAGIYGCLASNSAGTDKQNSTLRYIEAPKLMVVQSELLVALGDITVMECKTSGIPPPQVKWFKGDLELRPSTFLIIDPLLGLLKIQETQDLDAGDYTCVAINEAGRATGKITLDVGSPPVFIQEPADVSMEIGSNVTLPCYVQGYPEPTIKWRRLDNMPIFSRPFSVSSISQLRTGALFILNLWASDKGTYICEAENQFGKIQSETTVTVTGLVAPLIGISPSVANVIEGQQLTLPCTLLAGNPIPERRWIKNSAMLLQNPYITVRSDGSLHIERVQLQDGGEYTCVASNVAGTNNKTTSVVVHVLPTIQHGQQILSTIEGIPVTLPCKASGNPKPSVIWSKKGELISTSSAKFSAGADGSLYVVSPGGEESGEYVCTATNTAGYAKRKVQLTVYVRPRVFGDQRGLSQDKPVEISVLAGEEVTLPCEVKSLPPPIITWAKETQLISPFSPRHTFLPSGSMKITETRTSDSGMYLCVATNIAGNVTQAVKLNVHVPPKIQRGPKHLKVQVGQRVDIPCNAQGTPLPVITWSKGGSTMLVDGEHHVSNPDGTLSIDQATPSDAGIYTCVATNIAGTDETEITLHVQEPPTVEDLEPPYNTTFQERVANQRIEFPCPAKGTPKPTIKWLHNGRELTGREPGISILEDGTLLVIASVTPYDNGEYICVAVNEAGTTERKYNLKVHVPPVIKDKEQVTNVSVLLNQLTNLFCEVEGTPSPIIMWYKDNVQVTESSTIQTVNNGKILKLFRATPEDAGRYSCKAINIAGTSQKYFNIDVLVPPTIIGTNFPNEVSVVLNRDVALECQVKGTPFPDIHWFKDGKPLFLGDPNVELLDRGQVLHLKNARRNDKGRYQCTVSNAAGKQAKDIKLTIYIPPSIKGGNVTTDISVLINSLIKLECETRGLPMPAITWYKDGQPIMSSSQALYIDKGQYLHIPRAQVSDSATYTCHVANVAGTAEKSFHVDVYVPPMIEGNLATPLNKQVVIAHSLTLECKAAGNPSPILTWLKDGVPVKANDNIRIEAGGKKLEIMSAQEIDRGQYICVATSVAGEKEIKYEVDVLVPPAIEGGDETSYFIVMVNNLLELDCHVTGSPPPTIMWLKDGQLIDERDGFKILLNGRKLVIAQAQVSNTGLYRCMAANTAGDHKKEFEVTVHVPPTIKSSGLSERVVVKYKPVALQCIANGIPNPSITWLKDDQPVNTAQGNLKIQSSGRVLQIAKTLLEDAGRYTCVATNAAGETQQHIQLHVHEPPSLEDAGKMLNETVLVSNPVQLECKAAGNPVPVITWYKDNRLLSGSTSMTFLNRGQIIDIESAQISDAGIYKCVAINSAGATELFYSLQVHVAPSISGSNNMVAVVVNNPVRLECEARGIPAPSLTWLKDGSPVSSFSNGLQVLSGGRILALTSAQISDTGRYTCVAVNAAGEKQRDIDLRVYVPPNIMGEEQNVSVLISQAVELLCQSDAIPPPTLTWLKDGHPLLKKPGLSISENRSVLKIEDAQVQDTGRYTCEATNVAGKTEKNYNVNIWVPPNIGGSDELTQLTVIEGNLISLLCESSGIPPPNLIWKKKGSPVLTDSMGRVRILSGGRQLQISIAEKSDAALYSCVASNVAGTAKKEYNLQVYIRPTITNSGSHPTEIIVTRGKSISLECEVQGIPPPTVTWMKDGHPLIKAKGVEILDEGHILQLKNIHVSDTGRYVCVAVNVAGMTDKKYDLSVHAPPSIIGNHRSPENISVVEKNSVSLTCEASGIPLPSITWFKDGWPVSLSNSVRILSGGRMLRLMQTTMEDAGQYTCVVRNAAGEERKIFGLSVLVPPHIVGENTLEDVKVKEKQSVTLTCEVTGNPVPEITWHKDGQPLQEDEAHHIISGGRFLQITNVQVPHTGRYTCLASSPAGHKSRSFSLNVFVSPTIAGVGSDGNPEDVTVILNSPTSLVCEAYSYPPATITWFKDGTPLESNRNIRILPGGRTLQILNAQEDNAGRYSCVATNEAGEMIKHYEVKVYIPPIINKGDLWGPGLSPKEVKIKVNNTLTLECEAYAIPSASLSWYKDGQPLKSDDHVNIAANGHTLQIKEAQISDTGRYTCVASNIAGEDELDFDVNIQVPPSFQKLWEIGNMLDTGRNGEAKDVIINNPISLYCETNAAPPPTLTWYKDGHPLTSSDKVLILPGGRVLQIPRAKVEDAGRYTCVAVNEAGEDSLQYDVRVLVPPIIKGANSDLPEEVTVLVNKSALIECLSSGSPAPRNSWQKDGQPLLEDDHHKFLSNGRILQILNTQITDIGRYVCVAENTAGSAKKYFNLNVHVPPSVIGPKSENLTVVVNNFISLTCEVSGFPPPDLSWLKNEQPIKLNTNTLIVPGGRTLQIIRAKVSDGGEYTCIAINQAGESKKKFSLTVYVPPSIKDHDSESLSVVNVREGTSVSLECESNAVPPPVITWYKNGRMITESTHVEILADGQMLHIKKAEVSDTGQYVCRAINVAGRDDKNFHLNVYVPPSIEGPEREVIVETISNPVTLTCDATGIPPPTIAWLKNHKRIENSDSLEVRILSGGSKLQIARSQHSDSGNYTCIASNMEGKAQKYYFLSIQVPPSVAGAEIPSDVSVLLGENVELVCNANGIPTPLIQWLKDGKPIASGETERIRVSANGSTLNIYGALTSDTGKYTCVATNPAGEEDRIFNLNVYVTPTIRGNKDEAEKLMTLVDTSINIECRATGTPPPQINWLKNGLPLPLSSHIRLLAAGQVIRIVRAQVSDVAVYTCVASNRAGVDNKHYNLQVFAPPNMDNSMGTEEITVLKGSSTSMACITDGTPAPSMAWLRDGQPLGLDAHLTVSTHGMVLQLLKAETEDSGKYTCIASNEAGEVSKHFILKVLEPPHINGSEEHEEISVIVNNPLELTCIASGIPAPKMTWMKDGRPLPQTDQVQTLGGGEVLRISTAQVEDTGRYTCLASSPAGDDDKEYLVRVHVPPNIAGTDEPRDITVLRNRQVTLECKSDAVPPPVITWLRNGERLQATPRVRILSGGRYLQINNADLGDTANYTCVASNIAGKTTREFILTVNVPPNIKGGPQSLVILLNKSTVLECIAEGVPTPRITWRKDGAVLAGNHARYSILENGFLHIQSAHVTDTGRYLCMATNAAGTDRRRIDLQVHVPPSIAPGPTNMTVIVNVQTTLACEATGIPKPSINWRKNGHLLNVDQNQNSYRLLSSGSLVIISPSVDDTATYECTVTNGAGDDKRTVDLTVQVPPSIADEPTDFLVTKHAPAVITCTASGVPFPSIHWTKNGIRLLPRGDGYRILSSGAIEILATQLNHAGRYTCVARNAAGSAHRHVTLHVHEPPVIQPQPSELHVILNNPILLPCEATGTPSPFITWQKEGINVNTSGRNHAVLPSGGLQISRAVREDAGTYMCVAQNPAGTALGKIKLNVQVPPVISPHLKEYVIAVDKPITLSCEADGLPPPDITWHKDGRAIVESIRQRVLSSGSLQIAFVQPGDAGHYTCMAANVAGSSSTSTKLTVHVPPRIRSTEGHYTVNENSQAILPCVADGIPTPAINWKKDNVLLANLLGKYTAEPYGELILENVVLEDSGFYTCVANNAAGEDTHTVSLTVHVLPTFTELPGDVSLNKGEQLRLSCKATGIPLPKLTWTFNNNIIPAHFDSVNGHSELVIERVSKEDSGTYVCTAENSVGFVKAIGFVYVKEPPVFKGDYPSNWIEPLGGNAILNCEVKGDPTPTIQWNRKGVDIEISHRIRQLGNGSLAIYGTVNEDAGDYTCVATNEAGVVERSMSLTLQSPPIITLEPVETVINAGGKIILNCQATGEPQPTITWSRQGHSISWDDRVNVLSNNSLYIADAQKEDTSEFECVARNLMGSVLVRVPVIVQVHGGFSQWSAWRACSVTCGKGIQKRSRLCNQPLPANGGKPCQGSDLEMRNCQNKPCPVDGSWSEWSLWEECTRSCGRGNQTRTRTCNNPSVQHGGRPCEGNAVEIIMCNIRPCPVHGAWSAWQPWGTCSESCGKGTQTRARLCNNPPPAFGGSYCDGAETQMQVCNERNCPIHGKWATWASWSACSVSCGGGARQRTRGCSDPVPQYGGRKCEGSDVQSDFCNSDPCPTHGNWSPWSGWGTCSRTCNGGQMRRYRTCDNPPPSNGGRACGGPDSQIQRCNTDMCPVDGSWGSWHSWSQCSASCGGGEKTRKRLCDHPVPVKGGRPCPGDTTQVTRCNVQACPGGPQRARGSVIGNINDVEFGIAFLNATITDSPNSDTRIIRAKITNVPRSLGSAMRKIVSILNPIYWTTAKEIGEAVNGFTLTNAVFKRETQVEFATGEILQMSHIARGLDSDGSLLLDIVVSGYVLQLQSPAEVTVKDYTEDYIQTGPGQLYAYSTRLFTIDGISIPYTWNHTVFYDQAQGRMPFLVETLHASSVESDYNQIEETLGFKIHASISKGDRSNQCPSGFTLDSVGPFCADEDECAAGNPCSHSCHNAMGTYYCSCPKGLTIAADGRTCQDIDECALGRHTCHAGQDCDNTIGSYRCVVRCGSGFRRTSDGLSCQDINECQESSPCHQRCFNAIGSFHCGCEPGYQLKGRKCMDVNECRQNVCRPDQHCKNTRGGYKCIDLCPNGMTKAENGTCIDIDECKDGTHQCRYNQICENTRGSYRCVCPRGYRSQGVGRPCMDINECEQVPKPCAHQCSNTPGSFKCICPPGQHLLGDGKSCAGLERLPNYGTQYSSYNLARFSPVRNNYQPQQHYRQYSHLYSSYSEYRNSRTSLSRTRRTIRKTCPEGSEASHDTCVDIDECENTDACQHECKNTFGSYQCICPPGYQLTHNGKTCQDIDECLEQNVHCGPNRMCFNMRGSYQCIDTPCPPNYQRDPVSGFCLKNCPPNDLECALSPYALEYKLVSLPFGIATNQDLIRLVAYTQDGVMHPRTTFLMVDEEQTVPFALRDENLKGVVYTTRPLREAETYRMRVRASSYSANGTIEYQTTFIVYIAVSAYPY

SEQ ID NO: 34946 - protein, 5518 aa, Homo sapiens
MISWEVVHTVFLFALLYSSLAQDASPQSEIRAEEIPEGASTLAFVFDVTGSMYDDLVQVIEGASKILETSLKRPKRPLFNFALVPFHDPEIGPVTITTDPKKFQYELRELYVQGGGDCPEMSIGAIKIALEISLPGSFIYVFTDARSKDYRLTHEVLQLIQQKQSQVVFVLTGDCDDRTHIGYKVYEEIASTSSGQVFHLDKKQVNEVLKWVEEAVQASKVHLLSTDHLEQAVNTWRIPFDPSLKEVTVSLSGPSPMIEIRNPLGKLIKKGFGLHELLNIHNSAKVVNVKEPEAGMWTVKTSSSGRHSVRITGLSTIDFRAGFSRKPTLDFKKTVSRPVQGIPTYVLLNTSGISTPARIDLLELLSISGSSLKTIPVKYYPHRKPYGIWNISDFVPPNEAFFLKVTGYDKDDYLFQRVSSVSFSSIVPDAPKVTMPEKTPGYYLQPGQIPCSVDSLLPFTLSFVRNGVTLGVDQYLKESASVNLDIAKVTLSDEGFYECIAVSSAGTGRAQTFFDVSEPPPVIQVPNNVTVTPGERAVLTCLIISAVDYNLTWQRNDRDVRLAEPARIRTLANLSLELKSVKFNDAGEYHCMVSSEGGSSAASVFLTVQEPPKVTVMPKNQSFTGGSEVSIMCSATGYPKPKIAWTVNDMFIVGSHRYRMTSDGTLFIKNAAPKDAGIYGCLASNSAGTDKQNSTLRYIEAPKLMVVQSELLVALGDITVMECKTSGIPPPQVKWFKGDLELRPSTFLIIDPLLGLLKIQETQDLDAGDYTCVAINEAGRATGKITLDVGSPPVFIQEPADVSMEIGSNVTLPCYVQGYPEPTIKWRRLDNMPIFSRPFSVSSISQLRTGALFILNLWASDKGTYICEAENQFGKIQSETTVTVTGLVAPLIGISPSVANVIEGQQLTLPCTLLAGNPIPERRWIKNSAMLLQNPYITVRSDGSLHIERVQLQDGGEYTCVASNVAGTNNKTTSVVVHVLPTIQHGQQILSTIEGIPVTLPCKASGNPKPSVIWSKKGELISTSSAKFSAGADGSLYVVSPGGEESGEYVCTATNTAGYAKRKVQLTVYVRPRVFGDQRGLSQDKPVEISVLAGEEVTLPCEVKSLPPPIITWAKETQLISPFSPRHTFLPSGSMKITETRTSDSGMYLCVATNIAGNVTQAVKLNVHVPPKIQRGPKHLKVQVGQRVDIPCNAQGTPLPVITWSKGGSTMLVDGEHHVSNPDGTLSIDQATPSDAGIYTCVATNIAGTDETEITLHVQEPPTVEDLEPPYNTTFQERVANQRIEFPCPAKGTPKPTIKWLHNGRELTGREPGISILEDGTLLVIASVTPYDNGEYICVAVNEAGTTERKYNLKVHVPPVIKDKEQVTNVSVLLNQLTNLFCEVEGTPSPIIMWYKDNVQVTESSTIQTVNNGKILKLFRATPEDAGRYSCKAINIAGTSQKYFNIDVLVPPTIIGTNFPNEVSVVLNRDVALECQVKGTPFPDIHWFKDGKPLFLGDPNVELLDRGQVLHLKNARRNDKGRYQCTVSNAAGKQAKDIKLTIYIPPSIKGGNVTTDISVLINSLIKLECETRGLPMPAITWYKDGQPIMSSSQALYIDKGQYLHIPRAQVSDSATYTCHVANVAGTAEKSFHVDVYVPPMIEGNLATPLNKQVVIAHSLTLECKAAGNPSPILTWLKDGVPVKANDNIRIEAGGKKLEIMSAQEIDRGQYICVATSVAGEKEIKYEVDVLVPPAIEGGDETSYFIVMVNNLLELDCHVTGSPPPTIMWLKDGQLIDERDGFKILLNGRKLVIAQAQVSNTGLYRCMAANTAGDHKKEFEVTVHVPPTIKSSGLSERVVVKYKPVALQCIANGIPNPSITWLKDDQPVNTAQGNLKIQSSGRVLQIAKTLLEDAGRYTCVATNAAGETQQHIQLHVHEPPSLEDAGKMLNETVLVSNPVQLECKAAGNPVPVITWYKDNRLLSGSTSMTFLNRGQIIDIESAQISDAGIYKCVAINSAGATELFYSLQVHVAPSISGSNNMVAVVVNNPVRLECEARGIPAPSLTWLKDGSPVSSFSNGLQVLSGGRILALTSAQISDTGRYTCVAVNAAGEKQRDIDLRVYVPPNIMGEEQNVSVLISQAVELLCQSDAIPPPTLTWLKDGHPLLKKPGLSISENRSVLKIEDAQVQDTGRYTCEATNVAGKTEKNYNVNIWVPPNIGGSDELTQLTVIEGNLISLLCESSGIPPPNLIWKKKGSPVLTDSMGRVRILSGGRQLQISIAEKSDAALYSCVASNVAGTAKKEYNLQVYIRPTITNSGSHPTEIIVTRGKSISLECEVQGIPPPTVTWMKDGHPLIKAKGVEILDEGHILQLKNIHVSDTGRYVCVAVNVAGMTDKKYDLSVHAPPSIIGNHRSPENISVVEKNSVSLTCEASGIPLPSITWFKDGWPVSLSNSVRILSGGRMLRLMQTTMEDAGQYTCVVRNAAGEERKIFGLSVLVPPHIVGENTLEDVKVKEKQSVTLTCEVTGNPVPEITWHKDGQPLQEDEAHHIISGGRFLQITNVQVPHTGRYTCLASSPAGHKSRSFSLNVFVSPTIAGVGSDGNPEDVTVILNSPTSLVCEAYSYPPATITWFKDGTPLESNRNIRILPGGRTLQILNAQEDNAGRYSCVATNEAGEMIKHYEVKVYIPPIINKGDLWGPGLSPKEVKIKVNNTLTLECEAYAIPSASLSWYKDGQPLKSDDHVNIAANGHTLQIKEAQISDTGRYTCVASNIAGEDELDFDVNIQVPPSFQKLWEIGNMLDTGRNGEAKDVIINNPISLYCETNAAPPPTLTWYKDGHPLTSSDKVLILPGGRVLQIPRAKVEDAGRYTCVAVNEAGEDSLQYDVRVLVPPIIKGANSDLPEEVTVLVNKSALIECLSSGSPAPRNSWQKDGQPLLEDDHHKFLSNGRILQILNTQITDIGRYVCVAENTAGSAKKYFNLNVHVPPSVIGPKSENLTVVVNNFISLTCEVSGFPPPDLSWLKNEQPIKLNTNTLIVPGGRTLQIIRAKVSDGGEYTCIAINQAGESKKKFSLTVYVPPSIKDHDSESLSVVNVREGTSVSLECESNAVPPPVITWYKNGRMITESTHVEILADGQMLHIKKAEVSDTGQYVCRAINVAGRDDKNFHLNVYVPPSIEGPEREVIVETISNPVTLTCDATGIPPPTIAWLKNHKRIENSDSLEVRILSGGSKLQIARSQHSDSGNYTCIASNMEGKAQKYYFLSIQVPPSVAGAEIPSDVSVLLGENVELVCNANGIPTPLIQWLKDGKPIASGETERIRVSANGSTLNIYGALTSDTGKYTCVATNPAGEEDRIFNLNVYVTPTIRGNKDEAEKLMTLVDTSINIECRATGTPPPQINWLKNGLPLPLSSHIRLLAAGQVIRIVRAQVSDVAVYTCVASNRAGVDNKHYNLQVFAPPNMDNSMGTEEITVLKGSSTSMACITDGTPAPSMAWLRDGQPLGLDAHLTVSTHGMVLQLLKAETEDSGKYTCIASNEAGEVSKHFILKVLEPPHINGSEEHEEISVIVNNPLELTCIASGIPAPKMTWMKDGRPLPQTDQVQTLGGGEVLRISTAQVEDTGRYTCLASSPAGDDDKEYLVRVHVPPNIAGTDEPRDITVLRNRQVTLECKSDAVPPPVITWLRNGERLQATPRVRILSGGRYLQINNADLGDTANYTCVASNIAGKTTREFILTVNVPPNIKGGPQSLVILLNKSTVLECIAEGVPTPRITWRKDGAVLAGNHARYSILENGFLHIQSAHVTDTGRYLCMATNAAGTDRRRIDLQVHVPPSIAPGPTNMTVIVNVQTTLACEATGIPKPSINWRKNGHLLNVDQNQNSYRLLSSGSLVIISPSVDDTATYECTVTNGAGDDKRTVDLTVQVPPSIADEPTDFLVTKHAPAVITCTASGVPFPSIHWTKNGIRLLPRGDGYRILSSGAIEILATQLNHAGRYTCVARNAAGSAHRHVTLHVHEPPVIQPQPSELHVILNNPILLPCEATGTPSPFITWQKEGINVNTSGRNHAVLPSGGLQISRAVREDAGTYMCVAQNPAGTALGKIKLNVQVPPVISPHLKEYVIAVDKPITLSCEADGLPPPDITWHKDGRAIVESIRQRVLSSGSLQIAFVQPGDAGHYTCMAANVAGSSSTSTKLTVHVPPRIRSTEGHYTVNENSQAILPCVADGIPTPAINWKKDNVLLANLLGKYTAEPYGELILENVVLEDSGFYTCVANNAAGEDTHTVSLTVHVLPTFTELPGDVSLNKGEQLRLSCKATGIPLPKLTWTFNNNIIPAHFDSVNGHSELVIERVSKEDSGTYVCTAENSVGFVKAIGFVYVKEPPVFKGDYPSNWIEPLGGNAILNCEVKGDPTPTIQWNRKGVDIEISHRIRQLGNGSLAIYGTVNEDAGDYTCVATNEAGVVERSMSLTLQSPPIITLEPVETVINAGGKIILNCQATGEPQPTITWSRQGHSISWDDRVNVLSNNSLYIADAQKEDTSEFECVARNLMGSVLVRVPVIVQVHGGFSQWSAWRACSVTCGKGIQKRSRLCNQPLPANGGKPCQGSDLEMRNCQNKPCPVDGSWSEWSLWEECTRSCGRGNQTRTRTCNNPSVQHGGRPCEGNAVEIIMCNIRPCPVHGAWSAWQPWGTCSESCGKGTQTRARLCNNPPPAFGGSYCDGAETQMQVCNERNCPIHGKWATWASWSACSVSCGGGARQRTRGCSDPVPQYGGRKCEGSDVQSDFCNSDPCPTHGNWSPWSGWGTCSRTCNGGQMRRYRTCDNPPPSNGGRACGGPDSQIQRCNTDMCPVDGSWGSWHSWSQCSASCGGGEKTRKRLCDHPVPVKGGRPCPGDTTQVTRCNVQACPGGPQRARGSVIGNINDVEFGIAFLNATITDSPNSDTRIIRAKITNVPRSLGSAMRKIVSILNPIYWTTAKEIGEAVNGFTLTNAVFKRETQVEFATGEILQMSHIARGLDSDGSLLLDIVVSGYVLQLQSPAEVTVKDYTEDYIQTGPGQLYAYSTRLFTIDGISIPYTWNHTVFYDQAQGRMPFLVETLHASSVESDYNQIEETLGFKIHASISKGDRSNQCPSGFTLDSVGPFCADEDECAAGNPCSHSCHNAMGTYYCSCPKGLTIAADGRTCQDIDECALGRHTCHAGQDCDNTIGSYRCVVRCGSGFRRTSDGLSCQDINECQESSPCHQRCFNAIGSFHCGCEPGYQLKGRKCMDVNECRQNVCRPDQHCKNTRGGYKCIDLCPNGMTKAENGTCIDIDECKDGTHQCRYNQICENTRGSYRCVCPRGYRSQGVGRPCMDIDECENTDACQHECKNTFGSYQCICPPGYQLTHNGKTCQDIDECLEQNVHCGPNRMCFNMRGSYQCIDTPCPPNYQRDPVSGFCLKNCPPNDLECALSPYALEYKLVSLPFGIATNQDLIRLVAYTQDGVMHPRTTFLMVDEEQTVPFALRDENLKGVVYTTRPLREAETYRMRVRASSYSANGTIEYQTTFIVYIAVSAYPY

SEQ ID NO: 34947 - protein, 555 aa, Homo sapiens
MPKNQSFTGGSEVSIMCSATGYPKPKIAWTVNDMFIVGSHRYRMTSDGTLFIKNAAPKDAGIYGCLASNSAGTDKQNSTLRYIEAPKLMVVQSELLVALGDITVMECKTSGIPPPQVKWFKGDLELRPSTFLIIDPLLGLLKIQETQDLDAGDYTCVAINEAGRATGKITLDVGSPPVFIQEPADVSMEIGSNVTLPCYVQGYPEPTIKWRRLDNMPIFSRPFSVSSISQLRTGALFILNLWASDKGTYICEAENQFGKIQSETTVTVTGLVAPLIGISPSVANVIEGQQLTLPCTLLAGNPIPERRWIKNSAMLLQNPYITVRSDGSLHIERVQLQDGGEYTCVASNVAGTNNKTTSVVVHVLPTIQHGQQILSTIEGIPVTLPCKASGNPKPSVIWSKKGELISTSSAKFSAGADGSLYVVSPGGEESGEYVCTATNTAGYAKRKVQLTVYVRPRVFGDQRGLSQDKPVEISVLAGEEVTLPCEVKSLPPPIITWAKETQLISPFSPRHTFLPSGSMKITETRTSDSGMYLCVATNIAGNVTQAVKLNVHGES

SEQ ID NO: 34948 - protein, 24 aa, Homo sapiens
MAPRGFSCLLLSTSEIDLPVKRRA

SEQ ID NO: 34949 - protein, 109 aa, Homo sapiens
MSARGEGAGQPSTSAQGQPAAPAPQKRGRGRPRKQQQEPTGEPSPKRPRGRPKGSKNKSPSKAAQKKAEATGEKRPRGRPRKWPQQVVQKKPAQEETEETSSQESAEED

SEQ ID NO: 34950 - protein, 106 aa, Homo sapiens
MSARGEGAGQPSTSAQGQPAAPAPQKRGRGRPRKQQQEPTGEPSPKRPRGRPKGSKNKSPSKAAQKKAEATGEKRPRGRPRKWDNLLPRTSSKKKTSLGNSTKRSH

SEQ ID NO: 34951 - protein, 86 aa, Homo sapiens
MSARGEGAGQPSTSAQGQPAAPAPQKRGRGRPRKQQQEPTGEPSPKRPRGRPKGSKNKSPSKAAQKKAEATGEKRPRGRPRKWLQN

SEQ ID NO: 34952 - protein, 92 aa, Homo sapiens
MSARGEGAGQPSTSAQGQPAAPAPQKRGRGRPRKQQQEPTGEPSPKRPRGRPKGSKNKSPSKAAQKKAEATGEKRPRGRPRKWWLLMKSPCW

SEQ ID NO: 34953 - protein, 103 aa, Homo sapiens
MSARGEGAGQPSTSAQGQPAAPAPQKRGRGRPRKQQQEPTGEPSPKRPRGRPKGSKNKSPSKAAQKKAEATGEKRPRGRPRKWLRAQALDSDGLGSNSGPSLS

SEQ ID NO: 34954 - protein, 90 aa, Homo sapiens
MSARGEGAGQPSTSAQGQPAAPAPQKRGRGRPRKQQQEPTGEPSPKRPRGRPKGSKNKSPSKAAQKKAEATGEKRPRGRPRKWEEFYIAA

SEQ ID NO: 34955 - protein, 366 aa, Homo sapiens
MRVMAPRALLLLLSGGLALTETWACSHSMRYFDTAVSRPGRGEPRFISVGYVDDTQFVRFDSDAASPRGEPRAPWVEQEGPEYWDRETQKYKRQAQADRVSLRNLRGYYNQSEDGSHTLQRMSGCDLGPDGRLLRGYDQSAYDGKDYIALNEDLRSWTAADTAAQITQRKLEAARAAEQLRAYLEGTCVEWLRRYLENGKETLQRAEPPKTHVTHHPLSDHEATLRCWALGFYPAEITLTWQRDGEDQTQDTELVETRPAGDGTFQKWAAVVVPSGQEQRYTCHMQHEGLQEPLTLSWEPSSQPTIPIMGIVAGLAVLVVLAVLGAVVTAMMCRRKSSGGKGGSCSQAACSNSAQGSDESLITCKA

SEQ ID NO: 34956 - protein, 326 aa, Homo sapiens
MRVMAPRALLLLLSGGLALTETWACSHSMRYFDTAVSRPGRGEPRFISVGYVDDTQFVRFDSDAASPRGEPRAPWVEQEGPEYWDRETQKYKRQAQADRVSLRNLRGYYNQSEDGSHTLQRMSGCDLGPDGRLLRGYDQSAYDGKDYIALNEHLRSCTAADTAAQITQRKLEAARAAEQLRAYLEGTCVEWLRRYLENGKETLQRAEPPKTHVTHHPLSDHEATLRCWALGFYPAEITLTWQRDGEDQTQDTELVETRPAGDGTFQKWAAVVVPSGQEQRYTCHMQHEGLQEPLTLRWGGKGGSCSQAACSNSAQGSDESLITCKA

SEQ ID NO: 34957 - protein, 483 aa, Homo sapiens
MTPILTVLICLGLSLGPRTHVQAGHLPKPTLWAEPGSVIIQGSPVTLRCQGSLQAEEYHLYRENKSASWVRRIQEPGKNGQFPIPSITWEHAGRYHCQYYSHNHSSEYSDPLELVVTGAYSKPTLSALPSPVVTLGGNVTLQCVSQVAFDGFILCKEGEDEHPQRLNSHSHARGWSWAIFSVGPVSPSRRWSYRCYAYDSNSPYVWSLPSDLLELLVPGVSKKPSLSVQPGPMVAPGESLTLQCVSDVGYDRFVLYKEGERDFLQRPGWQPQAGLSQANFTLGPVSPSHGGQYRCYSAHNLSSEWSAPSDPLDILITGQFYDRPSLSVQPVPTVAPGKNVTLLCQSRGQFHTFLLTKEGAGHPPLHLRSEHQAQQNQAEFRMGPVTSAHVGTYRCYSSLSSNPYLLSLPSDPLELVVSEAAETLSPSQNKTDSTTTSLGQHPQDYTVENLIRMGVAGLVLVVLGILLFEAQHSQRSLQDAAGR

SEQ ID NO: 34958 - protein, 466 aa, Homo sapiens
MTPILTVLICLGLSLGPRTHVQAGHLPKPTLWAEPGSVIIQGSPVTLRCQGSLQAEEYHLYRENKSASWVRRIQEPGKNGQFPIPSITWEHAGRYHCQYYSHNHSSEYSDPLELVVTGAYSKPTLSALPSPVVTLGGNVTLQCVSQVAFDGFILCKEGEDEHPQRLNSHSHARGWSWAIFSVGPVSPSRRWSYRCYAYDSNSPYVWSLPSDLLELLVPGVSKKPSLSVQPGPMVAPGESLTLQCVSDVGYDRFVLYKEGERDFLQRPGWQPQAGLSQANFTLGPVSPSHGGQYRCYSAHNLSSEWSAPSDPLDILITGQFYDRPSLSVQPVPTVAPGKNVTLLCQSRGQFHTFLLTKEGAGHPPLHLRSEHQAQQNQAEFRMGPVTSAHVGTYRCYSSLSSNPYLLSLPSDPLELVVSASLGQHPQDYTVENLIRMGVAGLVLVVLGILLFEAQHSQRSLQDAAGR

SEQ ID NO: 34959 - protein, 425 aa, Homo sapiens
MTPILTVLICLGHLPKPTLWAEPGSVIIQGSPVTLRCQGSLQAEEYHLYRENKSASWVRRIQEPGKNGQFPIPSITWEHAGRYHCQYYSHNHSSEYSDPLELVVTGAYSKPTLSALPSPVVTLGGNVTLQCVSQVAFDGFILCKEGEDEHPQRLNSHSHARGWSWAIFSVGPVSPSRRWSYRCYAYDSNSPYVWSLPSDLLELLVPGVSKKPSLSVQPGPMVAPGESLTLQCVSDVGYDRFVLYKEGERDFLQRPGWQPQAGLSQANFTLGPVSPSHGGQYRCYSAHNLSSEWSAPSDPLDILITGQFYDRPSLSVQPVPTVAPGKNVTLLCQSRGQFHTFLLTKEGAGHPPLHLRSEHQAQQNQAEFRMGPVTSAHVGTYRCYSSLSSNPYLLSLPSDPLELVVSEAAETLSPSQNKTDSTTSE

SEQ ID NO: 34960 - protein, 437 aa, Homo sapiens [sequence omitted]

SEQ ID NO: 34961 - protein, 338 aa, Homo sapiens
MVVMAPRTLFLLLSGALTLTETWAGSHSMRYFSAAVSRPGRGEPRFIAMGYVDDTQFVRFDSDSACPRMEPRAPWVEQEGPEYWEEETRNTKAHAQTDRMNLQTLRGYYNQSEASSHTLQWMIGCDLGSDGRLLRGYEQYAYDGKDYLALNEDLRSWTAADTAAQISKRKCEAANVAEQRRAYLEGTCVEWLHRYLENGKEMLQRADPPKTHVTHHPVFDYEATLRCWALGFYPAEIILTWQRDGEDQTQDVELVETRPAGDGTFQKWAAVVVPSGEEQRYTCHVQHEGLPEPLMLRWKQSSLPTIPIMGIVAGLVVLAAVVTGAAVAAVLWRKKSSD

SEQ ID NO: 34962 - protein, 246 aa, Homo sapiens
MVVMAPRTLFLLLSGALTLTETWAGSHSMRYFSAAVSRPGRGEPRFIAMGYVDDTQFVRFDSDSACPRMEPRAPWVEQEGPEYWEEETRNTKAHAQTDRMNLQTLRGYYNQSEAKPPKTHVTHHPVFDYEATLRCWALGFYPAEIILTWQRDGEDQTQDVELVETRPAGDGTFQKWAAVVVPSGEEQRYTCHVQHEGLPEPLMLRWKQSSLPTIPIMGIVAGLVVLAAVVTGAAVAAVLWRKKSSD

SEQ ID NO: 34963 - protein, 154 aa, Homo sapiens
MVVMAPRTLFLLLSGALTLTETWAGSHSMRYFSAAVSRPGRGEPRFIAMGYVDDTQFVRFDSDSACPRMEPRAPWVEQEGPEYWEEETRNTKAHAQTDRMNLQTLRGYYNQSEAKQSSLPTIPIMGIVAGLVVLAAVVTGAAVAAVLWRKKSSD

SEQ ID NO: 34964 - protein, 246 aa, Homo sapiens
MVVMAPRTLFLLLSGALTLTETWAGSHSMRYFSAAVSRPGRGEPRFIAMGYVDDTQFVRFDSDSACPRMEPRAPWVEQEGPEYWEEETRNTKAHAQTDRMNLQTLRGYYNQSEASSHTLQWMIGCDLGSDGRLLRGYEQYAYDGKDYLALNEDLRSWTAADTAAQISKRKCEAANVAEQRRAYLEGTCVEWLHRYLENGKEMLQRAKQSSLPTIPIMGIVAGLVVLAAVVTGAAVAAVLWRKKSSD

SEQ ID NO: 34965 - protein, 319 aa, Homo sapiens
MVVMAPRTLFLLLSGALTLTETWAGSHSMRYFSAAVSRPGRGEPRFIAMGYVDDTQFVRFDSDSACPRMEPRAPWVEQEGPEYWEEETRNTKAHAQTDRMNLQTLRGYYNQSEASSHTLQWMIGCDLGSDGRLLRGYEQYAYDGKDYLALNEDLRSWTAADTAAQISKRKCEAANVAEQRRAYLEGTCVEWLHRYLENGKEMLQRADPPKTHVTHHPVFDYEATLRCWALGFYPAEIILTWQRDGEDQTQDVELVETRPAGDGTFQKWAAVVVPSGEEQRYTCHVQHEGLPEPLMLRWSKEGDGGIMSVRESRSLSEDL

SEQ ID NO: 34966 - protein, 227 aa, Homo sapiens
MVVMAPRTLFLLLSGALTLTETWAGSHSMRYFSAAVSRPGRGEPRFIAMGYVDDTQFVRFDSDSACPRMEPRAPWVEQEGPEYWEEETRNTKAHAQTDRMNLQTLRGYYNQSEAKPPKTHVTHHPVFDYEATLRCWALGFYPAEIILTWQRDGEDQTQDVELVETRPAGDGTFQKWAAVVVPSGEEQRYTCHVQHEGLPEPLMLRWSKEGDGGIMSVRESRSLSEDL

SEQ ID NO: 34967 - protein, 116 aa, Homo sapiens
MVVMAPRTLFLLLSGALTLTETWAGSHSMRYFSAAVSRPGRGEPRFIAMGYVDDTQFVRFDSDSACPRMEPRAPWVEQEGPEYWEEETRNTKAHAQTDRMNLQTLRGYYNQSEASE

SEQ ID NO: 34968 - protein, 186 aa, Homo sapiens
MGKEIQLKPKANVSSYVHFLLNYRNKFKEQQPNTYVGFKEFSRKCSEKWRSISKHEKAKYEALAKLDKARYQEEMMNYVGKRKKRRKRDPQEPRRPPSSFLLFCQDHYAQLKRENPNWSVVQVAKATGKMWSTATDLEKHPYEQRVALLRAKYFEELELYRKQCNARKKYRMSARNRCRGKRVRQS

SEQ ID NO: 34969 - protein, 439 aa, Homo sapiens
MTPILTVLICLGLSLDPRTHVQAGPLPKPTLWAEPGSVITQGSPVTLRCQGSLETQEYHLYREKKTALWITRIPQELVKKGQFPILSITWEHAGRYCCIYGSHTAGLSESSDPLELVVTGAYSKPTLSALPSPVVTSGGNVTIQCDSQVAFDGFILCKEGEDEHPQCLNSHSHARGSSRAIFSVGPVSPSRRWSYRCYGYDSRAPYVWSLPSDLLGLLVPGVSKKPSLSVQPGPVVAPGEKLTFQCGSDAGYDRFVLYKEWGRDFLQRPGRQPQAGLSQANFTLGPVSRSYGGQYTCSGAYNLSSEWSAPSDPLDILITGQIRARPFLSVRPGPTVASGENVTLLCQSQGGMHTFLLTKEGAADSPLRLKSKRQSHKYQAEFPMSPVTSAHAGTYRCYGSLSSNPYLLTHPSDPLELVVSGAAETLSPPQNKSDSKAGE

SEQ ID NO: 34970 - protein, 375 aa, Homo sapiens
MTPILTVLICLGLSLDPRTHVQAGPLPKPTLWAEPGSVITQGSPVTLRCQGSLETQEYHLYREKKTALWITRIPQELVKKGQFPILSITWEHAGRYCCIYGSHTAGLSESSDPLELVVTGAYSKPTLSALPSPVVTSGGNVTIQCDSQVAFDGFILCVSKKPSLSVQPGPVVAPGEKLTFQCGSDAGYDRFVLYKEWGRDFLQRPGRQPQAGLSQANFTLGPVSRSYGGQYTCSGAYNLSSEWSAPSDPLDILITGQIRARPFLSVRPGPTVASGENVTLLCQSQGGMHTFLLTKEGAADSPLRLKSKRQSHKYQAEFPMSPVTSAHAGTYRCYGSLSSNPYLLTHPSDPLELVVSGAAETLSPPQNKSDSKAGE

SEQ ID NO: 34971 - protein, 456 aa, Homo sapiens
MHRGLIHPQSSAVGGDAMTPILTVLICLGLSLDPRTHVQAGPLPKPTLWAEPGSVITQGSPVTLRCQGSLETQEYHLYREKKTALWITRIPQELVKKGQFPILSITWEHAGRYCCIYGSHTAGLSESSDPLELVVTGAYSKPTLSALPSPVVTSGGNVTIQCDSQVAFDGFILCKEGEDEHPQCLNSHSHARGSSRAIFSVGPVSPSRRWSYRCYGYDSRAPYVWSLPSDLLGLLVPGVSKKPSLSVQPGPVVAPGEKLTFQCGSDAGYDRFVLYKEWGRDFLQRPGRQPQAGLSQANFTLGPVSRSYGGQYTCSGAYNLSSEWSAPSDPLDILITGQIRARPFLSVRPGPTVASGENVTLLCQSQGGMHTFLLTKEGAADSPLRLKSKRQSHKYQAEFPMSPVTSAHAGTYRCYGSLSSNPYLLTHPSDPLELVVSGAAETLSPPQNKSDSKAGE

SEQ ID NO: 34972 - protein, 550 aa, Homo sapiens
MVPKADSGAFLLLFLLVLTVTEPLRPELRCNPGQFACRSGTIQCIPLPWQCDGWATCEDESDEANCPEVTGEVRPHHGKEAVDPRQGRARGGDPSHFHAVNVAQPVRFSSFLGKCPTGWHHYEGTASCYRVYLSGENYWDAAQTCQRLNGSLATFSTDQELRFVLAQEWDQPERSFGWKDQRKLWVGYQYVITGRNRSLEGRWEVAFKGSSEVFLPPDPIFASAMSENDNVFCAQLQCFHFPTLRHHDLHSWHAESCYEKSSFLCKRSQTCVDIKDNVVDEGFYFTPKGDDPCLSCTCHGGEPEMCVAALCERPQGCQQYRKDPKECCKFMCLDPDGNSLFDSMASGMRLVVSCISSFLILSLLLFMVHRLRQRRRERIESLIGANLHHFNLGRRIPGFDYGPDGFGTGLTPLHLSDDGEGGTFHFHDPPPPYTAYKYPDIGQPDDPPPPYEASIHPDSVFYDPADDDAFEPVEVSLPAPGDGGSEGALLRRLEQPLPTAGASLADLEDSADSSSALLVPPDPAQSGSTPAAEALPGGGRHSRSSLNTVV

SEQ ID NO: 34973 - protein, 509 aa, Homo sapiens
MVPKADSGAFLLLFLLVLTVTEPLRPEVTGEVRPHHGKEAVDPRQGRARGGDPSHFHAVNVAQPVRFSSFLGKCPTGWHHYEGTASCYRVYLSGENYWDAAQTCQRLNGSLATFSTDQELRFVLAQEWDQPERSFGWKDQRKLWVGYQYVITGRNRSLEGRWEVAFKGSSEVFLPPDPIFASAMSENDNVFCAQLQCFHFPTLRHHDLHSWHAESCYEKSSFLCKRSQTCVDIKDNVVDEGFYFTPKGDDPCLSCTCHGGEPEMCVAALCERPQGCQQYRKDPKECCKFMCLDPDGNSLFDSMASGMRLVVSCISSFLILSLLLFMVHRLRQRRRERIESLIGANLHHFNLGRRIPGFDYGPDGFGTGLTPLHLSDDGEGGTFHFHDPPPPYTAYKYPDIGQPDDPPPPYEASIHPDSVFYDPADDDAFEPVEVSLPAPGDGGSEGALLRRLEQPLPTAGASLADLEDSADSSSALLVPPDPAQSGSTPAAEALPGGGRHSRSSLNTVV

SEQ ID NO: 34974 - protein, 327 aa, Homo sapiens
MVPKADSGAFLLLFLLVLTVTEPLRPELRCNPGQFACRSGTIQCIPLPWQCDGWATCEDESDEANCPEVTGEVRPHHGKEAVDPRQGRARGGDPSHFHAVNVAQPVRFSSFLGKCPTGWHHYEGTASCYRVYLSGENYWDAAQTCQRLNGSLATFSTDQELRFVLAQEWDQPERSFGWKDQRKLWVGYQYVITGRNRSLEGRWEVAFKGSSEVFLPPDPIFASAMSENDNVFCAQLQCFHFPTLRHHDLHSWHAESCYEKSSFLCKRSQTCVDIKDNVVDEGFYFTPKGDDPCLSCTCHGGEPEMCVAALCERPHGCSPLSCTARAT

SEQ ID NO: 34975 - protein, 353 aa, Homo sapiens
ASPTSPKVFPLSLCSTQPDGNVVIACLVQGFFPQEPLSVTWSESGQGVTARNFPPSQDASGDLYTTSSQLTLPATQCLAGKSVTCHVKHYTNPSQDVTVPCPVPSTPPTPSPSTPPTPSPSCCHPRLSLHRPALEDLLLGSEANLTCTLTGLRDASGVTFTWTPSSGKSAVQGPPERDLCGCYSVSSVLPGCAEPWNHGKTFTCTAAYPESKTPLTATLSKSGNTFRPEVHLLPPPSEELALNELVTLTCLARGFSPKDVLVRWLQGSQELPREKYLTWASRQEPSQGTTTFAVTSILRVAAEDWKKGDTFSCMVGHEALPLAFTQKTIDRLAGKPTHVNVSVVMAEVDGTCY

SEQ ID NO: 34976 - protein, 500 aa, Homo sapiens
MASVAQESAGSQRRLPPRHGALRGLLLLCLWLPSGRAALPPAAPLSELHAQLSGVEQLLEEFRRQLQQERPQEELELELRAGGGPQEDCPGPGSGGYSAMPDAIIRTKDSLAAGASFLRAPAAVRGWRQCVAACCSEPRCSVAVVELPRRPAPPAAVLGCYLFNCTARGRNVCKFALHSGYSSYSLSRAPDGAALATARASPRQEKDAPPLSKAGQDVVLHLPTDGVVLDGRESTDDHAIVQYEWALLQGDPSVDMKVPQSGTLKLSHLQEGTYTFQLTVTDTAGQRSSDNVSVTVLRAAYSTGGCLHTCSRYHFFCDDGCCIDITLACDGVQQCPDGSDEDFCQNLGLDRKMVTHTAASPALPRTTGPSEDAGGDSLVEKSQKATAPNKPPALSNTEKRNHSAFWGPESQIIPVMPDSSSSGKNRKEESYIFESKGDGGGGEHPAPETGAVLPLALGLAITALLLLMVACRLRLVKQKLKKARPITSEESDYLINGMYL

SEQ ID NO: 34977 - protein, 237 aa, Homo sapiens
MASVAQESAGSQRRLPPRHGALRGLLLLCLWLPSGRAALPPAAPLSELHAQLSGVEQLLEEFRRQLQQERPQEELELELRAGGGPQEDCPGPGSGGYSAMPDAIIRTKDSLAAGASFLRAPAAVRGWRQCVAACCSEPRCSVAVVELPRRPAPPAAVLGCYLFNCTARGRNVCKFALHSGYSSYSLSRAPDGAALATARASPRQGKRATEGPALARALETRSALAKLEAKHTRAKLF

SEQ ID NO: 34978 - protein, 410 aa, Homo sapiens
MVLSQRQRDELNRAIADYLRSNGYEEAYSVFKKEAELDVNEELDKKYAGLLEKKWTSVIRLQKKVMELESKLNEAKEEFTSGGPLGQKRDPKEWIPRPPEKYALSGHRSPVTRVIFHPVFSVMVSASEDATIKVWDYETGDFERTLKGHTDSVQDISFDHSGKLLASCSADMTIKLWDFQGFECIRTMHGHDHNVSSVAIMPNGDHIVSASRDKTIKMWEVQTGYCVKTFTGHREWVRMVRPNQDGTLIASCSNDQTVRVWVVATKECKAELREHEHVVECISWAPESSYSSISEATGSETKKSGKPGPFLLSGSRDKTIKMWDVSTGMCLMTLVGHDNWVRGVLFHSGGKFILSCADDKTLRVWDYKNKRCMKTLNAHEHFVTSLDFHKTAPYVVTGSVDQTVKVWECR

SEQ ID NO: 34979 - protein, 147 aa, Homo sapiens
MVLSQRQRDELVMELESKLNEAKEEFTSGGPLGQKRDPKEWIPRPPEKYALSGHRSPVTRVIFHPVFSVMVSASEDATIKDMTIKLWDFQGFECIRTMHGHDHNVSSVAIMPNGDHIVSASRDKTIKMWEVQTGYCVKTFTGHREWI

SEQ ID NO: 34980 - protein, 399 aa, Homo sapiens
MKMRFLGLVVCLVLWTLHSEGSGGKLTAVDPETNMNVSEIISYWGFPSEEYLVETEDGYILCLNRIPHGRKNHSDKGPKPVVFLQHGLLADSSNWVTNLANSSLGFILADAGFDVWMGNSRGNTWSRKHKTLSVSQDEFWAFSYDEMAKYDLPASINFILNKTGQEQVYYVGHSQGTTIGFIAFSQIPELAKRIKMFFALGPVASVAFCTSPMAKLGRLPDHLIKDLFGDKEFLPQSAFLKWLGTHVCTHVILKELCGNLCFLLCGFNERNLNMSRVDVYTTHSPAGTSVQNMLHWSQAVKFQKFQAFDWGSSAKNYFHYNQSYPPTYNVKDMLVPTAVWSGGHDWLADVYDVNILLTQITNLVFHESIPEWEHLDFIWGLDAPWRLYNKIINLMRKYQ

SEQ ID NO: 34981 - protein, 343 aa, Homo sapiens
MACLEFVPFDVQMCLEFLPSGPKPVVFLQHGLLADSSNWVTNLANSSLGFILADAGFDVWMGNSRGNTWSRKHKTLSVSQDEFWAFSYDEMAKYDLPASINFILNKTGQEQVYYVGHSQGTTIGFIAFSQIPELAKRIKMFFALGPVASVAFCTSPMAKLGRLPDHLIKDLFGDKEFLPQSAFLKWLGTHVCTHVILKELCGNLCFLLCGFNERNLNMSRVDVYTTHSPAGTSVQNMLHWSQAVKFQKFQAFDWGSSAKNYFHYNQSYPPTYNVKDMLVPTAVWSGGHDWLADVYDVNILLTQITNLVFHESIPEWEHLDFIWGLDAPWRLYNKIINLMRKYQ

SEQ ID NO: 34982 - protein, 107 aa, Homo sapiens [sequence omitted]

SEQ ID NO: 34983 - protein, 228 aa, Homo sapiens
MREGKRGPPCILSFRGTLERVEAQWELEAQGPGQCPAPLGDPASTTDGAQEARVPLDGAFWIPRPPAGSPKGCFACVSKPPALQAPAAPAPEPSASPPMAPTLFPMESKSSKTDSVRAAGAPPACKHLAEKKTMTNPTTVIEVYPDTTEVNDYYLWSIFNFVYLNFCCLGFIALAYSLKVRDKKLLNDLNGAVEDAKTARLFNITSSALAASCIILVFIFLRYPLTDY

SEQ ID NO: 34984 - protein, 189 aa, Homo sapiens
MALPFALMMALVVLSCKSSCSLGCNLSQTHSLNNRRTLMLMAQMRRISPFSCLKDRHDFEFPQEEFDGNQFQKAQAISVLHEMMQQTFNLFSTKNSSAAWDETLLEKFYIELFQQMNDLEACVIQEVGVEETPLMNEDSILAVKKYFQRITLYLMEKKYSPCAWEVVRAEIMRSLSFSTNLQKRLRRKD

SEQ ID NO: 34985 - protein, 241 aa, Homo sapiens
MGTASRSNIARHLQTNLILFCVGAVGACTLSVTQPWYLEVDYTHEAVTIKCTFSATGCPSEQPTCLWFRYGAHQPENLCLDGCKSEADKFTVREALKENQVSLTVNRVTSNDSAIYICGIAFPSVPEARAKQTGGGTTLVVREIKLLSKELRSFLTALVSLLSVYVTGVCVAFILLSKSKSNPLRNKEIKEDSQKKKSARRIFQEIAQELYHKRHVETNQQSEKDNNTYENRRVLSNYERP

SEQ ID NO: 34986 - protein, 189 aa, Homo sapiens
MALSFSLLMAVLVLSYKSICSLGCDLPQTHSLGNRRALILLAQMGRISHFSCLKDRHDFGFPEEEFDGHQFQKAQAISVLHEMIQQTFNLFSTEDSSAAWEQSLLEKFSTELYQQLNDLEACVIQEVGVEETPLMNEDSILAVRKYFQRITLYLTEKKYSPCAWEVVRAEIMRSLSFSTNLQKRLRRKD

SEQ ID NO: 34987 - protein, 304 aa, Homo sapiens
MADNSSDECEEENNKEKKKTSQLTPQRGFSENEDDDDDDDDSSETDSDSDDDDEEHGAPLEGAYDPADYEHLPVSAEIKELFQYISRYTPQLIDLDHKLKPFIPDFIPAVGDIDAFLKVPRPDGKPDNLGLLVLDEPSTKQSDPTVLSLWLTENSKQHNITQHMKVKSLEDAEKNPKAIDTWIESISELHRSKPPATVHYTRPMPDIDTLMQEWSPEFEELLGKVSLPTAEIDCSLAEYIDMICAILDIPVYKSRIQSLHLLFSLYSEFKNSQHFKALAEGKKAFTPSSNSTSQAGDMETLTFS

SEQ ID NO: 34988 - protein, 355 aa, Homo sapiens
MADNSSDECEEENNKVLREGMPQAPGHRGKDMDPVPPAPASLKCHQTPSHVLERVGWYRESQKHRKEKKKTSQLTPQRGFSENEDDDDDDDDSSETDSDSDDDDEEHGAPLEGAYDPADYEHLPVSAEIKELFQYISRYTPQLIDLDHKLKPFIPDFIPAVGDIDAFLKVPRPDGKPDNLGLLVLDEPSTKQSDPTVLSLWLTENSKQHNITQHMKVKSLEDAEKNPKAIDTWIESISELHRSKPPATVHYTRPMPDIDTLMQEWSPEFEELLGKVSLPTAEIDCSLAEYIDMICAILDIPVYKSRIQSLHLLFSLYSEFKNSQHFKALAEGKKAFTPSSNSTSQAGDMETLTFS

SEQ ID NO: 34989 - protein, 275 aa, Homo sapiens
MSSFGYRTLTVALFTLICCPGSDEKVFEVHVRPKKLAVEPKGSLEVNCSTTCNQPEVGGLETSLDKILLDEQAQWKHYLVSNISHDTVLQCHFTCSGKQESMNSNVSVYQPPRQVILTLQPTLVAVGKSFTIECRVPTVEPLDSLTLFLFRGNETLHYETFGKAAPAPQEATATFNSTADREDGHRNFSCLAVLDLMSRGGNIFHKHSAPKMLEIYEPVSDSQMVIIVTVVSVLLSLFVTSVLLCFIFGQHLRQQRMGTYGVRAAWRRLPQAFRP

SEQ ID NO: 34990 - protein, 643 aa, Homo sapiens
MLLPCHWVLDATFSDGSLGQWVKNTCATYALSPVVLPPQPQPRKKATDKDYSAFHLGHLREVRLFLRGGTSDQRMDSLVLCPTYFKLWRTLSGSPGLQLSDLHFGSQPEGKFSLRRAVSVKQREEPQDWPLNEKRTLWKDSDLPTWRRGTGYTLSLPAVSPGKRLWGEKAGSLPESEPLFTYTLDEKVDKLVQFLLLKYQAKEPLTRAEMQMNVINTYTGYFPMIFRKAREFIEILFGISLTEVDPDHFYVFVNTLDLTCEGSLSDEQGMPQNRLLILILSVIFIKGNCASEEVIWEVLNAIGPWSALAGFADVLSRLALWESEGPEAFCEESGLRSAEGSVLDLANPQGLAGHRQEDGRRGLTEASPQQKKGGEDEDMPAAGMPPLPQSPPEIPPQGPPKISPQGPPQSPPQSPLDSCSSPLLWTRLDEESSSEEEDTATWHALPESESLPRYALDEKVAELVQFLLLKYQTKEPVTKAEMLTTVIKKYKDYFPMIFGKAHEFIELIFGIALTDMDPDNHSYFFEDTLDLTYEGSLIDDQGMPKNCLLILILSMIFIKGSCVPEEVIWEVLSAIGPIQRPAREVLEFLSKLSSIIPSAFPSWYMDALKDMEDRAQAIIDTTDDATAMASASPSVMSTNFCPE

SEQ ID NO: 34991 - protein, 346 aa, Homo sapiens
MPLFPNLPRLSFEEDFQNPSVTEDLVDAQDSIDEEEEDASSTSSSSFHFLFPSSSSLSSSSPLSSPLPSTLILGVPEDEDMPAAGMPPLPQSPPEIPPQGPPKISPQGPPQSPPQSPLDSCSSPLLWTRLDEESSSEEEDTATWHALPESESLPRYALDEKVAELVQFLLLKYQTKEPVTKAEMLTTVIKKYKDYFPMIFGKAHEFIELIFGIALTDMDPDNHSYFFEDTLDLTYEGSLIDDQGMPKNCLLILILSMIFIKGSCVPEEVIWEVLSAIGVCAGREHFIYGDPRKLLTIHWVQRKYLEYREVPNSAPPRYEFLWGPRAHSEASKRSLRVFIQAIQYHP

SEQ ID NO: 34992 - protein, 572 aa, Homo sapiens
MEPEAPRRRHTHQRGYLLTRNPHLNKDLAFTLEERQQLNIHGLLPPSFNSQEIQVLRVVKNFEHLNSDFDRYLLLMDLQDRNEKLFYRVLTSDIEKFMPIVYTPTVGLACQQYSLVFRKPRGLFITIHDRGHIASVLNAWPEDVIKAIVVTDGERILGLGDLGCNGMGIPVGKLALYTACGGMNPQECLPVILDVGTENEELLKDPLYIGLRQRRVRGSEYDDFLDEFMEAVSSKYGMNCLIQFEDFANVNAFRLLNKYRNQYCTFNDDIQGTASVAVAGLLAALRITKNKLSDQTILFQGAGEAALGIAHLIVMALEKEGLPKEKAIKKIWLVDSKGLIVKGRASLTQEKEKFAHEHEEMKNLEAIVQEIKPTALIGVAAIGGAFSEQILKDMAAFNERPIIFALSNPTSKAECSAEQCYKITKGRAIFASGSPFDPVTLPNGQTLYPGQGNNSYVFPGVALGVVACGLRQITDNIFLTTAEVIAQQVSDKHLEEGRLYPPLNTIRDVSLKIAEKIVKDAYQEKTATVYPEPQNKEAFVRSQMYSTDYDQILPDCYSWPEEVQKIQTKVDQ

SEQ ID NO: 34993 - protein, 497 aa, Homo sapiens
MDLQDRNEKLFYRVLTSDIEKFMPIVYTPTVGLACQQYSLVFRKPRGLFITIHDRGHIASVLNAWPEDVIKAIVVTDGERILGLGDLGCNGMGIPVGKLALYTACGGMNPQECLPVILDVGTENEELLKDPLYIGLRQRRVRGSEYDDFLDEFMEAVSSKYGMNCLIQFEDFANVNAFRLLNKYRNQYCTFNDDIQGTASVAVAGLLAALRITKNKLSDQTILFQGAGEAALGIAHLIVMALEKEGLPKEKAIKKIWLVDSKGLIVKGRASLTQEKEKFAHEHEEMKNLEAIVQEIKPTALIGVAAIGGAFSEQILKDMAAFNERPIIFALSNPTSKAECSAEQCYKITKGRAIFASGSPFDPVTLPNGQTLYPGQGNNSYVFPGVALGVVACGLRQITDNIFLTTAEVIAQQVSDKHLEEGRLYPPLNTIRDVSLKIAEKIVKDAYQEKTATVYPEPQNKEAFVRSQMYSTDYDQILPDCYSWPEEVQKIQTKVDQ

SEQ ID NO: 34994 - protein, 154 aa, Homo sapiens
MADDLDFETGDAGASATFPMQCSALRKNGFVVLKGWPCKIVEMSASKTGKHGHAKVHLVGIDIFTGKKYEDICPSTHNMDVPNIKRNDFQLIGIQDGYLSLLQDSGEVPEDLRLPEGDLGKEIEQKYDCGEEILITVLSAMTEEAAVAIKAMAK

SEQ ID NO: 34995 - protein, 156 aa, Homo sapiens
MCHSRSCHPTMTILQAPTPAPSTIPGPRRGSGPEIFTFDPLPEPAAAPAGRPSASRGHRKRSRRVLYPRVVRRQLPVEEPNPAKRLLFLLLTIVFCQILMAEEGVPAPLPPEDAPNAASLAPTPVSAVLEPFNLTSEPSDYALDLSTFLQQHPAAF

SEQ ID NO: 34996 - protein, 219 aa, Homo sapiens
MPRGRKSRRRRNARAAEENRNNRKIQASEASETPMAASVVASTPEDDLSGPEEDPSTPEEASTTPEEASSTAQAQKPSVPRSNFQGTKKSLLMSILALIFIMGNSAKEALVWKVLGKLGMQPGRQHSIFGDPKKIVTEEFVRRGYLIYKPVPRSSPVEYEFFWGPRAHVESSKLKVMHFVARVRNRCSKDWPCNYDWDSDDDAEVEAILNSGARGYSAP

SEQ ID NO: 34997 - protein, 248 aa, Homo sapiens
MALCEAAGCGSALLWPRLLLFGDSITQFSFQQGGWGASLADRLVRKCDVLNRGFSGYNTRWAKIILPRLIRKGNSLDIPVAVTIFFGANDSALKDENPKQHIPLEEYAANLKSMVQYLKSVDIPENRVILITPTPLCETAWEEQCIIQGCKLNRLNSVVGEYANACLQVAQDCGTDVLDLWTLMQDSQDFSSYLSDGLHLSPKGNEFLFSHLWPLIEKKVSSLPLLLPYWRDVAEAKPELSLLGDGDH

SEQ ID NO: 34998 - protein, 135 aa, Homo sapiens
MVQYLKSVDIPENRVILITPTPLCETAWEEQCIIQGCKLNRLNSVVGEYANACLQVAQDCGTDVLDLWTLMQDSQDFSSYLSDGLHLSPKGNEFLFSHLWPLIEKKVSSLPLLLPYWRDVAEAKPELSLLGDGDH

SEQ ID NO: 34999 - protein, 699 aa, Homo sapiens
MAACEGRRSGALGSSQSDFLTPPVGGAPWAVATTVVMYPPPPPPPHRDFISVTLSFGENYDNSKSWRRRSCWRKWKQLSRLQRNMILFLLAFLLFCGLLFYINLADHWKALAFRLEEEQKMRPEIAGLKPANPPVLPAPQKADTDPENLPEISSQKTQRHIQRGPPHLQIRPPSQDLKDGTQEEATKRQEAPVDPRPEGDPQRTVISWRGAVIEPEQGTELPSRRAEVPTKPPLPPARTQGTPVHLNYRQKGVIDVFLHAWKGYRKFAWGHDELKPVSRSFSEWFGLGLTLIDALDTMWILGLRKEFEEARKWVSKKLHFEKDVDVNLFESTIRILGGLLSAYHLSGDSLFLRKAEDFGNRLMPAFRTPSKIPYSDVNIGTGVAHPPRWTSDSTVAEVTSIQLEFRELSRLTGDKKFQEAVEKVTQHIHGLSGKKDGLVPMFINTHSGLFTHLGVFTLGARADSYYEYLLKQWIQGGKQETQLLEDYVEAIEGVRTHLLRHSEPSKLTFVGELAHGRFSAKMDHLVCFLPGTLALGVYHGLPASHMELAQELMETCYQMNRQMETGLSPEIVHFNLYPQPGRRDVEVKPADRHNLLRPETVESLFYLYRVTGDRKYQDWGWEILQSFSRFTRVPSGGYSSINNVQDPQKPEPRDKMESFFLGETLKYLFLLFSDDPNLLSLDAYVFNTEAHPLPIWTPA

SEQ ID NO: 35000 - protein, 1491 aa, Homo sapiens
MSKVIQKKNHWTSRVHECTVKRGPQGELGVTVLGGAEHGEFPYVGAVAAVEAAGLPGGGEGPRLGEGELLLEVQGVRVSGLPRYDVLGVIDSCKEAVTFKAVRQGGRLNKDLRHFLNQRFQKGSPDHELQQTIRDNLYRHAVPCTTRSPREGEVPGVDYNFLTVKEFLDLEQSGTLLEVGTYEGNYYGTPKPPSQPVSGKVITTDALHSLQSGSKQSTPKRTKSYNDMQNAGIVHAENEEEDDVPEMNSSFTADSGEQEEHTLQETALPPVNSSIIAAPITDPSQKFPQYLPLSAEDNLGPLPENWEMAYTENGEVYFIDHNTKTTSWLDPRCLNKQQKPLEECEDDEGVHTEELDSELELPAGWEKIEDPVYGIYYVDHINRKTQYENPVLEAKRKKQLEQQQQQQQQQQQQQQQQQQQQTEEWTEDHSALVPPVIPNHPPSNPEPAREVPLQGKPFFTRNPSELKGKFIHTKLRKSSRGFGFTVVGGDEPDEFLQIKSLVLDGPAALDGKMETGDVIVSVNDTCVLGHTHAQVVKIFQSIPIGASVDLELCRGYPLPFDPDDPNTSLVTSVAILDKEPIIVNGQETYDSPASHSSKTGKVNGMKDARPSSPADVASNSSHGYPNDTVSLASSIATQPELITVHIVKGPMGFGFTIADSPGGGGQRVKQIVDSPRCRGLKEGDLIVEVNKKNVQALTHNQVVDMLVECPKGSEVTLLVQRGGLPVPKKSPKSQPLERKDSQNSSQHSVSSHRSLHTASPSHSTQVLPEFPPAEAQAPDQTDSSGQKKPDPFKIWAQSRSMYENRPMSPSPASGLSKGEREREINSTNFGECPIPDYQEQDIFLWRKETGFGFRILGGNEPGEPIYIGHIVPLGAADTDGRLRSGDELICVDGTPVIGKSHQLVVQLMQQAAKQGHVNLTVRRKVVFAVPKTENEVPSPASSHHSSNQPASLTEEKRTPQGSQNSLNTVSSGSGSTSGIGSGGGGGSGVVSTVVQPYDVEIRRGENEGFGFVIVSSVSRPEAGTTFAGNACVAMPHKIGRIIEGSPADRCGKLKVGDRILAVNGCSITNKSHSDIVNLIKEAGNTVTLRIIPGDESSNATLLTNAEKIATITTTHTPSQQGTQETRNTTKPKQESQFEFKAPQATQEQDFYTVELERGAKGFGFSLRGGREYNMDLYVLRLAEDGPAERCGKMRIGDEILEINGETTKNMKHSRAIELIKNGGRRVRLFLKRGDGSVPEYDPSSDRHGPATGPQGVPEVRAGPDRRQHPSLESSYPPDLHKSSPHGEKRAHARDPKGSREYSRQPNEHHTWNGTSRKPDSGACRPKDRAPEGRRDAQAERAAAANGPKRRSPEKRREGTRSADNTLERREKHEKRRDVSPERRRERSPTRRRDGSPSRRRRSLERLLEQRRSPERRRGGSPERRAKSTDRRRARSPERRRERSLDKRNREDRASHREREEANLKQDAGRSSRHPPEQRRRPYKECSTDLSI

SEQ ID NO: 35001 - protein, 1462 aa, Homo sapiens
MSKVIQKKNHWTSRVHECTVKRGPQGELGVTVLGGAEHGEFPYVGAVAAVEAAGLPGGGEGPRLGEGELLLEVQGVRVSGLPRYDVLGVIDSCKEAVTFKAVRQGGRLNKDLRHFLNQRFQKGSPDHELQQTIRDNLYRHAVPCTTRSPREGEVPGVDYNFLTVKEFLDLEQSGTLLEVGTYEGNYYGTPKPPSQPVSGKVITTDALHSLQSGSKQSTPKRTKSYNDMQNAGIVHAENEEEDDVPEMNSSFTADSGEQEEHTLQETALPPVNSSIIAAPITDPSQKFPQYLPLSAEDNLGPLPENWEMAYTENGEVYFIDHNTKTTSWLDPRCLNKQQKPLEECEDDEGVHTEELDSELELPAGWEKIEDPVYGIYYVDHINRKTQYENPVLEAKRKKQLEQQQQQQQQQQQQQQQQQQQQTEEWTEDHSALVPPVIPNHPPSNPEPAREVPLQGKPFFTRNPSELKGKFIHTKLRKSSRGFGFTVVGGDEPDEFLQIKSLVLDGPAALDGKMETGDVIVSVNDTCVLGHTHAQVVKIFQSIPIGASVDLELCRGYPLPFDPDDPNTSLVTSVAILDKEPIIVNGQETYDSPASHSSKTGKVNGMKDARPSSPADVASNSSHGYPNDTVSLASSIATQPELITVHIVKGPMGFGFTIADSPGGGGQRVKQIVDSPRCRGLKEGDLIVEVNKKNVQALTHNQVVDMLVECPKGSEVTLLVQRGGLPVPKKSPKSQPLERKDSQNSSQHSVSSHRSLHTASPSHSTQVLPEFPPAEAQAPDQTDSSGQKKPDPFKIWAQSRSMYENRLPDYQEQDIFLWRKETGFGFRILGGNEPGEPIYIGHIVPLGAADTDGRLRSGDELICVDGTPVIGKSHQLVVQLMQQAAKQGHVNLTVRRKVVFAVPKTENEVPSPASSHHSSNQPASLTEEKRTPQGSQNSLNTVSSGSGSTSGIGSGGGGGSGVVSTVVQPYDVEIRRGENEGFGFVIVSSVSRPEAGTTFGNACVAMPHKIGRIIEGSPADRCGKLKVGDRILAVNGCSITNKSHSDIVNLIKEAGNTVTLRIIPGDESSNATLLTNAEKIATITTTHTPSQQGTQETRNTTKPKQESQFEFKAPQATQEQDFYTVELERGAKGFGFSLRGGREYNMDLYVLRLAEDGPAERCGKMRIGDEILEINGETTKNMKHSRAIELIKNGGRRVRLFLKRGDGSVPEYDPSSDRHGPATGPQGVPEVRAGPDRRQHPSLESSYPPDLHKSSPHGEKRAHARDPKGSREYSRQPNEHHTWNGTSRKPDSGACRPKDRAPEGRRDAQAERAAAANGPKRRSPEKRREGTRSADNTLERREKHEKRRDVSPERRRERSPTRRRDGSPSRRRRSLERLLEQRRSPERRRGGSPERRAKSTDRRRARSPERRRERSLDKRNREDRASHREREEANLKQDAGRSSRHPPEQRRRPYKECSTDLSI

SEQ ID NO: 35002 - protein, 1256 aa, Homo sapiens
MSKVIQKKNHWTSRVHECTVKRGPQGELGVTVLGGAEHGEFPYVGAVAAVEAAGLPGGGEGPRLGEGELLLEVQGVRVSGLPRYDVLGVIDSCKEAVTFKAVRQGGRLNKDLRHFLNQRFQKGSPDHELQQTIRDNLYRHAVPCTTRSPREGEVPGVDYNFLTVKEFLDLEQSGTLLEVGTYEGNYYGTPKPPSQPVSGKVITTDALHSLQSGSKQSTPKRTKSYNDMQNAGIVHAENEEEDDVPEMNSSFTADSGEQEEHTLQETALPPVNSSIIAAPITDPSQKFPQYLPLSAEDNLGPLPENWEMAYTENGEVYFIDHNTKTTSWLDPRCLNKQQKPLEECEDDEGVHTEELDSELELPAGWEKIEDPVYGIYYVDHINRKTQYENPVLEAKRKKQLEQQQQQQQQQQQQQQQQQQQQTEEWTEDHSALVPPVIPNHPPSNPEPAREVPLQGKPFFTRNPSELKGKFIHTKLRKSSRGFGFTVVGGDEPDEFLQIKSLVLDGPAALDGKMETGDVIVSVNDTCVLGHTHAQVVKIFQSIPIGASVDLELCRGYPLPFDPDDPNTSLVTSVAILDKEPIIVNGQETYDSPASHSSKTGKVNGMKDARPSSPADVASNSSHGYPNDTVSLASSIATQPELITVHIVKGPMGFGFTIADSPGGGGQRVKQIVDSPRCRGLKEGDLIVEVNKKNVQALTHNQVVDMLVECPKGSEVTLLVQRGGLPVPKKSPKSQPLERKDSQNSSQHSVSSHRSLHTASPSHSTQVLPEFPPAEAQAPDQTDSSGQKKPDPFKIWAQSRSMYENRPMSPSPASGLSKGEREREINSTNFGECPIPDYQEQDIFLWRKETGFGFRILGGNEPGEPIYIGHIVPLGAADTDGRLRSGDELICVDGTPVIGKSHQLVVQLMQQAAKQGHVNLTVRRKVVFAVPKTENEVPSPASSHHSSNQPASLTEEKRTPQGSQNSLNTVSSGSGSTSGIGSGGGGGSGVVSTVVQPYDVEIRRGENEGFGFVIVSSVSRPEAGTTFAGNACVAMPHKIGRIIEGSPADRCGKLKVGDRILAVNGCSITNKSHSDIVNLIKEAGNTVTLRIIPGDESSNATLLTNAEKIATITTTHTPSQQGTQETRNTTKPKQESQFEFKAPQATQEQDFYTVELERGAKGFGFSLRGGREYNMDLYVLRLAEDGPAERCGKMRIGDEILEINGETTKNMKHSRAIELIKNGGRRVRLFLKRGDGSVPEYGGSNYENIPSFPGMTP

SEQ ID NO: 35003 - protein, 1160 aa, Homo sapiens
MSKVIQKKNHWTSRVHECTVKRGPQGELGVTVLGGAEHGEFPYVGAVAAVEAAGLPGGGEGPRLGEGELLLEVQGVRVSGLPRYDVLGVIDSCKEAVTFKAVRQGGRLNKDLRHFLNQRFQKGSPDHELQQTIRDNLYRHAVPCTTRSPREGEVPGVDYNFLTVKEFLDLEQSGTLLEVGTYEGNYYGTPKPPSQPVSGKVITTDALHSLQSGSKQSTPKRTKSYNDMQNAGIVHAENEEEDDVPEMNSSFTADSGEQEEHTLQETALPPVNSSIIAAPITDPSQKFPQYLPLSAEDNLGPLPENWEMAYTENGEVYFIDHNTKTTSWLDPRCLNKQQKPLEECEDDEGVHTEELDSELELPAGWEKIEDPVYGIYYVDHINRKTQYENPVLEAKRKKQLEQQQQQQQQQQQQQQQQQQQQTEEWTEDHSALVPPVIPNHPPSNPEPAREVPLQGKPFFTRNPSELKGKFIHTKLRKSSRGFGFTVVGGDEPDEFLQIKSLVLDGPAALDGKMETGDVIVSVNDTCVLGHTHAQVVKIFQSIPIGASVDLELCRGYPLPFDPDDPNTSLVTSVAILDKEPIIVNGQETYDSPASHSSKTGKVNGMKDARPSSPADVASNSSHGYPNDTVSLASSIATQPELITVHIVKGPMGFGFTIADSPGGGGQRVKQIVDSPRCRGLKEGDLIVEVNKKNVQALTHNQVVDMLVECPKGSEVTLLVQRGGLPVPKKSPKSQPLERKDSQNSSQHSVSSHRSLHTASPSHSTQVLPEFPPAEAQAPDQTDSSGQKKPDPFKIWAQSRSMYENRLPDYQEQDIFLWRKETGFGFRILGGNEPGEPIYIGHIVPLGAADTDGRLRSGDELICVDGTPVIGKSHQLVVQLMQQAAKQGHVNLTVRRKVVFAVPKTENEVPSPASSHHSSNQPASLTEEKRTPQGSQNSLNTVSSGSGSTSGIGSGGGGGSGVVSTVVQPYDVEIRRGENEGFGFVIVSSVSRPEAGTTFESSNATLLTNAEKIATITTTHTPSQQGTQETRNTTKPKQESQFEFKAPQATQEQDFYTVELERGAKGFGFSLRGGREYNMDLYVLRLAEDGPAERCGKMRIGDEILEINGETTKNMKHSRAIELIKNGGRRVRLFLKRGDGSVPEYGGSNYENIPSFPGMTP

SEQ ID NO: 35004 - protein, 1287 aa, Homo sapiens
MSKVIQKKNHWTSRVHECTVKRGPQGELGVTVLGGAEHGEFPYVGAVAAVEAAGLPGGGEGPRLGEGELLLEVQGVRVSGLPRYDVLGVIDSCKEAVTFKAVRQGGRLNKDLRHFLNQRFQKGSPDHELQQTIRDNLYRHAVPCTTRSPREGEVPGVDYNFLTVKEFLDLEQSGTLLEVGTYEGNYYGTPKPPSQPVSGKVITTDALHSLQSGSKQSTPKRTKSYNDMQNAGIVHAENEEEDDVPEMNSSFTADSGEQEEHTLQETALPPVNSSIIAAPITDPSQKFPQYLPLSAEDNLGPLPENWEMAYTENGEVYFIDHNTKTTSWLDPRCLNKQQKPLEECEDDEGVHTEELDSELELPAGWEKIEDPVYGIYYVDHINRKTQYENPVLEAKRKKQLEQQQQQQQQQQQQQQQQQQQQTEEWTEDHSALVPPVIPNHPPSNPEPAREVPLQGKPFFTRNPSELKGKFIHTKLRKSSRGFGFTVVGGDEPDEFLQIKSLVLDGPAALDGKMETGDVIVSVNDTCVLGHTHAQVVKIFQSIPIGASVDLELCRGYPLPFDPDDPNTSLVTSVAILDKEPIIVNGQETYDSPASHSSKTGKVNGMKDARPSSPADVASNSSHGYPNDTVSLASSIATQPELITVHIVKGPMGFGFTIADSPGGGGQRVKQIVDSPRCRGLKEGDLIVEVNKKNVQALTHNQVVDMLVECPKGSEVTLLVQRGGLPVPKKSPKSQPLERKDSQNSSQHSVSSHRSLHTASPSHSTQVLPEFPPAEAQAPDQTDSSGQKKPDPFKIWAQSRSMYENRPMSPSPASGLSKGEREREINSTNFGECPIPDYQEQDIFLWRKETGFGFRILGGNEPGEPIYIGHIVPLGAADTDGRLRSGDELICVDGTPVIGKSHQLVVQLMQQAAKQGHVNLTVRRKVVFAVPKTENEVPSPASSHHSSNQPASLTEEKRTPQGSQNSLNTVSSGSGSTSGIGSGGGGGSGVVSTVVQPYDVEIRRGENEGFGFVIVSSVSRPEAGTTFGNACVAMPHKIGRIIEGSPADRCGKLKVGDRILAVNGCSITNKSHSDIVNLIKEAGNTVTLRIIPGDESSNATLLTNAEKIATITTTHTPSQQGTQETRNTTKPKQESQFEFKAPQATQEQDFYTVELERGAKGFGFSLRGGREYNMDLYVLRLAEDGPAERCGKMRIGDEILEINGETTKNMKHSRAIELIKNGGRRVRLFLKRGDGSVPEYAMIPPNIAACMRNEKLGEACFYLMGHNQTTTPAATATAPPPVHKVFRK

SEQ ID NO: 35005 - protein, 1451 aa, Homo sapiens
MSKVIQKKNHWTSRVHECTVKRGPQGELGVTVLGGAEHGEFPYVGAVAAVEAAGLPGGGEGPRLGEGELLLEVQGVRVSGLPRYDVLGVIDSCKEAVTFKAVRQGGRLNKDLRHFLNQRFQKGSPDHELQQTIRDNLYRHAVPCTTRSPREGEVPGVDYNFLTVKEFLDLEQSGTLLEVGTYEGNYYGTPKPPSQPVSGKVITTDALHSLQSGSKQSTPKRTKSYNDMQNAGIVHAENEEEDDVPEMNSSFTADSGEQEEHTLQETALPPVNSSIIAAPITDPSQKFPQYLPLSAEDNLGPLPENWEMAYTENGEVYFIDHNTKTTSWLDPRCLNKQQKPLEECEDDEGVHTEELDSELELPAGWEKIEDPVYGIYYVDHINRKTQYENPVLEAKRKKQLEQQQQQQQQQQQQQQQQQQQQTEEWTEDHSALVPPVIPNHPPSNPEPAREVPLQGKPFFTRNPSELKGKFIHTKLRKSSRGFGFTVVGGDEPDEFLQIKSLVLDGPAALDGKMETGDVIVSVNDTCVLGHTHAQVVKIFQSIPIGASVDLELCRGYPLPFDPDDPNTSLVTSVAILDKEPIIVNGQETYDSPASHSSKTGKVNGMKDARPSSPADVASNSSHGYPNDTVSLASSIATQPELITVHIVKGPMGFGFTIADSPGGGGQRVKQIVDSPRCRGLKEGDLIVEVNKKNVQALTHNQVVDMLVECPKGSEVTLLVQRGGLPVPKKSPKSQPLERKDSQNSSQHSVSSHRSLHTASPSHSTQVLPEFPPAEAQAPDQTDSSGQKKPDPFKIWAQSRSMYENRLPDYQEQDIFLWRKETGFGFRILGGNEPGEPIYIGHIVPLGAADTDGRLRSGDELICVDGTPVIGKSHQLVVQLMQQAAKQGHVNLTVRRKVVFAVPKTENEVPSPASSHHSSNQPASLTEEKRTPQGSQNSLNTVSSGSGSTSGIGSGGGGGSGVVSTVVQPYDVEIRRGENEGFGFVIVSSVSRPEAGTTFGRIIEGSPADRCGKLKVGDRILAVNGCSITNKSHSDIVNLIKEAGNTVTLRIIPGDESSNATLLTNAEKIATITTTHTPSQQGTQETRNTTKPKQESQFEFKAPQATQEQDFYTVELERGAKGFGFSLRGGREYNMDLYVLRLAEDGPAERCGKMRIGDEILEINGETTKNMKHSRAIELIKNGGRRVRLFLKRGDGSVPEYDPSSDRHGPATGPQGVPEVRAGPDRRQHPSLESSYPPDLHKSSPHGEKRAHARDPKGSREYSRQPNEHHTWNGTSRKPDSGACRPKDRAPEGRRDAQAERAAAANGPKRRSPEKRREGTRSADNTLERREKHEKRRDVSPERRRERSPTRRRDGSPSRRRRSLERLLEQRRSPERRRGGSPERRAKSTDRRRARSPERRRERSLDKRNREDRASHREREEANLKQDAGRSSRHPPEQRRRPYKECSTDLSI

SEQ ID NO: 35006 - protein, 1425 aa, Homo sapiens
MSKVIQKKNHWTSRVHECTVKRGPQGELGVTVLGGAEHGEFPYVGAVAAVEAAGLPGGGEGPRLGEGELLLEVQGVRVSGLPRYDVLGVIDSCKEAVTFKAVRQGGRLNKDLRHFLNQRFQKGSPDHELQQTIRDNLYRHAVPCTTRSPREGEVPGVDYNFLTVKEFLDLEQSGTLLEVGTYEGNYYGTPKPPSQPVSGKVITTDALHSLQSGSKQSTPKRTKSYNDMQNAGIVHAENEEEDDVPEMNSSFTADSGEQEEHTLQETALPPVNSSIIAAPITDPSQKFPQYLPLSAEDNLGPLPENWEMAYTENGEVYFIDHNTKTTSWLDPRCLNKQQKPLEECEDDEGVHTEELDSELELPAGWEKIEDPVYGIYYVDHINRKTQYENPVLEAKRKKQLEQQQQQQQQQQQQQQQQQQQQTEEWTEDHSALVPPVIPNHPPSNPEPAREVPLQGKPFFTRNPSELKGKFIHTKLRKSSRGFGFTVVGGDEPDEFLQIKSLVLDGPAALDGKMETGDVIVSVNDTCVLGHTHAQVVKIFQSIPIGASVDLELCRGYPLPFDPDDPNTSLVTSVAILDKEPIIVNGQETYDSPASHSSKTGKVNGMKDARPSSPADVASNSSHGYPNDTVSLASSIATQPELITVHIVKGPMGFGFTIADSPGGGGQRVKQIVDSPRCRGLKEGDLIVEVNKKNVQALTHNQVVDMLVECPKGSEVTLLVQRGGLPVPKKSPKSQPLERKDSQNSSQHSVSSHRSLHTASPSHSTQVLPEFPPAEAQAPDQTDSSGQKKPDPFKIWAQSRSMYENRLPDYQEQDIFLWRKETGFGFRILGGNEPGEPIYIGHIVPLGAADTDGRLRSGDELICVDGTPVIGKSHQLVVQLMQQAAKQGHVNLTVRRKVVFAVPKTENEVPSPASSHHSSNQPASLTEEKRTPQGSQNSLNTVSSGSGSTSGIGSGGGGGSGVVSTVVQPYDVEIRRGENEGFGFVIVSSVSRPEAVMQCQPPSWCHSALGGSKHCNSVMGAASLEVQIYSCNNPTLLTNAEKIATITTTHTPSQQGTQETRNTTKPKQESQFEFKAPQATQEQDFYTVELERGAKGFGFSLRGGREYNMDLYVLRLAEDGPAERCGKMRIGDEILEINGETTKNMKHSRAIELIKNGGRRVRLFLKRGDGSVPEYDPSSDRHGPATGPQGVPEVRAGPDRRQHPSLESSYPPDLHKSSPHGEKRAHARDPKGSREYSRQPNEHHTWNGTSRKPDSGACRPKDRAPEGRRDAQAERAAAANGPKRRSPEKRREGTRSADNTLERREKHEKRRDVSPERRRERSPTRRRDGSPSRRRRSLERLLEQRRSPERRRGGSPERRAKSTDRRRARSPERRRERSLDKRNREDRASHREREEANLKQDAGRSSRHPPEQRRRPYKECSTDLSI

SEQ ID NO: 35007 - protein, 630 aa, Homo sapiens
MLMRKVPGFVPASPWGLRLPQKFLFLLFLSGLVTLCFGALFLLPHSSRLKRLFLAPRTQQPGLEVVAEIAGHAPAREQEPPPNPAPAAPAPGEDDPSSWASPRRRKGGLRRTRPTGPREEATAARGNSIPASRPGDEGVPFRFDFNAFRSRLRHPVLGTRADESQEPQSQVRAQREKIKEMMQFAWQSYKRYAMGKNELRPLTKDGYEGNMFGGLSGATVIDSLDTLYLMELKEEFQEAKAWVGESFHLNVSGEASLFEVNIRYIGGLLSAFYLTGEEVFRIKAIRLGEKLLPAFNTPTGIPKGVVSFKSGNWGWATAGSSSILAEFGSLHLEFLHLTELSGNQVFAEKVRNIRKVLRKIEKPFGLYPNFLSPVSGNWVQHHVSVGGLGDSFYEYLIKSWLMSGKTDMEAKNMYYEALEAIETYLLNVSPGGLTYIAEWRGGILDHKMGHLACFSGGMIALGAEDAKEEKRAHYRELAAQITKTCHESYARSDTKLGPEAFWFNSGREAVATQLSESYYILRPEVVESYMYLWRQTHNPIYREWGWEVVLALEKYCRTEAGFSGIQDVYSSTPNHDNKQQSFFLAETLKYLYLLFSEDDLLSLEDWVFNTEAHPLPVNHSDSSGRAWGRH

SEQ ID NO: 35008 - protein, 117 aa, Homo sapiens
MDWTWRFLFVVAAATGVQSQVQLVQSGAEVKKPGSSVKVSCKASGGTFSSYAISWVRQAPGQGLEWMGGIIPIFGTANYAQKFQGRVTITADKSTSTAYMELSSLRSEDTAVYYCAR

SEQ ID NO: 35009 - protein, 1150 aa, Homo sapiens
MKLKKQVTVCGAAIFCVAVFSLYLMLDRVQHDPTRHQNGGNFPRSQISVLQNRIEQLEQLLEENHEIISHIKDSVLELTANAEGPPAMLPYYTVNGSWVVPPEPRPSFFSISPQDCQFALGGRGQKPELQMLTVSEELPFDNVDGGVWRQGFDISYDPHDWDAEDLQVFVVPHSHNDPGWIKTFDKYYTEQTQHILNSMVSKLQEDPRRRFLWAEVSFFAKWWDNINVQKRAAVRRLVGNGQLEIATGGWVMPDEANSHYFALIDQLIEGHQWLERNLGATPRSGWAVDPFGYSSTMPYLLRRANLTSMLIQRVHYAIKKHFAATHSLEFMWRQTWDSDSSTDIFCHMMPFYSYDVPHTCGPDPKICCQFDFKRLPGGRINCPWKVPPRAITEANVAERAALLLDQYRKKSQLFRSNVLLVPLGDDFRYDKPQEWDAQFFNYQRLFDFFNSRPNLHVQAQFGTLSDYFDALYKRTGVEPGARPPGFPVLSGDFFSYADREDHYWTGYYTSRPFYKSLDRVLEAHLRGAEVLYSLAAAHARRSGLAGRYPLSDFTLLTEARRTLGLFQHHDAITGTAKEAVVVDYGVRLLRSLVNLKQVIIHAAHYLVLGDKETYHFDPEAPFLQVDDTRLSHDALPERTVIQLDSSPRFVVLFNPLEQERFSMVSLLVNSPRVRVLSEEGQPLAVQISAHWSSATEAVPDVYQVSVPVRLPALGLGVLQLQLGLDGHRTLPSSVRIYLHGRQLSVSRHEAFPLRVIDSGTSDFALSNRYMQVWFSGLTGLLKSIRRVDEEHEQQVDMQVLVYGTRTSKDKSGAYLFLPDGEAKPYVPKEPPVLRVTEGPFFSEVVAYYEHIHQAVRLYNLPGVEGLSLDISSLVDIRDYVNKELALHIHTDIDSQGIFFTDLNGFQVQPRRYLKKLPLQANFYPMPVMAYIQDAQKRLTLHTAQALGVSSLKDGQLEVILDRRLMQDDNRGLGQGLKDNKRTCNRFRLLLERRTVGSEVQDSHSTSYPSLLSHLTSMYLNAPALALPVARMQLPGPGLRSFHPLASSLPCDFHLLNLRTLQAEEDTLPSAETALILHRKGFDCGLEAKNLGFNCTTSQGKVALGSLFHGLDVVFLQPTSLTLLYPLASPSNSTDVYLEPMEIATFRLRLG

SEQ ID NO: 35010 - protein, 1139 aa, Homo sapiens
MKLKKQVTVCGAAIFCVAVFSLYLMLDRVQHDPTRHQNGGNFPRSQISVLQNRIEQLEQLLEENHEIISHIKDSVLELTANAEGPPAMLPYYTVNGSWVVPPEPRPSFFSISPQDCQFALGGRGQKPELQMLTVSEELPFDNVDGGVWRQGFDISYDPHDWDAEDLQVFVVPHSHNDPGWIKTFDKYYTEQTQHILNSMVSKLQEDPRRRFLWAEVSFFAKWWDNINVQKRAAVRRLVGNGQLEIATGGWVMPDEANSHYFALIDQLIEGHQWLERNLGATPRSGWAVDPFGYSSTMPYLLRRANLTSMLIQRVHYAIKKHFAATHSLEFMWRQTWDSDSSTDIFCHMMPFYSYDVPHTCGPDPKICCQFDFKRLPGGRINCPWKVPPRAITEANVAERAALLLDQYRKKSQLFRSNVLLVPLGDDFRYDKPQEWDAQFFNYQRLFDFFNSRPNLHVQAQFGTLSDYFDALYKRTGVEPGARPPGFPVLSGDFFSYADREDHYWTGYYTSRPFYKSLDRVLEAHLRGAEVLYSLAAAHARRSGLAGRYPLSDFTLLTEARRTLGLFQHHDAITGTAKEAVVVDYGVRLLRSLVNLKQVIIHAAHYLVLGDKETYHFDPEAPFLQVDDTRLSHDALPERTVIQLDSSPRFVVLFNPLEQERFSMVSLLVNSPRVRVLSEEGQPLAVQISAHWSSATEAVPDVYQVSVPVRLPALGLGVLQLQLGLDGHRTLPSSVRIYLHGRQLSVSRHEAFPLRVIDSGTSDFALSNRYMQVWFSGLTGLLKGSGLCFLAEHPKGGMQVLVYGTRTSKDKSGAYLFLPDGEASPTSPRSPPCCVSLKALSSQRWLRTMSTFTRRSGFTICQGWRGCLWTYHPWWTSGTTSTRSWPCTSIQTSTARVQPRRYLKKLPLQANFYPMPVMAYIQDAQKRLTLHTAQALGVSSLKDGQLEVILDRRLMQDDNRGLGQGLKDNKRTCNRFRLLLERRTVGSEVQDSHSTSYPSLLSHLTSMYLNAPALALPVARMQLPGPGLRSFHPLASSLPCDFHLLNLRTLQAEEDTLPSAETALILHRKGFDCGLEAKNLGFNCTTSQGKVALGSLFHGLDVVFLQPTSLTLLYPLASPSNSTDVYLEPMEIATFRLRLG

SEQ ID NO: 35011 - protein, 796 aa, Homo sapiens
MKLKKQVTVCGAAIFCVAVFSLYLMLDRVQHDPTRHQNGGNFPRSQISVLQNRIEQLEQLLEENHEIISHIKDSVLELTANAEGPPAMLPYYTVNGSWVVPPEPRPSFFSISPQDCQFALGGRGQKPELQMLTVSEELPFDNVDGGVWRQGFDISYDPHDWDAEDLQVFVVPHSHNDPGWIKTFDKYYTEQTQHILNSMVSKLQEDPRRRFLWAEVSFFAKWWDNINVQKRAAVRRLVGNGQLEIATGGWVMPDEANSHYFALIDQLIEGHQWLERNLGATPRSGWAVDPFGYSSTMPYLLRRANLTSMLIQRVHYAIKKHFAATHSLEFMWRQTWDSDSSTDIFCHMMPFYSYDVPHTCGPDPKICCQFDFKRLPGGRINCPWKVPPRAITEANVAERAALLLDQYRKKSQLFRSNVLLVPLGDDFRYDKPQEWDAQFFNYQRLFDFFNSRPNLHVQAQFGTLSDYFDALYKRTGVEPGARPPGFPVLSGDFFSYADREDHYWTGYYTSRPFYKSLDRVLEAHLRGAEVLYSLAAAHARRSGLAGRYPLSDFTLLTEARRTLGLFQHHDAITGTAKEAVVVDYGVRLLRSLVNLKQVIIHAAHYLVLGDKETYHFDPEAPFLQVDDTRLSHDALPERTVIQLDSSPRFVVLFNPLEQERFSMVSLLVNSPRVRVLSEEGQPLAVQISAHWSSATEAVPDVYQVSVPVRLPALGLGVLQLQLGLDGHRTLPSSVRIYLHGRQLSVSRHEAFPLRVIDSGTSDFALSNRYMQVWFSGLTGLLKSIRRVDEEHEQQVD

SEQ ID NO: 35012 - protein, 273 aa, Homo sapiens
MDPVPGTDSAPLAGLAWSSASAPPPRGFSAISCTVEGAPASFGKSFAQKSGYFLCLSSLGSLENPQENVVADIQIVVDKSPLPLGFSPVCDPMDSKASVSKKKRMCVKLLPLGATDTAVFDVRLSGKTKTVPGYLRIGDMGGFAIWCKKAKAPRPVPKPRGLSRDMQGLSLDAASQPSKGGLLERTASRLGSRASTLRRNDSIYEASSLYGISAMDGVPFTLHPRFEGKSCSPLAFSAFGDLTIKSLADIEEEYNYGFVVEKTAAARLPPSVS

SEQ ID NO: 35013 - protein, 233 aa, Homo sapiens
MDPVPGTDSAPLAGLAWSSASAPPPRGFSAISCTVEGAPASFGKSFAQKSGYFLCLSSLGSLENPQENVVADIQIVVDKSPLPLGFSPVCDPMDSKASVSKKKRMCVKLLPLGATDTAVFDVRLSGKTKTVPGYLRIGKGGLLERTASRLGSRASTLRRNDSIYEASSLYGISAMDGVPFTLHPRFEGKSCSPLAFSAFGDLTIKSLADIEEEYNYGFVVEKTAAARLPPSVS

SEQ ID NO: 35014 - protein, 257 aa, Homo sapiens
MDPVPGTDSAPLAGLAWSSASAPPPRGFSAISCTVEGAPASFGKSFAQKSGYFLCLSSLGSLENPQENVVADIQIVVDKSPLPLGFSPVCDPMDSKASVSKKKRMCVKLLPLGATDTAVFDVRLSGKTKTVPGYLRIGDMGGFAIWCKKAKAPRPVPKPRGLSRDMQGLSLDAASQPSKGGLLERTASRLGSRASTLRRNDSIYEASSLYGISAMDGVPFTLHPRFEGKSCSPLAFSYNYGFVVEKTAAARLPPSVS

SEQ ID NO: 35015 - protein, 1481 aa, Homo sapiens
MSKTLKKKKHWLSKVQECAVSWAGPPGDFGAEIRGGAERGEFPYLGRLREEPGGGTCCVVSGKAPSPGDVLLEVNGTPVSGLTNRDTLAVIRHFREPIRLKTVKPGKVINKDLRHYLSLQFQKGSIDHKLQQVIRDNLYLRTIPCTTRAPRDGEVPGVDYNFISVEQFKALEESGALLESGTYDGNFYGTPKPPAEPSPFQPDPVDQVLFDNEFDAESQRKRTTSVSKMERMDSSLPEEEEDEDKEAINGSGNAENRERHSESSDWMKTVPSYNQTNSSMDFRNYMMRDETLEPLPKNWEMAYTDTGMIYFIDHNTKTTTWLDPRLCKKAKAPEDCEDGELPYGWEKIEDPQYGTYYVDHLNQKTQFENPVEEAKRKKQLGQVEIGSSKPDMEKSHFTRDPSQLKGVLVRASLKKSTMGFGFTIIGGDRPDEFLQVKNVLKDGPAAQDGKIAPGDVIVDINGNCVLGHTHADVVQMFQLVPVNQYVNLTLCRGYPLPDDSEDPVVDIVAATPVINGQSLTKGETCMNPQDFKPGAMVLEQNGKSGHTLTGDGLNGPSDASEQRVSMASSGSSQPELVTIPLIKGPKGFGFAIADSPTGQKVKMILDSQWCQGLQKGDIIKEIYHQNVQNLTHLQVVEVLKQFPVGADVPLLILRGGPPSPTKTAKMKTDKKENAGSLEAINEPIPQPMPFPPSIIRSGSPKLDPSEVYLKSKTLYEDKPPNTKDLDVFLRKQESGFGFRVLGGDGPDQSIYIGAIIPLGAAEKDGRLRAADELMCIDGIPVKGKSHKQVLDLMTTAARNGHVLLTVRRKIFYGEKQPEDDSSQAFISTQNGSPRLNRAEVPARPAPQEPYDVVLQRKENEGFGFVILTSKNKPPPGVIPHKIGRVIEGSPADRCGKLKVGDHISAVNGQSIVELSHDNIVQLIKDAGVTVTLTVIAEEEHHGPPSGTNSARQSPALQHRPMGQSQANHIPGDRSALEGEIGKDVSTSYRHSWSDHKHLAQPDTAVISVVGSRHNQNLGCYPVELERGPRGFGFSLRGGKEYNMGLFILRLAEDGPAIKDGRIHVGDQIVEINGEPTQGITHTRAIELIQAGGNKVLLLLRPGTGLIPDHGDWDINNPSSSNVIYDEQSPLPPSSHFASIFEESHVPVIEESLRVQICEKAEELKDIVPEKKSTLNENQPEIKHQSLLQKNVSKRDPPSSHGHSNKKNLLKVENGVTRRGRSVSPKKPASQHSEEHLDKIPSPLKNNPKRRPRDQSLSPSKGENKSCQVSTRAGSGQDQCRKSRGRSASPKKQQKIEGSKAPSNAEAKLLEGKSRRIAGYTGSNAEQIPDGKEKSDVIRKDAKQNQLEKSRTRSPEKKIKRMVEKSLPSKMTNKTTSKEVSENEKGKKVTTGETSSSNDKIGENVQLSEKRLKQEPEEKVVSNKTEDHKGKELEAADKNKETGRFKPESSSPVKKTLITPGPWKVPSGNKVTGTIGMAEKRQ

SEQ ID NO: 35016 - protein, 1506 aa, Homo sapiens
MSKTLKKKKHWLSKVQECAVSWAGPPGDFGAEIRGGAERGEFPYLGRLREEPGGGTCCVVSGKAPSPGDVLLEVNGTPVSGLTNRDTLAVIRHFREPIRLKTVKPGKVINKDLRHYLSLQFQKGSIDHKLQQVIRDNLYLRTIPCTTRAPRDGEVPGVDYNFISVEQFKALEESGALLESGTYDGNFYGTPKPPAEPSPFQPDPVDQVLFDNEFDAESQRKRTTSVSKMERMDSSLPEEEEDEDKEAINGSGNAENRERHSESSDWMKTVPSYNQTNSSMDFRNYMMRDETLEPLPKNWEMAYTDTGMIYFIDHNTKTTTWLDPRLCKKAKAPEDCEDGELPYGWEKIEDPQYGTYYVDFTLVAQAGVQWHDLGSLQPPPPGFNHLNQKTQFENPVEEAKRKKQLGQVEIGSSKPDMEKSHFTRDPSQLKGVLVRASLKKSTMGFGFTIIGGDRPDEFLQVKNVLKDGPAAQDGKIAPGDVIVDINGNCVLGHTHADVVQMFQLVPVNQYVNLTLCRGYPLPDDSEDPVVDIVAATPVINGQSLTKGETCMNPQDFKPGAMVLEQNGKSGHTLTGDGLNGPSDASEQRVSMASSGSSQPELVTIPLIKGPKGFGFAIADSPTGQKVKMILDSQWCQGLQKGDIIKEIYHQNVQNLTHLQVVEVLKQFPVGADVPLLILRGGPPSPTKTAKMKTDKKENAGSLEAINEPIPQPMPFPPSIIRSGSPKLDPSEVYLKSKTLYEDKPPNTKDLDVFLRKQESGFGFRVLGGDGPDQSIYIGAIIPLGAAEKDGRLRAADELMCIDGIPVKGKSHKQVLDLMTTAARNGHVLLTVRRKIFYGEKQPEDDSSQAFISTQNGSPRLNRAEVPARPAPQEPYDVVLQRKENEGFGFVILTSKNKPPPGVIPHKIGRVIEGSPADRCGKLKVGDHISAVNGQSIVELSHDNIVQLIKDAGVTVTLTVIAEEEHHGPPSGTNSARQSPALQHRPMGQSQANHIPGDRSALEGEIGKDVSTSYRHSWSDHKHLAQPDTAVISVVGSRHNQNLGCYPVELERGPRGFGFSLRGGKEYNMGLFILRLAEDGPAIKDGRIHVGDQIVEINGEPTQGITHTRAIELIQAGGNKVLLLLRPGTGLIPDHGDWDINNPSSSNVIYDEQSPLPPSSHFASIFEESHVPVIEESLRVQICEKAEELKDIVPEKKSTLNENQPEIKHQSLLQKNVSKRDPPSSHGHSNKKNLLKVENGVTRRGRSVSPKKPASQHSEEHLDKIPSPLKNNPKRRPRDQSLSPSKGENKSCQVSTRAGSGQDQCRKSRGRSASPKKQQKIEGSKAPSNAEAKLLEGKSRRIAGYTGSNAEQIPDGKEKSDVIRKDAKQNQLEKSRTRSPEKKIKRMVEKSLPSKMTNKTTSKEVSENEKGKKVTTGETSSSNDKIGENVQLSEKRLKQEPEEKVVSNKTEDHKGKELEAADKNKETGRFKPESSSPVKKTLITPGPWKVPSGNKVTGTIGMAEKRQ

SEQ ID NO: 35017 - protein, 1150 aa, Homo sapiens
MSKTLKKKKHWLSKVQECAVSWAGPPGDFGAEIRGGAERGEFPYLGRLREEPGGGTCCVVSGKAPSPGDVLLEVNGTPVSGLTNRDTLAVIRHFREPIRLKTVKPGKVINKDLRHYLSLQFQKGSIDHKLQQVIRDNLYLRTIPCTTRAPRDGEVPGVDYNFISVEQFKALEESGALLESGTYDGNFYGTPKPPAEPSPFQPDPVDQVLFDNEFDAESQRKRTTSVSKMERMDSSLPEEEEDEDKEAINGSGNAENRERHSESSDWMKTVPSYNQTNSSMDFRNYMMRDETLEPLPKNWEMAYTDTGMIYFIDHNTKTTTWLDPRLCKKAKAPEDCEDGELPYGWEKIEDPQYGTYYVDFTLVAQAGVQWHDLGSLQPPPPGFNHLNQKTQFENPVEEAKRKKQLGQVEIGSSKPDMEKSHFTRDPSQLKGVLVRASLKKSTMGFGFTIIGGDRPDEFLQVKNVLKDGPAAQDGKIAPGDVIVDINGNCVLGHTHADVVQMFQLVPVNQYVNLTLCRGYPLPDDSEDPVVDIVAATPVINGQSLTKGETCMNPQDFKPGAMVLEQNGKSGHTLTGDGLNGPSDASEQRVSMASSGSSQPELVTIPLIKGPKGFGFAIADSPTGQKVKMILDSQWCQGLQKGDIIKEIYHQNVQNLTHLQVVEVLKQFPVGADVPLLILRGGPPSPTKTAKMKTDKKENAGSLEAINEPIPQPMPFPPSIIRSGSPKLDPSEVYLKSKTLYEDKPPNTKDLDVFLRKQESGFGFRVLGGDGPDQSIYIGAIIPLGAAEKDGRLRAADELMCIDGIPVKGKSHKQVLDLMTTAARNGHVLLTVRRKIFYGEKQPEDDSSQAFISTQNGSPRLNRAEVPARPAPQEPYDVVLQRKENEGFGFVILTSKNKPPPGVIPHKIGRVIEGSPADRCGKLKVGDHISAVNGQSIVELSHDNIVQLIKDAGVTVTLTVIAEEEHHGPPSGTNSARQSPALQHRPMGQSQANHIPGDRSALEGEIGKDVSTSYRHSWSDHKHLAQPDTAVISVVGSRHNQNLGCYPVELERGPRGFGFSLRGGKEYNMGLFILRLAEDGPAIKDGRIHVGDQIVEINGEPTQGITHTRAIELIQAGGNKVLLLLRPGTGLIPDHGLAPSGLCSYVKPEQH

SEQ ID NO: 35018 - protein, 1125 aa, Homo sapiens
MSKTLKKKKHWLSKVQECAVSWAGPPGDFGAEIRGGAERGEFPYLGRLREEPGGGTCCVVSGKAPSPGDVLLEVNGTPVSGLTNRDTLAVIRHFREPIRLKTVKPGKVINKDLRHYLSLQFQKGSIDHKLQQVIRDNLYLRTIPCTTRAPRDGEVPGVDYNFISVEQFKALEESGALLESGTYDGNFYGTPKPPAEPSPFQPDPVDQVLFDNEFDAESQRKRTTSVSKMERMDSSLPEEEEDEDKEAINGSGNAENRERHSESSDWMKTVPSYNQTNSSMDFRNYMMRDETLEPLPKNWEMAYTDTGMIYFIDHNTKTTTWLDPRLCKKAKAPEDCEDGELPYGWEKIEDPQYGTYYVDHLNQKTQFENPVEEAKRKKQLGQVEIGSSKPDMEKSHFTRDPSQLKGVLVRASLKKSTMGFGFTIIGGDRPDEFLQVKNVLKDGPAAQDGKIAPGDVIVDINGNCVLGHTHADVVQMFQLVPVNQYVNLTLCRGYPLPDDSEDPVVDIVAATPVINGQSLTKGETCMNPQDFKPGAMVLEQNGKSGHTLTGDGLNGPSDASEQRVSMASSGSSQPELVTIPLIKGPKGFGFAIADSPTGQKVKMILDSQWCQGLQKGDIIKEIYHQNVQNLTHLQVVEVLKQFPVGADVPLLILRGGPPSPTKTAKMKTDKKENAGSLEAINEPIPQPMPFPPSIIRSGSPKLDPSEVYLKSKTLYEDKPPNTKDLDVFLRKQESGFGFRVLGGDGPDQSIYIGAIIPLGAAEKDGRLRAADELMCIDGIPVKGKSHKQVLDLMTTAARNGHVLLTVRRKIFYGEKQPEDDSSQAFISTQNGSPRLNRAEVPARPAPQEPYDVVLQRKENEGFGFVILTSKNKPPPGVIPHKIGRVIEGSPADRCGKLKVGDHISAVNGQSIVELSHDNIVQLIKDAGVTVTLTVIAEEEHHGPPSGTNSARQSPALQHRPMGQSQANHIPGDRSALEGEIGKDVSTSYRHSWSDHKHLAQPDTAVISVVGSRHNQNLGCYPVELERGPRGFGFSLRGGKEYNMGLFILRLAEDGPAIKDGRIHVGDQIVEINGEPTQGITHTRAIELIQAGGNKVLLLLRPGTGLIPDHGLAPSGLCSYVKPEQH

SEQ ID NO: 35019 - protein, 2803 aa, Homo sapiens
MDGVAEFSEYVSETVDVPSPFDLLEPPTSGGFLKLSKPCCYIFPGGRGDSALFAVNGFNILVDGGSDRKSCFWKLVRHLDRIDSVLLTHIGADNLPGINGLLQRKVAELEEEQSQGSSSYSDWVKNLISPELGVVFFNVPEKLRLPDASRKAKRSIEEACLTLQHLNRLGIQAEPLYRVVSNTIEPLTLFHKMGVGRLDMYVLNPVKDSKEMQFLMQKWAGNSKAKTGIVLPNGKEAEISVPYLTSITALVVWLPANPTEKIVRVLFPGNAPQNKILEGLEKLRHLDFLRYPVATQKDLASGAVPTNLKPSKIKQRADSKESLKATTKTAVSKLAKREEVVEEGAKEARSELAKELAKTEKKAKESSEKPPEKPAKPERVKTESSEALKAEKRKLIKDKVGKKHLKEKISKLEEKKDKEKKEIKKERKELKKDEGRKEEKKDAKKEEKRKDTKPELKKISKPDLKPFTPEVRKTLYKAKVPGRVKIDRSRAIRGEKELSSEPQTPPAQKGTVPLPTISGHRELVLSSPEDLTQDFEEMKREERALLAEQRDTGLGDKPFPLDTAEEGPPSTAIQGTPPSVPGLGQEEHVMKEKELVPEVPEEQGSKDRGLDSGAETEEEKDTWEEKKQREAERLPDRTEAREESEPEVKEDVIEKAELEEMEEVHPSDEEEEDATKAEGFYQKHMQEPLKVTPRSREAFGGRELGLQGKAPEKETSLFLSSLTTPAGATEHVSYIQDETIPGYSETEQTISDEEIHDEPEERPAPPRFHTSTYDLPGPEGAGPFEASQPADSAVPATSGKVYGTPETELTYPTNIVAAPLAEEEHVSSATSITECDKLSSFATSVAEDQSVASLTAPQTEETGKSSLLLDTVTSIPSSRTEATQGLDYVPSAGTISPTSSLEEDKGFKSPPCEDFSVTGESEKRGEIIGKGLSGERAVEEEEEETANVEMSEKLCSQYGTPVFSAPGHALHPGEPALGEAEERCLSPDDSTVKMASPPPSGPPSATHTPFHQSPVEEKSEPQDFQEADSWGDTKRTPGVGKEDAAEETVKPGPEEGTLEKEEKVPPPRSPQAQEAPVNIDEGLTGCTIQLLPAQDKAIVFEIMEAGEPTGPILGAEALPGGLRTLPQEPGKPQKDEVLRYPDRSLSPEDAESLSVLSVPSPDTANQEPTPKSPCGLTEQYLHKDRWPEVSPEDTQSLSLSEESPSKETSLDVSSKQLSPESLGTLQFGELNLGKEEMGHLMQAEDTSHHTAPMSVPEPHAATASPPTDGTTRYSAQTDITDDSLDRKSPASSFSHSTPSGNGKYLPGAITSPDEHILTPDSSFSKSPESLPGPALEDIAIKWEDKVPGLKDRTSEQKKEPEPKDEVLQQKDKTLEHKEVVEPKDTAIYQKDEALHVKNEAVKQQDKALEQKGRDLEQKDTALEQKDKALEPKDKDLEEKDKALEQKDKIPEEKDKALEQKDTALEQKDKALEPKDKDLEQKDRVLEQKEKIPEEKDKALDQKVRSVEHKAPEDTVAEMKDRDLEQTDKAPEQKHQAQEQKDKVSEKKDQALEQKYWALGQKDEALEQNIQALEENHQTQEQESLVQEDKTRKPKMLEEKSPEKVKAMEEKLEALLEKTKALGLEESLVQEGRAREQEEKYWRGQDVVQEWQETSPTREEPAGEQKELAPAWEDTSPEQDNRYWRGREDVALEQDTYWRELSCERKVWFPHELDGQGARPHYTEERESTFLDEGPDDEQEVPLREHATRSPWASDFKDFQESSPQKGLEVERWLAESPVGLPPEEEDKLTRSPFEIISPPASPPEMVGQRVPSAPGQESPIPDPKLMPHMKNEPTTPSWLADIPPWVPKDRPLPPAPLSPAPGPPTPAPESHTPAPFSWGTAEYDSVVAAVQEGAAELEGGPYSPLGKDYRKAEGEREEEGRAEAPDKSSHSSKVPEASKSHATTEPEQTEPEQREPTPYPDERSFQYADIYEQMMLTGLGPACPTREPPLGAAGDWPPCLSTKEAAAGRNTSAEKELSSPISPKSLQSDTPTFSYAALAGPTVPPRPEPGPSMEPSLTPPAVPPRAPILSKGPSPPLNGNILSCSPDRRSPSPKESGRSHWDDSTSDSELEKGAREQPEKEAQSPSPPHPIPMGSPTLWPETEAHVSPPLDSHLGPARPSLDFPASAFGFSSLQPAPPQLPSPAEPRSAPCGSLAFSGDRALALAPGPPTRTRHDEYLEVTKAPSLDSSLPQLPSPSSPGAPLLSNLPRPASPALSEGSSSEATTPVISSVAERFSPSLEAAEQESGELDPGMEPAAHSLWDLTPLSPAPPASLDLALAPAPSLPGDMGDGILPCHLECSEAATEKPSPFQVPSEDCAANGPTETSPNPPGPAPAKAENEEAAACPAWERGAWPEGAERSSRPDTLLSPEQPVCPAGGSGGPPSSASPEVEAGPQGCATEPRPHRGELSPSFLNPPLPPSIDDRDLSTEEVRLVGRGGRRRVGGPGTTGGPCPVTDETPPTSASDSGSSQSDSDVPPETEECPSITAEAALDSDEDGDFLPVDKAGGVSGTHHPRPGHDPPPLPQPDPRPSPPRPDVCMADPEGLSSESGRVERLREKEKVQGRVGRRAPGKAKPASPARRLDLRGKRSPTPGKGPADRASRAPPRPRSTTSQVTPAEEKDGHSPMSKGLVNGLKAGPMALSSKGSSGAPVYVDLAYIPNHCSGKTADLDFFRRVRASYYVVSGNDPANGEPSRAVLDALLEGKAQWGENLQVTLIPTHDTEVTREWYQQTHEQQQQLNVLVLASSSTVVMQDESFPACKIEF

SEQ ID NO: 35020 - protein, 2805 aa, Homo sapiens
MDGVAEFSEYVSETVDVPSPFDLLEPPTSGGFLKLSKPCCYIFPGGRGDSALFAVNGFNILVDGGSDRKSCFWKLVRHLDRIDSVLLTHIGADNLPGINGLLQRKVAELEEEQSQGSSSYSDWVKNLISPELGVVFFNVPEKLRLPDASRKAKRSIEEACLTLQHLNRLGIQAEPLYRVVSNTIEPLTLFHKMGVGRLDMYVLNPVKDSKEMQFLMQKWAGNSKAKTGIVLPNGKEAEISVPYLTSITALVVWLPANPTEKIVRVLFPGNAPQNKILEGLEKLRHLDFLRYPVATQKDLASGAVPTNLKPSKIKQRADSKESLKATTKTAVSKLAKREEVVEEGAKEARSELAKELAKTEKKAKESSEKPPEKPAKPERVKTESSEALKAEKRKLIKDKVGKKHLKEKISKLEEKKDKEKKEIKKERKELKKDEGRKEEKKDAKKEEKRKDTKPELKKISKPDLKPFTPEVRKTLYKAKVPGRVKIDRSRAIRGEKELSSEPQTPPAQKGTVPLPTISGHRELVLSSPEDLTQDFEEMKREERALLAEQRDTGLGDKPFPLDTAEEGPPSTAIQGTPPSVPGLGQEEHVMKEKELVPEVPEEQGSKDRGLDSGAETEEEKDTWEEKKQREAERLPDRTEAREESEPEVKEDVIEKAELEEMEEVHPSDEEEEDATKAEGFYQKHMQEPLKVTPRSREAFGGRELGLQGKAPEKETSLFLSSLTTPAGATEHVSYIQDETIPGYSETEQTISDEEIHDEPEERPAPPRFHTSTYDLPGPEGAGPFEASQPADSAVPATSGKVYGTPETELTYPTNIVAAPLAEEEHVSSATSITECDKLSSFATSVAEDQSVASLTAPQTEETGKSSLLLDTVTSIPSSRTEATQGLDYVPSAGTISPTSSLEEDKGFKSPPCEDFSVTGESEKRGEIIGKGLSGERAVEEEEEETANVEMSEKLCSQYGTPVFSAPGHALHPGEPALGEAEERCLSPDDSTVKMASPPPSGPPSATHTPFHQSPVEEKSEPQDFQEADSWGDTKRTPGVGKEDAAEETVKPGPEEGTLEKEEKVPPPRSPQAQEAPVNIDEGLTGCTIQLLPAQDKAIVFEIMEAGEPTGPILGAEALPGGLRTLPQEPGKPQKDEVLRYPDRSLSPEDAESLSVLSVPSPDTANQEPTPKSPCGLTEQYLHKDRWPEVSPEDTQSLSLSEESPSKETSLDVSSKQLSPESLGTLQFGELNLGKEEMGHLMQAEDTSHHTAPMSVPEPHAATASPPTDGTTRYSAQTDITDDSLDRKSPASSFSHSTPSGNGKYLPGAITSPDEHILTPDSSFSKSPESLPGPALEDIAIKWEDKVPGLKDRTSEQKKEPEPKDEVLQQKDKTLEHKEVVEPKDTAIYQKDEALHVKNEAVKQQDKALEQKGRDLEQKDTALEQKDKALEPKDKDLEEKDKALEQKDKIPEEKDKALEQKDTALEQKDKALEPKDKDLEQKDRVLEQKEKIPEEKDKALDQKVRSVEHKAPEDTVAEMKDRDLEQTDKAPEQKHQAQEQKDKVSEKKDQALEQKYWALGQKDEALEQNIQALEENHQTQEQESLVQEDKTRKPKMLEEKSPEKVKAMEEKLEALLEKTKALGLEESLVQEGRAREQEEKYWRGQDVVQEWQETSPTREEPAGEQKELAPAWEDTSPEQDNRYWRGREDVALEQDTYWRELSCERKVWFPHELDGQGARPHYTEERESTFLDEGPDDEQEVPLREHATRSPWASDFKDFQESSPQKGLEVERWLAESPVGLPPEEEDKLTRSPFEIISPPASPPEMVGQRVPSAPGQESPIPDPKLMPHMKNEPTTPSWLADIPPWVPKDRPLPPAPLSPAPGPPTPAPESHTPAPFSWGTAEYDSVVAAVQEGAAELEGGPYSPLGKDYRKAEGEREEEGRAEAPDKSSHSSKVPEASKSHATTEPEQTEPEQREPTPYPDERSFQYADIYEQMMLTGLGPACPTREPPLGAAGDWPPCLSTKEAAAGRNTSAEKELSSPISPKSLQSDTPTFSYAALAGPTVPPRPEPGPSMEPSLTPPAVPPRAPILSKGPSPPLNGNILSCSPDRRSPSPKESGRSHWDDSTSDSELEKGAREQPEKEAQSPSPPHPIPMGSPTLWPETEAHVSPPLDSHLGPARPSLDFPASAFGFSSLQPAPPQLPSPAEPRSAPCGSLAFSGDRALALAPGPPTRTRHDEYLEVTKAPSLDSSLPQLPSPSSPGAPLLSNLPRPASPALSEGSSSEATTPVISSVAERFSPSLEAAEQESGELDPGMEPAAHSLWDLTPLSPAPPASLDLALAPAPSLPGDMGDGILPCHLECSEAATEKPSPFQVPSEDCAANGPTETSPNPPGPAPAKAENEEAAACPAWERGAWPEGAERSSRPDTLLSPEQPVCPAGGSGGPPSSASPEVEAGPQGCATEPRPHRGELSPSFLNPPLPPSIDDRDLSTEEVRLVGRGGRRRVGGPGTTGGPCPVTDETPPTSASDSGSSQSDSDVPPETEECPSITAEAALDSDEDGDFLPVDKAGGVSGTHHPRPGHDPPPLPQPDPRPSPPRPDVCMADPEGLSSESGRVERLREKEKVQGRVGRRAPGKAKPASPARRLDLRGKRSPTPGKGPADRASRAPPRPRSTTSQVTPAEEKDGHSPMSKGLVNGLKAGPMALSSKGSSGAPVYVDLAYIPNHCSGKTADLDFFRRVRASYYVVSGNDPANGEPSRAVLDALLEGKAQWGENLQSVVTLIPTHDTEVTREWYQQTHEQQQQLNVLVLASSSTVVMQDESFPACKIEF

SEQ ID NO: 35021 - protein, 319 aa, Homo sapiens
MRSCFCVRRSRDPPPPQPPPPPPQRGTDQSTMPEVKDLSEALPETSMDPITGVGVVASRNRAPTGYDVVAQTADGVDADLWKDGLFKSKVTRYLCFTRSFSKENSHLGNVLVDMKLIDIKDTLPVGFIPIQETVDTQEVAFRKKRLCIKFIPRDSTEAAICDIRIMGRTKQAPPQYTFIGELNSMGIWYRMGRVPRNHDSSQPTTPSQSSAASTPAPNLPRHISLTLPATFRGRNSTRTDYEYQHSNLYAISAMDGVPFMISEKFSCVPESMQPFDLLGITIKSLAEIEKEYEYSFRTEQSAAARLPPSPTRCQQIPQS

SEQ ID NO: 35022 - protein, 221 aa, Homo sapiens
MRSCFCVRRSRDPPPPQPPPPPPQRGTDQSTMPEVKDLSEALPETSMDPITGVGVVASRNRAPTGYDVVAQTADGVDADLWKDGLFKSKVTRYLCFTRSFSKENSHLGNVLVDMKLIDIKDTLPVGFIPIQETVDTQEVAFRKKRLCIKFIPRDSTEAAICDIRIMGRTKQAPPQYTFIGELNSMGIWYRMGRVPRNHDSSQPTTPSQSSAASTPAPNLPR

SEQ ID NO: 35023 - protein, 447 aa, Homo sapiens
MPAPALPTSAMAVQVPLWHHYLQAIRSREAPRAQDFQRAENVLLTVLERVHALDPRFIVDYSRGLEAFQFALRSSEDPMDMEVPLWVDAEALLIEEPEATQPEDGLELCHLGVPREGAGLERWTTEDTFTASSEGDAKCRGHIVPSKVLCVLKDLLVAAIVHCKHHSLIAPGSLNAASLREEQLHLSLLVSSGWRTISFHVVPVVRRKLGAPALEGVQQMPGFPEGSLRRILSQGVDLVPASAQLWRTSTDYLLTRLLGELGSLQGHRLDSLSILDRVNHESWRDSGQTDGLTFGHLKMVLLWASVLFLAPEDWAELQGAVYRLLVVLLCCLATRKLPHFLHPQRNLLQGSGLDLGAIYQRVEGFASQPEAALRIHATHLGRSPPPRIGSGLKALLQLPASDPTYWATAYFDVLLDKFQVFNIQDKDRISAMQSIFQKTRTLGGEES

SEQ ID NO: 35024 - protein, 298 aa, Homo sapiens
MDTGVWGWGAAACRWGPAERAAGSLNAASLREEQLHLSLLVSSGWRTISFHVVPVVRRKLGAPALEGVQQMPGFPEGSLRRILSQGVDLVPASAQLWRTSTDYLLTRLLGELGSLQGHRLDSLSILDRVNHESWRDSGQTDGLTFGHLKMVLLWASVLFLAPEDWAELQGAVYRLLVVLLCCLATRKLPHFLHPQRNLLQGSGLDLGAIYQRVEGFASQPEAALRIHATHLGRSPPPRIGSGLKALLQLPASDPTYWATAYFDVLLDKFQVFNIQDKDRISAMQSIFQKTRTLGGEES

SEQ ID NO: 35025 - protein, 279 aa, Homo sapiens
MDTGSLNAASLREEQLHLSLLVSSGWRTISFHVVPVVRRKLGAPALEGVQQMPGFPEGSLRRILSQGVDLVPASAQLWRTSTDYLLTRLLGELGSLQGHRLDSLSILDRVNHESWRDSGQTDGLTFGHLKMVLLWASVLFLAPEDWAELQGAVYRLLVVLLCCLATRKLPHFLHPQRNLLQGSGLDLGAIYQRVEGFASQPEAALRIHATHLGRSPPPRIGSGLKALLQLPASDPTYWATAYFDVLLDKFQVFNIQDKDRISAMQSIFQKTRTLGGEES

SEQ ID NO: 35026 - protein, 1040 aa, Homo sapiens
MAAAPALKHWRTTLERVEKFVSPLYFTDCNLRGRLFGASCPVAVLSSFLTPERLPYQEAVQRDFRPAQVGDSFGPTWWTCWFRVELTIPEAWVGQEVHLCWESDGEGLVWRDGEPVQGLTKEGEKTSYVLTDRLGERDPRSLTLYVEVACNGLLGAGKGSMIAAPDPEKMFQLSRAELAVFHRDVHMLLVDLELLLGIAKGLGKDNQRSFQALYTANQMVNVCDPAQPETFPVAQALASRFFGQHGGESQHTIHATGHCHIDTAWLWPFKETVRKCARSWVTALQLMERNPEFIFACSQAQQLEWVKSRYPGLYSRIQEFACRGQFVPVGGTWVEMDGNLPSGEAMVRQFLQGQNFFLQEFGKMCSEFWLPDTFGYSAQLPQIMHGCGIRRFLTQKLSWNLVNSFPHHTFFWEGLDGSRVLVHFPPGDSYGMQGSVEEVLKTVANNRDKGRANHSAFLFGFGDGGGGPTQTMLDRLKRLSNTDGLPRVQLSSPRQLFSALESDSEQLCTWVGELFLELHNGTYTTHAQIKKGNRECERILHDVELLSSLALARSAQFLYPAAQLQHLWRLLLLNQFHDVVTGSCIQMVAEEAMCHYEDIRSHGNTLLSAAAAALCAGEPGPEGLLIVNTLPWKRIEVMALPKPGGAHSLALVTVPSMGYAPVPPPTSLQPLLPQQPVFVVQETDGSVTLDNGIIRVKLDPTGRLTSLVLVASGREAIAEGAVGNQFVLFDDVPLYWDAWDVMDYHLETRKPVLGQAGTLAVGTEGGLRGSAWFLLQISPNSRLSQEVVLDVGCPYVRFHTEVHWHEAHKFLKVEFPARVRSSQATYEIQFGHLQRPTHYNTSWDWARFEVWAHRWMDLSEHGFGLALLNDCKYGASVRGSILSLSLLRAPKAPDATADTGRHEFTYALMPHKGSFQDAGVIQAAYSLNFPLLALPAPSPAPATSWSAFSVSSPAVVLETVKQAESSPQRRSLVLRLYEAHGSHVDCWLHLSLPVQEAILCDLLERPDPAGHLTLRDNRLKLTFSPFQVLSLLLVLQPPPH

SEQ ID NO: 35027 - protein, 1017 aa, Homo sapiens
MAAAPALKHWRTTLERVEKFVSPLYFTDCNLRGRLFGASCPVAVLSSFLTPERLPYQEAVQRDFRPAQVGDSFGPTWWTCWFRVELTIPEAWVGQEVHLCWESDGEGLVWRDGEPVQGLTKEGEKTSYVLTDRLGERDPRSLTLYVEVACNGLLGAGKGSMIAAPDPEKMFQLSRAELAVFHRDVHMLLVDLELLLGIAKGLGKDNQRSFQALYTANQMVNVCDPAQPETFPVAQALASRFFGQHGGESQHTIHATGHCHIDTAWLWPFKETVRKCARSWVTALQLMERNPEFIFACSQAQQLEWVKSRYPGLYSRIQEFACRGQFVPVGGTWVEMDGNLPSGEAMVRQFLQGQNFFLQEFGKMCSEFWLPDTFGYSAQLPQIMHGCGIRRFLTQKLSWNLVNSFPHHTFFWEGLDGSRVLVHFPPGDSYGMQGSVEEVLKTVANNRDKGRANHSAFLFGFGDGGGGPTQTMLDRLKRLSNTDGLPRVQLSSPRQLFSALESDSEQLCTWVGELFLELHNGTYTTHAQIKKGNRECERILHDVELLSSLALARSAQFLYPAAQLQHLWRLLLLNQFHDVVTGSCIQMVAEEAMCHYEDIRSHGNTLLSAAAAALCAGEPGPEGLLIVNTLPWKRIEVMALPKPGGAHSLALVTVPSMGYAPVPPPTSLQPLLPQQPVFVVQETDGSVTLDNGIIRVKLDPTGRLTSLVLVASGREAIAEGAVGNQFVLFDDVPLYWDAWDVMDYHLETRKPVLGQAGTLAVGTEGGLRGSAWFLLQISPNSRLSQEVVLDVGCPYVRFHTEVHWHEAHKFLKVEFPARVRSSQATYEIQFGHLQRPTHYNTSWDWARFEVWAHRWMDLSEHGFGLALLNDCKYGASVRGSILSLSLLRAPKAPDATADTGRHEFTYALMPHKAPSPAPATSWSAFSVSSPAVVLETVKQAESSPQRRSLVLRLYEAHGSHVDCWLHLSLPVQEAILCDLLERPDPAGHLTLRDNRLKLTFSPFQVLSLLLVLQPPPH

SEQ ID NO: 35028 - protein, 941 aa, Homo sapiens
MAAAPALKHWRTTLERVEKFVSPLYFTDCNLRGRLFGASCPVAVLSSFLTPERLPYQEAVQRDFRPAQVGDSFGPTWWTCWFRVELTIPEAWVGQEVHLCWESDGEGLVWRDGEPVQGLTKEGEKTSYVLTDRLGERDPRSLTLYVEVACNGLLGAGKGSMIAAPDPEKMFQLSRAELAVFHRDVHMLLVDLELLLGIAKAQQLEWVKSRYPGLYSRIQEFACRGQFVPVGGTWVEMDGNLPSGEAMVRQFLQGQNFFLQEFGKMCSEFWLPDTFGYSAQLPQIMHGCGIRRFLTQKLSWNLVNSFPHHTFFWEGLDGSRVLVHFPPGDSYGMQGSVEEVLKTVANNRDKGRANHSAFLFGFGDGGGGPTQTMLDRLKRLSNTDGLPRVQLSSPRQLFSALESDSEQLCTWVGELFLELHNGTYTTHAQIKKGNRECERILHDVELLSSLALARSAQFLYPAAQLQHLWRLLLLNQFHDVVTGSCIQMVAEEAMCHYEDIRSHGNTLLSAAAAALCAGEPGPEGLLIVNTLPWKRIEVMALPKPGGAHSLALVTVPSMGYAPVPPPTSLQPLLPQQPVFVVQETDGSVTLDNGIIRVKLDPTGRLTSLVLVASGREAIAEGAVGNQFVLFDDVPLYWDAWDVMDYHLETRKPVLGQAGTLAVGTEGGLRGSAWFLLQISPNSRLSQEVVLDVGCPYVRFHTEVHWHEAHKFLKVEFPARVRSSQATYEIQFGHLQRPTHYNTSWDWARFEVWAHRWMDLSEHGFGLALLNDCKYGASVRGSILSLSLLRAPKAPDATADTGRHEFTYALMPHKGSFQDAGVIQAAYSLNFPLLALPAPSPAPATSWSAFSVSSPAVVLETVKQAESSPQRRSLVLRLYEAHGSHVDCWLHLSLPVQEAILCDLLERPDPAGHLTLRDNRLKLTFSPFQVLSLLLVLQPPPH

SEQ ID NO: 35029 - protein, 1057 aa, Homo sapiens
MAAAPALKHWRTTLERVEKFVSPLYFTDCNLRGRLFGASCPVAVLSSFLTPERLPYQEAVQRDFRPAQVGDSFGPTWWTCWFRVELTIPEAWVGQEVHLCWESDGEGLVWRDGEPVQGLTKEGEKTSYVLTDRLGERDPRSLTLYVEVACNGLLGAGKGSMIAAPDPEKMFQLSRAELAVFHRDVHMLLVDLELLLGIAKGLGKDNQRSFQALYTANQMVNVCDPAQPETFPVAQALASRFFGQHGGESQHTIHATGHCHIDTAWLWPFKETVRKCARSWVTALQLMERNPEFIFACSQAQQLEWVKSRYPGLYSRIQEFACRGQFVPVGGTWVEMDGNLPSGEAMVRQFLQGQNFFLQEFGKMCSEFWLPDTFGYSAQLPQIMHGCGIRRFLTQKLSWNLVNSFPHHTFFWEGLDGSRVLVHFPPGDSYGMQGSVEEVLKTVANNRDKGRANHSAFLFGFGDGGGGPTQTMLDRLKRLSNTDGLPRVQLSSPRQLFSALESDSEQLCTWVGELFLELHNGTYTTHAQIKKGNRECERILHDVELLSSLALARSAQFLYPAAQLQHLWRLLLLNQFHDVVTGSCIQMVAEEAMCHYEDIRSHGNTLLSAAAAALCAGEPGPEGLLIVNTLPWKRIEVMALPKPGGAHSLGLTPSPGDSAQHGLCSCSSPHLTAAPAAPAACVRSARAPTDSASRPPPTKTDGSVTLDNGIIRVKLDPTGRLTSLVLVASGREAIAEGAVGNQFVLFDDVPLYWDAWDVMDYHLETRKPVLGQAGTLAVGTEGGLRGSAWFLLQISPNSRLSQEVVLDVGCPYVRFHTEVHWHEAHKFLKVEFPARVRSSQATYEIQFGHLQRPTHYNTSWDWARFEVWAHRWMDLSEHGFGLALLNDCKYGASVRGSILSLSLLRAPKAPDATADTGRHEFTYALMPHKGSFQDAGVIQAAYSLNFPLLALPAPSPAPATSWSAFSVSSPAVVLETVKQAESSPQRRSLVLRLYEAHGSHVDCWLHLSLPVQEAILCDLLERPDPAGHLTLRDNRLKLTFSPFQVLSLLLVLQPPPH

SEQ ID NO: 35030 - protein, 626 aa, Homo sapiens
MIFLTALPLFWIMISASRGGHWGAWMPSSISAFEGTCVSIPCRFDFPDELRPAVVHGVWYFNSPYPKNYPPVVFKSRTQVVHESFQGRSRLLGDLGLRNCTLLLSNVSPELGGKYYFRGDLGGYNQYTFSEHSVLDIVNTPNIVVPPEVVAGTEVEVSCMVPDNCPELRPELSWLGHEGLGEPAVLGRLREDEGTWVQVSLLHFVPTREANGHRLGCQASFPNTTLQFEGYASMDVKYPPVIVEMNSSVEAIEGSHVSLLCGADSNPPPLLTWMRDGTVLREAVAESLLLELEEVTPAEDGVYACLAENAYGQDNRTVGLSVMYAPWKPTVNGTMVAVEGETVSILCSTQSNPDPILTIFKEKQILSTVIYESELQLELPAVSPEDDGEYWCVAENQYGQRATAFNLSVEFAPVLLLESHCAAARDTVQCLCVVKSNPEPSVAFELPSRNVTVNESEREFVYSERSGLVLTSILTLRGQAQAPPRVICTARNLYGAKSLELPFQGAHRLMWAKIGPVGAVVAFAILIAIVCYITQTRRKKNVTESPSFSAGDNPPVLFSSDFRISGAPEKYESERRLGSERRLLGLRGEPPELDLSYSHSDLGKRPTKDSYTLTEELAEYAEIRVK

SEQ ID NO: 35031 - protein, 582 aa, Homo sapiens
MIFLTALPLFWIMISASRGGHWGAWMPSSISAFEGTCVSIPCRFDFPDELRPAVVHGVWYFNSPYPKNYPPVVFKSRTQVVHESFQGRSRLLGDLGLRNCTLLLSNVSPELGGKYYFRGDLGGYNQYTFSEHSVLDIVNTPNIVVPPEVVAGTEVEVSCMVPDNCPELRPELSWLGHEGLGEPAVLGRLREDEGTWVQVSLLHFVPTREANGHRLGCQASFPNTTLQFEGYASMDVKYPPVIVEMNSSVEAIEGSHVSLLCGADSNPPPLLTWMRDGTVLREAVAESLLLELEEVTPAEDGVYACLAENAYGQDNRTVGLSVMYAPWKPTVNGTMVAVEGETVSILCSTQSNPDPILTIFKEKQILSTVIYESELQLELPAVSPEDDGEYWCVAENQYGQRATAFNLSVEFAPVLLLESHCAAARDTVQCLCVVKSNPEPSVAFELPSRNVTVNESEREFVYSERSGLVLTSILTLRGQAQAPPRVICTARNLYGAKSLELPFQGAHRLMWAKIGPVGAVVAFAILIAIVCYITQTRRKKNVTESPSFSAGDNPPVLFSSDFRISGAPEKYESKEVSTLESH

SEQ ID NO: 35032 - protein, 601 aa, Homo sapiens
MPSSISAFEGTCVSIPCRFDFPDELRPAVVHGVWYFNSPYPKNYPPVVFKSRTQVVHESFQGRSRLLGDLGLRNCTLLLSNVSPELGGKYYFRGDLGGYNQYTFSEHSVLDIVNTPNIVVPPEVVAGTEVEVSCMVPDNCPELRPELSWLGHEGLGEPAVLGRLREDEGTWVQVSLLHFVPTREANGHRLGCQASFPNTTLQFEGYASMDVKYPPVIVEMNSSVEAIEGSHVSLLCGADSNPPPLLTWMRDGTVLREAVAESLLLELEEVTPAEDGVYACLAENAYGQDNRTVGLSVMYAPWKPTVNGTMVAVEGETVSILCSTQSNPDPILTIFKEKQILSTVIYESELQLELPAVSPEDDGEYWCVAENQYGQRATAFNLSVEFAPVLLLESHCAAARDTVQCLCVVKSNPEPSVAFELPSRNVTVNESEREFVYSERSGLVLTSILTLRGQAQAPPRVICTARNLYGAKSLELPFQGAHRLMWAKIGPVGAVVAFAILIAIVCYITQTRRKKNVTESPSFSAGDNPPVLFSSDFRISGAPEKYESERRLGSERRLLGLRGEPPELDLSYSHSDLGKRPTKDSYTLTEELAEYAEIRVK

SEQ ID NO: 35033 - protein, 194 aa, Homo sapiens
MAKSSQRKQRDCVNQCKSKPGLSTSIPLRMSSYTFKRPVTRITPHPGNEVRYHQWEESLEKPQQVCWQRRLQGLQAYSSAGELSSTLDLANTLQKLVPSYTGGSLLEDLASGLEHSCPMPHLACSSDAVEIIPAEGVGISQLLCKQFLVTEEDIRKQEGKVKTVRERLAIALIADGLANEAEKVRDQEGRPEKR

SEQ ID NO: 35034 - protein, 1059 aa, Homo sapiens
MAAVAGSGAAAAPSSLLLVVGSEFGSPGLLTYVLEELERGIRSWDVDPGVCNLDEQLKVFVSRHSATFSSIVKGQRSLHHRGDNLETLVLLNPSDKSLYDELRNLLLDPASHKLLVLAGPCLEETGELLLQTGGFSPHHFLQVLKDREIRDILATTPPPVQPPILTITCPTFGDWAQLAPAVPGLQGALRLQLRLNPPAQLPNSEGLCEFLEYVAESLEPPSPFELLEPPTSGGFLRLGRPCCYIFPGGLGDAAFFAVNGFTVLVNGGSNPKSSFWKLVRHLDRVDAVLVTHPGADSLPGLNSLLRRKLAERSEVAAGGGSWDDRLRRLISPNLGVVFFNACEAASRLARGEDEAELALSLLAQLGITPLPLSRGPVPAKPTVLFEKMGVGRLDMYVLHPPSAGAERTLASVCALLVWHPAGPGEKVVRVLFPGCTPPACLLDGLVRLQHLRFLREPVVTPQDLEGPGRAESKESVGSRDSSKREGLLATHPRPGQERPGVARKEPARAEAPRKTEKEAKTPRELKKDPKPSVSRTQPREVRRAASSVPNLKKTNAQAAPKPRKAPSTSHSGFPPVANGPRSPPSLRCGEASPPSAACGSPASQLVATPSLELGPIPAGEEKALELPLAASSIPRPRTPSPESHRSPAEGSERLSLSPLRGGEAGPDASPTVTTPTVTTPSLPAEVGSPHSTEVDESLSVSFEQVLPPSAPTSEAGLSLPLRGPRARRSASPHDVDLCLVSPCEFEHRKAVPMAPAPASPGSSNDSSARSQERAGGLGAEETPPTSVSESLPTLSDSDPVPLAPGAADSDEDTEGFGVPRHDPLPDPLKVPPPLPDPSSICMVDPEMLPPKTARQTENVSRTRKPLARPNSRAAAPKATPVAAAKTKGLAGGDRASRPLSARSEPSEKGGRAPLSRKSSTPKTATRGPSGSASSRPGVSATPPKSPVYLDLAYLPSGSSAHLVDEEFFQRVRALCYVISGQDQRKEEGMRAVLDALLASKQHWDRDLQVTLIPTFDSVAMHTWYAETHARHQALGITVLGSNSMVSMQDDAFPACKVEF

SEQ ID NO: 35035 - protein, 1033 aa, Homo sapiens
MAGMIDRFSPANTGIRSWDVDPGVCNLDEQLKVFVSRHSATFSSIVKGQRSLHHRGDNLETLVLLNPSDKSLYDELRNLLLDPASHKLLVLAGPCLEETGELLLQTGGFSPHHFLQVLKDREIRDILATTPPPVQPPILTITCPTFGDWAQLAPAVPGLQGALRLQLRLNPPAQLPNSEGLCEFLEYVAESLEPPSPFELLEPPTSGGFLRLGRPCCYIFPGGLGDAAFFAVNGFTVLVNGGSNPKSSFWKLVRHLDRVDAVLVTHPGADSLPGLNSLLRRKLAERSEVAAGGGSWDDRLRRLISPNLGVVFFNACEAASRLARGEDEAELALSLLAQLGITPLPLSRGPVPAKPTVLFEKMGVGRLDMYVLHPPSAGAERTLASVCALLVWHPAGPGEKVVRVLFPGCTPPACLLDGLVRLQHLRFLREPVVTPQDLEGPGRAESKESVGSRDSSKREGLLATHPRPGQERPGVARKEPARAEAPRKTEKEAKTPRELKKDPKPSVSRTQPREVRRAASSVPNLKKTNAQAAPKPRKAPSTSHSGFPPVANGPRSPPSLRCGEASPPSAACGSPASQLVATPSLELGPIPAGEEKALELPLAASSIPRPRTPSPESHRSPAEGSERLSLSPLRGGEAGPDASPTVTTPTVTTPSLPAEVGSPHSTEVDESLSVSFEQVLPPSAPTSEAGLSLPLRGPRARRSASPHDVDLCLVSPCEFEHRKAVPMAPAPASPGSSNDSSARSQERAGGLGAEETPPTSVSESLPTLSDSDPVPLAPGAADSDEDTEGFGVPRHDPLPDPLKVPPPLPDPSSICMVDPEMLPPKTARQTENVSRTRKPLARPNSRAAAPKATPVAAAKTKGLAGGDRASRPLSARSEPSEKGGRAPLSRKSSTPKTATRGPSGSASSRPGVSATPPKSPVYLDLAYLPSGSSAHLVDEEFFQRVRALCYVISGQDQRKEEGMRAVLDALLASKQHWDRDLQVTLIPTFDSVAMHTWYAETHARHQALGITVLGSNSMVSMQDDAFPACKVEF

SEQ ID NO: 35036 - protein, 208 aa, Homo sapiens
MGEPAFTSFPSLPVLGKLKRNMMPWALQKKREIHMAKAHRRRAARSALPMRLTSCIFRRPVTRIRSHPDNQVRRRKGDEHLEKPQQLCAYRRLQALQPCSSQGEGSSPLHLESVLSILAPGTAGESLDRAGAERVRSPLEPTPGRFPAVAGGPTPGMGCQLPPPLSGQLVTPADIRRQARRVKKARERLAKALQADRLARRAEMLTGG

SEQ ID NO: 35037 - protein, 208 aa, Homo sapiens
MGEPAFTSFPSPPVLGKLKRNMMPWALQKKREIHMAKAHRRRAARSALPMRLTSCIFRRPVTRIRSHPDNQVRRRKGDEHLEKPQQLCAYRRLQALQPCSSQGEGSSPLHLESVLSILAPGTAGESLDRAGAERVRSPLEPTPGRFPAVAGGPTPGMGCQLPPPLSGQLVTPADIRRQARRVKKARERLAKALQADRLARQAEMLTCR

SEQ ID NO: 35038 - protein, 725 aa, Homo sapiens
MAAASAVSVLLVAAERNRWHRLPSLLLPPRTWVWRQRTMKYTTATGRNITKVLIANRGEIACRVMRTAKKLGVQTVAVYSEADRNSMHVDMADEAYSIGPAPSQQSYLSMEKIIQVAKTSAAQAIHPGCGFLSENMEFAELCKQEGIIFIGPPPSAIRDMGIKSTSKSIMAAAGVPVVEGYHGEDQSDQCLKEHARRIGYPVMIKAVRGGGGKGMRIVRSEQEFQEQLESARREAKKSFNDDAMLIEKFVDTPRHVEVQVFGDHHGNAVYLFERDCSVQRRHQKIIEEAPAPGIKSEVRKKLGEAAVRAAKAVNYVGAGTVEFIMDSKHNFCFMEMNTRLQVEHPVTEMITGTDLVEWQLRIAAGEKIPLSQEEITLQGHAFEARIYAEDPSNNFMPVAGPLVHLSTPRADPSTRIETGVRQGDEVSVHYDPMIAKLVVWAADRQAALTKLRYSLRQYNIVGLHTNIDFLLNLSGHPEFEAGNVHTDFIPQHHKQLLLSRKAAAKESLCQAALGLILKEKAMTDTFTLQAHDQFSPFSSSSGRRLNISYTRNMTLKDGKNNVAIAVTYNHDGSYSMQIEDKTFQVLGNLYSEGDCTYLKCSVNGVASKAKLIILENTIYLFSKEGSIEIDIPVPKYLSSVSSQETQGGPLAPMTGTIEKVFVKAGDKVKAGDSLMVMIAMKMEHTIKSPKDGTVKKVFYREGAQANRHTPLVEFEEEESDKRESE

SEQ ID NO: 35039 - protein, 208 aa, Homo sapiens
MGEPAFTSFPSPPVLGKLKRNMMPWALQKKREIHMAKAHRRRAARSALPMRLTSCIFRRPVTRIRSHPDNQVRRRKGDEHLEKPQQLCAYRRLQALQPCSSQGEGSSPLHLESVLSILAPGTAGESLDRAGAERVRIPLEPTPGRFPAVAGGPTPGMGCQLPPPLSGQLVTPADIRRQARRVKKARERLAKALQADRLARQAEMLTCR

SEQ ID NO: 35040 - protein, 208 aa, Homo sapiens
MGEPAFTSFPSPPVLGKLKRNMMPWALQKKREIHMAKAHRRRAARSALPMRLTSCIFRRPVTRIRSHPDNQVRRRKGDEHLEKPQQLCAYRRLQALQPCSSQGEGSSPLHLESVLSILAPGTAGESLDRAGAERVRIPLEPTPGRFPAVAGGPTPGMGCQLPPPLSGQLVTPADIRRQARRVKKARERLAKALQADRLARQAEMLTGG

SEQ ID NO: 35041 - protein, 204 aa, Homo sapiens
MGEPAFTSFPSLPVLGKLKRNMMPWALQKKREIHMAKAHRRRAARSALPMRLTSCIFRRPVTRIRSHPDNQVRRRKGDEHLEKPQQLCAYRRLQALQPCSSQGEGSSPLHLESVLSILAPGTAGESLDRAGAERVRSPLEPTPGRFPAVAGGPTPGMGCQLPPPLSGQLVTPADIRRQARRVKKARERLAKALQADRLARRAEM

SEQ ID NO: 35042 - protein, 97 aa, Homo sapiens
MTSSPVSRVVYNGKRTSSPRSPPSSSEIFTPAHEENVRFIYEAWQGVERDLRGQVPGGERGLVEEYVEKVPNPSLKTFKPIDLSDLKRRSTQDAKKS

SEQ ID NO: 35043 - protein, 462 aa, Homo sapiens
MDKDSQGLLDSSLMASGTASRSEDEESLAGQKRASSQALGTIPKRRSSSRFIKRKKFDDELVESSLAKSSTRAKGASGVEPGRCSGSEPSSSEKKKVSKAPSTPVPPSPAPAPGLTKRVKKSKQPLQVTKDLGRWKPADDLLLINAVLQTNDLTSVHLGVKFSCRFTLREVQERWYALLYDPVISKLACQAMRQLHPEAIAAIQSKALFSKAEEQLLSKVGSTSQPTLETFQDLLHRHPDAFYLARTAKALQAHWQLMKQYYLLEDQTVQPLPKGDQVLNFSDAEDLIDDSKLKDMRDEVLEHELMVADRRQKREIRQLEQELHKWQVLVDSITGMSSPDFDNQTLAVLRGRMVRYLMRSREITLGRATKDNQIDVDLSLEGPAWKISRKQGVIKLKNNGDFFIANEGRRPIYIDGRPVLCGSKWRLSNNSVVEIASLRFVFLINQDLIALIRAEAAKITPQ

SEQ ID NO: 35044 - protein, 475 aa, Homo sapiens
MTRGTGGTAQRGRSGPDSQGLLDSSLMASGTASRSEDEESLAGQKRASSQALGTIPKRRSSSRFIKRKKFDDELVESSLAKSSTRAKGASGVEPGRCSGSEPSSSEKKKVSKAPSTPVPPSPAPAPGLTKRVKKSKQPLQVTKDLGRWKPADDLLLINAVLQTNDLTSVHLGVKFSCRFTLREVQERWYALLYDPVISKLACQAMRQLHPEAIAAIQSKALFSKAEEQLLSKVGSTSQPTLETFQDLLHRHPDAFYLARTAKALQAHWQLMKQYYLLEDQTVQPLPKGDQVLNFSDAEDLIDDSKLKDMRDEVLEHELMVADRRQKREIRQLEQELHKWQVLVDSITGMSSPDFDNQTLAVLRGRMVRYLMRSREITLGRATKDNQIDVDLSLEGPAWKISRKQGVIKLKNNGDFFIANEGRRPIYIDGRPVLCGSKWRLSNNSVVEIASLRFVFLINQDLIALIRAEAAKITPQ

SEQ ID NO: 35045 - protein, 449 aa, Homo sapiens
MASGTASRSEDEESLAGQKRASSQALGTIPKRRSSSRFIKRKKFDDELVESSLAKSSTRAKGASGVEPGRCSGSEPSSSEKKKVSKAPSTPVPPSPAPAPGLTKRVKKSKQPLQVTKDLGRWKPADDLLLINAVLQTNDLTSVHLGVKFSCRFTLREVQERWYALLYDPVISKLACQAMRQLHPEAIAAIQSKALFSKAEEQLLSKVGSTSQPTLETFQDLLHRHPDAFYLARTAKALQAHWQLMKQYYLLEDQTVQPLPKGDQVLNFSDAEDLIDDSKLKDMRDEVLEHELMVADRRQKREIRQLEQELHKWQVLVDSITGMSSPDFDNQTLAVLRGRMVRYLMRSREITLGRATKDNQIDVDLSLEGPAWKISRKQGVIKLKNNGDFFIANEGRRPIYIDGRPVLCGSKWRLSNNSVVEIASLRFVFLINQDLIALIRAEAAKITPQ

SEQ ID NO: 35046 - protein, 271 aa, Homo sapiens
MRQLHPEAIAAIQSKALFSKAEEQLLSKVGSTSQPTLETFQDLLHRHPDAFYLARTAKALQAHWQLMKQYYLLEDQTVQPLPKGDQVLNFSDAEDLIDDSKLKDMRDEVLEHELMVADRRQKREIRQLEQELHKWQVLVDSITGMSSPDFDNQTLAVLRGRMVRYLMRSREITLGRATKDNQIDVDLSLEGPAWKISRKQGVIKLKNNGDFFIANEGRRPIYIDGRPVLCGSKWRLSNNSVVEIASLRFVFLINQDLIALIRAEAAKITPQ

SEQ ID NO: 35047 - protein, 732 aa, Homo sapiens
MERGGGGSGTGSRPEGTARGTSLPGKIAEPGAVRTSQPNYRPQGMEGFLKSDERQRLAKERREEREKCLAAREQQILEKQKRARLQYEKQMEERWRKLEEQRQREDQKRAAVEEKRKQKLREEEERLEAMMRRSLERTQQLELKKKYSWGAPLAIGPGGHDACDKLSTSTMSLPKPTEPPMNKRLSSSTVAISYSPDRVFHVCPRLAPLGPLNPSYKSSPTRNIEKKKATSTSTSGAGDVGKEALSGGEASLVEKVKRGQRTATSLPVVNFGSPLRRCEFSGGIPKRPSSPVISKTATKAYPQSPKTTKPPYPGSPVKYRLPALSGQDMPKRKAEKEKSNKEREGTLAQQAAGPQGEEALEKHVVDKHASEKHAAAAGGKAENSAALGKPTAGTTDAGEAAKILAEKRRQARLQKEQEEQERLEKEEQDRLEREELKRKAEEERLRLEEEARKQEEERKRQEEEKKKQEGEEKRKAGEEAKRKAEEELLLKEKQEQEKQEKAMIEKQKEAAETKAREVAEQMRLEREQIMLQIEQERLERKKRIDEIMKRTRKSDVSPQVKKEDPKVGVQPAVCVEKKTKLVVPNKMEINGLNTCQEVNGVDHAAPETYPQDIFSNGLKPAGGLIHLDALDGKSNSLDDSTEEVQSMDVSPVSKEELISIPEFSPVSEMIPGVSLDQNGTGNARALQDLLDFTGPPTFPKRSSENLSLDDCNKNLIEGFNSPGQETPLNTFC

SEQ ID NO: 35048 - protein, 773 aa, Homo sapiens
MERGGGGSGTGSRPEGTARGTSLPGKIAEPGAVRTSQPNYRPQGMEGFLKSDERQRLAKERREEREKCLAAREQQILEKQKRARLQYEKQMEERWRKLEEQRQREDQKRAAVEEKRKQKLREEEERLEAMMRRSLERTQQLELKKKYSWGAPLAIGPGGHDACDKLSTSTMSLPKPTEPPMNKRLSSSTVAISYSPDRAHHMHLSPMEAILVSRLLTPTQSSLARSRASVMLSGQANDSVFHVCPRLAPLGPLNPSYKSSPTRNIEKKKATSTSTSGAGDVGKEALSGGEASLVEKVKRGQRTATSLPVVNFGSPLRRCEFSGGIPKRPSSPVISKTATKAYPQSPKTTKPPYPGSPVKYRLPALSGQDMPKRKAEKEKSNKEREGTLAQQAAGPQGEEALEKHVVDKHASEKHAAAAGGKAENSAALGKPTAGTTDAGEAAKILAEKRRQARLQKEQEEQERLEKEEQDRLEREELKRKAEEERLRLEEEARKQEEERKRQEEEKKKQEGEEKRKAGEEAKRKAEEELLLKEKQEQEKQEKAMIEKQKEAAETKAREVAEQMRLEREQIMLQIEQERLERKKRIDEIMKRTRKSDVSPQVKKEDPKVGVQPAVCVEKKTKLVVPNKMEINGLNTCQEVNGVDHAAPETYPQDIFSNGLKPAGGLIHLDALDGKSNSLDDSTEEVQSMDVSPVSKEELISIPEFSPVSEMIPGVSLDQNGTGNARALQDLLDFTGPPTFPKRSSENLSLDDCNKNLIEGFNSPGQETPLNTFC

SEQ ID NO: 35049 - protein, 234 aa, Homo sapiens
MERGGGGSGTGSRPEGTARGTSLPGKIAEPGAVRTSQPNYRPQGMEGFLKSDERQRLAKERREEREKCLAAREQQILEKQKRARLQYEKQMEERWRKLEEQRQREDQKRAAVEEKRKQKLREEEERLEAMMRRSLERTQQLELKKKYSWGAPLAIGPGGHDGESENTPPPPLGLAASTLPPDAGTTAAAAESTNACDKLSTSTMSLPKPTEPPMNKRLSSSTVAISYSPDQAEG

SEQ ID NO: 35050 - protein, 687 aa, Homo sapiens
MERGGGGSGTGSRPEGTARGTSLPGKIAEPGAVRTSQPNYRPQGMEGFLKSDERQRLAKERREEREKCLAAREQQILEKQKRARLQYEKQMEERWRKLEEQRQREDQKRAAVEEKRKQKLREEEERLEAMMRRSLERTQQLELKKKYSWGAPLAIGPGGHDAPLGPLNPSYKSSPTRNIEKKKATSTSTSGAGDVGKEALSGGEASLVEKVKRGQRTATSLPVVNFGSPLRRCEFSGGIPKRPSSPVISKTATKAYPQSPKTTKPPYPGSPVKYRLPALSGQDMPKRKAEKEKSNKEREGTLAQQAAGPQGEEALEKHVVDKHASEKHAAAAGGKAENSAALGKPTAGTTDAGEAAKILAEKRRQARLQKEQEEQERLEKEEQDRLEREELKRKAEEERLRLEEEARKQEEERKRQEEEKKKQEGEEKRKAGEEAKRKAEEELLLKEKQEQEKQEKAMIEKQKEAAETKAREVAEQMRLEREQIMLQIEQERLERKKRIDEIMKRTRKSDVSPQVKKEDPKVGVQPAVCVEKKTKLVVPNKMEINGLNTCQEVNGVDHAAPETYPQDIFSNGLKPAGGLIHLDALDGKSNSLDDSTEEVQSMDVSPVSKEELISIPEFSPVSEMIPGVSLDQNGTGNARALQDLLDFTGPPTFPKRSSENLSLDDCNKNLIEGFNSPGQETPLNTFC

SEQ ID NO: 35051 - protein, 680 aa, Homo sapiens
MEGFLKSDERQRLAKERREEREKCLAAREQQILEKQKRARLQYEKQMEERWRKLEEQRQREDQKRAAVEEKRKQKLREEEERLEAMMRRSLERTQQLELKKKYSWGAPLAIGPGGHDACDKLSTSTMSLPKPTEPPMNKRLSSSTVAISYSPDRAPLGPLNPSYKSSPTRNIEKKKATSTSTSGAGDVGKEALSGGEASLVEKVKRGQRTATSLPVVNFGSPLRRCEFSGGIPKRPSSPVISKTATKAYPQSPKTTKPPYPGSPVKYRLPALSGQDMPKRKAEKEKSNKEREGTLAQQAAGPQGEEALEKHVVDKHASEKHAAAAGGKAENSAALGKPTAGTTDAGEAAKILAEKRRQARLQKEQEEQERLEKEEQDRLEREELKRKAEEERLRLEEEARKQEEERKRQEEEKKKQEGEEKRKAGEEAKRKAEEELLLKEKQEQEKQEKAMIEKQKEAAETKAREVAEQMRLEREQIMLQIEQERLERKKRIDEIMKRTRKSDVSPQVKKEDPKVGVQPAVCVEKKTKLVVPNKMEINGLNTCQEVNGVDHAAPETYPQDIFSNGLKPAGGLIHLDALDGKSNSLDDSTEEVQSMDVSPVSKEELISIPEFSPVSEMIPGVSLDQNGTGNARALQDLLDFTGPPTFPKRSSENLSLDDCNKNLIEGFNSPGQETPLNTFC

SEQ ID NO: 35052 - protein, 119 aa, Homo sapiens
MVLPLPWLSRYHFLRLLLPSWSLAPQGSHGCCSQNPKASMEEQTSSRGNGKMTSPPRGPGTHRTAELARAEELLEQQLELYQALLEGQEGAWEAQALVLKIQKLKEQMRRHQESLGGGA

SEQ ID NO: 35053 - protein, 300 aa, Homo sapiens
MQSDDVIWDTLGNKQFCSFKIRTKTQSFCRNEYSLTGLCNRSSCPLANSQYATIKEEKGQCYLYMKVIERAAFPRRLWERVRLSKNYEKALEQIDENLIYWPRFIRHKCKQRFTKITQYLIRIRKLTLKRQRKLVPLSKKVERREKRREEKALIAAQLDNAIEKELLERLKQDTYGDIYNFPIHAFDKALEQQEAESDSSDTEEKDDDDDDEEDVGKREFVEDGEVDESDISDFEDMDKLDASSDEDQDGKSSSEEEEEKALSAKHKGKMPLRGPLQRKRAYVEIEYEQETEPVAKAKTT

SEQ ID NO: 35054 - protein, 876 aa, Homo sapiens
MMADGAAAGAGGSPSLRELRARMVAAANEIAKERRKQDVVNRVATHSSNIRSTFKPVIDGSMLKNDIKQRLARERREEKRRQQDANKETQLLEKERKTKLQYEKQMEERQRKLKERKEKEEQRRIAAEEKRHQKDEAQKEKFTAILYRTLERRRLADDYQQKRWSWGGSAMANSESKTANKRSASTEKLEQGTSALIRQMPLSSAGLQNSVAKRKTDKERSSSLNRRDSNLHSSTDKEQAERKPRVTGVTNYVMQYVTVPLRKCTSDELRAVMFPMSTMKIPPQTKVEESPLEKVETPPKASVDAPPQVNVEVFCNTSMEASPKAGVGMAPEVSTDSFPVVSVDVSPVVSTYDSEMSMDASPELSIEALPKVDLETVPKVSIVASPEASLEAPPEVSLEALPEVSVEAAPEGSLEAPPKGSAEVAPKESVKGSPKESMEASPEAMVKASPKTSLEASMEASPKAKARDAPKKSEMDKQALIPIAKKRLSSYTECYKWSSSPENACGLPSPISTNRQIQKNCPPSPLPLISKQSPQTSFPYKIMPIQHTLSVQSASSTVKKKKETVSKTTNRCEALSQRHMIYEESGNKSTAGIMNAEAATKILTELRRLAREQREKEEEERQREEMQQRVIKKSKDMAKEAVGGQAEDHLKLKDGQQQNETKKKKGWLDQEDQEAPLQKGDAKIKAQEEADKRKKEHERIMLQNLQERLERKKRIEEIMKRTRKTDVNASKVTETSSHDIYEEAEADNEESDKDSLNEMFPSAILNGTGSPTKFKMPFNNAKKMTHKLVFLEDGTSQVRKEPKTYFNGDLKNFRQKSMKDTSIQEVVSRPSSKRMTSHTTKTRKADETNTTSRSSAQTKSEGFHDILPKSSDTFRQ

SEQ ID NO: 35055 - protein, 835 aa, Homo sapiens
MMADGAAAGAGGSPSLRELRARMVAAANEIAKERRKQDVVNRVATHSSNIRSTFKPVIDGSMLKNDIKQRLARERREEKRRQQDANKETQLLEKERKTKLQYEKQMEERQRKLKERKEKEEQRRIAAEEKRHQKDEAQKEKFTAILYRTLERRRLADDYQQKRWSWGGSAMANSESKTANKRSASTEKLEQGTSALIRQMPLSSAGLQNSVAKRKTDKERSSSLNRRDSNLHSSTDKEQAERKPRVEESPLEKVETPPKASVDAPPQVNVEVFCNTSMEASPKAGVGMAPEVSTDSFPVVSVDVSPVVSTYDSEMSMDASPELSIEALPKVDLETVPKVSIVASPEASLEAPPEVSLEALPEVSVEAAPEGSLEAPPKGSAEVAPKESVKGSPKESMEASPEAMVKASPKTSLEASMEASPKAKARDAPKKSEMDKQALIPIAKKRLSSYTECYKWSSSPENACGLPSPISTNRQIQKNCPPSPLPLISKQSPQTSFPYKIMPIQHTLSVQSASSTVKKKKETVSKTTNRCEALSQRHMIYEESGNKSTAGIMNAEAATKILTELRRLAREQREKEEEERQREEMQQRVIKKSKDMAKEAVGGQAEDHLKLKDGQQQNETKKKKGWLDQEDQEAPLQKGDAKIKAQEEADKRKKEHERIMLQNLQERLERKKRIEEIMKRTRKTDVNASKVTETSSHDIYEEAEADNEESDKDSLNEMFPSAILNGTGSPTKFKMPFNNAKKMTHKLVFLEDGTSQVRKEPKTYFNGDLKNFRQKSMKDTSIQEVVSRPSSKRMTSHTTKTRKADETNTTSRSSAQTKSEGFHDILPKSSDTFRQ

SEQ ID NO: 35056 - protein, 841 aa, Homo sapiens
MMADGAAAGAGGSPSLRELRARMVAAANEIAKERRKQDVVNRVATHSSNIRSTFKPVIDGSMLKNDIKQRLARERREEKRRQQDANKETQLLEKERKTKLQYEKQMEERQRKLKERKEKEEQRRIAAEEKRHQKDEAQKEKFTAILYRTLERRRLADDYQQKRWSWGGSAMANSESKTGKTDKERSSSLNRRDSNLHSSTDKEQAERKPRVTGVTNYVMQYVTVPLRKCTSDELRAVMFPMSTMKIPPQTKVEESPLEKVETPPKASVDAPPQVNVEVFCNTSMEASPKAGVGMAPEVSTDSFPVVSVDVSPVVSTYDSEMSMDASPELSIEALPKVDLETVPKVSIVASPEASLEAPPEVSLEALPEVSVEAAPEGSLEAPPKGSAEVAPKESVKGSPKESMEASPEAMVKASPKTSLEASMEASPKAKARDAPKKSEMDKQALIPIAKKRLSSYTECYKWSSSPENACGLPSPISTNRQIQKNCPPSPLPLISKQSPQTSFPYKIMPIQHTLSVQSASSTVKKKKETVSKTTNRCEALSQRHMIYEESGNKSTAGIMNAEAATKILTELRRLAREQREKEEEERQREEMQQRVIKKSKDMAKEAVGGQAEDHLKLKDGQQQNETKKKKGWLDQEDQEAPLQKGDAKIKAQEEADKRKKEHERIMLQNLQERLERKKRIEEIMKRTRKTDVNASKVTETSSHDIYEEAEADNEESDKDSLNEMFPSAILNGTGSPTKFKMPFNNAKKMTHKLVFLEDGTSQVRKEPKTYFNGDLKNFRQKSMKDTSIQEVVSRPSSKRMTSHTTKTRKADETNTTSRSSAQTKSEGFHDILPKSSDTFRQ

SEQ ID NO: 35057 - protein, 858 aa, Homo sapiens
MTSPRVAAANEIAKERRKQDVVNRVATHSSNIRSTFKPVIDGSMLKNDIKQRLARERREEKRRQQDANKETQLLEKERKTKLQYEKQMEERQRKLKERKEKEEQRRIAAEEKRHQKDEAQKEKFTAILYRTLERRRLADDYQQKRWSWGGSAMANSESKTANKRSASTEKLEQGTSALIRQMPLSSAGLQNSVAKRKTDKERSSSLNRRDSNLHSSTDKEQAERKPRVTGVTNYVMQYVTVPLRKCTSDELRAVMFPMSTMKIPPQTKVEESPLEKVETPPKASVDAPPQVNVEVFCNTSMEASPKAGVGMAPEVSTDSFPVVSVDVSPVVSTYDSEMSMDASPELSIEALPKVDLETVPKVSIVASPEASLEAPPEVSLEALPEVSVEAAPEGSLEAPPKGSAEVAPKESVKGSPKESMEASPEAMVKASPKTSLEASMEASPKAKARDAPKKSEMDKQALIPIAKKRLSSYTECYKWSSSPENACGLPSPISTNRQIQKNCPPSPLPLISKQSPQTSFPYKIMPIQHTLSVQSASSTVKKKKETVSKTTNRCEALSQRHMIYEESGNKSTAGIMNAEAATKILTELRRLAREQREKEEEERQREEMQQRVIKKSKDMAKEAVGGQAEDHLKLKDGQQQNETKKKKGWLDQEDQEAPLQKGDAKIKAQEEADKRKKEHERIMLQNLQERLERKKRIEEIMKRTRKTDVNASKVTETSSHDIYEEAEADNEESDKDSLNEMFPSAILNGTGSPTKFKMPFNNAKKMTHKLVFLEDGTSQVRKEPKTYFNGDLKNFRQKSMKDTSIQEVVSRPSSKRMTSHTTKTRKADETNTTSRSSAQTKSEGFHDILPKSSDTFRQ

SEQ ID NO: 35058 - protein, 1328 aa, Homo sapiens
MESRDPAQPMSPGEATQSGARPADRYGLLKHSREFLDFFWDIAKPEQETRLAATEKLLEYLRGRPKGSEMKYALKRLITGLGVGRETARPCYSLALAQLLQSFEDLPLCSILQQIQEKYDLHQVKKAMLRPALFANLFGVLALFQSGRLVKDQEALMKSVKLLQALAQYQNHLQEQPRKALVDILSEVSKATLQEILPEVLKADLNIILSSPEQLELFLLAQQKVPSKLKKLVGSVNLFSDENVPRLVNVLKMAASSVKKDRKLPAIALDLLRLALKEDKFPRFWKEVVEQGLLKMQFWPASYLCFRLLGAALPLLTKEQLHLVMQGDVIRHYGEHVCTAKLPKQFKFAPEMDDYVGTFLEGCQDDPERQLAVLVAFSSVTNQGLPVTPTFWRVVRFLSPPALQGYVAWLRAMFLQPDLDSLVDFSTNNQKKAQDSSLHMPERAVFRLRKWIIFRLVSIVDSLHLEMEEALTEQVARFCLFHSFFVTKKPTSQIPETKHPFSFPLENQAREAVSSAFFSLLQTLSTQFKQAPGQTQGGQPWTYHLVQFADLLLNHSHNVTTVTPFTAQQRQAWDRMLQTLKELEAHSAEARAAAFQHLLLLVGIHLLKSPAESCDLLGDIQTCIRKSLGEKPRRSRTKTIDPQEPPWVEVLVEILLALLAQPSHLMRQVARSVFGHICSHLTPRALQLILDVLNPETSEDENDRVVVTDDSDERRLKGAEDKSEEGEDNRSSESEEESEGEESEEEERDGDVDQGFREQLMTVLQAGKALGGEDSENEEELGDEAMMALDQSLASLFAEQKLRIQARRDEKNKLQKEKALRRDFQIRVLDLVEVLVTKQPENALVLELLEPLLSIIRRSLRSSSSKQEQDLLHKTARIFTHHLCRARRYCHDLGERAGALHAQVERLVQQAGRQPDSPTALYHFNASLYLLRVLKGNTAEGCVHETQEKQKAGTDPSHMPTGPQAASCLDLNLVTRVYSTALSSFLTKRNSPLTVPMFLSLFSRHPVLCQSLLPILVQHITGPVRPRHQACLLLQKTLSMREVRSCFEDPEWKQLMGQVLAKVTENLRVLGEAQTKAQHQQALSSLELLNVLFRTCKHEKLTLDLTVLLGVLQGQQQSLQQGAHSTGSSRLHDLYWQAMKTLGVQRPKLEKKDAKEIPSATQSPISKKRKKKGFLPETKKRKKRKSEDGTPAEDGTPAATGGSQPPSMGRKKRNRTKAKVPAQANGTPTTKSPAPGAPTRSPSTPAKSPKLQKKNQKPSQVNGAPGSPTEPAGQKQHQKALPKKGVLGKSPLSALARKKARLSLVIRSPSLLQSGAKKKAQVRKAGKP

SEQ ID NO: 35059 - protein, 1332 aa, Homo sapiens
MESRDPAQPMSPGEATQSGARPADRYGLLKHSREFLDFFWDIAKPEQETRLAATEKLLEYLRGRPKGSEMKYALKRLITGLGVGRETARPCYSLALAQLLQSFEDLPLCSILQQIQEKYDLHQVKKAMLRPALFANLFGVLALFQSGRLVKDQEALMKSVKLLQALAQYQNHLQEQPRKALVDILSEVSKATLQEILPEVLKADLNIILSSPEQLELFLLAQQKVPSKLKKLVGSVNLFSDENVPRLVNVLKMAASSVKKDRKLPAIALDLLRLALKEDKFPRFWKEVVEQGLLKMQFWPASYLCFRLLGAALPLLTKEQLHLVMQGDVIRHYGEHVCTAKLPKQFKFAPEMDDYVGTFLEGCQDDPERQLAVLVAFSSVTNQGLPVTPTFWRVVRFLSPPALQGYVAWLRAMFLQPDLDSLVDFSTNNQKKAQDSSLHMPERAVFRLRKWIIFRLVSIVDSLHLEMEEALTEQVARFCLFHSFFVTKKPTSQIPETKHPFSFPLENQAREAVSSAFFSLLQTLSTQFKQAPGQTQGGQPWTYHLVQFADLLLNHSHNVTTVTPFTAQQRQAWDRMLQTLKELEAHSAEARAAAFQHLLLLVGIHLLKSPAESCDLLGDIQTCIRKSLGEKPRRSRTKTIDPQEPPWVEVLVEILLALLAQPSHLMRQVARSVFGHICSHLTPRALQLILDVLNPETSEDENDRVVVTDDSDERRLKGAEDKSEEGEDNRSSESEEESEGEESEEEERDGDVDQGFREQLMTVLQAGKALGGEDSENEEELGDEAMMALDQSLASLFAEQKLRIQARRDEKNKLQKEKALRRDFQIRVLDLVEVLVTKQPENALVLELLEPLLSIIRRSLRSSSSKQEQDLLHKTARIFTHHLCRARRYCHDLGERAGALHAQVERLVQQAGRQPDSPTALYHFNASLYLLRVLKGNTAEGCVHETQEKQKAGTDPSHMPTGPQAASCLDLNLVTRVYSTALSSFLTKRNSPLTVPMFLSLFSRHPVLCQSLLPILVQHITGPVRPRHQACLLLQKTLSMREVRSCFEDPEWKQLMGQVLAKVTENLRVLGEAQTKAQHQQALSSLELLNVLFRTCKHEKLTLDLTVLLGVLQGQQQSLQQGAHSTGSSRLHDLYWQAMKTLGVQRPKLEKKDAKEIPSATQSPISKKRKKKGFLPETKKRKKRKSEDGTPAEDGTPAATGGSQPPSMGRKKRNRTKAKVPAQANGTPTTKSPAPGAPTRSPSTPAKSPKLQKKNQKPSQVNGAPGSPTEPAGQKQHQKALPKKGVLGKSPLSALARKKARLSLVIRSPSLLQSGAKKKAQTLRFTISSSKK

SEQ ID NO: 35060 - protein, 216 aa, Homo sapiens
MQAGKPILYSYFRSSCSWRVRIALALKGIDYKTVPINLIKDRGQQFSKDFQALNPMKQVPTLKIDGITIHQSLAIIEYLEEMRPTPRLLPQDPKKRASVRMISDLIAGGIQPLQNLSVLKQVGEEMQLTWAQNAITCGFNALEQILQSTAGIYCVGDEVTMADLCLVPQVANAERFKVDLTPYPTISSINKRLLVLEAFQVSHPCRQPDTPTELRA

SEQ ID NO: 35061 - protein, 161 aa, Homo sapiens
MKQVPTLKIDGITIHQSLAIIEYLEEMRPTPRLLPQDPKKRASVRMISDLIAGGIQPLQNLSVLKQVGEEMQLTWAQNAITCGFNALEQILQSTAGIYCVGDEVTMADLCLVPQVANAERFKVDLTPYPTISSINKRLLVLEAFQVSHPCRQPDTPTELRA

SEQ ID NO: 35062 - protein, 174 aa, Homo sapiens
MQAGKPILYSYFRSSCSWRVRIALALKGIDYKTVPINLIKDRGQQFSKDFQALNPMKQVPTLKIDGITIHQSNLSVLKQVGEEMQLTWAQNAITCGFNALEQILQSTAGIYCVGDEVTMADLCLVPQVANAERFKVDLTPYPTISSINKRLLVLEAFQVSHPCRQPDTPTELRA

SEQ ID NO: 35063 - protein, 984 aa, Homo sapiens
METKGYHSLPEGLDMERRWGQVSQAVERSSLGPTERTDENNYMEIVNVSCVSGAIPNNSTQGSSKEKQELLPCLQQDNNRPGILTSDIKTELESKELSATVAESMGLYMDSVRDADYSYEQQNQQGSMSPAKIYQNVEQLVKFYKGNGHRPSTLSCVNTPLRSFMSDSGSSVNGGVMRAVVKSPIMCHEKSPSVCSPLNMTSSVCSPAGINSVSSTTASFGSFPVHSPITQGTPLTCSPNVENRGSRSHSPAHASNVGSPLSSPLSSMKSSISSPPSHCSVKSPVSSPNNVTLRSSVSSPANINNSRCSVSSPSNTNNRSTLSSPAASTVGSICSPVNNAFSYTASGTSAGSSTLRDVVPSPDTQEKGAQEVPFPKTEEVESAISNGVTGQLNIVQYIKPEPDGAFSSSCLGGNSKINSDSSFSVPIKQESTKHSCSGTSFKGNPTVNPFPFMDGSYFSFMDDKDYYSLSGILGPPVPGFDGNCEGSGFPVGIKQEPDDGSYYPEASIPSSAIVGVNSGGQSFHYRIGAQGTISLSRSARDQSFQHLSSFPPVNTLVESWKSHGDLSSRRSDGYPVLEYIPENVSSSTLRSVSTGSSRPSKICLVCGDEASGCHYGVVTCGSCKVFFKRAVEGQHNYLCAGRNDCIIDKIRRKNCPACRLQKCLQAGMNLGARKSKKLGKLKGIHEEQPQQQQPPPPPPPPQSPEEGTTYIAPAKEPSVNTALVPQLSTISRALTPSPVMVLENIEPEIVYAGYDSSKPDTAENLLSTLNRLAGKQMIQVVKWAKVLPGFKNLPLEDQITLIQYSWMCLSSFALSWRSYKHTNSQFLYFAPDLVFNEEKMHQSAMYELCQGMHQISLQFVRLQLTFEEYTIMKVLLLLSTIPKDGLKSQAAFEEMRTNYIKELRKMVTKCPNNSGQSWQRFYQLTKLLDSMHDLVSDLLEFCFYTFRESHALKVEFPAMLVEIISDQLPKVESGNAKPLYFHRK

SEQ ID NO: 35064 - protein, 706 aa, Homo sapiens
METKGYHSLPEGLDMERRWGQVSQAVERSSLGPTERTDENNYMEIVNVSCVSGAIPNNSTQGSSKEKQELLPCLQQDNNRPGILTSDIKTELESKELSATVAESMGLYMDSVRDADYSYEQQNQQGSMSPAKIYQNVEQLVKFYKGNGHRPSTLSCVNTPLRSFMSDSGSSVNGGVMRAVVKSPIMCHEKSPSVCSPLNMTSSVCSPAGINSVSSTTASFGSFPVHSPITQGTPLTCSPNVENRGSRSHSPAHASNVGSPLSSPLSSMKSSISSPPSHCSVKSPVSSPNNVTLRSSVSSPANINNSRCSVSSPSNTNNRSTLSSPAASTVGSICSPVNNAFSYTASGTSAGSSTLRDVVPSPDTQEKGAQEVPFPKTEEVESAISNGVTGQLNIVQYIKPEPDGAFSSSCLGGNSKINSDSSFSVPIKQESTKHSCSGTSFKGNPTVNPFPFMDGSYFSFMDDKDYYSLSGILGPPVPGFDGNCEGSGFPVGIKQEPDDGSYYPEASIPSSAIVGVNSGGQSFHYRIGAQGTISLSRSARDQSFQHLSSFPPVNTLVESWKSHGDLSSRRSDGYPVLEYIPENVSSSTLRSVSTGSSRPSKICLVCGDEASGCHYGVVTCGSCKVFFKRAVEGQHNYLCAGRNDCIIDKIRRKNCPACRLQKCLQAGMNLGERRCISLPCMNYARGCTKSAFSSFDCSSPLKNTPS

SEQ ID NO: 35065 - protein, 988 aa, Homo sapiens
METKGYHSLPEGLDMERRWGQVSQAVERSSLGPTERTDENNYMEIVNVSCVSGAIPNNSTQGSSKEKQELLPCLQQDNNRPGILTSDIKTELESKELSATVAESMGLYMDSVRDADYSYEQQNQQGSMSPAKIYQNVEQLVKFYKGNGHRPSTLSCVNTPLRSFMSDSGSSVNGGVMRAVVKSPIMCHEKSPSVCSPLNMTSSVCSPAGINSVSSTTASFGSFPVHSPITQGTPLTCSPNVENRGSRSHSPAHASNVGSPLSSPLSSMKSSISSPPSHCSVKSPVSSPNNVTLRSSVSSPANINNSRCSVSSPSNTNNRSTLSSPAASTVGSICSPVNNAFSYTASGTSAGSSTLRDVVPSPDTQEKGAQEVPFPKTEEVESAISNGVTGQLNIVQYIKPEPDGAFSSSCLGGNSKINSDSSFSVPIKQESTKHSCSGTSFKGNPTVNPFPFMDGSYFSFMDDKDYYSLSGILGPPVPGFDGNCEGSGFPVGIKQEPDDGSYYPEASIPSSAIVGVNSGGQSFHYRIGAQGTISLSRSARDQSFQHLSSFPPVNTLVESWKSHGDLSSRRSDGYPVLEYIPENVSSSTLRSVSTGSSRPSKICLVCGDEASGCHYGVVTCGSCKVFFKRAVEGKCSWQHNYLCAGRNDCIIDKIRRKNCPACRLQKCLQAGMNLGARKSKKLGKLKGIHEEQPQQQQPPPPPPPPQSPEEGTTYIAPAKEPSVNTALVPQLSTISRALTPSPVMVLENIEPEIVYAGYDSSKPDTAENLLSTLNRLAGKQMIQVVKWAKVLPGFKNLPLEDQITLIQYSWMCLSSFALSWRSYKHTNSQFLYFAPDLVFNEEKMHQSAMYELCQGMHQISLQFVRLQLTFEEYTIMKVLLLLSTIPKDGLKSQAAFEEMRTNYIKELRKMVTKCPNNSGQSWQRFYQLTKLLDSMHDLVSDLLEFCFYTFRESHALKVEFPAMLVEIISDQLPKVESGNAKPLYFHRK

SEQ ID NO: 35066 - protein, 867 aa, Homo sapiens
METKGYHSLPEGLDMERRWGQVSQAVERSSLGPTERTDENNYMEIVNVSCVSGAIPNNSTQGSSKEKQELLPCLQQDNNRPGILTSDIKTELESKELSATVAESMGLYMDSVRDADYSYEQQNQQGSMSPAKIYQNVEQLVKFYKGNGHRPSTLSCVNTPLRSFMSDSGSSVNGGVMRAVVKSPIMCHEKSPSVCSPLNMTSSVCSPAGINSVSSTTASFGSFPVHSPITQGTPLTCSPNVENRGSRSHSPAHASNVGSPLSSPLSSMKSSISSPPSHCSVKSPVSSPNNVTLRSSVSSPANINNSRCSVSSPSNTNNRSTLSSPAASTVGSICSPVNNAFSYTASGTSAGSSTLRDVVPSPDTQEKGAQEVPFPKTEEVESAISNGVTGQLNIVQYIKPEPDGAFSSSCLGGNSKINSDSSFSVPIKQESTKHSCSGTSFKGNPTVNPFPFMDGSYFSFMDDKDYYSLSGILGPPVPGFDGNCEGSGFPVGIKQEPDDGSYYPEASIPSSAIVGVNSGGQSFHYRIGAQGTISLSRSARDQSFQHLSSFPPVNTLVESWKSHGDLSSRRSDGYPVLEYIPENVSSSTLRSVSTGSSRPSKICLVCGDEASGCHYGVVTCGSCKVFFKRAVEGQHNYLCAGRNDCIIDKIRRKNCPACRLQKCLQAGMNLGGFKNLPLEDQITLIQYSWMCLSSFALSWRSYKHTNSQFLYFAPDLVFNEEKMHQSAMYELCQGMHQISLQFVRLQLTFEEYTIMKVLLLLSTIPKDGLKSQAAFEEMRTNYIKELRKMVTKCPNNSGQSWQRFYQLTKLLDSMHDLVSDLLEFCFYTFRESHALKVEFPAMLVEIISDQLPKVESGNAKPLYFHRK

SEQ ID NO: 35067 - protein, 115 aa, Homo sapiens
MLVCVLLYSFRLFGIQGEAQLTESGGDLVHLEGPLRLSCAASWFTFSIYEIHWVCQASGKGLEWVAVIWRGESHQYNADYVRGRLTTSRDNTKYMLYMQMISLRTQNMAAFNCAG

SEQ ID NO: 35068 - protein, 117 aa, Homo sapiens
MGSTAILALLLAVLQGVCAEVQLVQSGAEVKKPGESLKISCKGSGYSFTSYWIGWVRQMPGKGLEWMGIIYPGDSDTRYSPSFQGQVTISADKSISTAYLQWSSLKASDTAMYYCAR

SEQ ID NO: 35069 - protein, 117 aa, Homo sapiens; identical to SEQ ID NO: 13226

SEQ ID NO: 35070 - protein, 519 aa, Homo sapiens
MDADEGQDMSQVSGKESPPVSDTPDEGDEPMPIPEDLSTTSGGQQSSKSDRVVASNVKVETQSDEENGRACEMNGEECAEDLRMLDASGEKMNGSHRDQGSSALSGVGGIRLPNGKLKCDICGIICIGPNVLMVHKRSHTGERPFQCNQCGASFTQKGNLLRHIKLHSGEKPFKCHLCNYACRRRDALTGHLRTHSVGKPHKCGYCGRSYKQRSSLEEHKERCHNYLESMGLPGTLYPVIKEETNHSEMAEDLCKIGSERSLVLDRLASNVAKRKSSMPQKFLGDKGLSDTPYDSSASYEKENEMMKSHVMDQAINNAINYLGAESLRPLVQTPPGGSEVVPVISPMYQLHKPLAEGTPRSNHSAQDSAVENLLLLSKAKLVPSEREASPSNSCQDSTDTESNNEEQRSGLIYLTNHIAPHARNGLSLKEEHRAYDLLRAASENSQDALRVVSTSGEQMKVYKCEHCRVLFLDHVMYTIHMGCHGFRDPFECNMCGYHSQDRYEFSSHITRGEHRFHMS

SEQ ID NO: 35071 - protein, 432 aa, Homo sapiens
MDADEGQDMSQVSGKESPPVSDTPDEGDEPMPIPEDLSTTSGGQQSSKSDRVVGERPFQCNQCGASFTQKGNLLRHIKLHSGEKPFKCHLCNYACRRRDALTGHLRTHSVGKPHKCGYCGRSYKQRSSLEEHKERCHNYLESMGLPGTLYPVIKEETNHSEMAEDLCKIGSERSLVLDRLASNVAKRKSSMPQKFLGDKGLSDTPYDSSASYEKENEMMKSHVMDQAINNAINYLGAESLRPLVQTPPGGSEVVPVISPMYQLHKPLAEGTPRSNHSAQDSAVENLLLLSKAKLVPSEREASPSNSCQDSTDTESNNEEQRSGLIYLTNHIAPHARNGLSLKEEHRAYDLLRAASENSQDALRVVSTSGEQMKVYKCEHCRVLFLDHVMYTIHMGCHGFRDPFECNMCGYHSQDRYEFSSHITRGEHRFHMS

SEQ ID NO: 35072 - protein, 432 aa, Homo sapiens
MDADEGQDMSQVSGKESPPVSDTPDEGDEPMPIPEDLSTTSGGQQSSKSDRVVASNVKVETQSDEENGRACEMNGEECAEDLRMLDASGEKMNGSHRDQGSSALSGVGGIRLPNGKLKCDICGIICIGPNVLMVHKRSHTGERPFQCNQCGASFTQKGNLLRHIKLHSGEKPFKCHLCNYACRRRDALTGHLRTHSGDKGLSDTPYDSSASYEKENEMMKSHVMDQAINNAINYLGAESLRPLVQTPPGGSEVVPVISPMYQLHKPLAEGTPRSNHSAQDSAVENLLLLSKAKLVPSEREASPSNSCQDSTDTESNNEEQRSGLIYLTNHIAPHARNGLSLKEEHRAYDLLRAASENSQDALRVVSTSGEQMKVYKCEHCRVLFLDHVMYTIHMGCHGFRDPFECNMCGYHSQDRYEFSSHITRGEHRFHMS

SEQ ID NO: 35073 - protein, 388 aa, Homo sapiens
MDADEGQDMASNVKVETQSDEENGRACEMNGEECAEDLRMLDASGEKMNGSHRDQGSSALSGVGGIRLPNGKLKCDICGIICIGPNVLMVHKRSHTGERPFQCNQCGASFTQKGNLLRHIKLHSGEKPFKCHLCNYACRRRDALTGHLRTHSGDKGLSDTPYDSSASYEKENEMMKSHVMDQAINNAINYLGAESLRPLVQTPPGGSEVVPVISPMYQLHKPLAEGTPRSNHSAQDSAVENLLLLSKAKLVPSEREASPSNSCQDSTDTESNNEEQRSGLIYLTNHIAPHARNGLSLKEEHRAYDLLRAASENSQDALRVVSTSGEQMKVYKCEHCRVLFLDHVMYTIHMGCHGFRDPFECNMCGYHSQDRYEFSSHITRGEHRFHMS

SEQ ID NO: 35074 - protein, 376 aa, Homo sapiens
MDADEGQDMSQVSGKESPPVSDTPDEGDEPMPIPEDLSTTSGGQQSSKSDRVVASNVKVETQSDEENGRACEMNGEECAEDLRMLDASGEKMNGSHRDQGSSALSGVGGIRLPNGKLKCDICGIICIGPNVLMVHKRSHTGDKGLSDTPYDSSASYEKENEMMKSHVMDQAINNAINYLGAESLRPLVQTPPGGSEVVPVISPMYQLHKPLAEGTPRSNHSAQDSAVENLLLLSKAKLVPSEREASPSNSCQDSTDTESNNEEQRSGLIYLTNHIAPHARNGLSLKEEHRAYDLLRAASENSQDALRVVSTSGEQMKVYKCEHCRVLFLDHVMYTIHMGCHGFRDPFECNMCGYHSQDRYEFSSHITRGEHRFHMS

SEQ ID NO: 35075 - protein, 289 aa, Homo sapiens
MDADEGQDMSQVSGKESPPVSDTPDEGDEPMPIPEDLSTTSGGQQSSKSDRVVGDKGLSDTPYDSSASYEKENEMMKSHVMDQAINNAINYLGAESLRPLVQTPPGGSEVVPVISPMYQLHKPLAEGTPRSNHSAQDSAVENLLLLSKAKLVPSEREASPSNSCQDSTDTESNNEEQRSGLIYLTNHIAPHARNGLSLKEEHRAYDLLRAASENSQDALRVVSTSGEQMKVYKCEHCRVLFLDHVMYTIHMGCHGFRDPFECNMCGYHSQDRYEFSSHITRGEHRFHMS

SEQ ID NO: 35076 - protein, 477 aa, Homo sapiens
MDADEGQDMSQVSGKESPPVSDTPDEGDEPMPIPEDLSTTSGGQQSSKSDRVVASNVKVETQSDEENGRACEMNGEECAEDLRMLDASGEKMNGSHRDQGSSALSGVGGIRLPNGKLKCDICGIICIGPNVLMVHKRSHTGERPFQCNQCGASFTQKGNLLRHIKLHSGEKPFKCHLCNYACRRRDALTGHLRTHSVIKEETNHSEMAEDLCKIGSERSLVLDRLASNVAKRKSSMPQKFLGDKGLSDTPYDSSASYEKENEMMKSHVMDQAINNAINYLGAESLRPLVQTPPGGSEVVPVISPMYQLHKPLAEGTPRSNHSAQDSAVENLLLLSKAKLVPSEREASPSNSCQDSTDTESNNEEQRSGLIYLTNHIAPHARNGLSLKEEHRAYDLLRAASENSQDALRVVSTSGEQMKVYKCEHCRVLFLDHVMYTIHMGCHGFRDPFECNMCGYHSQDRYEFSSHITRGEHRFHMS

SEQ ID NO: 35077 - protein, 226 aa, Homo sapiens
MDADEGQDMSQVSGKESPPVSDTPDEGDEPMPIPEDLSTTSGGQQSSKSDRVVASNVKVETQSDEENGRACEMNGEECAEDLRMLDASGEKMNGSHRDQGSSALSGVGGIRLPNGKLKCDICGIICIGPNVLMVHKRSHTGERPFQCNQCGASFTQKGNLLRHIKLHSGEKPFKCHLCNYACRRRDALTGHLRTHSVIKEETNHSEMAEDLCKIGSEISRAGQTSK

SEQ ID NO: 35078 - protein, 117 aa, Homo sapiens
MDWTWRILFLVAAATGAHSQVQLVQSGSELKKPGASVKVSCKASGYTFTSYAMNWVRQAPGQGLEWMGWINTNTGNPTYAQGFTGRFVFSLDTSVSTAYLQICSLKAEDTAVYYCAR

SEQ ID NO: 35079 - protein, 356 aa, Homo sapiens
MNFEFEREIGFINSQPSLAECLTSFPAVLETFQTSSIKESTLIPPPPPFEQTFPSLQPGASTLQRPRSQKRAEDGPALPPPPPPPLPAAPPAPEFPWMKEKKSAKKPSQSATSPSPAASAVPASGVGSPADGLGLPEAGGGGARRLRTAYTNTQLLELEKEFHFNKYLCRPRRVEIAALLDLTERQVKVWFQNRRMKHKRQTQHREPPDGEPACPGALEDICDPAEEPAASPGGPSASRAAWEACCHPPEVVPGALSADPRPLAVRLEGAGASSPGCALRGAGGLEPGPLPEDVFSGRQDSPFLPDLNFFAADSCLQLSGGLSPSLQGSLDSPVPFSEEELDFFTSTLCAIDLQFP

SEQ ID NO: 35080 - protein, 335 aa, Homo sapiens
MDNARMNSFLEYPILSSGDSGTCSARAYPSDHRITTFQSCAVSANSCGGDDRFLVGRGVQIGSPHHHHHHHHHHPQPATYQTSGNLGVSYSHSSCGPSYGSQNFSAPYSPYALNQEADVSGGYPQCAPAVYSGNLSSPMVQHHHHHQGYAGGAVGSPQYIHHSYGQEHQSLALATYNNSLSPLHASHQEACRSPASETSSPAQTFDWMKVKRNPPKTGKVGEYGYLGQPNAVRTNFTTKQLTELEKEFHFNKYLTRARRVEIAASLQLNETQVKIWFQNRRMKQKKREKEGLLPISPATPPGNDEKAEESSEKSSSSPCVPSPGSSTSDTLTTSH

SEQ ID NO: 35081 - protein, 137 aa, Homo sapiens
MDNARMNSFLEYPILSSGDSGTCSARAYPSDHRITTFQSCAVSANSCGGDDRFLVGRGVQIGSPHHHHHHHHHHPQPATYQTSGNLGVSYSHSSCGPSYGSQNFSAPYSPYALNQEADPPRSLSLPRIGDIFSSADF

SEQ ID NO: 35082 - protein, 227 aa, Homo sapiens
MDNARMNSFLEYPILSSGDSGTCSARAYPSDHRITTFQSCAVSANSCGGDDRFLVGRGVQIGSPHHHHHHHHHHPQPATYQTSGNLGVSYSHSSCGPSYGSQNFSAPYSPYALNQEADVSGGYPQCAPAVYSGNLSSPMVQHHHHHQGYAGGAVGSPQYIHHSYGQEHQSLALATYNNSLSPLHASHQEACRSPASETSSPAQTFDWMKVKRNPPKTGQSCWLVDAP

SEQ ID NO: 35083 - protein, 791 aa, Homo sapiens
MPVPWFLLSLALGRSPVVLSLERLVGPQDATHCSPVSLEPWGDEERLRVQFLAQQSLSLAPVTAATARTALSGLSGADGRREERGRGKSWVCLSLGGSGNTEPQKKGLSCRLWDSDILCLPGDIVPAPGPVLAPTHLQTELVLRCQKETDCDLCLRVAVHLAVHGHWEEPEDEEKFGGAADSGVEEPRNASLQAQVVLSFQAYPTARCVLLEVQVPAALVQFGQSVGSVVYDCFEAALGSEVRIWSYTQPRYEKELNHTQQLPDCRGLEVWNSIPSCWALPWLNVSADGDNVHLVLNVSEEQHFGLSLYWNQVQGPPKPRWHKNLTGPQIITLNHTDLVPCLCIQVWPLEPDSVRTNICPFREDPRAHQNLWQAARLQLLTLQSWLLDAPCSLPAEAALCWRAPGGDPCQPLVPPLSWENVTVDKVLEFPLLKGHPNLCVQVNSSEKLQLQECLWADSLGPLKDDVLLLETRGPQDNRSLCALEPSGCTSLPSKASTRAARLGEYLLQDLQSGQCLQLWDDDLGALWACPMDKYIHKRWALVWLACLLFAAALSLILLLKKDHAKGWLRLLKQDVRSGAAARGRAALLLYSADDSGFERLVGALASALCQLPLRVAVDLWSRRELSAQGPVAWFHAQRRQTLQEGGVVVLLFSPGAVALCSEWLQDGVSGPGAHGPHDAFRASLSCVLPDFLQGRAPGSYVGACFDRLLHPDAVPALFRTVPVFTLPSQLPDFLGALQQPRAPRSGRLQERAEQVSRALQPALDSYFHPPGTPAPGRGVGPGAGPGAGDGT

SEQ ID NO: 35084 - protein, 720 aa, Homo sapiens
MPVPWFLLSLALGRSPVVLSLERLVGPQDATHCSPGLSCRLWDSDILCLPGDIVPAPGPVLAPTHLQTELVLRCQKETDCDLCLRVAVHLAVHGHWEEPEDEEKFGGAADSGVEEPRNASLQAQVVLSFQAYPTARCVLLEVQVPAALVQFGQSVGSVVYDCFEAALGSEVRIWSYTQPRYEKELNHTQQLPDCRGLEVWNSIPSCWALPWLNVSADGDNVHLVLNVSEEQHFGLSLYWNQVQGPPKPRWHKNLTGPQIITLNHTDLVPCLCIQVWPLEPDSVRTNICPFREDPRAHQNLWQAARLQLLTLQSWLLDAPCSLPAEAALCWRAPGGDPCQPLVPPLSWENVTVDKVLEFPLLKGHPNLCVQVNSSEKLQLQECLWADSLGPLKDDVLLLETRGPQDNRSLCALEPSGCTSLPSKASTRAARLGEYLLQDLQSGQCLQLWDDDLGALWACPMDKYIHKRWALVWLACLLFAAALSLILLLKKDHAKGWLRLLKQDVRSGAAARGRAALLLYSADDSGFERLVGALASALCQLPLRVAVDLWSRRELSAQGPVAWFHAQRRQTLQEGGVVVLLFSPGAVALCSEWLQDGVSGPGAHGPHDAFRASLSCVLPDFLQGRAPGSYVGACFDRLLHPDAVPALFRTVPVFTLPSQLPDFLGALQQPRAPRSGRLQERAEQVSRALQPALDSYFHPPGTPAPGRGVGPGAGPGAGDGT

SEQ ID NO: 35085 - protein, 705 aa, Homo sapiens
MPVPWFLLSLALGRSPVVLSLERLVGPQDATHCSPGLSCRLWDSDILCLPGDIVPAPGPVLAPTHLQTELVLRCQKETDCDLCLRVAVHLAVHGHWEEPEDEEKFGGAADSGVEEPRNASLQAQVVLSFQAYPTARCVLLEVQVPAALVQFGQSVGSVVYDCFEAALGSEVRIWSYTQPRYEKELNHTQQLPALPWLNVSADGDNVHLVLNVSEEQHFGLSLYWNQVQGPPKPRWHKNLTGPQIITLNHTDLVPCLCIQVWPLEPDSVRTNICPFREDPRAHQNLWQAARLQLLTLQSWLLDAPCSLPAEAALCWRAPGGDPCQPLVPPLSWENVTVDKVLEFPLLKGHPNLCVQVNSSEKLQLQECLWADSLGPLKDDVLLLETRGPQDNRSLCALEPSGCTSLPSKASTRAARLGEYLLQDLQSGQCLQLWDDDLGALWACPMDKYIHKRWALVWLACLLFAAALSLILLLKKDHAKGWLRLLKQDVRSGAAARGRAALLLYSADDSGFERLVGALASALCQLPLRVAVDLWSRRELSAQGPVAWFHAQRRQTLQEGGVVVLLFSPGAVALCSEWLQDGVSGPGAHGPHDAFRASLSCVLPDFLQGRAPGSYVGACFDRLLHPDAVPALFRTVPVFTLPSQLPDFLGALQQPRAPRSGRLQERAEQVSRALQPALDSYFHPPGTPAPGRGVGPGAGPGAGDGT

SEQ ID NO: 35086 - protein, 538 aa, Homo sapiens
MPVPWFLLSLALGRSPVVLSLERLVGPQDATHCSPGLSCRLWDSDILCLPGDIVPAPGPVLAPTHLQTELVLRCQKETDCDLCLRVAVHLAVHGHWEEPEDEEKFGGAADSGVEEPRNASLQAQVVLSFQAYPTARCVLLEVQVPAALVQFGQSVGSVVYDCFEAALGSEVRIWSYTQPRYEKELNHTQQLPALPWLNVSADGDNVHLVLNVSEEQHFGLSLYWNQVQGPPKPRWHKNLTGPQIITLNHTDLVPCLCIQVWPLEPDSVRTNICPFREDPRAHQNLWQAARLQLLTLQSWLLDAPCSLPAEAALCWRAPGGDPCQPLVPPLSWENVTVDKVLEFPLLKGHPNLCVQVNSSEKLQLQECLWADSLGPLKDDVLLLETRGPQDNRSLCALEPSGCTSLPSKASTRAARLGEYLLQDLQSGQCLQLWDDDLGALWACPMDKYIHKRWALVWLACLLFAAALSLILLLKKDHAKGWLRLLKQDVRSGGEWEQALGGGPPPGSQACASSPLPSPSVFSGSGRQGPRGSAPLLSR

SEQ ID NO: 35087 - protein, 707 aa, Homo sapiens
MPVPWFLLSLALGRSPVVLSLERLVGPQDATHCSPGLSCRLWDSDILCLPGDIVPAPGPVLAPTHLQTELVLRCQKETDCDLCLRVAVHLAVHGHWEEPEDEEKFGGAADSGVEEPRNASLQAQVVLSFQAYPTARCVLLEVQVPAALVQFGQSVGSVVYDCFEAALGSEVRIWSYTQPRYEKELNHTQQLPDCRGLEVWNSIPSCWALPWLNVSADGDNVHLVLNVSEEQHFGLSLYWNQVQGPPKPRWHKNLTGPQIITLNHTDLVPCLCIQVWPLEPDSVRTNICPFREDPRAHQNLWQAARLQLLTLQSWLLDAPCSLPAEAALCWRAPGGDPCQPLVPPLSWENVTVDKVLEFPLLKGHPNLCVQVNSSEKLQLQECLWADSLGPLKDDVLLLETRGPQDNRSLCALEPSGCTSLPSKASTRAARLGEYLLQDLQSGQCLQLWDDDLGALWACPMDKYIHKRWALVWLACLLFAAALSLILLLKKDHAKAAARGRAALLLYSADDSGFERLVGALASALCQLPLRVAVDLWSRRELSAQGPVAWFHAQRRQTLQEGGVVVLLFSPGAVALCSEWLQDGVSGPGAHGPHDAFRASLSCVLPDFLQGRAPGSYVGACFDRLLHPDAVPALFRTVPVFTLPSQLPDFLGALQQPRAPRSGRLQERAEQVSRALQPALDSYFHPPGTPAPGRGVGPGAGPGAGDGT

SEQ ID NO: 35088 - protein, 688 aa, Homo sapiens
MPVPWFLLSLALGRSPVVLSLERLVGPQDATHCSPGLSCRLWDSDILCLPGDIVPAPGPVLAPTHLQTELVLRCQKETDCDLCLRVAVHLAVHGHWEEPEDEEKFGGAADSGVEEPRNASLQAQVVLSFQAYPTARCVLLEVQVPAALVQFGQSVGSVVYDCFEAALGSEVRIWSYTQPRYEKELNHTQQLPALPWLNVSADGDNVHLVLNVSEEQHFGLSLYWNQVQGPPKPRWHKNLTGPQIITLNHTDLVPCLCIQVWPLEPDSVRTNICPFREDPRAHQNLWQAARLQLLTLQSWLLDAPCSLPAEAALCWRAPGGDPCQPLVPPLSWENVTVDVNSSEKLQLQECLWADSLGPLKDDVLLLETRGPQDNRSLCALEPSGCTSLPSKASTRAARLGEYLLQDLQSGQCLQLWDDDLGALWACPMDKYIHKRWALVWLACLLFAAALSLILLLKKDHAKGWLRLLKQDVRSGAAARGRAALLLYSADDSGFERLVGALASALCQLPLRVAVDLWSRRELSAQGPVAWFHAQRRQTLQEGGVVVLLFSPGAVALCSEWLQDGVSGPGAHGPHDAFRASLSCVLPDFLQGRAPGSYVGACFDRLLHPDAVPALFRTVPVFTLPSQLPDFLGALQQPRAPRSGRLQERAEQVSRALQPALDSYFHPPGTPAPGRGVGPGAGPGAGDGT

SEQ ID NO: 35089 - protein, 690 aa, Homo sapiens
MPVPWFLLSLALGRSPVVLSLERLVGPQDATHCSPGLSCRLWDSDILCLPGDIVPAPGPVLAPTHLQTELVLRCQKETDCDLCLRVAVHLAVHGHWEEPEDEEKFGGAADSGVEEPRNASLQAQVVLSFQAYPTARCVLLEVQVPAALVQFGQSVGSVVYDCFEAALGSEVRIWSYTQPRYEKELNHTQQLPDCRGLEVWNSIPSCWALPWLNVSADGDNVHLVLNVSEEQHFGLSLYWNQVQGPPKPRWHKNLTGPQIITLNHTDLVPCLCIQVWPLEPDSVRTNICPFREDPRAHQNLWQAARLQLLTLQSWLLDAPCSLPAEAALCWRAPGGDPCQPLVPPLSWENVTVDVNSSEKLQLQECLWADSLGPLKDDVLLLETRGPQDNRSLCALEPSGCTSLPSKASTRAARLGEYLLQDLQSGQCLQLWDDDLGALWACPMDKYIHKRWALVWLACLLFAAALSLILLLKKDHAKAAARGRAALLLYSADDSGFERLVGALASALCQLPLRVAVDLWSRRELSAQGPVAWFHAQRRQTLQEGGVVVLLFSPGAVALCSEWLQDGVSGPGAHGPHDAFRASLSCVLPDFLQGRAPGSYVGACFDRLLHPDAVPALFRTVPVFTLPSQLPDFLGALQQPRAPRSGRLQERAEQVSRALQPALDSYFHPPGTPAPGRGVGPGAGPGAGDGT

SEQ ID NO: 35090 - protein, 692 aa, Homo sapiens
MPVPWFLLSLALGRSPVVLSLERLVGPQDATHCSPGLSCRLWDSDILCLPGDIVPAPGPVLAPTHLQTELVLRCQKETDCDLCLRVAVHLAVHGHWEEPEDEEKFGGAADSGVEEPRNASLQAQVVLSFQAYPTARCVLLEVQVPAALVQFGQSVGSVVYDCFEAALGSEVRIWSYTQPRYEKELNHTQQLPALPWLNVSADGDNVHLVLNVSEEQHFGLSLYWNQVQGPPKPRWHKNLTGPQIITLNHTDLVPCLCIQVWPLEPDSVRTNICPFREDPRAHQNLWQAARLQLLTLQSWLLDAPCSLPAEAALCWRAPGGDPCQPLVPPLSWENVTVDKVLEFPLLKGHPNLCVQVNSSEKLQLQECLWADSLGPLKDDVLLLETRGPQDNRSLCALEPSGCTSLPSKASTRAARLGEYLLQDLQSGQCLQLWDDDLGALWACPMDKYIHKRWALVWLACLLFAAALSLILLLKKDHAKAAARGRAALLLYSADDSGFERLVGALASALCQLPLRVAVDLWSRRELSAQGPVAWFHAQRRQTLQEGGVVVLLFSPGAVALCSEWLQDGVSGPGAHGPHDAFRASLSCVLPDFLQGRAPGSYVGACFDRLLHPDAVPALFRTVPVFTLPSQLPDFLGALQQPRAPRSGRLQERAEQVSRALQPALDSYFHPPGTPAPGRGVGPGAGPGAGDGT

SEQ ID NO: 35091 - protein, 1332 aa, Homo sapiens
MESHSRAGKSRKSAKFRSISRSLMLCNAKTSDDGSSPDEKYPDPFEISLAQGKEGIFHSSVQLADTSEAGPSSVPDLALASEAAQLQAAGNDRGKTCRRIFFMKESSTASSREKPGKLEAQSSNFLFPKACHQRARSNSTSVNPYCTREIDFPMTKKSAAPTDRQPYSLCSNRKSLSQQLDCPAGKAAGTSRPTRSLSTAQLVQPSGGLQASVISNIVLMKGQAKGLGFSIVGGKDSIYGPIGIYVKTIFAGGAAAADGRLQEGDEILELNGESMAGLTHQDALQKFKQAKKGLLTLTVRTRLTAPPSLCSHLSPPLCRSLSSSTCITKDSSSFALESPSAPISTAKPNYRIMVEVSLQKEAGVGLGIGLCSVPYFQCISGIFVHTLSPGSVAHLDGRLRCGDEIVEISDSPVHCLTLNEVYTILSHCDPGPVPIIVSRHPDPQVSEQQLKEAVAQAVENTKFGKERHQWSLEGVKRLESSWHGRPTLEKEREKNSAPPHRRAQKVMIRSSSDSSYMSGSPGGSPGSGSAEKPSSDVDISTHSPSLPLAREPVVLSIASSRLPQESPPLPESRDSHPPLRLKKSFEILVRKPMSSKPKPPPRKYFKSDSDPQKSLEERENSSCSSGHTPPTCGQEARELLPLLLPQEDTAGRSPSASAGCPGPGIGPQTKSSTEGEPGWRRASPVTQTSPIKHPLLKRQARMDYSFDTTAEDPWVRISDCIKNLFSPIMSENHGHMPLQPNASLNEEEGTQGHPDGTPPKLDTANGTPKVYKSADSSTVKKGPPVAPKPAWFRQSLKGLRNRASDPRGLPDPALSTQPAPASREHLGSHIRASSSSSSIRQRISSFETFGSSQLPDKGAQRLSLQPSSGEAAKPLGKHEEGRFSGLLGRGAAPTLVPQQPEQVLSSGSPAASEARDPGVSESPPPGRQPNQKTLPPGPDPLLRLLSTQAEESQGPVLKMPSQRARSFPLTRSQSCETKLLDEKTSKLYSISSQVSSAVMKSLLCLPSSISCAQTPCIPKEGASPTSSSNEDSAANGSAETSALDTGFSLNLSELREYTEGLTEAKEDDDGDHSSLQSGQSVISLLSSEELKKLIEEVKVLDEATLKQLDGIHVTILHKEEGAGLGFSLAGGADLENKVITVHRVFPNGLASQEGTIQKGNEVLSINGKSLKGTTHHDALAILRQAREPRQAVIVTRKLTPEAMPDLNSSTDSAASASAASDVSVESTAEATVCTVTLEKMSAGLGFSLEGGKGSLHGDKPLTINRIFKGAASEQSETVQPGDEILQLGGTAMQGLTRFEAWNIIKALPDGPVTIVIRRKSLQSKETTAAGDS

SEQ ID NO: 35092 - protein, 1331 aa, Homo sapiens
MESHSRAGKSRKSAKFRSISRSLMLCNAKTSDDGSSPDEKYPDPFEISLAQGKEGIFHSSVQLADTSEAGPSSVPDLALASEAAQLQAAGNDRGKTCRRIFFMKESSTASSREKPGKLEAQSSNFLFPKACHQRARSNSTSVNPYCTREIDFPMTKKSAAPTDRQPYSLCSNRKSLSQQLDCPAGKAAGTSRPTRSLSTAQLVQPSGGLQASVISNIVLMKGQAKGLGFSIVGGKDSIYGPIGIYVKTIFAGGAAAADGRLQEGDEILELNGESMAGLTHQDALQKFKQAKKGLLTLTVRTRLTAPPSLCSHLSPPLCRSLSSSTCITKDSSSFALESPSAPISTAKPNYRIMVEVSLQKEAGVGLGIGLCSVPYFQCISGIFVHTLSPGSVAHLDGRLRCGDEIVEISDSPVHCLTLNEVYTILSHCDPGPVPIIVSRHPDPQVSEQQLKEAVAQAVENTKFGKERHQWSLEGVKRLESSWHGRPTLEKEREKNSAPPHRRAQKVMIRSSSDSSYMSGSPGGSPGSGSAEKPSSDVDISTHSPSLPLAREPVVLSIASSRLPQESPPLPESRDSHPPLRLKKSFEILVRKPMSSKPKPPPRKYFKSDSDPQKSLEERENSSCSSGHTPPTCGQEARELLPLLLPQEDTAGRSPSASAGCPGPGIGPQTKSSTEGEPGWRRASPVTQTSPIKHPLLKRQARMDYSFDTTAEDPWVRISDCIKNLFSPIMSENHGHMPLQPNASLNEEEGTQGHPDGTPPKLDTANGTPKVYKSADSSTVKKGPPVAPKPAWFRQSLKGLRNRASDPRGLPDPALSTQPAPASREHLGSHIRASSSSSSIRQRISSFETFGSSQLPDKGAQRLSLQPSSGEAAKPLGKHEEGRFSGLLGRGAAPTLVPQQPEQVLSSGSPAASEARDPGVSESPPPGRQPNQKTLPPGPDPLLRLLSTQAEESQGPVLKMPSQRARSFPLTRSQSCETKLLDEKTSKLYSISSQVSSAVMKSLLCLPSSISCAQTPCIPKEGASPTSSSNEDSAANGSAETSALDTGFSLNLSELREYTEGLTEAKEDDDGDHSSLQSGQSVISLLSSEELKKLIEEVKVLDEATLKQLDGIHVTILHKEEGAGLGFSLAGGADLENKVITVHRVFPNGLASQEGTIQKGNEVLSINGKSLKGTTHHDALAILRQAREPRQAVIVTRKLTPEAMPDLNSSTDSAASASAASDVSVESTEATVCTVTLEKMSAGLGFSLEGGKGSLHGDKPLTINRIFKGAASEQSETVQPGDEILQLGGTAMQGLTRFEAWNIIKALPDGPVTIVIRRKSLQSKETTAAGDS

SEQ ID NO: 35093 - protein, 631 aa, Homo sapiens
MDYSFDTTAEDPWVRISDCIKNLFSPIMSENHGHMPLQPNASLNEEEGTQGHPDGTPPKLDTANGTPKVYKSADSSTVKKGPPVAPKPAWFRQSLKGLRNRASDPRGLPDPALSTQPAPASREHLGSHIRASSSSSSIRQRISSFETFGSSQLPDKGAQRLSLQPSSGEAAKPLGKHEEGRFSGLLGRGAAPTLVPQQPEQVLSSGSPAASEARDPGVSESPPPGRQPNQKTLPPGPDPLLRLLSTQAEESQGPVLKMPSQRARSFPLTRSQSCETKLLDEKTSKLYSISSQVSSAVMKSLLCLPSSISCAQTPCIPKEGASPTSSSNEDSAANGSAETSALDTGFSLNLSELREYTEGLTEAKEDDDGDHSSLQSGQSVISLLSSEELKKLIEEVKVLDEATLKQLDGIHVTILHKEEGAGLGFSLAGGADLENKVITVHRVFPNGLASQEGTIQKGNEVLSINGKSLKGTTHHDALAILRQAREPRQAVIVTRKLTPEAMPDLNSSTDSAASASAASDVSVESTAEATVCTVTLEKMSAGLGFSLEGGKGSLHGDKPLTINRIFKGAASEQSETVQPGDEILQLGGTAMQGLTRFEAWNIIKALPDGPVTIVIRRKSLQSKETTAAGDS

SEQ ID NO: 35094 - protein, 560 aa, Homo sapiens
MDYSFDTTAEDPWVRISDCIKNLFSPIMSENHGHMPLQPNASLNEEEGTQGHPDGTPPKLDTANGTPKVYKSADSSTVKKGPPVAPKPAWFRQSLKGLRNRASDPRGLPDPALSTQPAPASREHLGSHIRASSSSSSIRQRISSFETFGSSQLPDKGAQRLSLQPSSGEAAKPLGKHEEGRFSGLLGRGAAPTLVPQQPEQVLSSGSPAASEARDPGVSESPPPGRQPNQKTLPPGPDPLLRLLSTQAEESQGPVLKMPSQRARSFPLTRSQSCETKLLDEKTSKLYSISSQVSSAVMKSLLCLPSSISCAQTPCIPKEGASPTSSSNEDSAANGSAETSALDTGFSLNLSELREYTEGLTEAKEDDDGDHSSLQSGQSVISLLSSEELKKLIEEVKVLDEATLKQLDGIHVTILHKEEGAGLGFSLAGGADLENKVITVHRVFPNGLASQEGTIQKGNEVLSINGKSLKGTTHHDALAILRQAREPRQAVIVTRKLTPEAMPDLNSSTDSAASASAASDVSVESTEATVCTVTLEDVGRAGLQPGRREGLPTRRQASHH

SEQ ID NO: 35095 - protein, 270 aa, Homo sapiens
MSSYFVNSFCGRYPNGPDYQLHNYGDHSSVSEQFRDSASMHSGRYGYGYNGMDLSVGRSGSGHFGSGERARSYAASASAAPAEPRYSQPATSTHSPQPDPLPCSAVAPSPGSDSHHGGKNSLSNSSGASADAGSTHISSREGVGTASGAEEDAPASSEQASAQSEPSPAPPAQPQIYPWMRKLHISHDNIGGPEGKRARTAYTRYQTLELEKEFHFNRYLTRRRRIEIAHALCLSERQIKIWFQNRRMKWKKDNKLKSMSMAAAGGAFRP

SEQ ID NO: 35096 - protein, 180 aa, Homo sapiens
MDWPHNLLFLLTISIFLGLGQPRSPKSKRKGQGRPGPLAPGPHQVPLDLVSRMKPYARMEEYERNIEEMVAQLRNSSELAQRKCEVNLQLWMSNKRSLSPWGYSINHDPSRIPVDLPEARCLCLGCVNPFTMQEDRSMVSVPVFSQVPVRRRLCPPPPRTGPCRQRAVMETIAVGCTCIF

SEQ ID NO: 35097 - protein, 233 aa, Homo sapiens
MSSYFVNPTFPGSLPSGQDSFLGQLPLYQAGYDALRPFPASYGASSLPDKTYTSPCFYQQSNSVLACNRASYEYGASCFYSDKDLSGASPSGSGKQRGPGDYLHFSPEQQYKPDSSSGQGKALHDEGADRKYTSPVYPWMQRMNSCAGAVYGSHGRRGRQTYTRYQTLELEKEFHFNRYLTRRRRIEIANALCLTERQIKIWFQNRRMKWKKENKLINSTQPSGEDSEAKAGE

SEQ ID NO: 35098 - protein, 398 aa, Homo sapiens
MLRLYVLVMGVSAFTLQPAAHTGAARSCRFRGRHYKREFRLEGEPVALRCPQVPYWLWASVSPRINLTWHKNDSARTVPGEEETRMWAQDGALWLLPALQEDSGTYVCTTRNASYCDKMSIELRVFENTDAFLPFISYPQILTLSTSGVLVCPDLSEFTRDKTDVKIQWYKDSLLLDKDNEKFLSVRGTTHLLVHDVALEDAGYYRCVLTFAHEGQQYNITRSIELRIKKKKEETIPVIISPLKTISASLGSRLTIPCKVFLGTGTPLTTMLWWTANDTHIESAYPGGRVTEGPRQEYSENNENYIEVPLIFDPVTREDLHMDFKCVVHNTLSFQTLRTTVKEASSTFSWGIVLAPLSLAFLVLGGIWMHRRCKHRTGKADGLTVLWPHHQDFQSYPK

SEQ ID NO: 35099 - protein, 296 aa, Homo sapiens
MLRLYVLVMGVSAFTLQPAAHTGAARSCRFRGRHYKREFRLEGEPVALRCPQVPYWLWASVSPRINLTWHKNDSARTVPGEEETRMWAQDGALWLLPALQEDSGTYVCTTRNASYCDKMSIELRVFENTDAFLPFISYPQILTLSTSGVLVCPDLSEFTRDKTDVKIQWYKDSLLLDKDNEKFLSVRGTTHLLVHDVALEDAGYYRCVLTFAHEGQQYNITRSIELRIKKKKEETIPVIISPLKTISASLGSRLTIPCKVFLGTGTPLTTMLWWTANDTHIESAYPGGRVTEGPRQ

SEQ ID NO: 35100 - protein, 825 aa, Homo sapiens
MGWLCSGLLFPVSCLVLLQVASSGNMKVLQEPTCVSDYMSISTCEWKMNGPTNCSTELRLLYQLVFLLSEAHTCIPENNGGAGCVCHLLMDDVVSADNYTLDLWAGQQLLWKGSFKPSEHVKPRAPGNLTVHTNVSDTLLLTWSNPYPPDNYLYNHLTYAVNIWSENDPADFRIYNVTYLEPSLRIAASTLKSGISYRARVRAWAQCYNTTWSEWSPSTKWHNSYREPFEQHLLLGVSVSCIVILAVCLLCYVSITKIKKEWWDQIPNPARSRLVAIIIQDAQGSQWEKRSRGQEPAKCPHWKNCLTKLLPCFLEHNMKRDEDPHKAAKEMPFQGSGKSAWCPVEISKTVLWPESISVVRCVELFEAPVECEEEEEVEEEKGSFCASPESSRDDFQEGREGIVARLTESLFLDLLGEENGGFCQQDMGESCLLPPSGSTSAHMPWDEFPSAGPKEAPPWGKEQPLHLEPSPPASPTQSPDNLTCTETPLVIAGNPAYRSFSNSLSQSPCPRELGPDPLLARHLEEVEPEMPCVPQLSEPTTVPQPEPETWEQILRRNVLQHGAAAAPVSAPTSGYQEFVHAVEQGGTQASAVVGLGPPGEAGYKAFSSLLASSAVSPEKCGFGASSGEEGYKPFQDLIPGCPGDPAPVPVPLFTFGLDREPPRSPQSSHLPSSSPEHLGLEPGEKVEDMPKPPLPQEQATDPLVDSLGSGIVYSALTCHLCGHLKQCHGQEDGGQTPVMASPCCGCCCGDRSSPPTTPLRAPDPSPGGVPLEASLCPASLAPSGISEKSKSSSSFHPAPGNAQSSSQTPKIVNFVSVGPTYMRVS

SEQ ID NO: 35101 - protein, 227 aa, Homo sapiens
MGWLCSGLLFPVSCLVLLQVASSGNMKVLQEPTCVSDYMSISTCEWKMNGPTNCSTELRLLYQLVFLLSEAHTCIPENNGGAGCVCHLLMDDVVSADNYTLDLWAGQQLLWKGSFKPSEHVKPRAPGNLTVHTNVSDTLLLTWSNPYPPDNYLYNHLTYAVNIWSENDPADFRIYNVTYLEPSLRIAASTLKSGISYRARVRAWAQCYNTTWSEWSPSTKWHNSNIC

SEQ ID NO: 35102 - protein, 810 aa, Homo sapiens
MQKDARREGNMKVLQEPTCVSDYMSISTCEWKMNGPTNCSTELRLLYQLVFLLSEAHTCIPENNGGAGCVCHLLMDDVVSADNYTLDLWAGQQLLWKGSFKPSEHVKPRAPGNLTVHTNVSDTLLLTWSNPYPPDNYLYNHLTYAVNIWSENDPADFRIYNVTYLEPSLRIAASTLKSGISYRARVRAWAQCYNTTWSEWSPSTKWHNSYREPFEQHLLLGVSVSCIVILAVCLLCYVSITKIKKEWWDQIPNPARSRLVAIIIQDAQGSQWEKRSRGQEPAKCPHWKNCLTKLLPCFLEHNMKRDEDPHKAAKEMPFQGSGKSAWCPVEISKTVLWPESISVVRCVELFEAPVECEEEEEVEEEKGSFCASPESSRDDFQEGREGIVARLTESLFLDLLGEENGGFCQQDMGESCLLPPSGSTSAHMPWDEFPSAGPKEAPPWGKEQPLHLEPSPPASPTQSPDNLTCTETPLVIAGNPAYRSFSNSLSQSPCPRELGPDPLLARHLEEVEPEMPCVPQLSEPTTVPQPEPETWEQILRRNVLQHGAAAAPVSAPTSGYQEFVHAVEQGGTQASAVVGLGPPGEAGYKAFSSLLASSAVSPEKCGFGASSGEEGYKPFQDLIPGCPGDPAPVPVPLFTFGLDREPPRSPQSSHLPSSSPEHLGLEPGEKVEDMPKPPLPQEQATDPLVDSLGSGIVYSALTCHLCGHLKQCHGQEDGGQTPVMASPCCGCCCGDRSSPPTTPLRAPDPSPGGVPLEASLCPASLAPSGISEKSKSSSSFHPAPGNAQSSSQTPKIVNFVSVGPTYMRVS

SEQ ID NO: 35103 - protein, 570 aa, Homo sapiens
MTLLWCVVSLYFYGILQSDASERCDDWGLDTMRQIQVFEDEPARIKCPLFEHFLKFNYSTAHSAGLTLIWYWTRQDRDLEEPINFRLPENRISKEKDVLWFRPTLLNDTGNYTCMLRNTTYCSKVAFPLEVVQKDSCFNSPMKLPVHKLYIEYGIQRITCPNVDGYFPSSVKPTITWYMGCYKIQNFNNVIPEGMNLSFLIALISNNGNYTCVVTYPENGRTFHLTRTLTVKVVGSPKNAVPPVIHSPNDHVVYEKEPGEELLIPCTVYFSFLMDSRNEVWWTIDGKKPDDITIDVTINESISHSRTEDETRTQILSIKKVTSEDLKRSYVCHARSAKGEVAKAAKVKQKVPAPRYTVELACGFGATVLLVVILIVVYHVYWLEMVLFYRAHFGTDETILDGKEYDIYVSYARNAEEEEFVLLTLRGVLENEFGYKLCIFDRDSLPGGIVTDETLSFIQKSRRLLVVLSPNYVLQGTQALLELKAGLENMASRGNINVILVQYKAVKETKVKELKRAKTVLTVIKWKGEKSKYPQGRFWKQLQVAMPVKKSPRRSSSDEQGLSYSSLKNV

SEQ ID NO: 35104 - protein, 356 aa, Homo sapiens
MTLLWCVVSLYFYGILQSDASERCDDWGLDTMRQIQVFEDEPARIKCPLFEHFLKFNYSTAHSAGLTLIWYWTRQDRDLEEPINFRLPENRISKEKDVLWFRPTLLNDTGNYTCMLRNTTYCSKVAFPLEVVQKDSCFNSPMKLPVHKLYIEYGIQRITCPNVDGYFPSSVKPTITWYMGCYKIQNFNNVIPEGMNLSFLIALISNNGNYTCVVTYPENGRTFHLTRTLTVKVVGSPKNAVPPVIHSPNDHVVYEKEPGEELLIPCTVYFSFLMDSRNEVWWTIDGKKPDDITIDVTINESISHSRTEDETRTQILSIKKVTSEDLKRSYVCHARSAKGEVAKAAKVKQKGNRCGQ

SEQ ID NO: 35105 - protein, 346 aa, Homo sapiens
MTLLWCVVSLYFYGILQSDASERCDDWGLDTMRQIQVFEDEPARIKCPLFEHFLKFNYSTAHSAGLTLIWYWTRQDRDLEEPINFRLPENRISKEKDVLWFRPTLLNDTGNYTCMLRNTTYCSKVAFPLEVVQKDSCFNSPMKLPVHKLYIEYGIQRITCPNVDGYFPSSVKPTITWYMGCYKIQNFNNVIPEGMNLSFLIALISNNGNYTCVVTYPENGRTFHLTRTLTVKVVGSPKNAVPPVIHSPNDHVVYEKEPGEELLIPCTVYFSFLMDSRNEVWWTIDGKKPDDITIDVTINESASSKIHSGTGLWFWSHSPASGDSHCCLPCLLARDGPILPGSFWNR

SEQ ID NO: 35106 - protein, 687 aa, Homo sapiens
MTLLWCVVSLYFYGILQSDASERCDDWGLDTMRQIQVFEDEPARIKCPLFEHFLKFNYSTAHSAGLTLIWYWTRQDRDLEEPINFRLPENRISKEKDVLWFRPTLLNDTGNYTCMLRNTTYCSKVAFPLEVVQKDSCFNSPMKLPVHKLYIEYGIQRITCPNVDGYFPSSVKPTITWYMGCYKIQNFNNVIPEGMNLSFLIALISNNGNYTCVVTYPENGRTFHLTRTLTVKVVGSPKNAVPPVIHSPNDHVVYEKEPGEELLIPCTVYFSFLMDSRNEVWWTIDGKKPDDITIDVTINESISHSRTEDETRTQILSIKKVTSEDLKRSYVCHARSAKGEVAKAAKVKQKVPAPRYTVELACGFGATVLLVVILIVVYHVYWLEMVLFYRAHFGTDETILDGKEYDIYVSYARNAEEEEFVLLTLRGVLENEFGYKLCIFDRDSLPGGNTVEAVFDFIQRSRRMIVVLSPDYVTEKSISMLEFKLGVMCQNSIATKLIVVEYRPLEHPHPGILQLKESVSFVSWKGEKSKHSGSKFWKALRLALPLRSLSASSGWNESCSSQSDISLDHVQRRRSRLKEPPELQSSERAAGSPPAPGTMSKHRGKSSATCRCCVTYCEGENHLRNKSRAEIHNQPQWETHLCKPVPQESETQWIQNGTRLEPPAPQISALALHHFTDLSNNNDFYIL

SEQ ID NO: 35107 - protein, 1076 aa, Homo sapiens
MAEFTSYKETASSRHLRFKLQSLSRRLDELEEATKNLQKAEDELLDLQDKVIQAEGSNSSMLAEIEVLRQRVLRIEGKDEEIKRAEDLCRLMKEKLEEEENLTRELKSEIERLQKRMAELEKLEEAFSRSKNDCTQLCLSLNEERNLTKKISSELEMLRVKVKELESSEDRLDKTEQSLASELEKLKSLTLSFVSERKYLNEKEKENEKLIKELTQKLEQNKKMNRDYTRNASNLERNDLRIEDGISSTLPSKESRRKGGLDYLKQVENETRNKSENEKNRNQEDNKVKDLNQEIEKLKTQIKHFESLEEELKKMKSKNNDLQDNYLSEQNKNKLLASQLEEIKLQIKKQKELENGEVEGEDAFLSSKGRHERTKFRGHGSEASVSKHTARELSPQHKRERLRNREFALNNENYSLSNRQVSSPSFTNRRAAKASHMGVSTDSGTQETKKTEDRFVPGSSQSEGKKSREQPSVLSRYPPAAQEHSKAWKGTSKPGTESGLKGKVEKTTRTFSDTTHGSVPSDPLGRADKASDTSSETVFGKRGHVLGNGSQVTQAANSGCSKAIGALASSRRSSSEGLSKGKKAANGLEADNSCPNSKAPVLSKYPYSCRSQENILQGFSTSHKEGVNQPAAVVMEDSSPHEALRCRVIKSSGREKPDSDDDLDIASLVTAKLVNTTITPEPEPKPQPNSREKAKTRGAPRTSLFENDKDAGMENESVKSVRASTNTMELPDTNGAGVKSQRPFSPREALRSRAIIKPVIVDKDVKKIMGGSGTETTLEKQKPVSKPGPNKVTSSITIYPSDSSSPRAAPGEALRERHTSTSNIQVGLAELTSVSNHVSSPFELSIHKHDITLQLAEAERMADGPLKDRPETVVSRSSIIIKPSDPVERNSHAPPAETIRWKSHSAPSEVGFSDARHVTVRNAWKSRRDLKSLEDPPTRIGKNVESTNSNAYTQRSSTDFSELEQPRSCLFEQGTRRVGPSSGDAPEPSSRRTQSSLTVSEVLTRRNRVGDTITVAAWNHSASMEEEGEDCTLSVYRQLHNSLDPSELPGKQGLPESGRVRAEERLRPTRPCAEEN

SEQ ID NO: 35108 - protein, 1026 aa, Homo sapiens
MAEFTSYKETASSRHLRFKLQSLSRRLDELEEATKNLQKAEDELLDLQDKVIQAEGSNSSMLAEIEVLRQRVLRIEGKDEEIKRAEDLCRLMKEKLEEEENLTRELKSEIERLQKRMAELEKLEEAFSRSKNDCTQLCLSLNEERNLTKKISSELEMLRVKVKELESSEDRLDKTEQSLASELEKLKSLTLSFVSERKYLNEKEKENEKLIKELTQKLEQNKKMNRDYTRNASNLERNDLRIEDGISSTLPSKESRRKGGLDYLKQVENETRNKSENEKNRNQEDNKVKDLNQEIEKLKTQIKHFESLEEELKKMKSKNNDLQDNYLSEQNKNKLLASQLEEIKLQIKKQKELENGEVEGEDAFLSSKGRHERTKFRGHGSEASVSKHTARELSPQHKRERLRNREFALNNENYSLSNRQVSSPSFTNRRAAKASHMGVSTDSGTQETKKTEDRFVPGSSQSEGKKSREQPSVLSRYPPAAQEHSKAWKGTSKPGTESGLKGKVEKTTRTFSDTTHGSVPSDPLGRADKASDTSSETVFGKRGHVLGNGSQVTQAANSGCSKAIGALASSRRSSSEGLSKGKKAANGLEADNSCPNSKAPVLSKYPYSCRSQENILQGFSTSHKEGVNQPAAVVMEDSSPHEALRCRVIKSSGREKPDSDDDLDIASLVTAKLVNTTITPEPEPKPQPNSREKAKTRGAPRTSLFENDKDAGMENESVKSVRASTNTMELPDTNGAGVKSQRPFSPREALRSRAIIKPVIVDKDVKKIMGGSGTETTLEKQKPVSKPGPNKVTSSITIYPSDSSSPRAAPGEALRERHTSTSNIQVGLAELTSVSNHVSSPFELSIHKHDITLQLAEAERMADGPLKDRPETVVSRSSIIIKPSDPVERNSHAPPAETIRWKSHSAPSEVGFSDARHVTVRNAWKSRRDLKSLEDPPTRIGKNVESTNSNAYTQRSSTDFSELEQPRSCLFEQGTRRVGPSSGDAPEPSSRRTQSSLTVSEVLTRRNRVGDTITVAAWNHSASMSS

SEQ ID NO: 35109 - protein, 1053 aa, Homo sapiens
MAEFTSYKETASSRHLRFKLQSLSRRLDELEEATKNLQKAEDELLDLQDKVIQAEGSNSSMLAEIEVLRQRVLRIEGKDEEIKRAEDLCRLMKEKLEEEENLTRELKSEIERLQKRMAELEKLEEAFSRSKNDCTQLCLSLNEERNLTKKISSELEMLRVKVKELESSEDRLDKTEQSLASELEKLKSLTLSFVSERKYLNEKEKENEKLIKELTQKLEQNKKMNRDYTRNASNLERNDLRIEDGISSTLPSKESRRKGGLDYLKQVENETRNKSENEKNRNQEDNKVKDLNQEIEKLKTQIKHFESLEEELKKMKSKNNDLQDNYLSEQNKNKLLASQLEEIKLQIKKQKELENGEVEGEDAFLSSKGRHERTKFRGHGSEASVSKHTARELSPQHKRERLRNREFALNNENYSLSNRQVSSPSFTNRRAAKASHMGVSTDSGTQETKKTEDRFVPGSSQSEGKKSREQPSVLSRYPPAAQEHSKAWKGTSKPGTESGLKGKVEKTTRTFSDTTHGSVPSDPLGRADKASDTSSETVFGKRGHVLGNGSQVTQAANSGCSKAIGALASSRRSSSEGLSKGKKAANGLEADNSCPNSKAPVLSKYPYSCRSQENILQGFSTSHKEGVNQPAAVVMEDSSPHEALRCRVIKSSGREKPDSDDDLDIASLVTAKLVNTTITPEPEPKPQPNSREKAKTRGAPRTSLFENDKDAGMENESVKSVRASTNTMELPDTNGAGVKSQRPFSPREALRSRAIIKPVIVDKDVKKIMGGSGTETTLEKQKPVSKPGPNKVTSSITIYPSDSSSPRAAPGEALRERHTSTSNIQVGLAELTSVSNHVSSPFELSIHKHDITLQLAEAERMADGPLKDRPETVVSRSSIIIKPSDPVERNSHAPPAETIRWKSHSAPSEVGFSDARHVTVRNAWKSRRDLKSLEDPPTRIGKNVESTNSNAYTQRSSTDFSELEQPRSCLFEQGTRRVGPSSGDAPEPSSRRTQSSLTVSEVLTRRNRVGDTITVAAWNHSASMVSSSLSPLSLFSLPFPSLPFPFSPLLWPV

SEQ ID NO: 35110 - protein, 134 aa, Homo sapiens
MRMLLHLSLLALGAAYVYAIPTEIPTSALVKETLALLSTHRTLLIANETLRIPVPVHKNHQLCTEEIFQGIGTLESQTVQGGTVERLFKNLSLIKKYIDGQKKKCGEERRRVNQFLDYLQEFLGVMNTEWIIES

SEQ ID NO: 35111 - protein, 334 aa, Homo sapiens
MSALLRLLRTGAPAAACLRLGTSAGTGSRRAMALYHTEERGQPCSQNYRLFFKNVTGHYISPFHDIPLKVNSKEENGIPMKKARNDEYENLFNMIVEIPRWTNAKMEIATKEPMNPIKQYVKDGKLRYVANIFPYKGYIWNYGTLPQTWEDPHEKDKSTNCFGDNDPIDVCEIGSKILSCGEVIHVKILGILALIDEGETDWKLIAINANDPEASKFHDIDDVKKFKPGYLEATLNWFRLYKVPDGKPENQFAFNGEFKNKAFALEVIKSTHQCWKALLMKKCNGGAINCTNVQISDSPFRCTQEEARSLVESVSSSPNKESNEEEQVWHFLGK

SEQ ID NO: 35112 - protein, 349 aa, Homo sapiens
MSALLRLLRTGAPAAACLRLGTSAGTGSRRAMALYHTEERGQPCSQNYRLFFKNVTGHYISPFHDIPLKVNSKEDTEAQGIFIDLSKIWENGIPMKKARNDEYENLFNMIVEIPRWTNAKMEIATKEPMNPIKQYVKDGKLRYVANIFPYKGYIWNYGTLPQTWEDPHEKDKSTNCFGDNDPIDVCEIGSKILSCGEVIHVKILGILALIDEGETDWKLIAINANDPEASKFHDIDDVKKFKPGYLEATLNWFRLYKVPDGKPENQFAFNGEFKNKAFALEVIKSTHQCWKALLMKKCNGGAINCTNVQISDSPFRCTQEEARSLVESVSSSPNKESNEEEQVWHFLGK

SEQ ID NO: 35113 - protein, 305 aa, Homo sapiens
MSALLRLLRTGAPAAACLRLGTSAGTGSRRAMALYHTEERGQPCSQNYRLFFKNVTGHYISPFHDIPLKVNSKEENGIPMKKARNDEYENLFNMIVEIPRWTNAKMEIATKEPMNPIKQYVKDGKLRYVANIFPYKGYIWNYGTLPQILSCGEVIHVKILGILALIDEGETDWKLIAINANDPEASKFHDIDDVKKFKPGYLEATLNWFRLYKVPDGKPENQFAFNGEFKNKAFALEVIKSTHQCWKALLMKKCNGGAINCTNVQISDSPFRCTQEEARSLVESVSSSPNKESNEEEQVWHFLGK

SEQ ID NO: 35114 - protein, 168 aa, Homo sapiens
MSALLRLLRTGAPAAACLRLGTSAGTGSRRAMALYHTEERGQPCSQNYRLFFNIDDVKKFKPGYLEATLNWFRLYKVPDGKPENQFAFNGEFKNKAFALEVIKSTHQCWKALLMKKCNGGAINCTNVQISDSPFRCTQEEARSLVESVSSSPNKESNEEEQVWHFLGK

SEQ ID NO: 35115 - protein, 232 aa, Homo sapiens
MSALLRLLRTGAPAAACLRLGTSAGTGSRRAMALYHTEERGQPCSQNYRLFFKNVTGHYISPFHDIPLKVNSKEILSCGEVIHVKILGILALIDEGETDWKLIAINANDPEASKFHDIDDVKKFKPGYLEATLNWFRLYKVPDGKPENQFAFNGEFKNKAFALEVIKSTHQCWKALLMKKCNGGAINCTNVQISDSPFRCTQEEARSLVESVSSSPNKESNEEEQVWHFLGK

SEQ ID NO: 35116 - protein, 1182 aa, Homo sapiens
MESLLENPVRAVLYLKELTAIVQNQQSLIHTQRERIDELERRLDELSAENRSLWEHQQLLQAQPPPGLVPPSSAPLPAAPATAPAAAARAQEPLQDQGQRSAAAPHPAPDRPPRQHHGQLLEQPQRGPGSRAHTPQSPHKHLGTQGAVTDKEKERPPSCCAAAGALLQHKSPSALGKGVLSRRPENETVLHQFCCPAADACSDLASQSDGSCTQAGGGMEDSVVAAAAVAAGRPSAHAPKAQAQELQEEEERPGAGAASPRAGPQHKASPGRQQPALATALCPHAPAASDYELSLDLKNKQIEMLEHKYGGHLVSRRAACTIQTAFRQYQLSKNFEKIRNSLLESRLPRRISLRKVRSPTAESLAAEKALMEGYGLVGLPLVRSPSLPPTFAGTLTELEDSFTEQVQSLAKSIDDALSTWSLKTMCSLRESGAYQLHQALQAAAGPPGLEAEGRAPESAGPGPGDDAAETPGLPPAHSGTLMMAFRDVTVQIANQNISVSSSTALSVANCLGAQTVQAPAEPAAGKAEQGETSGREAPEAPAVGREDASAEDSCAEAAASGAADGATAPKTEEEEEEEETAEVGRGAEAEAGDLEQLSSSSTSTKSAKSGSEASASASKDALQAMILSLPRYHCENPASCKSPTLSTDTLRKRLYRIGLNLFNINPDKGIQFLISRGFIPDTPIGVAHFLLQRKGLSRQMIGEFLGNSKKQFNRDVLDCVVDEMDFSSMELDEALRKFQAHIRVQGEAQKVERLIEAFSQRYCMCNPEVVQQFHNPDTIFILAFAIILLNTDMYSPNIKPDRKMMLEDFIRNLRGVDDGADIPRELVVGIYERIQQKELKSNEDHVTYVTKVEKSIVGMKTVLSVPHRRLVCCSRLFEVTDVNKLQKQAAHQREVFLFNDLLVILKLCPKKKSSSTYTFCKSVGLLGMQFQLFENEYYSHGITLVTPLSGSEKKQVLHFCALGSDEMQKFVEDLKESIAEVTELEQIRIEWELEKQQGTKTLSFKPCGAQGDPQSKQGSPTAKREAALRERPAESTVEVSIHNRLQTSQHNSGLGAERGAPVPPPDLQPSPPRQQTPPLPPPPPTPPGTLVQCQQIVKVIVLDKPCLARMEPLLSQALSCYTSSSSDSCGSTPLGGPGSPVKVTHQPPLPPPPPPYNHPHQFCPPGSLLHGHRYSSGSRSLV

SEQ ID NO: 35117 - protein, 759 aa, Homo sapiens
MLEHKYGGHLVSRRAACTIQTAFRQYQLSKNFEKIRNSLLESRLPRRISLRKVRSPTAESLAAEKALMEGYGLVGLPLVRSPSLPPTFAGTLTELEDSFTEQVQSLAKSIDDALSTWSLKTMCSLRESGAYQLHQALQAAAGPPGLEAEGRAPESAGPGPGDDAAETPGLPPAHSGTLMMAFRDVTVQIANQNISVSSSTALSVANCLGAQTVQAPAEPAAGKAEQGETSGREAPEAPAVGREDASAEDSCAEAAASGAADGATAPKTEEEEEEEETAEVGRGAEAEAGDLEQLSSSSTSTKSAKSGSEASASASKDALQAMILSLPRYHCENPASCKSPTLSTDTLRKRLYRIGLNLFNINPDKGIQFLISRGFIPDTPIGVAHFLLQRKGLSRQMIGEFLGNSKKQFNRDVLDCVVDEMDFSSMELDEALRKFQAHIRVQGEAQKVERLIEAFSQRYCMCNPEVVQQFHNPDTIFILAFAIILLNTDMYSPNIKPDRKMMLEDFIRNLRGVDDGADIPRELVVGIYERIQQKELKSNEDHVTYVTKVEKSIVGMKTVLSVPHRRLVCCSRLFEVTDVNKLQKQAAHQREVFLFNDLLVILKLCPKKKSSSTYTFCKSVGLLGMQFQLFENEYYSHGITLVTPLSGSEKKQVLHFCALGSDEMQKFVEDLKESIAEVTELEQIRIEWELEKQQGTKTLSFKPCGAQGDPQSKQGSPTAKREAALRERPAESTVEVLINASPARLTILPISRDTIKSYC

SEQ ID NO: 35118 - protein, 1488 aa, Homo sapiens
MEAGSGPPGGPGSESPNRAVEYLLELNNIIESQQQLLETQRRRIEELEGQLDQLTQENRDLREESQLHRGELHRDPHGARDSPGRESQYQNLRETQFHHRELRESQFHQAARDVGYPNREGAYQNREAVYRDKERDASYPLQDTTGYTARERDVAQCHLHHENPALGRERGGREAGPAHPGREKEAGYSAAVGVGPRPPRERGQLSRGASRSSSPGAGGGHSTSTSTSPATTLQRKSDGENSRTVSVEGDAPGSDLSTAVDSPGSQPPYRLSQLPPSSSHMGGPPAGVGLPWAQRARLQPASVALRKQEEEEIKRSKALSDSYELSTDLQDKKVEMLERKYGGSFLSRRAARTIQTAFRQYRMNKNFERLRSSASESRMSRRIILSNMRMQFSFEEYEKAQNPAYFEGKPASLDEGAMAGARSHRLERGLPYGGSCGGGIDGGGSSVTTSGEFSNDITELEDSFSKQVKSLAESIDEALNCHPSGPMSEEPGSAQLEKRESKEQQEDSSATSFSDLPLYLDDTVPQQSPERLPSTEPPPQGRPEFWAPAPLPPVPPPVPSGTREDGSREEGTRRGPGCLECRDFRLRAAHLPLLTIEPPSDSSVDLSDRSDRGSVHRQLVYEADGCSPHGTLKHKGPPGRAPIPHRHYPAPEGPAPAPPGPLPPAPNSGTGPSGVAGGRRLGKCEAAGENSDGGDNESLESSSNSNETINCSSGSSSRDSLREPPATGLCKQTYQRETRHSWDSPAFNNDVVQRRHYRIGLNLFNKKPEKGIQYLIERGFLSDTPVGVAHFILERKGLSRQMIGEFLGNRQKQFNRDVLDCVVDEMDFSSMDLDDALRKFQSHIRVQGEAQKVERLIEAFSQRYCVCNPALVRQFRNPDTIFILAFAIILLNTDMYSPSVKAERKMKLDDFIKNLRGVDNGEDIPRDLLVGIYQRIQGRELRTNDDHVSQVQAVERMIVGKKPVLSLPHRRLVCCCQLYEVPDPNRPQRLGLHQREVFLFNDLLVVTKIFQKKKILVTYSFRQSFPLVEMHMQLFQNSYYQFGIKLLSAVPGGERKVLIIFNAPSLQDRLRFTSDLRESIAEVQEMEKYRVESELEKQKGMMRPNASQPGGAKDSVNGTMARSSLEDTYGAGDGLKRGALSSSLRDLSDAGKRGRRNSVGSLDSTIEGSVISSPRPHQRMPPPPPPPPPEEYKSQRPVSNSSSFLGSLFGSKRGKGPFQMPPPPTGQASASSSSASSTHHHHHHHHHGHSHGGLGVLPDGQSKLQALHAQYCQGPGPAPPPYLPPQQPSLPPPPQQPPPLPQLGSIPPPPASAPPVGPHRHFHAHGPVPGPQHYTLGRPGRAPRRGAGGHPQFAPHGRHPLHQPTSPLPLYSPAPQHPPAHKQGPKHFIFSHHPQMMPAAGAAGGPGSRPPGGSYSHPHHPQSPLSPHSPIPPHPSYPPLPPPSPHTPHSPLPPTSPHGPLHASGPPGTANPPSANPKAKPSRISTVV

SEQ ID NO: 35119 - protein, 949 aa, Homo sapiens
MEPPGRSSRSTASHTLHQYCCPTQVLDSMKLTPSGRLAESSVEGDAPGSDLSTAVDSPGSQPPYRLSQLPPSSSHMGGPPAGVGLPWAQRARLQPASVALRKQEEEEIKRSKALSDSYELSTDLQDKKVEMLERKYGGSFLSRRAARTIQTAFRQYRMNKNFERLRSSASESRMSRRIILSNMRMQFSFEEYEKAQNPAYFEGKPASLDEGAMAGARSHRLERGLPYGGSCGGGIDGGGSSVTTSGEFSNDITELEDSFSKQVKSLAESIDEALNCHPSGPMSEEPGSAQLEKRESKEQQEDSSATSFSDLPLYLDDTVPQQSPERLPSTEPPPQGRPEFWAPAPLPPVPPPVPSGTREDGSREEGTRRGPGCLECRDFRLRAAHLPLLTIEPPSDSSVDLSDRSDRGSVHRQLVYEADGCSPHGTLKHKGPPGRAPIPHRHYPAPEGPAPAPPGPLPPAPNSGTGPSGVAGGRRLGKCEAAGENSDGGDNESLESSSNSNETINCSSGSSSRDSLREPPATGLCKQTYQRETRHSWDSPAFNNDVVQRRHYRIGLNLFNKKPEKGIQYLIERGFLSDTPVGVAHFILERKGLSRQMIGEFLGNRQKQFNRDVLDCVVDEMDFSSMDLDDALRKFQSHIRVQGEAQKVERLIEAFSQRYCVCNPALVRQFRNPDTIFILAFAIILLNTDMYSPSVKAERKMKLDDFIKNLRGVDNGEDIPRDLLVGIYQRIQGRELRTNDDHVSQVQAVERMIVGKKPVLSLPHRRLVCCCQLYEVPDPNRPQRLGLHQREVFLFNDLLVVTKIFQKKKILVTYSFRQSFPLVEMHMQLFQNSYYQFGIKLLSAVPGGERKVLIIFNAPSLQDRLRFTSDLRESIAEVQEMEKYRVESELEKQKGMMRPNASQPGGAKDSVNGTMARSSLEDTYGAGDGLKRGALSSSLRDLSDAGVCY

SEQ ID NO: 35120 - protein, 73 aa, Homo sapiens
MEPPGRSSRSTASHTLHQYCCPTQVLDSMKLTPSGRLAESREEEEEEETEEEEEEDAHQFCCPASECSSPSSR

SEQ ID NO: 35121 - protein, 1631 aa, Homo sapiens
MERRAAGPGWAAYERLTAEEMDEQRRQNVAYQYLCRLEEAKRWMEACLKEELPSPVELEESLRNGVLLAKLGHCFAPSVVPLKKIYDVEQLRYQATGLHFRHTDNINFWLSAIAHIGLPSTFFPETTDIYDKKNMPRVVYCIHALSLFLFRLGLAPQIHDLYGKVKFTAEELSNMASELAKYGLQLPAFSKIGGILANELSVDEAAVHAAVLAINEAVERGVVEDTLAALQNPSALLENLREPLAAVYQEMLAQAKMEKAANARNHDDRESQDIYDHYLTQAEIQGNINHVNVHGALEVVDDALERQSPEALLKALQDPALALRGVRRDFADWYLEQLNSDREQKAQELGLVELLEKEEVQAGVAAANTKGDQEQAMLHAVQRINKAIRRRVAADTVKELMCPEAQLPPVYPVASSMYQLELAVLQQQQGELGQEELFVAVEMLSAVVLINRALEARDASGFWSSLVNPATGLAEVEGENAQRYFDALLKLRQERGMGEDFLSWNDLQATVSQVNAQTQEETDRVLAVSLINEALDKGSPEKTLSALLLPAAGLDDVSLPVAPRYHLLLVAAKRQKAQVTGDPGAVLWLEEIRQGVVRANQDTNTAQRMALGVAAINQAIKEGKAAQTERVLRNPAVALRGVVPDCANGYQRALESAMAKKQRPADTAFWVQHDMKDGTAYYFHLQTFQGIWEQPPGCPLNTSHLTREEIQSAVTKVTAAYDRQQLWKANVGFVIQLQARLRGFLVRQKFAEHSHFLRTWLPAVIKIQAHWRGYRQRKIYLEWLQYFKANLDAIIKIQAWARMWAARRQYLRRLHYFQKNVNSIVKIQAFFRARKAQDDYRILVHAPHPPLSVVRRFAHLLNQSQQDFLAEAELLKLQEEVVRKIRSNQQLEQDLNIMDIKIGLLVKNRITLQEVVSHCKKLTKRNKEQLSDMMVLDKQKGLKSLSKEKRQKLEAYQHLFYLLQTQPIYLAKLIFQMPQNKTTKFMEAVIFSLYNYASSRREAYLLLQLFKTALQEEIKSKVEQPQDVVTGNPTVVRLVVRFYRNGRGQSALQEILGKVIQDVLEDKVLSVHTDPVHLYKNWINQTEAQTGQRSHLPYDVTPEQALSHPEVQRRLDIALRNLLAMTDKFLLAITSSVDQIPYGMRYVAKVLKATLAEKFPDATDSEVYKVVGNLLYYRFLNPAVVAPDAFDIVAMAAGGALAAPQRHALGAVAQLLQHAAAGKAFSGQSQHLRVLNDYLEETHLKFRKFIHRACQVPEPEERFAVDEYSDMVAVAKPMVYITVGELVNTHRLLLEHQDCIAPDHQDPLHELLEDLGELPTIPDLIGESIAADGHTDLSKLEVSLTLTNKFEGLEADADDSNTRSLLLSTKQLLADIIQFHPGDTLKEILSLSASREQEAAHKQLMSRRQACTAQTPEPLRRHRSLTAHSLLPLAEKQRRVLRNLRRLEALGLVSARNGYQGLVDELAKDIRNQHRHRHRRKAELVKLQATLQGLSTKTTFYEEQGDYYSQYIRACLDHLAPDSKSSGKGKKQPSLHYTAAQLLEKGVLVEIEDLPASHFRNVIFDITPGDEAGKFEVNAKFLGVDMERFQLHYQDLLQLQYEGVAVMKLFNKAKVNVNLLIFLLNKKFLRK

SEQ ID NO: 35122 - protein, 240 aa, Homo sapiens
MATAMYLEHYLDSIENLPCELQRNFQLMRELDQRTEDKKAEIDILAAEYISTVKTLSPDQRVERLQKIQNAYSKCKEYSDDKVQLAMQTYEMVDKHIRRLDADLARFEADLKDKMEGSDFESSGGRGLKKGRGQKEKRGSRGRGRRTSEEDTPKKKKHKGGSEFTDTILSVHPSDVLDMPVDPNEPTYCLCHQVSYGEMIGCDNPDCPIEWFHFACVDLTTKPKGKWFCPRCVQEKRKKK

SEQ ID NO: 35123 - protein, 226 aa, Homo sapiens
MATAMYLEHYLDSIENLPCELQRNFQLMRELDQRTEDKKAEIDILAAEYISTVKTLSPDQRVERLQKIQNAYSKCKEYSDDKVQLAMQTYEMVDKHIRRLDADLARFEADLKDKMEGSDFESSGGRGLKKGRGQKEKRGSRGRGRRTSEEDTPKKKKHKGGSEFTDTILSVHPSDVLDMPVDPNEPTYCLCHQVSYGEMIGCDNPDCPIEWFHFACVDLTTKPKGK

SEQ ID NO: 35124 - protein, 146 aa, Homo sapiens
MLAGAGRPGLPQGRHLCWLLCAFTLKLCQAEAPVQEEKLSASTSNLPCWLVEEFVVAEECSPCSNFRAKTTPECGPTGYVEKITCSSSKRNEFKSCRSALMEQRLFWKFEGAVVCVALIFACLVIIRQRQLDRKALEKVRKQIESI

SEQ ID NO: 35125 - protein, 117 aa, Homo sapiens
MAWGWHLSFLSASTSNLPCWLVEEFVVAEECSPCSNFRAKTTPECGPTGYVEKITCSSSKRNEFKSCRSALMEQRLFWKFEGAVVCVALIFACLVIIRQRQLDRKALEKVRKQIESI

SEQ ID NO: 35126 - protein, 710 aa, Homo sapiens
MSAQGDCEFLVQRARELVPQDLWAAKAWLITARSLYPADFNIQYEMYTIERNAERTATAGRLLYDMFVNFPDQPVVWREISIITSALRNDSQDKQTQFLRSLFETLPGRVQCEMLLKVTEQCFNTLERSEMLLLLLRRFPETVVQHGVGLGEALLEAETIEEQESPVNCFRKLFVCDVLPLIINNHDVRLPANLLYKYLNKAAEFYINYVTRSTQIENQHQGAQDTSDLMSPSKRSSQKYIIEGLTEKSSQIVDPWERLFKILNVVGMRCEWQMDKGRRSYGDILHRMKDLCRYMNNFDSEAHAKYKNQVVYSTMLVFFKNAFQYVNSIQPSLFQGPNAPSQVPLVLLEDVSNVYGDVEIDRNKHIHKKRKLAEGREKTMSSDDEDCSAKGRNRHIVVNKAELANSTEVLESFKLARESWELLYSLEFLDKEFTRICLAWKTDTWLWLRIFLTDMIIYQGQYKKAIASLHHLAALQGSISQPQITGQGTLEHQRALIQLATCHFALGEYRMTCEKVLDLMCYMVLPIQDGGKSQEEPSKVKPKFRKGSDLKLLPCTSKAIMPYCLHLMLACFKLRAFTDNRDDMALGHVIVLLQQEWPRGENLFLKAVNKICQQGNFQYENFFNYVTNIDMLEEFAYLRTQEGGKIHLELLPNQGMLIKHHTVTRGITKGVKEDFRLAMERQVSRCGENLMVVLHRFCINEKILLLQTLT

SEQ ID NO: 35127 - protein, 410 aa, Homo sapiens
MVVQNSADAGDMRAGVQLEPFLHQVGGHMSVMKYDEHTVCKPLVSREQRFYESLPLAMKRFTPQYKGTVTVHLWKDSTGHLSLVANPVKESQEPFKVSTESAAVAIWQTLQQTTGSNGSDCTLAQWPHAQLARSPKESPAKALLRSEPHLNTPAFSLVEDTNGNQVERKSFNPWGLQCHQAHLTRLCSEYPENKRHRFLLLENVVSQYTHPCVLDLKMGTRQHGDDASEEKKARHMRKCAQSTSACLGVRICGMQVYQTDKKYFLCKDKYYGRKLSVEGFRQALYQFLHNGSHLRRELLEPILHQLRALLSVIRSQSSYRFYSSSLLVIYDGQEPPERAPGSPHPHEAPQAAHGSSPGGLTKVDIRMIDFAHTTYKGYWNEHTTYDGPDPGYIFGLENLIRILQDIQEGE

SEQ ID NO: 35128 - protein, 205 aa, Homo sapiens
MAASTASHRPIKGILKNKTSTTSSMVASAEQPRRSVDEELSKKSQKWDEINILATYHPADKGYGLMKIDEPSPPYHSMMGDDEDACRDTETTEAMAPDILAKKLAAAEGLEPKYRIQEQESSGEEDSDLSPEEREKKRQFEMRRKLHYNEGLNIKLARQLISKDLHDDDEDEEMLETADGESMNTEESNQGSTPSDQQQNKLRSS

SEQ ID NO: 35129 - protein, 2671 aa, Homo sapiens
MSEMSSFLHIGDIVSLYAEGSVNGFISTLGLVDDRCVVEPAAGDLDNPPKKFRDCLFKVCPMNRYSAQKQYWKAKQTKQDKEKIADVVLLQKLQHAAQMEQKQNDTENKKVHGDVVKYGSVIQLLHMKSNKYLTVNKRLPALLEKNAMRVTLDATGNEGSWLFIQPFWKLRSNGDNVVVGDKVILNPVNAGQPLHASNYELSDNAGCKEVNSVNCNTSWKINLFMQFRDHLEEVLKGGDVVRLFHAEQEKFLTCDEYKGKLQVFLRTTLRQSATSATSSNALWEVEVVHHDPCRGGAGHWNGLYRFKHLATGNYLAAEENPSYKGDASDPKAAGMGAQGRTGRRNAGEKIKYCLVAVPHGNDIASLFELDPTTLQKTDSFVPRNSYVRLRHLCTNTWIQSTNVPIDIEEERPIRLMLGTCPTKEDKEAFAIVSVPVSEIRDLDFANDASSMLASAVEKLNEGFISQNDRRFVIQLLEDLVFFVSDVPNNGQNVLDIMVTKPNRERQKLMREQNILKQVFGILKAPFREKGGEGPLVRLEELSDQKNAPYQHMFRLCYRVLRHSQEDYRKNQEHIAKQFGMMQSQIGYDILAEDTITALLHNNRKLLEKHITKTEVETFVSLVRKNREPRFLDYLSDLCVSNHIAIPVTQELICKCVLDPKNSDILIRTELRPVKEMAQSHEYLSIEYSEEEVWLTWTDKNNEHHEKSVRQLAQEARAGNAHDENVLSYYRYQLKLFARMCLDRQYLAIDEISQQLGVDLIFLCMADEMLPFDLRASFCHLMLHVHVDRDPQELVTPVKFARLWTEIPTAITIKDYDSNLNASRDDKKNKFANTMEFVEDYLNNVVSEAVPFANEEKNKLTFEVVSLAHNLIYFGFYSFSELLRLTRTLLGIIDCVQGPPAMLQAYEDPGGKNVRRSIQGVGHMMSTMVLSRKQSVFSAPSLSAGASAAEPLDRSKFEENEDIVVMETKLKILEILQFILNVRLDYRISYLLSVFKKEFVEVFPMQDSGADGTAPAFDSTTANMNLDRIGEQAEAMFGVGKTSSMLEVDDEGGRMFLRVLIHLTMHDYAPLVSGALQLLFKHFSQRQEAMHTFKQVQLLISAQDVENYKVIKSELDRLRTMVEKSELWVDKKGSGKGEEVEAGAAKDKKERPTDEEGFLHPPGEKSSENYQIVKGILERLNKMCGVGEQMRKKQQRLLKNMDAHKVMLDLLQIPYDKGDAKMMEILRYTHQFLQKFCAGNPGNQALLHKHLHLFLTPGLLEAETMQHIFLNNYQLCSEISEPVLQHFVHLLATHGRHVQYLDFLHTVIKAEGKYVKKCQDMIMTELTNAGDDVVVFYNDKASLAHLLDMMKAARDGVEDHSPLMYHISLVDLLAACAEGKNVYTEIKCTSLLPLEDVVSVVTHEDCITEVKMAYVNFVNHCYVDTEVEMKEIYTSNHIWTLFENFTLDMARVCSKREKRVADPTLEKYVLSVVLDTINAFFSSPFSENSTSLQTHQTIVVQLLQSTTRLLECPWLQQQHKGSVEACIRTLAMVAKGRAILLPMDLDAHISSMLSSGASCAAAAQRNASSYKATTRAFPRVTPTANQWDYKNIIEKLQDIITALEERLKPLVQAELSVLVDVLHWPELLFLEGSEAYQRCESGGFLSKLIQHTKDLMESEEKLCIKVLRTLQQMLLKKTKYGDRGNQLRKMLLQNYLQNRKSTSRGDLPDPIGTGLDPDWSAIAATQCRLDKEGATKLVCDLITSTKNEKIFQESIGLAIHLLDGGNTEIQKSFHNLMMSDKKSERFFKVLHDRMKRAQQETKSTVAVNMNDLGSQPHEDREPVDPTTKGRVASFSIPGSSSRYSLGPSLRRGHEVSERVQSSEMGTSVLIMQPILRFLQLLCENHNRDLQNFLRCQNNKTNYNLVCETLQFLDIMCGSTTGGLGLLGLYINEDNVGLVIQTLETLTEYCQGPCHENQTCIVTHESNGIDIITALILNDISPLCKYRMDLVLQLKDNASKLLLALMESRHDSENAERILISLRPQELVDVIKKAYLQEEERENSEVSPREVGHNIYILALQLSRHNKQLQHLLKPVKRIQEEEAEGISSMLSLNNKQLSQMLKSSAPAQEEEEDPLAYYENHTSQIEIVRQDRSMEQIVFPVPGICQFLTEETKHRLFTTTEQDEQGSKVSDFFDQSSFLHNEMEWQRKLRSMPLIYWFSRRMTLWGSISFNLAVFINIIIAFFYPYMEGASTGVLDSPLISLLFWILICFSIAALFTKRYSIRPLIVALILRSIYYLGIGPTLNILGALNLTNKIVFVVSFVGNRGTFIRGYKAMVMDMEFLYHVGYILTSVLGLFAHELFYSILLFDLIYREETLFNVIKSVTRNGRSILLTALLALILVYLFSIVGFLFLKDDFILEVDRLPNNHSTASPLGMPHGAAAFVDTCSGDKMDCVSGLSVPEVLEEDRELDSTERACDTLLMCIVTVMNHGLRNGGGVGDILRKPSKDESLFPARVVYDLLFFFIVIIIVLNLIFGVIIDTFADLRSEKQKKEEILKTTCFICGLERDKFDNKTVSFEEHIKLEHNMWNYLYFIVLVRVKNKTDYTGPESYVAQMIKNKNLDWFPRMRAMSLVSNEGEGEQNEIRILQDKLNSTMKLVSHLTAQLNELKEQMTEQRKRRQRLGFVDVQNCISR

SEQ ID NO: 35130 - protein, 716 aa, Homo sapiens
MEDCLHTSSENLSKLVSWAHSHGTICSLIPNLKHLLSEGSHGNLTAMWGCSAGHAYHWPLTATCRAGSQERVCFQDNRSFNSDSPSIIGVPSETQTSPVERYPGRPVKAKLDCNRTRDSCDFSYCSEPSELDETVEEYEDENTLFDMVCESSVTDEDSDFEPQTQRPQSIARKRPGVVPSSLHSSSQTQMVDECSNDVIIKKIKQEIPEDYYIVANAELTGGVDGPALSLTQMAKPKPQTHAGPSCVGSAKLIPHVTSAISTELDPHGMSASPSVISRPIVQKTARVSLASPNRGPPGTHGTNQQVAMQMPVSTSHPNKQISIPLSALQLPGQDEQVASEEFLSHLPSQVSSCEVALSPSVNTEPEVSSSQQQPPVAPAITTEATAQCIPAYSTKLNKFPVFNINDDLNDLCTSAVSPNTTKATRYALNVWRYWCMTNGLKDHTDITKIPAVKLNELLENFYVTVKKSDGSDFLATSLHAIRRGLDRILKNAGVGFSITSSTFSSSTKKLKEKLWVLSKAGMSGARSRNIVYFSLSDEEEMWQAGCLGDDSPITLLSTVVKYNSQYLNMRTLQEHADLMYGDIELLKDPQNQPYFARTDSVKRESRSGSTRVCHGKIYHEHSRGHKQCPYCLLYKYMYIHRPPTQMEAKSPFYLTARKEATDMGSVWYEEQRMGLRSLRGIVPNLAKKVKLENCENFTFVSFTQVSRRLGSHSCCQ

SEQ ID NO: 35131 - protein, 738 aa, Homo sapiens
MEDCLHTSSENLSKLVSWAHSHGTICSLIPNLKHLLSEGSHGNLTAMWGCSAGHAYHWPLTATCRAGSQERVCFQDNRSFNSDSPSIIGVPSETQTSPVERYPGRPVKAKLDCNRTRDSCDFSYCSEPSELDETVEEYEDENTLFDMVCESSVTDEDSDFEPQTQRPQSIARKRPGVVPSSLHSSSQTQMVDECSNDVIIKKIKQEIPEDYYIVANAELTGGVDGPALSLTQMAKPKPQTHAGPSCVGSAKLIPHVTSAISTELDPHGMSASPSVISRPIVQKTARVSLASPNRGPPGTHGTNQQVAMQMPVSTSHPNKQISIPLSALQLPGQDEQVASEEFLSHLPSQVSSCEVALSPSVNTEPEVSSSQQQPPVAPAITTEATAQCIPDQDERAAELSREQNEKTIRSTQTALRNFREFLISKYPSETREIYVIPCKELDAYLASFFVDARQKDGSEYEPNSLANYQCGLERYLKEHRYGYSITRDKEFKRSQEALKQKQIELRCKGKGNKPHKSMKLTFADELILRKRGLLSRYNPEGLLNLVWLNNTKAFGHCTGFHGSTLKWGDIRLRVTETGLEYLEWMGQDTGDLNAKTKRGGTDSRVYATQHAPQTCPVQDYKEYAQRRPPAMRYEDAPFYLSIKPVVNLAALHWYNCQALGKNKLAKMVKTMCEKGNIPGRKTNFSVYQSCSTLSEAQSNQLVLICNNLSQQAAQSVAGHSNNGNFIVSASYDSSSDTA

SEQ ID NO: 35132 - protein, 744 aa, Homo sapiens
MEDCLHTSSENLSKLVSWAHSHGTICSLIPNLKHLLSEGSHGNLTAMWGCSAGHAYHWPLTATCRAGSQERVCFQDNRSFNSDSPSIIGVPSETQTSPVERYPGRPVKAKLDCNRTRDSCDFSYCSEPSELDETVEEYEDENTLFDMVCESSVTDEDSDFEPQTQRPQSIARKRPGVVPSSLHSSSQTQMVDECSNDVIIKKIKQEIPEDYYIVANAELTGGVDGPALSLTQMAKPKPQTHAGPSCVGSAKLIPHVTSAISTELDPHGMSASPSVISRPIVQKTARVSLASPNRGPPGTHGTNQQVAMQMPVSTSHPNKQISIPLSALQLPGQDEQVASEEFLSHLPSQVSSCEVALSPSVNTEPEVSSSQQQPPVAPAITTEATAQCIPDQDERAAELSREQNEKTIRSTQTALRNFPYSTKLNKFPVFNINDDLNDLCTSAVSPNTTKATRYALNVWRYWCMTNGLKDHTDITKIPAVKLNELLENFYVTVKKSDGSDFLATSLHAIRRGLDRILKNAGVGFSITSSTFSSSTKKLKEKLWVLSKAGMSGARSRNIVYFSLSDEEEMWQAGCLGDDSPITLLSTVVKYNSQYLNMRTLQEHADLMYGDIELLKDPQNQPYFARTDSVKRESRSGSTRVCHGKIYHEHSRGHKQCPYCLLYKYMYIHRPPTQMEAKSPFYLTARKEATDMGSVWYEEQRMGLRSLRGIVPNLAKKVKLENCENFTFVSFTQVSRRLGSHSCCQ

SEQ ID NO: 35133 - protein, 458 aa, Homo sapiens
MSLRLQSSSASYGGGFGGGSCQLGGGRGVSTCSTRFVSGGSAGGYGGGVSCGFGGGAGSGFGGGYGGGLGGGYGGGLGGGFGGGFAGGFVDFGACDGGLLTGNEKITMQNLNDRLASYLEKVRALEEANADLEVKIRDWHLKQSPASPERDYSPYYKTIEELRDKILTATIENNRVILEIDNARLAADDFRLKYENELALRQSVEADINGLRRVLDELTLSKTDLEMQIESLNEELAYMKKNHEEEMKEFSNQVVGQVNVEMDATPGIDLTRVLAEMREQYEAMAERNRRDAEEWFHTKSAELNKEVSTNTAMIQTSKTEITELRRTLQGLEIELQSQLSMKAGLENTVAETECRYALQLQQIQGLISSIEAQLSELRSEMECQNQEYKMLLDIKTRLEQEIATYRSLLEGQDAKMIGFPSSAGSVSPRSTSVTTTSSASVTTTSNASGRRTSDVRRP

SEQ ID NO: 35134 - protein, 355 aa, Homo sapiens
MSLRLQSSSASYGGGFGGGSCQLGGGRGVSTCSTRFVSGGSAGGYGGGVSCGFGGGAGSGFGGGLGGGFGGGFAGGFVDFGACDGGLLTGNEKITMQNLNDRLASYLEKVRALEEANADLEVKIRDWHLKQSPASPERDYSPYYKTIEELRDKILTATIENNRVILEIDNARLAADDFRLKYENELALRQSVEADINGLRRVLDELTLSKTDLEMQIESLNEELAYMKKNHEEEMKEFSNQVVGQVNVEMDATPGIDLTRVLAEMREQYEAMAERNRRDAEEWFHTKSAELNKEVSTNTAMIQTSKTEITELRRTLQGLEIELQSQLSMKAGLENTVADPGTHQQHRGPAERAPQ

SEQ ID NO: 35135 - protein, 420 aa, Homo sapiens
MSLRLQSSSASYGGGFGGGSCQLGGGRGVSTCSTRFVSGGSAGGYGGGVSCGFGGGAGSGFGGGYGGGLGGGYGGGLGGGFGGGFAGGFVDFGACDGGLLTGNEKITMQNLNDRLASYLEKVRALEEANADLEVKIRDWHLKQSPASPERDYSPYYKTIEELRDKILTATIENNRVILEIDNARLAADDFRLKYENELALRQSVEADINGLRRVLDELTLSKTDLEMQIESLNEELAYMKKNHEEEMKEFSNQVVGQVNVEMDATPGIDLTRVLAEMREQYEAMAERNRRDAEEWFHTKSAELNKEVSTNTAMIQTSKTEITELRRTLQGLEIELQSQLSMKAGLENTVAETECRYALQLQQIQGLISSIEAQLSELRSEMECQNQEYKMLLDIKTRLEQEIATYRSLLEGQDAKKRQPP

SEQ ID NO: 35136 - protein, 887 aa, Homo sapiens
MPILLFLIDTSASMNQRSHLGTTYLDTAKGAVETFMKLRARDPASRGDRYMLVTFEEPPYAIKAGWKENHATFMNELKNLQAEGLTTLGQSLRTAFDLLNLNRLVTGIDNYGQGRNPFFLEPAIIITITDGSKLTTTSGVQDELHLPLNSPLPGSELTKEPFRWDQRLFALVLRLPGTMSVESEQLTGVPLDDSAITPMCEVTGGRSYSVCSPRMLNQCLESLVQKVQSGVVINFEKAGPDPSPVEDGQPDISRPFGSQPWHSCHKLIYVRPNPKTGVPIGHWPVPESFWPDQNSPTLPPRTSHPVVKFSCTDCEPMVIDKLPFDKYELEPSPLTQFILERKSPQTCWQVYVSNSAKYSELGHPFGYLKASTALNCVNLFVMPYNYPVLLPLLDDLFKVHKAKPTLKWRQSFESYLKTMPPYYLGPLKKAVRMMGAPNLIADSMEYGLSYSVISYLKKLSQQAKIESDRVIGSVGKKVVQETGIKVRSRSHGLSMAYRKDFQQLLQGISEDVPHRLLDLNMKEYTGFQVALLNKDLKPQTFRNAYDIPRRNLLDHLTRMRSNLLKSTRRFLKGQDEDQVHSVPIAQMGNYQEYLKQVPSPLRELDPDQPRRLHTFGNPFKLDKKGMMIDEADEFVAGPQNKHKRPGEPNMQGIPKRRRCMSPLLRGRQQNPVVNNHIGGKGPPAPTTQAQPDLIKPLPLHKISETTNDSIIHDVVENHVADQLSSDITPNAMDTEFSASSPASLLERPTNHMEALGHDHLGTNDLTVGGFLENHEEPRDKEQCAEENIPASSLNKGKKLMHCRSHEEVNTELKAQIMKEIRKPGRKYERIFTLLKHVQGSLQTRLIFLQNVIKEASRFKKRMLIEQLENFLDEIHRRANQINHINSN

SEQ ID NO: 35137 - protein, 115 aa, Homo sapiens
MPILLFLIDTSASMNQRSHLGTTYLDTAKGAVETFMKLRARDPASRGDRYMLVTFEEPPYAIKAGWKENHATFMNELKNLQAEGLTTLGQSLRTAFDLLNLNRLVTGIDNYGQVG

SEQ ID NO: 35138 - protein, 874 aa, Homo sapiens
MNQRSHLGTTYLDTAKGAVETFMKLRARDPASRGDRYMLVTFEEPPYAIKAGWKENHATFMNELKNLQAEGLTTLGQSLRTAFDLLNLNRLVTGIDNYGQGRNPFFLEPAIIITITDGSKLTTTSGVQDELHLPLNSPLPGSELTKEPFRWDQRLFALVLRLPGTMSVESEQLTGVPLDDSAITPMCEVTGGRSYSVCSPRMLNQCLESLVQKVQSGVVINFEKAGPDPSPVEDGQPDISRPFGSQPWHSCHKLIYVRPNPKTGVPIGHWPVPESFWPDQNSPTLPPRTSHPVVKFSCTDCEPMVIDKLPFDKYELEPSPLTQFILERKSPQTCWQVYVSNSAKYSELGHPFGYLKASTALNCVNLFVMPYNYPVLLPLLDDLFKVHKAKPTLKWRQSFESYLKTMPPYYLGPLKKAVRMMGAPNLIADSMEYGLSYSVISYLKKLSQQAKIESDRVIGSVGKKVVQETGIKVRSRSHGLSMAYRKDFQQLLQGISEDVPHRLLDLNMKEYTGFQVALLNKDLKPQTFRNAYDIPRRNLLDHLTRMRSNLLKSTRRFLKGQDEDQVHSVPIAQMGNYQEYLKQVPSPLRELDPDQPRRLHTFGNPFKLDKKGMMIDEADEFVAGPQNKHKRPGEPNMQGIPKRRRCMSPLLRGRQQNPVVNNHIGGKGPPAPTTQAQPDLIKPLPLHKISETTNDSIIHDVVENHVADQLSSDITPNAMDTEFSASSPASLLERPTNHMEALGHDHLGTNDLTVGGFLENHEEPRDKEQCAEENIPASSLNKGKKLMHCRSHEEVNTELKAQIMKEIRKPGRKYERIFTLLKHVQGSLQTRLIFLQNVIKEASRFKKRMLIEQLENFLDEIHRRANQINHINSN

SEQ ID NO: 35139 - protein, 577 aa, Homo sapiens
MADVAGPSRPSAAAFWSRDFSDEEQSVVYVPGISAEGNVRSRHKLMSPKADVKLKTSRVTDASISMESLKGTGDSVDEQNSCRGEIKSASLKDLCLEDKRRIANLIKELARVSEEKEVTEERLKAEQESFEKKIRQLEEQNELIIKEREALQLQYRECQELLSLYQKYLSEQQEKLTMSLSELGAARMQEQQVSSRKSTLQCSSVELDGSYLSIARPQTYYQTKQRPKSAVQDSASESLIAFRNNSLKPVTLHHPKDDLDKIPSETTTCNCESPGRKPAVPTEKMPQEELHMKECPHLKPTPSQCCGHRLAADRVHDSHPTNMTPQHPKTHPESCSYCRLSWASLVHGGGALQPIETLKKQISEDRKQQLMLQKMELEIEKERLQHLLAQQETKLLLKQQQLHQSRLDYNCLLKSNCDGWLLGTSSSIKKHQDPPNSGENRKERKTVGFHSHMKDDAQWSCQKKDTCRPQRGTVTGVRKDASTSPMPTGSLKDFVTTASPSLQHTTSRYETSLLDLVQSLSPNSAPKPQRYPSREAGAWNHGTFRLSPLKSTRKKMGMHRTPEELEENQILEDIFFI

SEQ ID NO: 35140 - protein, 573 aa, Homo sapiens
MPDNIIVFSFMFSCVVSDEEQSVVYVPGISAEGNVRSRHKLMSPKADVKLKTSRVTDASISMESLKGTGDSVDEQNSCRGEIKSASLKDLCLEDKRRIANLIKELARVSEEKEVTEERLKAEQESFEKKIRQLEEQNELIIKEREALQLQYRECQELLSLYQKYLSEQQEKLTMSLSELGAARMQEQQVSSRKSTLQCSSVELDGSYLSIARPQTYYQTKQRPKSAVQDSASESLIAFRNNSLKPVTLHHPKDDLDKIPSETTTCNCESPGRKPAVPTEKMPQEELHMKECPHLKPTPSQCCGHRLAADRVHDSHPTNMTPQHPKTHPESCSYCRLSWASLVHGGGALQPIETLKKQISEDRKQQLMLQKMELEIEKERLQHLLAQQETKLLLKQQQLHQSRLDYNCLLKSNCDGWLLGTSSSIKKHQDPPNSGENRKERKTVGFHSHMKDDAQWSCQKKDTCRPQRGTVTGVRKDASTSPMPTGSLKDFVTTASPSLQHTTSRYETSLLDLVQSLSPNSAPKPQRYPSREAGAWNHGTFRLSPLKSTRKKMGMHRTPEELEENQILEDIFFI

SEQ ID NO: 35141 - protein, 279 aa, Homo sapiens
MPQEELHMKECPHLKPTPSQCCGHRLAADRVHDSHPTNMTPQHPKTHPESCSYCRLSWASLVHGGGALQPIETLKKQISEDRKQQLMLQKMELEIEKERLQHLLAQQETKLLLKQQQLHQSRLDYNWLKAQALFKSRELVAEKQLTKPQELKLDMNGSDSGPSLLKSNCDGWLLGTSSSIKKHQDPPNSGENRKERKTVGFHSHMKDDAQWSCQKKDTCRPQRGTVTGVRKDASTSPMPTGSLKDFVTTASPSLQHTTSRPGISTKICFLSNHFFILFS

SEQ ID NO: 35142 - protein, 129 aa, Homo sapiens
MPQEELHMKECPHLKPTPSQCCGHRLAADRVHDSHPTNMTPQHPKTHPESCSYCRLSWASLVHGGGALQPIETLKKQISEDRKQQLMLQKMELEIEKERLQHLLAQQETKLLLKQQQLHQSRLDYNCSE

SEQ ID NO: 35143 - protein, 1822 aa, Homo sapiens
MAGPRPSPWARLLLAALISVSLSGTLANRCKKAPVKSCTECVRVDKDCAYCTDEMFRDRRCNTQAELLAAGCQRESIVVMESSFQITEETQIDTTLRRSQMSPQGLRVRLRPGEERHFELEVFEPLESPVDLYILMDFSNSMSDDLDNLKKMGQNLARVLSQLTSDYTIGFGKFVDKVSVPQTDMRPEKLKEPWPNSDPPFSFKNVISLTEDVDEFRNKLQGERISGNLDAPEGGFDAILQTAVCTRDIGWRPDSTHLLVFSTESAFHYEADGANVLAGIMSRNDERCHLDTTGTYTQYRTQDYPSVPTLVRLLAKHNIIPIFAVTNYSYSYYEKLHTYFPVSSLGVLQEDSSNIVELLEEAFNRIRSNLDIRALDSPRGLRTEVTSKMFQKTRTGSFHIRRGEVGIYQVQLRALEHVDGTHVCQLPEDQKGNIHLKPSFSDGLKMDAGIICDVCTCELQKEVRSARCSFNGDFVCGQCVCSEGWSGQTCNCSTGSLSDIQPCLREGEDKPCSGRGECQCGHCVCYGEGRYEGQFCEYDNFQCPRTSGFLCNDRGRCSMGQCVCEPGWTGPSCDCPLSNATCIDSNGGICNGRGHCECGRCHCHQQSLYTDTICEINYSAIHPGLCEDLRSCVQCQAWGTGEKKGRTCEECNFKVKMVDELKRAEEVVVRCSFRDEDDDCTYSYTMEGDGAPGPNSTVLVHKKKDCPPGSFWWLIPLLLLLLPLLALLLLLCWKYCACCKACLALLPCCNRGHMVGFKEDHYMLRENLMASDHLDTPMLRSGNLKGRDVVRWKVTNNMQRPGFATHAASINPTELVPYGLSLRLARLCTENLLKPDTRECAQLRQEVEENLNEVYRQISGVHKLQQTKFRQQPNAGKKQDHTIVDTVLMAPRSAKPALLKLTEKQVEQRAFHDLKVAPGYYTLTADQDARGMVEFQEGVELVDVRVPLFIRPEDDDEKQLLVEAIDVPAGTATLGRRLVNITIIKEQARDVVSFEQPEFSVSRGDQVARIPVIRRVLDGGKSQVSYRTQDGTAQGNRDYIPVEGELLFQPGEAWKELQVKLLELQEVDSLLRGRQVRRFHVQLSNPKFGAHLGQPHSTTIIIRDPDELDRSFTSQMLSSQPPPHGDLGAPQNPNAKAAGSRKIHFNWLPPSGKPMGYRVKYWIQGDSESEAHLLDSKVPSVELTNLYPYCDYEMKVCAYGAQGEGPYSSLVSCRTHQEVPSEPGRLAFNVVSSTVTQLSWAEPAETNGEITAYEVCYGLVNDDNRPIGPMKKVLVDNPKNRMLLIENLRESQPYRYTVKARNGAGWGPEREAIINLATQPKRPMSIPIIPDIPIVDAQSGEDYDSFLMYSDDVLRSPSGSQRPSVSDDTGCGWKFEPLLGEELDLRRVTWRLPPELIPRLSASSGRSSDAEAPHGPPDDGGAGGKGGSLPRSATPGPPGEHLVNGRMDFAFPGSTNSLHRMTTTSAAAYGTHLSPHVPHRVLSTSSTLTRDYNSLTRSEHSHSTTLPRDYSTLTSVSSHDSRLTAGVPDTPTRLVFSALGPTSLRVSWQEPRCERPLQGYSVEYQLLNGGELHRLNIPNPAQTSVVVEDLLPNHSYVFRVRAQSQEGWGREREGVITIESQVHPQSPLCPLPGSAFTLSTPSAPGPLVFTALSPDSLQLSWERPRRPNGDIVGYLVTCEMAQGGGPATAFRVDGDSPESRLTVPGLSENVPYKFKVQARTTEGFGPEREGIITIESQDGGPFPQLGSRAGLFQHPLQSEYSSITTTHTSATEPFLVDGLTLGAQHLEAGGSLTRHVTQEFVSRTLTTSGTLSTHMDQQFFQT

SEQ ID NO: 35144 - protein, 1752 aa, Homo sapiens
MAGPRPSPWARLLLAALISVSLSGTLANRCKKAPVKSCTECVRVDKDCAYCTDEMFRDRRCNTQAELLAAGCQRESIVVMESSFQITEETQIDTTLRRSQMSPQGLRVRLRPGEERHFELEVFEPLESPVDLYILMDFSNSMSDDLDNLKKMGQNLARVLSQLTSDYTIGFGKFVDKVSVPQTDMRPEKLKEPWPNSDPPFSFKNVISLTEDVDEFRNKLQGERISGNLDAPEGGFDAILQTAVCTRDIGWRPDSTHLLVFSTESAFHYEADGANVLAGIMSRNDERCHLDTTGTYTQYRTQDYPSVPTLVRLLAKHNIIPIFAVTNYSYSYYEKLHTYFPVSSLGVLQEDSSNIVELLEEAFNRIRSNLDIRALDSPRGLRTEVTSKMFQKTRTGSFHIRRGEVGIYQVQLRALEHVDGTHVCQLPEDQKGNIHLKPSFSDGLKMDAGIICDVCTCELQKEVRSARCSFNGDFVCGQCVCSEGWSGQTCNCSTGSLSDIQPCLREGEDKPCSGRGECQCGHCVCYGEGRYEGQFCEYDNFQCPRTSGFLCNDRGRCSMGQCVCEPGWTGPSCDCPLSNATCIDSNGGICNGRGHCECGRCHCHQQSLYTDTICEINYSAIHPGLCEDLRSCVQCQAWGTGEKKGRTCEECNFKVKMVDELKRAEEVVVRCSFRDEDDDCTYSYTMEGDGAPGPNSTVLVHKKKDCPPGSFWWLIPLLLLLLPLLALLLLLCWKYCACCKACLALLPCCNRGHMVGFKEDHYMLRENLMASDHLDTPMLRSGNLKGRDVVRWKVTNNMQRPGFATHAASINPTELVPYGLSLRLARLCTENLLKPDTRECAQLRQEVEENLNEVYRQISGVHKLQQTKFRQQPNAGKKQDHTIVDTVLMAPRSAKPALLKLTEKQVEQRAFHDLKVAPGYYTLTADQDARGMVEFQEGVELVDVRVPLFIRPEDDDEKQLLVEAIDVPAGTATLGRRLVNITIIKEQARDVVSFEQPEFSVSRGDQVARIPVIRRVLDGGKSQVSYRTQDGTAQGNRDYIPVEGELLFQPGEAWKELQVKLLELQEVDSLLRGRQVRRFHVQLSNPKFGAHLGQPHSTTIIIRDPDELDRSFTSQMLSSQPPPHGDLGAPQNPNAKAAGSRKIHFNWLPPSGKPMGYRVKYWIQGDSESEAHLLDSKVPSVELTNLYPYCDYEMKVCAYGAQGEGPYSSLVSCRTHQEVPSEPGRLAFNVVSSTVTQLSWAEPAETNGEITAYEVCYGLVNDDNRPIGPMKKVLVDNPKNRMLLIENLRESQPYRYTVKARNGAGWGPEREAIINLATQPKRPMSIPIIPDIPIVDAQSGEDYDSFLMYSDDVLRSPSGSQRPSVSDDTEHLVNGRMDFAFPGSTNSLHRMTTTSAAAYGTHLSPHVPHRVLSTSSTLTRDYNSLTRSEHSHSTTLPRDYSTLTSVSSHDSRLTAGVPDTPTRLVFSALGPTSLRVSWQEPRCERPLQGYSVEYQLLNGGELHRLNIPNPAQTSVVVEDLLPNHSYVFRVRAQSQEGWGREREGVITIESQVHPQSPLCPLPGSAFTLSTPSAPGPLVFTALSPDSLQLSWERPRRPNGDIVGYLVTCEMAQGGGPATAFRVDGDSPESRLTVPGLSENVPYKFKVQARTTEGFGPEREGIITIESQDGGPFPQLGSRAGLFQHPLQSEYSSITTTHTSATEPFLVDGLTLGAQHLEAGGSLTRHVTQEFVSRTLTTSGTLSTHMDQQFFQT

SEQ ID NO: 35145 - protein, 1805 aa, Homo sapiens
MAGPRPSPWARLLLAALISVSLSGTLANRCKKAPVKSCTECVRVDKDCAYCTDEMFRDRRCNTQAELLAAGCQRESIVVMESSFQITEETQIDTTLRRSQMSPQGLRVRLRPGEERHFELEVFEPLESPVDLYILMDFSNSMSDDLDNLKKMGQNLARVLSQLTSDYTIGFGKFVDKVSVPQTDMRPEKLKEPWPNSDPPFSFKNVISLTEDVDEFRNKLQGERISGNLDAPEGGFDAILQTAVCTRDIGWRPDSTHLLVFSTESAFHYEADGANVLAGIMSRNDERCHLDTTGTYTQYRTQDYPSVPTLVRLLAKHNIIPIFAVTNYSYSYYEKLHTYFPVSSLGVLQEDSSNIVELLEEAFNRIRSNLDIRALDSPRGLRTEVTSKMFQKTRTGSFHIRRGEVGIYQVQLRALEHVDGTHVCQLPEDQKGNIHLKPSFSDGLKMDAGIICDVCTCELQKEVRSARCSFNGDFVCGQCVCSEGWSGQTCNCSTGSLSDIQPCLREGEDKPCSGRGECQCGHCVCYGEGRYEGQFCEYDNFQCPRTSGFLCNDRGRCSMGQCVCEPGWTGPSCDCPLSNATCIDSNGGICNGRGHCECGRCHCHQQSLYTDTICEINYSAIHPGLCEDLRSCVQCQAWGTGEKKGRTCEECNFKVKMVDELKRAEEVVVRCSFRDEDDDCTYSYTMEGDGAPGPNSTVLVHKKKDCPPGSFWWLIPLLLLLLPLLALLLLLCWKYCACCKACLALLPCCNRGHMVGFKEDHYMLRENLMASDHLDTPMLRSGNLKGRDVVRWKVTNNMQRPGFATHAASINPTELVPYGLSLRLARLCTENLLKPDTRECAQLRQEVEENLNEVYRQISGVHKLQQTKFRQQPNAGKKQDHTIVDTVLMAPRSAKPALLKLTEKQVEQRAFHDLKVAPGYYTLTADQDARGMVEFQEGVELVDVRVPLFIRPEDDDEKQLLVEAIDVPAGTATLGRRLVNITIIKEQARDVVSFEQPEFSVSRGDQVARIPVIRRVLDGGKSQVSYRTQDGTAQGNRDYIPVEGELLFQPGEAWKELQVKLLELQEVDSLLRGRQVRRFHVQLSNPKFGAHLGQPHSTTIIIRDPDELDRSFTSQMLSSQPPPHGDLGAPQNPNAKAAGSRKIHFNWLPPSGKPMGYRVKYWIQGDSESEAHLLDSKVPSVELTNLYPYCDYEMKVCAYGAQGEGPYSSLVSCRTHQEVPSEPGRLAFNVVSSTVTQLSWAEPAETNGEITAYEVCYGLVNDDNRPIGPMKKVLVDNPKNRMLLIENLRESQPYRYTVKARNGAGWGPEREAIINLATQPKRPMSIPIIPDIPIVDAQSGEDYDSFLMYSDDVLRSPSGSQRPSVSDDTEHLVNGRMDFAFPGSTNSLHRMTTTSAAAYGTHLSPHVPHRVLSTSSTLTRDYNSLTRSEHSHSTTLPRDYSTLTSVSSHGLPPIWEHGRSRLPLSWALGSRSRAQMKGFPPSRGPRDSIILAGRPAAPSWGPDSRLTAGVPDTPTRLVFSALGPTSLRVSWQEPRCERPLQGYSVEYQLLNGGELHRLNIPNPAQTSVVVEDLLPNHSYVFRVRAQSQEGWGREREGVITIESQVHPQSPLCPLPGSAFTLSTPSAPGPLVFTALSPDSLQLSWERPRRPNGDIVGYLVTCEMAQGGGPATAFRVDGDSPESRLTVPGLSENVPYKFKVQARTTEGFGPEREGIITIESQDGGPFPQLGSRAGLFQHPLQSEYSSITTTHTSATEPFLVDGLTLGAQHLEAGGSLTRHVTQEFVSRTLTTSGTLSTHMDQQFFQT

SEQ ID NO: 35146 - protein, 1745 aa, Homo sapiens
MAGPRPSPWARLLLAALISVSLSGTLANRCKKAPVKSCTECVRVDKDCAYCTDEMFRDRRCNTQAELLAAGCQRESIVVMESSFQITEETQIDTTLRRSQMSPQGLRVRLRPGEERHFELEVFEPLESPVDLYILMDFSNSMSDDLDNLKKMGQNLARVLSQLTSDYTIGFGKFVDKVSVPQTDMRPEKLKEPWPNSDPPFSFKNVISLTEDVDEFRNKLQGERISGNLDAPEGGFDAILQTAVCTRDIGWRPDSTHLLVFSTESAFHYEADGANVLAGIMSRNDERCHLDTTGTYTQYRTQDYPSVPTLVRLLAKHNIIPIFAVTNYSYSYYEKLHTYFPVSSLGVLQEDSSNIVELLEEAFNRIRSNLDIRALDSPRGLRTEVTSKMFQKTRTGSFHIRRGEVGIYQVQLRALEHVDGTHVCQLPEDQKGNIHLKPSFSDGLKMDAGIICDVCTCELQKEVRSARCSFNGDFVCGQCVCSEGWSGQTCNCSTGSLSDIQPCLREGEDKPCSGRGECQCGHCVCYGEGRYEGQFCEYDNFQCPRTSGFLCNDRGRCSMGQCVCEPGWTGPSCDCPLSNATCIDSNGGICNGRGHCECGRCHCHQQSLYTDTICEINYSAIHPGLCEDLRSCVQCQAWGTGEKKGRTCEECNFKVKMVDELKRAEEVVVRCSFRDEDDDCTYSYTMEGDGAPGPNSTVLVHKKKDCPPGSFWWLIPLLLLLLPLLALLLLLCWKYCACCKACLALLPCCNRGHMVGFKEDHYMLRENLMASDHLDTPMLRSGNLKGRDVVRWKVTNNMQRPGFATHAASINPTELVPYGLSLRLARLCTENLLKPDTRECAQLRQEVEENLNEVYRQISGVHKLQQTKFRQQPNAGKKQDHTIVDTVLMAPRSAKPALLKLTEKQVEQRAFHDLKVAPGYYTLTADQDARGMVEFQEGVELVDVRVPLFIRPEDDDEKQLLVEAIDVPAGTATLGRRLVNITIIKEQARDVVSFEQPEFSVSRGDQVARIPVIRRVLDGGKSQVSYRTQDGTAQGNRDYIPVEGELLFQPGEAWKELQVKLLELQEVDSLLRGRQVRRFHVQLSNPKFGAHLGQPHSTTIIIRDPDELDRSFTSQMLSSQPPPHGDLGAPQNPNAKAAGSRKIHFNWLPPSGKPMGYRVKYWIQGDSESEAHLLDSKVPSVELTNLYPYCDYEMKVCAYGAQGEGPYSSLVSCRTHQEVPSEPGRLAFNVVSSTVTQLSWAEPAETNGEITAYEVCYGLVNDDNRPIGPMKKVLVDNPKNRMLLIENLRESQPYRYTVKARNGAGWGPEREAIINLATQPKRPMSIPIIPDIPIVDAQSGEDYDSFLMYSDDVLRSPSGSQRPSVSDDTEHLVNGRMDFAFPGSTNSLHRMTTTSAAAYGTHLSPHVPHRVLSTSSTLTRDYNSLTRSEHSHSTTLPRDYSTLTSVSSHDSRLTAGVPDTPTRLVFSALGPTSLRVSWQEPRCERPLQGYSVEYQLLNGGELHRLNIPNPAQTSVVVEDLLPNHSYVFRVRAQSQEGWGREREGVITIESQVHPQSPLCPLPGSAFTLSTPSAPGPLVFTALSPDSLQLSWERPRRPNGDIVGYLVTWPATAFRVDGDSPESRLTVPGLSENVPYKFKVQARTTEGFGPEREGIITIESQDGGPFPQLGSRAGLFQHPLQSEYSSITTTHTSATEPFLVDGLTLGAQHLEAGGSLTRHVTQEFVSRTLTTSGTLSTHMDQQFFQT

SEQ ID NO: 35147 - protein, 964 aa, Homo sapiens
MAGPRPSPWARLLLAALISVSLSGTLANRCKKAPVKSCTECVRVDKDCAYCTDEMFRDRRCNTQAELLAAGCQRESIVVMESSFQITEETQIDTTLRRSQMSPQGLRVRLRPGEERHFELEVFEPLESPVDLYILMDFSNSMSDDLDNLKKMGQNLARVLSQLTSDYTIGFGKFVDKVSVPQTDMRPEKLKEPWPNSDPPFSFKNVISLTEDVDEFRNKLQGERISGNLDAPEGGFDAILQTAVCTRDIGWRPDSTHLLVFSTESAFHYEADGANVLAGIMSRNDERCHLDTTGTYTQYRTQDYPSVPTLVRLLAKHNIIPIFAVTNYSYSYYEKLHTYFPVSSLGVLQEDSSNIVELLEEAFNRIRSNLDIRALDSPRGLRTEVTSKMFQKTRTGSFHIRRGEVGIYQVQLRALEHVDGTHVCQLPEDQKGNIHLKPSFSDGLKMDAGIICDVCTCELQKEVRSARCSFNGDFVCGQCVCSEGWSGQTCNCSTGSLSDIQPCLREGEDKPCSGRGECQCGHCVCYGEGRYEGQFCEYDNFQCPRTSGFLCNDRGRCSMGQCVCEPGWTGPSCDCPLSNATCIDSNGGICNGRGHCECGRCHCHQQSLYTDTICEINYSAIHPGLCEDLRSCVQCQAWGTGEKKGRTCEECNFKVKMVDELKRAEEVVVRCSFRDEDDDCTYSYTMEGDGAPGPNSTVLVHKKKDCPPGSFWWLIPLLLLLLPLLALLLLLCWKYCACCKACLALLPCCNRGHMVGFKEDHYMLRENLMASDHLDTPMLRSGNLKGRDVVRWKVTNNMQRPGFATHAASINPTELVPYGLSLRLARLCTENLLKPDTRECAQLRQEVEENVRTQELGLAGDVAERGLQADLRCTQAPADQVPAAAQCREKARPHHCGHSADGAPLGQAGPAEAYREAGGTEGLPRPQGGPRLLHPHCRPGRPGHGGVPGGRGAGGRTGAPLYPA

SEQ ID NO: 35148 - protein, 903 aa, Homo sapiens
MSDSGSQLGSMGSLTMKSQLQITVISAKLKENKKNWFGPSPYVEVTVDGQSKKTEKCNNTNSPKWKQPLTVIVTPVSKLHFRVWSHQTLKSDVLLGTAALDIYETLKSNNMKLEEVVVTLQLGGDKEPTETIGDLSICLDGLQLESEVVTNGETTCSENGVSLCLPRLECNSAISAHCNLCLPGLSDSPISASRVAGFTGASQNDDGSRSKDETRVSTNGSDDPEDAGAGENRRVSGNNSPSLSNGGFKPSRPPRPSRPPPPTPRRPASVNGSPSATSESDGSSTGSLPPTNTNTNTSEGATSGLIIPLTISGGSGPRPLNPVTQAPLPPGWEQRVDQHGRVYYVDHVEKRTTWDRPEPLPPGWERRVDNMGRIYYVDHFTRTTTWQRPTLESVRNYEQWQLQRSQLQGAMQQFNQRFIYGNQDLFATSQSKEFDPLGPLPPGWEKRTDSNGRVYFVNHNTRITQWEDPRSQGQLNEKPLPEGWEMRFTVDGIPYFVDHNRRTTTYIDPRTGKSALDNGPQIAYVRDFKAKVQYFRFWCQQLAMPQHIKITVTRKTLFEDSFQQIMSFSPQDLRRRLWVIFPGEEGLDYGGVAREWFFLLSHEVLNPMYCLFEYAGKDNYCLQINPASYINPDHLKYFRFIGRFIAMALFHGKFIDTGFSLPFYKRILNKPVGLKDLESIDPEFYNSLIWVKENNIEECDLEMYFSVDKEILGEIKSHDLKPNGGNILVTEENKEEYIRMVAEWRLSRGVEEQTQAFFEGFNEILPQQYLQYFDAKELEVLLCGMQEIDLNDWQRHAIYRHYARTSKQIMWFWQFVKEIDNEKRMRLLQFVTGTCRLPVGGFADLMGSNGPQKFCIEKVGKENWLPRSHTCFNRLDLPPYKSYEQLKEKLLFAIEETEGFGQE

SEQ ID NO: 35149 - protein, 862 aa, Homo sapiens
MSDSGSQLGSMGSLTMKSQLQITVISAKLKENKKNWFGPSPYVEVTVDGQSKKTEKCNNTNSPKWKQPLTVIVTPVSKLHFRVWSHQTLKSDVLLGTAALDIYETLKSNNMKLEEVVVTLQLGGDKEPTETIGDLSICLDGLQLESEVVTNGETTCSESASQNDDGSRSKDETRVSTNGSDDPEDAGAGENRRVSGNNSPSLSNGGFKPSRPPRPSRPPPPTPRRPASVNGSPSATSESDGSSTGSLPPTNTNTNTSEGATSGLIIPLTISGGSGPRPLNPVTQAPLPPGWEQRVDQHGRVYYVDHVEKRTTWDRPEPLPPGWERRVDNMGRIYYVDHFTRTTTWQRPTLESVRNYEQWQLQRSQLQGAMQQFNQRFIYGNQDLFATSQSKEFDPLGPLPPGWEKRTDSNGRVYFVNHNTRITQWEDPRSQGQLNEKPLPEGWEMRFTVDGIPYFVDHNRRTTTYIDPRTGKSALDNGPQIAYVRDFKAKVQYFRFWCQQLAMPQHIKITVTRKTLFEDSFQQIMSFSPQDLRRRLWVIFPGEEGLDYGGVAREWFFLLSHEVLNPMYCLFEYAGKDNYCLQINPASYINPDHLKYFRFIGRFIAMALFHGKFIDTGFSLPFYKRILNKPVGLKDLESIDPEFYNSLIWVKENNIEECDLEMYFSVDKEILGEIKSHDLKPNGGNILVTEENKEEYIRMVAEWRLSRGVEEQTQAFFEGFNEILPQQYLQYFDAKELEVLLCGMQEIDLNDWQRHAIYRHYARTSKQIMWFWQFVKEIDNEKRMRLLQFVTGTCRLPVGGFADLMGSNGPQKFCIEKVGKENWLPRSHTCFNRLDLPPYKSYEQLKEKLLFAIEETEGFGQE

SEQ ID NO: 35150 - protein, 752 aa, Homo sapiens
MKLEEVVVTLQLGGDKEPTETIGDLSICLDGLQLESEVVTNGETTCSESASQNDDGSRSKDETRVSTNGSDDPEDAGAGENRRVSGNNSPSLSNGGFKPSRPPRPSRPPPPTPRRPASVNGSPSATSESDGSSTGSLPPTNTNTNTSEGATSGLIIPLTISGGSGPRPLNPVTQAPLPPGWEQRVDQHGRVYYVDHVEKRTTWDRPEPLPPGWERRVDNMGRIYYVDHFTRTTTWQRPTLESVRNYEQWQLQRSQLQGAMQQFNQRFIYGNQDLFATSQSKEFDPLGPLPPGWEKRTDSNGRVYFVNHNTRITQWEDPRSQGQLNEKPLPEGWEMRFTVDGIPYFVDHNRRTTTYIDPRTGKSALDNGPQIAYVRDFKAKVQYFRFWCQQLAMPQHIKITVTRKTLFEDSFQQIMSFSPQDLRRRLWVIFPGEEGLDYGGVAREWFFLLSHEVLNPMYCLFEYAGKDNYCLQINPASYINPDHLKYFRFIGRFIAMALFHGKFIDTGFSLPFYKRILNKPVGLKDLESIDPEFYNSLIWVKENNIEECDLEMYFSVDKEILGEIKSHDLKPNGGNILVTEENKEEYIRMVAEWRLSRGVEEQTQAFFEGFNEILPQQYLQYFDAKELEVLLCGMQEIDLNDWQRHAIYRHYARTSKQIMWFWQFVKEIDNEKRMRLLQFVTGTCRLPVGGFADLMGSNGPQKFCIEKVGKENWLPRSHTCFNRLDLPPYKSYEQLKEKLLFAIEETEGFGQE

SEQ ID NO: 35151 - protein, 264 aa, Homo sapiens
MMDCTWTLPGMRATWQPAPFLPWDQTPWRVSFSWSPVLLAWGGVWSGEAHPCAHVLRPPASPCPPRPRRGCGDSGSSGMAQRAQAGSNQSRGKCGRDGRCPPRSSPGAPEAAERVESAETRGPGKSWILSPSSMSEPRRGKARRSPGRRRHPHSSFPQASSPSSPSRRETIPQVQSSGVPGAMSPEQTLFSRSPRGLSHLGQSLCRTVKESEAQRGKTMPPGSHSPSGAGQGRTARKGPAREEIPSSDSSAKPSVYPHPHLTAT

SEQ ID NO: 35152 - protein, 483 aa, Homo sapiens
MSYPQGYLYQPSASLALYSCPAYSTSVISGPRTDELGRSSSGSAFSPYAGSTAFTAPSPGYNSHLQYGADPAAAAAAAFSSYVGSPYDHTPGMAGSLGYHPYAAPLGSYPYGDPAYRKNATRDATATLKAWLNEHRKNPYPTKGEKIMLAIITKMTLTQVSTWFANARRRLKKENKMTWTPRNRSEDEEEEENIDLEKNDEDEPQKPEDKGDPEGPEAGGAEQKAASGCERLQGPPTPAGKETEGSLSDSDFKEPPSEGRLDALQGPPRTGGPSPAGPAAARLAEDPAPHYPAGAPAPGPHPAAGEVPPGPGGPSVIHSPPPPPPPAVLAKPKLWSLAEIATSSDKVKDGGGGNEGSPCPPCPGPIAGQALGGSRASPAPAPSRSPSAQCPFPGGTVLSRPLYYTAPFYPGYTNYGSFGHLHGHPGPGPGPTTGPGSHFNGLNQTVLNRADALAKDPKMLRSQSQLDLCKDSPYELKKGMSDI

SEQ ID NO: 35153 - protein, 482 aa, Homo sapiens
MSYPQGYLYQPSASLALYSCPAYSTSVISGPRTDELGRSSSGSAFSPYAGSTAFTAPSPGYNSHLQYGADPAAAAAAAFSSYVGSPYDHTPGMAGSLGYHPYAAPLGSYPYGDPAYRKNATRDATATLKAWLNEHRKNPYPTKGEKIMLAIITKMTLTQVSTWFANARRRLKKENKMTWTPRNRSEDEEEEENIDLEKNDEDEPQKPEDKGDPEGPEAGAEQKAASGCERLQGPPTPAGKETEGSLSDSDFKEPPSEGRLDALQGPPRTGGPSPAGPAAARLAEDPAPHYPAGAPAPGPHPAAGEVPPGPGGPSVIHSPPPPPPPAVLAKPKLWSLAEIATSSDKVKDGGGGNEGSPCPPCPGPIAGQALGGSRASPAPAPSRSPSAQCPFPGGTVLSRPLYYTAPFYPGYTNYGSFGHLHGHPGPGPGPTTGPGSHFNGLNQTVLNRADALAKDPKMLRSQSQLDLCKDSPYELKKGMSDI

SEQ ID NO: 35154 - protein, 417 aa, Homo sapiens
MAVETTVHTHLSASPPQGSPYDHTPGMAGSLGYHPYAAPLGSYPYGDPAYRKNATRDATATLKAWLNEHRKNPYPTKGEKIMLAIITKMTLTQVSTWFANARRRLKKENKMTWTPRNRSEDEEEEENIDLEKNDEDEPQKPEDKGDPEGPEAGGAEQKAASGCERLQGPPTPAGKETEGSLSDSDFKEPPSEGRLDALQGPPRTGGPSPAGPAAARLAEDPAPHYPAGAPAPGPHPAAGEVPPGPGGPSVIHSPPPPPPPAVLAKPKLWSLAEIATSSDKVKDGGGGNEGSPCPPCPGPIAGQALGGSRASPAPAPSRSPSAQCPFPGGTVLSRPLYYTAPFYPGYTNYGSFGHLHGHPGPGPGPTTGPGSHFNGLNQTVLNRADALAKDPKMLRSQSQLDLCKDSPYELKKGMSDI

SEQ ID NO: 35155 - protein, 1035 aa, Homo sapiens
MVVFVGRRLPALLGLFKKKGSAKAENDKHLSVGPGQGPGSAVDEHQDNVFFPSGRPPHLEELHTQAQEGLRSLQHQEKQKLNKGGWDHGDTQSIQSSRTGPDEDNISFCSQTTSYVAESSTAEDALSIRSEMIQRKGSTFRPHDSFPKSGKSGRRRRERRSTVLGLPQHVQKELGLRNEREAPGTPRAPGARDAVRIPTVDGRPRGTSGMGARVSLQALEAEAEAGAETEAMLQRHIDRVYRDDTFVGRSTGTRAPPLTRPMSLAVPGLTGGAGPAEPLSPAMSISPQATYLSKLIPHAVLPPTVDVVALGRCSLRTLSRCSLHSASPASVRSLGRFSSVSSPQPRSRHPSSSSDTWSHSQSSDTIVSDGSTLSSKGGSEGQPESSTASNSVVPPPQGGSGRGSPSGGSTAEASDTLSIRSSGQLSGRSVSLRKLKRPPPPPRRTHSLHQRGLAVPDGPLGLPPKPERKQQPQLPRPPTTGGSEGAGAAPCPPNPANSWVPGLSPGGSRRPPRSPERTLSPSSGYSSQSGTPTLPPKGLAGPPASPGKAQPPKPERVTSLRSPGASVSSSLTSLCSSSSDPAPSDRSGPQILTPLGDRFVIPPHPKVPAPFSPPPSKPRSPNPAAPALAAPAVVPGPVSTTDASPQSPPTPQTTLTPLQESPVISKDQSPPPSPPPSYHPPPPPTKKPEVVVEAPSASETAEEPLQDPNWPPPPPPAPEEQDLSMADFPPPEEAFFSVASPEPAGPSGSPELVSSPAASSSSATALQIQPPGSPDPPPAPPAPAPASSAPGHVAKLPQKEPVGCSKGGGPPREDVGAPLVTPSLLQMVRLRSVGAPGGAPTPALGPSAPQKPLRRALSGRASPVPAPSSGLHAAVRLKACSLAASEGLSSAQPNGPPEAEPRPPQSPASTASFIFSKGSRKLQLERPVSPETQADLQRNLVAELRSISEQRPPQAPKKSPKAPPPVARKPSVGVPPPASPSYPRAEPLTAPPTNGLPHTQDRTKRELAENGGVLQLVGPEEKMGLPGSDSQKELA

SEQ ID NO: 35156 - protein, 1094 aa, Homo sapiens
MAARAPPAAPAAEEPGNPGGPPRRKKSRSGASGLRRAFSWLRGKRRKKKAAGAEGAEPAAPRAKKAEDKAKRAKGKGRGSAKAENDKHLSVGPGQGPGSAVDEHQDNVFFPSGRPPHLEELHTQAQEGLRSLQHQEKQKLNKGGWDHGDTQSIQSSRTGPDEDNISFCSQTTSYVAESSTAEDALSIRSEMIQRKGSTFRPHDSFPKSGKSGRRRRERRSTVLGLPQHVQKELGLRNEREAPGTPRAPGARDAVRIPTVDGRPRGTSGMGARVSLQALEAEAEAGAETEAMLQRHIDRVYRDDTFVGRSTGTRAPPLTRPMSLAVPGLTGGAGPAEPLSPAMSISPQATYLSKLIPHAVLPPTVDVVALGRCSLRTLSRCSLHSASPASVRSLGRFSSVSSPQPRSRHPSSSSDTWSHSQSSDTIVSDGSTLSSKGGSEGQPESSTASNSVVPPPQGGSGRGSPSGGSTAEASDTLSIRSSGQLSGRSVSLRKLKRPPPPPRRTHSLHQRGLAVPDGPLGLPPKPERKQQPQLPRPPTTGGSEGAGAAPCPPNPANSWVPGLSPGGSRRPPRSPERTLSPSSGYSSQSGTPTLPPKGLAGPPASPGKAQPPKPERVTSLRSPGASVSSSLTSLCSSSSDPAPSDRSGPQILTPLGDRFVIPPHPKVPAPFSPPPSKPRSPNPAAPALAAPAVVPGPVSTTDASPQSPPTPQTTLTPLQESPVISKDQSPPPSPPPSYHPPPPPTKKPEVVVEAPSASETAEEPLQDPNWPPPPPPAPEEQDLSMADFPPPEEAFFSVASPEPAGPSGSPELVSSPAASSSSATALQIQPPGSPDPPPAPPAPAPASSAPGHVAKLPQKEPVGCSKGGGPPREDVGAPLVTPSLLQMVRLRSVGAPGGAPTPALGPSAPQKPLRRALSGRASPVPAPSSGLHAAVRLKACSLAASEGLSSAQPNGPPEAEPRPPQSPASTASFIFSKGSRKLQLERPVSPETQADLQRNLVAELRSISEQRPPQAPKKSPKAPPPVARKPSVGVPPPASPSYPRAEPLTAPPTNGLPHTQDRTKRELAENGGVLQLVGPEEKMGLPGSDSQKELA

SEQ ID NO: 35157 - protein, 1046 aa, Homo sapiens
MGNSHHKRKAPSGPRVRSFWRFGRSAKRPAGSAKAENDKHLSVGPGQGPGSAVDEHQDNVFFPSGRPPHLEELHTQAQEGLRSLQHQEKQKLNKGGWDHGDTQSIQSSRTGPDEDNISFCSQTTSYVAESSTAEDALSIRSEMIQRKGSTFRPHDSFPKSGKSGRRRRERRSTVLGLPQHVQKELGLRNEREAPGTPRAPGARDAVRIPTVDGRPRGTSGMGARVSLQALEAEAEAGAETEAMLQRHIDRVYRDDTFVGRSTGTRAPPLTRPMSLAVPGLTGGAGPAEPLSPAMSISPQATYLSKLIPHAVLPPTVDVVALGRCSLRTLSRCSLHSASPASVRSLGRFSSVSSPQPRSRHPSSSSDTWSHSQSSDTIVSDGSTLSSKGGSEGQPESSTASNSVVPPPQGGSGRGSPSGGSTAEASDTLSIRSSGQLSGRSVSLRKLKRPPPPPRRTHSLHQRGLAVPDGPLGLPPKPERKQQPQLPRPPTTGGSEGAGAAPCPPNPANSWVPGLSPGGSRRPPRSPERTLSPSSGYSSQSGTPTLPPKGLAGPPASPGKAQPPKPERVTSLRSPGASVSSSLTSLCSSSSDPAPSDRSGPQILTPLGDRFVIPPHPKVPAPFSPPPSKPRSPNPAAPALAAPAVVPGPVSTTDASPQSPPTPQTTLTPLQESPVISKDQSPPPSPPPSYHPPPPPTKKPEVVVEAPSASETAEEPLQDPNWPPPPPPAPEEQDLSMADFPPPEEAFFSVASPEPAGPSGSPELVSSPAASSSSATALQIQPPGSPDPPPAPPAPAPASSAPGHVAKLPQKEPVGCSKGGGPPREDVGAPLVTPSLLQMVRLRSVGAPGGAPTPALGPSAPQKPLRRALSGRASPVPAPSSGLHAAVRLKACSLAASEGLSSAQPNGPPEAEPRPPQSPASTASFIFSKGSRKLQLERPVSPETQADLQRNLVAELRSISEQRPPQAPKKSPKAPPPVARKPSVGVPPPASPSYPRAEPLTAPPTNGLPHTQDRTKRELAENGGVLQLVGPEEKMGLPGSDSQKELA

SEQ ID NO: 35158 - protein, 143 aa, Homo sapiens
MVVFVGRRLPALLGLFKKKGSAKAENDKHLSVGPGQGPGSAVDEHQDNVFFPSGRPPHLEELHTQAQEGLRSLQHQEKQKLNKGGWDHGDTQSIQSSRTGPDEDNISFCSQTTSYVAESSTAEDALSIRSEMIQRKDSQKELA

SEQ ID NO: 35159 - protein, 5537 aa, Homo sapiens
MDSQKLAGEDKDSEPAADGPAASEDPSATESDLPNPHVGEVSVLSSGSPRLQETPQDCSGGPVRRCALCNCGEPSLHGQRELRRFELPFDWPRCPVVSPGGSPGPNEAVLPSEDLSQIGFPEGLTPAHLGEPGGSCWAHHWCAAWSAGVWGQEGPELCGVDKAIFSGISQRCSHCTRLGASIPCRSPGCPRLYHFPCATASGSFLSMKTLQLLCPEHSEGAAYLEEARCAVCEGPGELCDLFFCTSCGHHYHGACLDTALTARKRAGWQCPECKVCQACRKPGNDSKMLVCETCDKGYHTFCLKPPMEELPAHSWKCKACRVCRACGAGSAELNPNSEWFENYSLCHRCHKAQGGQTIRSVAEQHTPVCSRFSPPEPGDTPTDEPDALYVACQGQPKGGHVTSMQPKEPGPLQCEAKPLGKAGVQLEPQLEAPLNEEMPLLPPPEESPLSPPPEESPTSPPPEASRLSPPPEELPASPLPEALHLSRPLEESPLSPPPEESPLSPPPESSPFSPLEESPLSPPEESPPSPALETPLSPPPEASPLSPPFEESPLSPPPEELPTSPPPEASRLSPPPEESPMSPPPEESPMSPPPEASRLFPPFEESPLSPPPEESPLSPPPEASRLSPPPEDSPMSPPPEESPMSPPPEVSRLSPLPVVSRLSPPPEESPLSPPPEESPTSPPPEASRLSPPPEDSPTSPPPEDSPASPPPEDSLMSLPLEESPLLPLPEEPQLCPRSEGPHLSPRPEEPHLSPRPEEPHLSPQAEEPHLSPQPEEPCLCAVPEEPHLSPQAEGPHLSPQPEELHLSPQTEEPHLSPVPEEPCLSPQPEESHLSPQSEEPCLSPRPEESHLSPELEKPPLSPRPEKPPEEPGQCPAPEELPLFPPPGEPSLSPLLGEPALSEPGEPPLSPLPEELPLSPSGEPSLSPQLMPPDPLPPPLSPIITAAAPPALSPLGELEYPFGAKGDSDPESPLAAPILETPISPPPEANCTDPEPVPPMILPPSPGSPVGPASPILMEPLPPQCSPLLQHSLVPQNSPPSQCSPPALPLSVPSPLSPIGKVVGVSDEAELHEMETEKVSEPECPALEPSATSPLPSPMGDLSCPAPSPAPALDDFSGLGEDTAPLDGIDAPGSQPEPGQTPGSLASELKGSPVLLDPEELAPVTPMEVYPECKQTAGQGSPCEEQEEPRAPVAPTPPTLIKSDIVNEISNLSQGDASASFPGSEPLLGSPDPEGGGSLSMELGVSTDVSPARDEGSLRLCTDSLPETDDSLLCDAGTAISGGKAEGEKGRRRSSPARSRIKQGRSSSFPGRRRPRGGAHGGRGRGRARLKSTASSIETLVVADIDSSPSKEEEEEDDDTMQNTVVLFSNTDKFVLMQDMCVVCGSFGRGAEGHLLACSQCSQCYHPYCVNSKITKVMLLKGWRCVECIVCEVCGQASDPSRLLLCDDCDISYHTYCLDPPLLTVPKGGWKCKWCVSCMQCGAASPGFHCEWQNSYTHCGPCASLVTCPICHAPYVEEDLLIQCRHCERWMHAGCESLFTEDDVEQAADEGFDCVSCQPYVVKPVAPVAPPELVPMKVKEPEPQYFRFEGVWLTETGMALLRNLTMSPLHKRRQRRGRLGLPGEAGLEGSEPSDALGPDDKKDGDLDTDELLKGEGGVEHMECEIKLEGPVSPDVEPGKEETEESKKRKRKPYRPGIGGFMVRQRKSHTRTKKGPAAQAEVLSGDGQPDEVIPADLPAEGAVEQSLAEGDEKKKQQRRGRKKSKLEDMFPAYLQEAFFGKELLDLSRKALFAVGVGRPSFGLGTPKAKGDGGSERKELPTSQKGDDGPDIADEESRGLEGKADTPGPEDGGVKASPVPSDPEKPGTPGEGMLSSDLDRISTEELPKMESKDLQQLFKDVLGSEREQHLGCGTPGLEGSRTPLQRPFLQGGLPLGNLPSSSPMDSYPGLCQSPFLDSRERGGFFSPEPGEPDSPWTGSGGTTPSTPTTPTTEGEGDGLSYNQRSLQRWEKDEELGQLSTISPVLYANINFPNLKQDYPDWSSRCKQIMKLWRKVPAADKAPYLQKAKDNRAAHRINKVQKQAESQINKQTKVGDIARKTDRPALHLRIPPQPGALGSPPPAAAPTIFIGSPTTPAGLSTSADGFLKPPAGSVPGPDSPGELFLKLPPQVPAQVPSQDPFGLAPAYPLEPRFPTAPPTYPPYPSPTGAPAQPPMLGASSRPGAGQPGEFHTTPPGTPRHQPSTPDPFLKPRCPSLDNLAVPESPGVGGGKASEPLLSPPPFGESRKALEVKKEELGASSPSYGPPNLGFVDSPSSGTHLGGLELKTPDVFKAPLTPRASQVEPQSPGLGLRPQEPPPAQALAPSPPSHPDIFRPGSYTDPYAQPPLTPRPQPPPPESCCALPPRSLPSDPFSRVPASPQSQSSSQSPLTPRPLSAEAFCPSPVTPRFQSPDPYSRPPSRPQSRDPFAPLHKPPRPQPPEVAFKAGSLAHTSLGAGGFPAALPAGPAGELHAKVPSGQPPNFVRSPGTGAFVGTPSPMRFTFPQAVGEPSLKPPVPQPGLPPPHGINSHFGPGPTLGKPQSTNYTVATGNFHPSGSPLGPSSGSTGESYGLSPLRPPSVLPPPAPDGSLPYLSHGASQRSGITSPVEKREDPGTGMGSSLATAELPGTQDPGMSGLSQTELEKQRQRQRLRELLIRQQIQRNTLRQEKETAAAAAGAVGPPGSWGAEPSSPAFEQLSRGQTPFAGTQDKSSLVGLPPSKLSGPILGPGSFPSDDRLSRPPPPATPSSMDVNSRQLVGGSQAFYQRAPYPGSLPLQQQQQQLWQQQQATAATSMRFAMSARFPSTPGPELGRQALGSPLAGISTRLPGPGEPVPGPAGPAQFIELRHNVQKGLGPGGTPFPGQGPPQRPRFYPVSEDPHRLAPEGLRGLAVSGLPPQKPSAPPAPELNNSLHPTPHTKGPTLPTGLELVNRPPSSTELGRPNPLALEAGKLPCEDPELDDDFDAHKALEDDEELAHLGLGVDVAKGDDELGTLENLETNDPHLDDLLNGDEFDLLAYTDPELDTGDKKDIFNEHLRLVESANEKAEREALLRGVEPGPLGPEERPPPAADASEPRLASVLPEVKPKVEEGGRHPSPCQFTIATPKVEPAPAANSLGLGLKPGQSMMGSRDTRMGTGPFSSSGHTAEKASFGATGGPPAHLLTPSPLSGPGGSSLLEKFELESGALTLPGGPAASGDELDKMESSLVASELPLLIEDLLEHEKKELQKKQQLSAQLQPAQQQQQQQQQHSLLSAPGPAQAMSLPHEGSSPSLAGSQQQLSLGLAGARQPGLPQPLMPTQPPAHALQQRLAPSMAMVSNQGHMLSGQHGGQAGLVPQQSSQPVLSQKPMGTMPPSMCMKPQQLAMQQQLANSFFPDTDLDKFAAEDIIDPIAKAKMVALKGIKKVMAQGSIGVAPGMNRQQVSLLAQRLSGGPSSDLQNHVAAGSGQERSAGDPSQPRPNPPTFAQGVINEADQRQYEEWLFHTQQLLQMQLKVLEEQIGVHRKSRKALCAKQRTAKKAGREFPEADAEKLKLVTEQQSKIQKQLDQVRKQQKEHTNLMAEYRNKQQQQQQQQQQQQQQHSAVLALSPSQSPRLLTKLPGQLLPGHGLQPPQGPPGGQAGGLRLTPGGMALPGQPGGPFLNTALAQQQQQQHSGGAGSLAGPSGGFFPGNLALRSLGPDSRLLQERQLQLQQQRMQLAQKLQQQQQQQQQQQHLLGQVAIQQQQQQGPGVQTNQALGPKPQGLMPPSSHQGLLVQQLSPQPPQGPQGMLGPAQVAVLQQQHPGALGPQGPHRQVLMTQSRVLSSPQLAQQGQGLMGHRLVTAQQQQQQQQHQQQGSMAGLSHLQQSLMSHSGQPKLSAQPMGSLQQLQQQQQLQQQQQLQQQQQQQLQQQQQLQQQQLQQQQQQQQLQQQQQQQLQQQQQQLQQQQQQQQQQFQQQQQQQQMGLLNQSRTLLSPQQQQQQQVALGPGMPAKPLQHFSSPGALGPTLLLTGKEQNTVDPAVSSEATEGPSTHQGGPLAIGTTPESMATEPGEVKPSLSGDSQLLLVQPQPQPQPSSLQLQPPLRLPGQQQQQVSLLHTAGGGSHGQLGSGSSSEASSVPHLLAQPSVSLGDQPGSMTQNLLGPQQPMLERPMQNNTGPQPPKPGPVLQSGQGLPGVGIMPTVGQLRAQLQGVLAKNPQLRHLSPQQQQQLQALLMQRQLQQSQAVRQTPPYQEPGTQTSPLQGLLGCQPQLGGFPGPQTGPLQELGAGPRPQGPPRLPAPPGALSTGPVLGPVHPTPPPSSPQEPKRPSQLPSPSSQLPTEAQLPPTHPGTPKPQGPTLEPPPGRVSPAAAQLADTLFSKGLGPWDPPDNLAETQKPEQSSLVPGHLDQVNGQVVPEASQLSIKQEPREEPCALGAQSVKREANGEPIGAPGTSNHLLLAGPRSEAGHLLLQKLLRAKNVQLSTGRGSEGLRAEINGHIDSKLAGLEQKLQGTPSNKEDAAARKPLTPKPKRVQKASDRLVSSRKKLRKEDGVRASEALLKQLKQELSLLPLTEPAITANFSLFAPFGSGCPVNGQSQLRGAFGSGALPTGPDYYSQLLTKNNLSNPPTPPSSLPPTPPPSVQQKMVNGVTPSEELGEHPKDAASARDSERALRDTSEVKSLDLLAALPTPPHNQTEDVRMESDEDSDSPDSIVPASSPESILGEEAPRFPHLGSGRWEQEDRALSPVIPLIPRASIPVFPDTKPYGALGLEVPGKLPVTTWEKGKGSEVSVMLTVSAAAAKNLNGVMVAVAELLSMKIPNSYEVLFPESPARAGTEPKKGEAEGPGGKEKGLEGKSPDTGPDWLKQFDAVLPGYTLKSQLDILSLLKQESPAPEPPTQHSYTYNVSNLDVRQLSAPPPEEPSPPPSPLAPSPASPPTEPLVELPTEPLAEPPVPSPLPLASSPESARPKPRARPPEEGEDSRPPRLKKWKGVRWKRLRLLLTIQKGSGRQEDEREVAEFMEQLGTALRPDKVPRDMRRCCFCHEEGDGATDGPARLLNLDLDLWVHLNCALWSTEVYETQGGALMNVEVALHRGLLTKCSLCQRTGATSSCNRMRCPNVYHFACAIRAKCMFFKDKTMLCPMHKIKGPCEQELSSFAVFRRVYIERDEVKQIASIIQRGERLHMFRVGGLVFHAIGQLLPHQMADFHSATALYPVGYEATRIYWSLRTNNRRCCYRCSIGENNGRPEFVIKVIEQGLEDLVFTDASPQAVWNRIIEPVAAMRKEADMLRLFPEYLKGEELFGLTVHAVLRIAESLPGVESCQNYLFRYGRHPLMELPLMINPTGCARSEPKILTHYKRPHTLNSTSMSKAYQSTFTGETNTPYSKQFVHSKSSQYRRLRTEWKNNVYLARSRIQGLGLYAAKDLEKHTMVIEYIGTIIRNEVANRREKIYEEQNRGIYMFRINNEHVIDATLTGGPARYINHSCAPNCVAEVVTFDKEDKIIIISSRRIPKGEELTYDYQFDFEDDQHKIPCHCGAWNCRKWMN

SEQ ID NO: 35160 - protein, 5540 aa, Homo sapiens
MDSQKLAGEDKDSEPAADGPAASEDPSATESDLPNPHVGEVSVLSSGSPRLQETPQDCSGGPVRRCALCNCGEPSLHGQRELRRFELPFDWPRCPVVSPGGSPGPNEAVLPSEDLSQIGFPEGLTPAHLGEPGGSCWAHHWCAAWSAGVWGQEGPELCGVDKAIFSGISQRCSHCTRLGASIPCRSPGCPRLYHFPCATASGSFLSMKTLQLLCPEHSEGAAYLEEARCAVCEGPGELCDLFFCTSCGHHYHGACLDTALTARKRAGWQCPECKVCQACRKPGNDSKMLVCETCDKGYHTFCLKPPMEELPAHSWKCKACRVCRACGAGSAELNPNSEWFENYSLCHRCHKAQGGQTIRSVAEQHTPVCSRFSPPEPGDTPTDEPDALYVACQGQPKGGHVTSMQPKEPGPLQCEAKPLGKAGVQLEPQLEAPLNEEMPLLPPPEESPLSPPPEESPTSPPPEASRLSPPPEELPASPLPEALHLSRPLEESPLSPPPEESPLSPPPESSPFSPLEESPLSPPEESPPSPALETPLSPPPEASPLSPPFEESPLSPPPEELPTSPPPEASRLSPPPEESPMSPPPEESPMSPPPEASRLFPPFEESPLSPPPEESPLSPPPEASRLSPPPEDSPMSPPPEESPMSPPPEVSRLSPLPVVSRLSPPPEESPLSPPPEESPTSPPPEASRLSPPPEDSPTSPPPEDSPASPPPEDSLMSLPLEESPLLPLPEEPQLCPRSEGPHLSPRPEEPHLSPRPEEPHLSPQAEEPHLSPQPEEPCLCAVPEEPHLSPQAEGPHLSPQPEELHLSPQTEEPHLSPVPEEPCLSPQPEESHLSPQSEEPCLSPRPEESHLSPELEKPPLSPRPEKPPEEPGQCPAPEELPLFPPPGEPSLSPLLGEPALSEPGEPPLSPLPEELPLSPSGEPSLSPQLMPPDPLPPPLSPIITAAAPPALSPLGELEYPFGAKGDSDPESPLAAPILETPISPPPEANCTDPEPVPPMILPPSPGSPVGPASPILMEPLPPQCSPLLQHSLVPQNSPPSQCSPPALPLSVPSPLSPIGKVVGVSDEAELHEMETEKVSEPECPALEPSATSPLPSPMGDLSCPAPSPAPALDDFSGLGEDTAPLDGIDAPGSQPEPGQTPGSLASELKGSPVLLDPEELAPVTPMEVYPECKQTAGQGSPCEEQEEPRAPVAPTPPTLIKSDIVNEISNLSQGDASASFPGSEPLLGSPDPEGGGSLSMELGVSTDVSPARDEGSLRLCTDSLPETDDSLLCDAGTAISGGKAEGEKGRRRSSPARSRIKQGRSSSFPGRRRPRGGAHGGRGRGRARLKSTASSIETLVVADIDSSPSKEEEEEDDDTMQNTVVLFSNTDKFVLMQDMCVVCGSFGRGAEGHLLACSQCSQCYHPYCVNSKITKVMLLKGWRCVECIVCEVCGQASDPSRLLLCDDCDISYHTYCLDPPLLTVPKGGWKCKWCVSCMQCGAASPGFHCEWQNSYTHCGPCASLVTCPICHAPYVEEDLLIQCRHCERWMHAGCESLFTEDDVEQAADEGFDCVSCQPYVVKPVAPVAPPELVPMKVKEPEPQYFRFEGVWLTETGMALLRNLTMSPLHKRRQRRGRLGLPGEAGLEGSEPSDALGPDDKKDGDLDTDELLKGEGGVEHMECEIKLEGPVSPDVEPGKEETEESKKRKRKPYRPGIGGFMVRQRKSHTRTKKGPAAQAEVLSGDGQPDEGETVIPADLPAEGAVEQSLAEGDEKKKQQRRGRKKSKLEDMFPAYLQEAFFGKELLDLSRKALFAVGVGRPSFGLGTPKAKGDGGSERKELPTSQKGDDGPDIADEESRGLEGKADTPGPEDGGVKASPVPSDPEKPGTPGEGMLSSDLDRISTEELPKMESKDLQQLFKDVLGSEREQHLGCGTPGLEGSRTPLQRPFLQGGLPLGNLPSSSPMDSYPGLCQSPFLDSRERGGFFSPEPGEPDSPWTGSGGTTPSTPTTPTTEGEGDGLSYNQRSLQRWEKDEELGQLSTISPVLYANINFPNLKQDYPDWSSRCKQIMKLWRKVPAADKAPYLQKAKDNRAAHRINKVQKQAESQINKQTKVGDIARKTDRPALHLRIPPQPGALGSPPPAAAPTIFIGSPTTPAGLSTSADGFLKPPAGSVPGPDSPGELFLKLPPQVPAQVPSQDPFGLAPAYPLEPRFPTAPPTYPPYPSPTGAPAQPPMLGASSRPGAGQPGEFHTTPPGTPRHQPSTPDPFLKPRCPSLDNLAVPESPGVGGGKASEPLLSPPPFGESRKALEVKKEELGASSPSYGPPNLGFVDSPSSGTHLGGLELKTPDVFKAPLTPRASQVEPQSPGLGLRPQEPPPAQALAPSPPSHPDIFRPGSYTDPYAQPPLTPRPQPPPPESCCALPPRSLPSDPFSRVPASPQSQSSSQSPLTPRPLSAEAFCPSPVTPRFQSPDPYSRPPSRPQSRDPFAPLHKPPRPQPPEVAFKAGSLAHTSLGAGGFPAALPAGPAGELHAKVPSGQPPNFVRSPGTGAFVGTPSPMRFTFPQAVGEPSLKPPVPQPGLPPPHGINSHFGPGPTLGKPQSTNYTVATGNFHPSGSPLGPSSGSTGESYGLSPLRPPSVLPPPAPDGSLPYLSHGASQRSGITSPVEKREDPGTGMGSSLATAELPGTQDPGMSGLSQTELEKQRQRQRLRELLIRQQIQRNTLRQEKETAAAAAGAVGPPGSWGAEPSSPAFEQLSRGQTPFAGTQDKSSLVGLPPSKLSGPILGPGSFPSDDRLSRPPPPATPSSMDVNSRQLVGGSQAFYQRAPYPGSLPLQQQQQQLWQQQQATAATSMRFAMSARFPSTPGPELGRQALGSPLAGISTRLPGPGEPVPGPAGPAQFIELRHNVQKGLGPGGTPFPGQGPPQRPRFYPVSEDPHRLAPEGLRGLAVSGLPPQKPSAPPAPELNNSLHPTPHTKGPTLPTGLELVNRPPSSTELGRPNPLALEAGKLPCEDPELDDDFDAHKALEDDEELAHLGLGVDVAKGDDELGTLENLETNDPHLDDLLNGDEFDLLAYTDPELDTGDKKDIFNEHLRLVESANEKAEREALLRGVEPGPLGPEERPPPAADASEPRLASVLPEVKPKVEEGGRHPSPCQFTIATPKVEPAPAANSLGLGLKPGQSMMGSRDTRMGTGPFSSSGHTAEKASFGATGGPPAHLLTPSPLSGPGGSSLLEKFELESGALTLPGGPAASGDELDKMESSLVASELPLLIEDLLEHEKKELQKKQQLSAQLQPAQQQQQQQQQHSLLSAPGPAQAMSLPHEGSSPSLAGSQQQLSLGLAGARQPGLPQPLMPTQPPAHALQQRLAPSMAMVSNQGHMLSGQHGGQAGLVPQQSSQPVLSQKPMGTMPPSMCMKPQQLAMQQQLANSFFPDTDLDKFAAEDIIDPIAKAKMVALKGIKKVMAQGSIGVAPGMNRQQVSLLAQRLSGGPSSDLQNHVAAGSGQERSAGDPSQPRPNPPTFAQGVINEADQRQYEEWLFHTQQLLQMQLKVLEEQIGVHRKSRKALCAKQRTAKKAGREFPEADAEKLKLVTEQQSKIQKQLDQVRKQQKEHTNLMAEYRNKQQQQQQQQQQQQQQHSAVLALSPSQSPRLLTKLPGQLLPGHGLQPPQGPPGGQAGGLRLTPGGMALPGQPGGPFLNTALAQQQQQQHSGGAGSLAGPSGGFFPGNLALRSLGPDSRLLQERQLQLQQQRMQLAQKLQQQQQQQQQQQHLLGQVAIQQQQQQGPGVQTNQALGPKPQGLMPPSSHQGLLVQQLSPQPPQGPQGMLGPAQVAVLQQQHPGALGPQGPHRQVLMTQSRVLSSPQLAQQGQGLMGHRLVTAQQQQQQQQHQQQGSMAGLSHLQQSLMSHSGQPKLSAQPMGSLQQLQQQQQLQQQQQLQQQQQQQLQQQQQLQQQQLQQQQQQQQLQQQQQQQLQQQQQQLQQQQQQQQQQFQQQQQQQQMGLLNQSRTLLSPQQQQQQQVALGPGMPAKPLQHFSSPGALGPTLLLTGKEQNTVDPAVSSEATEGPSTHQGGPLAIGTTPESMATEPGEVKPSLSGDSQLLLVQPQPQPQPSSLQLQPPLRLPGQQQQQVSLLHTAGGGSHGQLGSGSSSEASSVPHLLAQPSVSLGDQPGSMTQNLLGPQQPMLERPMQNNTGPQPPKPGPVLQSGQGLPGVGIMPTVGQLRAQLQGVLAKNPQLRHLSPQQQQQLQALLMQRQLQQSQAVRQTPPYQEPGTQTSPLQGLLGCQPQLGGFPGPQTGPLQELGAGPRPQGPPRLPAPPGALSTGPVLGPVHPTPPPSSPQEPKRPSQLPSPSSQLPTEAQLPPTHPGTPKPQGPTLEPPPGRVSPAAAQLADTLFSKGLGPWDPPDNLAETQKPEQSSLVPGHLDQVNGQVVPEASQLSIKQEPREEPCALGAQSVKREANGEPIGAPGTSNHLLLAGPRSEAGHLLLQKLLRAKNVQLSTGRGSEGLRAEINGHIDSKLAGLEQKLQGTPSNKEDAAARKPLTPKPKRVQKASDRLVSSRKKLRKEDGVRASEALLKQLKQELSLLPLTEPAITANFSLFAPFGSGCPVNGQSQLRGAFGSGALPTGPDYYSQLLTKNNLSNPPTPPSSLPPTPPPSVQQKMVNGVTPSEELGEHPKDAASARDSERALRDTSEVKSLDLLAALPTPPHNQTEDVRMESDEDSDSPDSIVPASSPESILGEEAPRFPHLGSGRWEQEDRALSPVIPLIPRASIPVFPDTKPYGALGLEVPGKLPVTTWEKGKGSEVSVMLTVSAAAAKNLNGVMVAVAELLSMKIPNSYEVLFPESPARAGTEPKKGEAEGPGGKEKGLEGKSPDTGPDWLKQFDAVLPGYTLKSQLDILSLLKQESPAPEPPTQHSYTYNVSNLDVRQLSAPPPEEPSPPPSPLAPSPASPPTEPLVELPTEPLAEPPVPSPLPLASSPESARPKPRARPPEEGEDSRPPRLKKWKGVRWKRLRLLLTIQKGSGRQEDEREVAEFMEQLGTALRPDKVPRDMRRCCFCHEEGDGATDGPARLLNLDLDLWVHLNCALWSTEVYETQGGALMNVEVALHRGLLTKCSLCQRTGATSSCNRMRCPNVYHFACAIRAKCMFFKDKTMLCPMHKIKGPCEQELSSFAVFRRVYIERDEVKQIASIIQRGERLHMFRVGGLVFHAIGQLLPHQMADFHSATALYPVGYEATRIYWSLRTNNRRCCYRCSIGENNGRPEFVIKVIEQGLEDLVFTDASPQAVWNRIIEPVAAMRKEADMLRLFPEYLKGEELFGLTVHAVLRIAESLPGVESCQNYLFRYGRHPLMELPLMINPTGCARSEPKILTHYKRPHTLNSTSMSKAYQSTFTGETNTPYSKQFVHSKSSQYRRLRTEWKNNVYLARSRIQGLGLYAAKDLEKHTMVIEYIGTIIRNEVANRREKIYEEQNRGIYMFRINNEHVIDATLTGGPARYINHSCAPNCVAEVVTFDKEDKIIIISSRRIPKGEELTYDYQFDFEDDQHKIPCHCGAWNCRKWMN

SEQ ID NO: 35161 - protein, 137 aa, Homo sapiens
MSYNCSSGNFSSCCFGSYLRYPVSTYNLFYPSNAIYSPNTCQLGSSLYNGCQETYCEPTSCQTSCTLARSYQTSCYCPKNSIFCSPRQTNYIRSLGCGNTGLGSLGCGSTGFQSLDCGSSFYHPTTFSSRNFQATCY

SEQ ID NO: 35162 - protein, 245 aa, Homo sapiens
MSVCSSDLSYGSRVCLPGSCDSCSDSWQVDDCPESCCEPPCCAPAPCLSLVCTPVSRVSSPCCRVTCEPSPCQSGCTSSCTPSCCQQSSCQPACCTSSPCQQACCVPVCCKTVCCKPVCCMPVCCGPSSSCCQQSSCQPACCISSPCQQSCCVPVCCKPICCVPVCSGASSLCCQQSSCQPACCTTSCCRPSSSVSLLCRPVCRPARRVPVPSCCVPTSSCQPSCGRLASCGSLLCRPTCSRLAC

SEQ ID NO: 35163 - protein, 56 aa, Homo sapiens
MIYYSNYYGGYGYGGLGCGYGCGYRGYGCGYGGYGGYGNGYYCPSCYGRYWSYGFY

SEQ ID NO: 35164 - protein, 12 aa, Homo sapiens
WTFGQGTKVEIK

SEQ ID NO: 35165 - protein, 259 aa, Homo sapiens
MERKINRREKEKEYEGKHNSLEDTDQGKNCKSTLMTLNVGGYLYITQKQTLTKYPDTFLEGIVNGKILCPFDADGHYFIDRDGLLFRHVLNFLRNGELLLPEGFRENQLLAQEAEFFQLKGLAEEVKSRWEKEQLTPRETTFLEITDNHDRSQGLRIFCNAPDFISKIKSRIVLVSKSRLDGFPEEFSISSNIIQFKYFIKSENGTRLVLKEDNTFVCTLETLKFEAIMMALKCGFRLLTSLDCSKGSIVHSDALHFIK

SEQ ID NO: 35166 - protein, 63 aa, Homo sapiens
MSYYRSYYGGLGYGYGGFGGWGYGYGCGYGSFRRLGYGCGYGGYGFSCCRPLYYGGYGFSAFY

SEQ ID NO: 35167 - protein, 504 aa, Homo sapiens
MSVQVAAPGSAGLGPERLSPEELVRQTRQVVQGLEALRAEHHGLAGHLAEALAGQGPAAGLEMLEEKQQVVSHSLEAIELGLGEAQVLLALSAHVGALEAEKQRLRSQARRLAQENVWLREELEETQRRLRASEESVAQLEEEKRHLEFLGQLRQYDPPAESQQSESPPRRDSLASLFPSEEEERKGPEAAGAAAAQQGGYEIPARLRTLHNLVIQYAGQGRYEVAVPLCRQALEDLERSSGHCHPDVATMLNILALVYRDQNKYKEATDLLHDALQIREQTLGPEHPAVAATLNNLAVLYGKRGRYREAEPLCQRALEIREKVLGADHPDVAKQLNNLALLCQNQGKFEDVERHYARALSIYEALGGPHDPNVAKTKNNLASAYLKQNKYQQAEELYKEILHKEDLPAPLGAPNTGTAGDAEQALRRSSSLSKIRESIRRGSEKLVSRLRGEAAAGAAGMKRAMSLNTLNVDAPRAPGTQFPSWHLDKAPRTLSASTQDLSPH

SEQ ID NO: 35168 - protein, 503 aa, Homo sapiens
MSVQVAAPGSAGLGPERLSPEELVRQTRQVVQGLEALRAEHHGLAGHLAEALAGQGPAAGLEMLEEKQQVVSHSLEAIELGLGEAQVLLALSAHVGALEAEKQRLRSQARRLAQENVWLREELEETQRRLRASEESVAQLEEEKRHLEFLGQLRQYDPPAESQSESPPRRDSLASLFPSEEEERKGPEAAGAAAAQQGGYEIPARLRTLHNLVIQYAGQGRYEVAVPLCRQALEDLERSSGHCHPDVATMLNILALVYRDQNKYKEATDLLHDALQIREQTLGPEHPAVAATLNNLAVLYGKRGRYREAEPLCQRALEIREKVLGADHPDVAKQLNNLALLCQNQGKFEDVERHYARALSIYEALGGPHDPNVAKTKNNLASAYLKQNKYQQAEELYKEILHKEDLPAPLGAPNTGTAGDAEQALRRSSSLSKIRESIRRGSEKLVSRLRGEAAAGAAGMKRAMSLNTLNVDAPRAPGTQFPSWHLDKAPRTLSASTQDLSPH

SEQ ID NO: 35169 - protein, 518 aa, Homo sapiens
MIPQTPHHCSPGAAMSVQVAAPGSAGLGPERLSPEELVRQTRQVVQGLEALRAEHHGLAGHLAEALAGQGPAAGLEMLEEKQQVVSHSLEAIELGLGEAQVLLALSAHVGALEAEKQRLRSQARRLAQENVWLREELEETQRRLRASEESVAQLEEEKRHLEFLGQLRQYDPPAESQQSESPPRRDSLASLFPSEEEERKGPEAAGAAAAQQGGYEIPARLRTLHNLVIQYAGQGRYEVAVPLCRQALEDLERSSGHCHPDVATMLNILALVYRDQNKYKEATDLLHDALQIREQTLGPEHPAVAATLNNLAVLYGKRGRYREAEPLCQRALEIREKVLGADHPDVAKQLNNLALLCQNQGKFEDVERHYARALSIYEALGGPHDPNVAKTKNNLASAYLKQNKYQQAEELYKEILHKEDLPAPLGAPNTGTAGDAEQALRRSSSLSKIRESIRRGSEKLVSRLRGEAAAGAAGMKRAMSLNTLNVDAPRAPGTQFPSWHLDKAPRTLSASTQDLSPH

SEQ ID NO: 35170 - protein, 207 aa, Homo sapiens
MPHSHCHSLRSFHNAPPLSAITHGTNPITFEDRLCLPSSFHSRTCFLDNFQETCNETTSCQMTNCEQDLFTDDSCVQSNCFPGVVQTTYSNSRPCERTACQSESSSAGLACVSQPCQSESTQQMGFVAQSCQPASLKGNSCPPKTSKSKNFETLERASSQCQCQSQNPESSSCRPLVNVAPEPQLLESSPGVEPTCCVTGGSQLPSK

SEQ ID NO: 35171 - protein, 676 aa, Homo sapiens
MAPFLRIAFNSYELGSLQAEDEANQPFCAVKMKEALSTERGKTLVQKKPTMYPEWKSTFDAHIYEGRVIQIVLMRAAEEPVSEVTVGVSVLAERCKKNNGKAEFWLDLQPQAKVLMSVQYFLEDVDCKQSMRSEDEAKFPTMNRRGAIKQAKIHYIKNHEFIATFFGQPTFCSVCKDFVWGLNKQGYKCRQCNAAIHKKCIDKIIGRCTGTAANSRDTIFQKERFNIDMPHRFKVHNYMSPTFCDHCGSLLWGLVKQGLKCEDCGMNVHHKCREKVANLCGINQKLLAEALNQVTQRASRRSDSASSEPVGIYQGFEKKTGVAGEDMQDNSGTYGKIWEGSSKCNINNFIFHKVLGKGSFGKVLLGELKGRGEYFAIKALKKDVVLIDDDVECTMVEKRVLTLAAENPFLTHLICTFQTKDHLFFVMEFLNGGDLMYHIQDKGRFELYRATFYAAEIMCGLQFLHSKGIIYRDLKLDNVLLDRDGHIKIADFGMCKENIFGESRASTFCGTPDYIAPEILQGLKYTFSVDWWSFGVLLYEMLIGQSPFHGDDEDELFESIRVDTPHYPRWITKESKDILEKLFEREPTKRLGVTGNIKIHPFFKTINWTLLEKRRLEPPFRPKVKSPRDYSNFDQEFLNEKARLSYSDKNLIDSMDQSAFAGFSFVNPKFEHLLED

SEQ ID NO: 35172 - protein, 707 aa, Homo sapiens
MAPFLRIAFNSYELGSLQAEDEANQPFCAVKMKEALSTERGKTLVQKKPTMYPEWKSTFDAHIYEGRVIQIVLMRAAEEPVSEVTVGVSVLAERCKKNNGKAEFWLDLQPQAKVLMSVQYFLEDVDCKQSMRSEDEAKFPTMNRRGAIKQAKIHYIKNHEFIATFFGQPTFCSVCKDFVWGLNKQGYKCRQCNAAIHKKCIDKIIGRCTGTAANSRDTIFQKERFNIDMPHRFKVHNYMSPTFCDHCGSLLWGLVKQGLKCEDCGMNVHHKCREKVANLCGINQKLLAEALNQVTQRASRRSDSASSEPVGIYQGFEKKTGVAGEDMQGEAGSIAPLRFLFPLRPKKGDCPPFHCQVRQDNSGTYGKIWEGSSKCNINNFIFHKVLGKGSFGKVLLGELKGRGEYFAIKALKKDVVLIDDDVECTMVEKRVLTLAAENPFLTHLICTFQTKDHLFFVMEFLNGGDLMYHIQDKGRFELYRATFYAAEIMCGLQFLHSKGIIYRDLKLDNVLLDRDGHIKIADFGMCKENIFGESRASTFCGTPDYIAPEILQGLKYTFSVDWWSFGVLLYEMLIGQSPFHGDDEDELFESIRVDTPHYPRWITKESKDILEKLFEREPTKRLGVTGNIKIHPFFKTINWTLLEKRRLEPPFRPKVKSPRDYSNFDQEFLNEKARLSYSDKNLIDSMDQSAFAGFSFVNPKFEHLLED

SEQ ID NO: 35173 - protein, 159 aa, Homo sapiens
MTHCCSPCCQPTCCRTTCWQPTTVTTCSSTPCCQPSCCVSSCCQPCCHPTCCQNTCCRTTCCQPICVTSCCQPSCCSTPCCQPTCCGSSCGQSSSCAPVYCRRTCYHPTSVCLPGCLNQSCGSNCCQPCCRPACCETTCCRTTCFQPTCVYSCCQPSCC

SEQ ID NO: 35174 - protein, 512 aa, Homo sapiens
MHTPDFAGPDDARAVDIMDICESILERKRHDSERSTCSILEQTDMEAVEALVCMSSWGQRSQKGDLLRIRPLTPVSDSGDVTTTVHMDAATPELPKDFHSLSTLCITPPQSPDLVEPSTRTPVSPQVTDSKACTATDVLQSSAVVARALSGGAERGLLGLEPVPSSPCRAKGTSVIRHTGESPAACFPTIQTPDCRLSDSREGEEQLLGHFETLQDTHLTDSLLSTNLVSCQPCLHKSGGLLLTDKGQQAGWPGAVQTCSPKNYENDLPRKTTPLISVSVPAPPVLCQMIPVTGQSSMLPAFLKPPPQLSVGTVRPILAQAAPAPQPVFVGPAVPQGAVMLVLPQGALPPPAPCAANVMAAGNTKLLPLAPAPVFITSSQNCVPQVDFSRRRNYVCSFPGCRKTYFKSSHLKAHLRTHTGEKPFNCSWDGCDKKFARSDELSRHRRTHTGEKKFVCPVCDRRFMRSDHLTKHARRHMTTKKIPGWQAEVGKLNRIASAESPGSPLVSMPASA

SEQ ID NO: 35175 - protein, 495 aa, Homo sapiens
MDICESILERKRHDSERSTCSILEQTDMEAVEALVCMSSWGQRSQKGDLLRIRPLTPVSDSGDVTTTVHMDAATPELPKDFHSLSTLCITPPQSPDLVEPSTRTPVSPQVTDSKACTATDVLQSSAVVARALSGGAERGLLGLEPVPSSPCRAKGTSVIRHTGESPAACFPTIQTPDCRLSDSREGEEQLLGHFETLQDTHLTDSLLSTNLVSCQPCLHKSGGLLLTDKGQQAGWPGAVQTCSPKNYENDLPRKTTPLISVSVPAPPVLCQMIPVTGQSSMLPAFLKPPPQLSVGTVRPILAQAAPAPQPVFVGPAVPQGAVMLVLPQGALPPPAPCAANVMAAGNTKLLPLAPAPVFITSSQNCVPQVDFSRRRNYVCSFPGCRKTYFKSSHLKAHLRTHTGEKPFNCSWDGCDKKFARSDELSRHRRTHTGEKKFVCPVCDRRFMRSDHLTKHARRHMTTKKIPGWQAEVGKLNRIASAESPGSPLVSMPASA

SEQ ID NO: 35176 - protein, 359 aa, Homo sapiens
MVDMDKLINNLEVQLNSEGGSMQVFKQVTASVRNRDPPEIEYRSNMTSPTLLDANPMENPALFNDIKIEPPEELLASDFSLPQVEPVDLSFHKPKAPLQPASMLQAPIRPPKPQSSPQTLVVSTSTSDMSTSANIPTVLTPGSVLTSSQSTGSQQILHVIHTIPSVSLPNKMGGLKTIPVVVQSLPMVYTTLPADGGPAAITVPLIGGDGKNAGSVKVDPTSMSPLEIPSDSEESTIESGSSALQSLQGLQQEPAAMAQMQGEESLDLKRRRIHQCDFAGCSKVYTKSSHLKAHRRIHTGEKPYKCTWDGCSWKFARSDELTRHFRKHTGIKPFRCTDCNRSFSRSDHLSLHRRRHDTM

SEQ ID NO: 35177 - protein, 257 aa, Homo sapiens
MVDMDKLINNLEVQLNSEGGSMQVFKQVTASVRNRDPPEIEYRSNMTSPTLLDANPMENPALFNDIKIEPPEELLASDFSLPQVEPVDLSFHKPKAPLQPASMLQAPIRPPKPQSSPQTLVVSTSTSDMSTSANIPTVLTPGSVLTSSQSTGSQQILHVIHTIPSVSLPNKMGGLKTIPVVVQSLPMVYTTLPADGGPAAITVPLIGGDGKNAGSVKVDPTSMSPLEIPSDSEESTIESGSSALQSLQGLQQEREAL

SEQ ID NO: 35178 - protein, 252 aa, Homo sapiens
MSLPEDGMSSGHFRSPQLVTWSVTASVRNRDPPEIEYRSNMTSPTLLDANPMENPALFNDIKIEPPEELLASDFSLPQVEPVDLSFHKPKAPLQPASMLQAPIRPPKPQSSPQTLVVSTSTSDMSTSANIPTVLTPGSVLTSSQSTGSQQILHVIHTIPSVSLPNKMGGLKTIPVVVQSLPMVYTTLPADGGPAAITVPLIGGDGKNAGSVKVDPTSMSPLEIPSDSEESTIESGSSALQSLQGLQQEREAL

SEQ ID NO: 35179 - protein, 275 aa, Homo sapiens
MVDMDKLINNLEVQLNSEGGSMQVFKQVTASVRNRDPPEIEYRSNMTSPTLLDANPMENPALFNDIKIEPPEELLASDFSLPQVEPVDLSFHKPKAPLQPASMLQAPIRPPKPQSSPQTLVVSTSTSDMSTSANIPTVLTPGSVLTSSQSTGSQQILHVIHTIPSVSLPNKMGGLKTIPVVVQSLPMVYTTLPADGGPAAITVPLIGGDGKNAGSGEKPYKCTWDGCSWKFARSDELTRHFRKHTGIKPFRCTDCNRSFSRSDHLSLHRRRHDTM

SEQ ID NO: 35180 - protein, 457 aa, Homo sapiens
MATRVLSMSARLGPVPQPPAPQDEPVFAQLKPVLGAANPARDAALFPGEELKHAHHRPQAQPAPAQAPQPAQPPATGPRLPPEDLVQTRCEMEKYLTPQLPPVPIIPEHKKYRRDSASVVDQFFTDTEGLPYSINMNVFLPDITHLRTGLYKSQRPCVTHIKTEPVAIFSHQSETTAPPPAPTQALPEFTSIFSSHQTAAPEVNNIFIKQELPTPDLHLSVPTQQGHLYQLLNTPDLDMPSSTNQTAAMDTLNVSMSAAMAGLNTHTSAVPQTAVKQFQGMPPCTYTMPSQFLPQQATYFPPSPPSSEPGSPDRQAEMLQNLTPPPSYAATIASKLAIHNPNLPTTLPVNSQNIQPVRYNRRSNPDLEKRRIHYCDYPGCTKVYTKSSHLKAHLRTHTGEKPYKCTWEGCDWRFARSDELTRHYRKHTGAKPFQCGVCNRSFSRSDHLALHMKRHQN

SEQ ID NO: 35181 - protein, 305 aa, Homo sapiens
MATRVLSMSARLGPVPQPPAPQDEPVFAQLKPVLGAANPARDAALFPGEELKHAHHRPQAQPAPAQAPQPAQPPATGPRLPPEDLVQPSSTNQTAAMDTLNVSMSAAMAGLNTHTSAVPQTAVKQFQGMPPCTYTMPSQFLPQQATYFPPSPPSSEPGSPDRQAEMLQNLTPPPSYAATIASKLAIHNPNLPTTLPVNSQNIQPVRYNRRSNPDLEKRRIHYCDYPGCTKVYTKSSHLKAHLRTHTGEKPYKCTWEGCDWRFARSDELTRHYRKHTGAKPFQCGVCNRSFSRSDHLALHMKRHQN

SEQ ID NO: 35182 - protein, 166 aa, Homo sapiens
MATRVLSMSARLGPVPQPPAPQDEPVFAQLKPVLGAANPARDAALFPGEELKHAHHRPQAQPAPAQAPQPAQPPATGPRLPPEDLVQTRCEMEKYLTPQLPPVPMLLQLLLNWQFTIQIYPPPCQLTHKTSNLSDTIEGVTPIWRNDASTTAITLVAQKFIPSLLI

SEQ ID NO: 35183 - protein, 366 aa, Homo sapiens
MEKYLTPQLPPVPIIPEHKKYRRDSASVVDQFFTDTEGLPYSINMNVFLPDITHLRTGLYKSQRPCVTHIKTEPVAIFSHQSETTAPPPAPTQALPEFTSIFSSHQTAAPEVNNIFIKQELPTPDLHLSVPTQQGHLYQLLNTPDLDMPSSTNQTAAMDTLNVSMSAAMAGLNTHTSAVPQTAVKQFQGMPPCTYTMPSQFLPQQATYFPPSPPSSEPGSPDRQAEMLQNLTPPPSYAATIASKLAIHNPNLPTTLPVNSQNIQPVRYNRRSNPDLEKRRIHYCDYPGCTKVYTKSSHLKAHLRTHTGEKPYKCTWEGCDWRFARSDELTRHYRKHTGAKPFQCGVCNRSFSRSDHLALHMKRHQN

SEQ ID NO: 35184 - protein, 620 aa, Homo sapiens
MPSERCLSIQEMLTGQRLCHSESHNDSVLAALNQQRSDGILCDITLIAEEQKFHAHKAVLAACSDYFRAMFSLCMVESGADEVNLHGVTSLGLKQALEFAYTGQILLEPGVIQDVLAAGSHLQLLELLNLCSHYLIQELNSFNYLDLYRLADLFNLTLLEKAVIDFLVKHLSELLKSRPEEVLTLPYCLLQEVLKSDRLTSLSEEQIWQLAVRWLEHNCHYQYMDELLQYIRFGLMDVDTLHTVALSHPLVQASETATALVNEALEYHQSIYAQPVWQTRRTKPRFQSDTLYIIGGKKREVCKVKELRYFNPVDQENALIAAIANWSELAPMPVGRSHHCVAVMGDFLFVAGGEVEHASGRTCAVRTACRYDPRSNSWAEIAPMKNCREHFVLGAMEEYLYAVGGRNELRQVLPTVERYCPKKNKWTFVQSFDRSLSCHAGYVADGLLWISGGVTNTAQYQNRLMVYEPNQNKWISRSPMLQRRVYHSMAAVQRKLYVLGGNDLDYNNDRILVRHIDSYNIDTDQWTRCNFNLLTGQNESGVAVHNGRIYLVGGYSIWTNEPLACIQVLDVSREGKEEVFYGPTLPFASNGIAACFLPAPYFTCPNLQTLQVPHHRIGTI

SEQ ID NO: 35185 - protein, 584 aa, Homo sapiens
MPSERCLSIQEMLTGQRLCHSESHNDSVLAALNQQRSDGILCDITLIAEEQKFHAHKAVLAACSDYFRILLEPGVIQDVLAAGSHLQLLELLNLCSHYLIQELNSFNYLDLYRLADLFNLTLLEKAVIDFLVKHLSELLKSRPEEVLTLPYCLLQEVLKSDRLTSLSEEQIWQLAVRWLEHNCHYQYMDELLQYIRFGLMDVDTLHTVALSHPLVQASETATALVNEALEYHQSIYAQPVWQTRRTKPRFQSDTLYIIGGKKREVCKVKELRYFNPVDQENALIAAIANWSELAPMPVGRSHHCVAVMGDFLFVAGGEVEHASGRTCAVRTACRYDPRSNSWAEIAPMKNCREHFVLGAMEEYLYAVGGRNELRQVLPTVERYCPKKNKWTFVQSFDRSLSCHAGYVADGLLWISGGVTNTAQYQNRLMVYEPNQNKWISRSPMLQRRVYHSMAAVQRKLYVLGGNDLDYNNDRILVRHIDSYNIDTDQWTRCNFNLLTGQNESGVAVHNGRIYLVGGYSIWTNEPLACIQVLDVSREGKEEVFYGPTLPFASNGIAACFLPAPYFTCPNLQTLQVPHHRIGTI

SEQ ID NO: 35186 - protein, 551 aa, Homo sapiens
MPSERCLSIQEMLTGQRLCHSESHNDSVLAALNQQRSDGILCDITLIAEEQKFHAHKAVLAACSDYFRELNSFNYLDLYRLADLFNLTLLEKAVIDFLVKHLSELLKSRPEEVLTLPYCLLQEVLKSDRLTSLSEEQIWQLAVRWLEHNCHYQYMDELLQYIRFGLMDVDTLHTVALSHPLVQASETATALVNEALEYHQSIYAQPVWQTRRTKPRFQSDTLYIIGGKKREVCKVKELRYFNPVDQENALIAAIANWSELAPMPVGRSHHCVAVMGDFLFVAGGEVEHASGRTCAVRTACRYDPRSNSWAEIAPMKNCREHFVLGAMEEYLYAVGGRNELRQVLPTVERYCPKKNKWTFVQSFDRSLSCHAGYVADGLLWISGGVTNTAQYQNRLMVYEPNQNKWISRSPMLQRRVYHSMAAVQRKLYVLGGNDLDYNNDRILVRHIDSYNIDTDQWTRCNFNLLTGQNESGVAVHNGRIYLVGGYSIWTNEPLACIQVLDVSREGKEEVFYGPTLPFASNGIAACFLPAPYFTCPNLQTLQVPHHRIGTI

SEQ ID NO: 35187 - protein, 571 aa, Homo sapiens
MDHTSPTYMLANLTHLHSEQLLQGLNLLRQHHELCDIILRVGDVKIHAHKVVLASVSPYFKAMFTGNLSEKENSEVEFQCIDETALQAIVEYAYTGTVFISQDTVESLLPAANLLQIKLVLKECCAFLESQLDPGNCIGISRFAETYGCRDLYLAATKYICQNFEAVCQTEEFFELTHADLDEIVSNDCLNVATEETVFYALESWIKYDVQERQKYLAQLLNSVRLPLLSVKFLTRLYEANHLIRDDRTCKHLLNEALKYHFMPEHRLSHQTVLMTRPRCAPKVLCAVGGKSGLFACLDSVEMYFPQNDSWIGLAPLNIPRYEFGICVLDQKVYVIGGIATNVRPGVTIRKHENSVECWNPDTNTWTSLERMNESRSTLGVVVLAGELYALGGYDGQSYLQSVEKYIPKIRKWQPVAPMTTTRSCFAAAVLDGMIYAIGGYGPAHMNSVERYDPSKDSWEMVASMADKRIHFGVGVMLGFIFVVGGHNGVSHLSSIERYDPHQNQWTVCRPMKEPRTGVGAAVIDNYLYVVGGHSGSSYLNTVQKYDPISDTWLDSAGMIYCRCNFGLTAL

SEQ ID NO: 35188 - protein, 300 aa, Homo sapiens
MDHTSPTYMLANLTHLHSEQLLQGLNLLRQHHELCDIILRVGDVKIHAHKVVLASVSPYFKAMFTGNLSEKENSEVEFQCIDETALQAIVEYAYTGTVFISQDTVESLLPAANLLQIKLVLKECCAFLESQLDPGNCIGISRFAETYGCRDLYLAATKYICQNFEAVCQTEEFFELTHADLDEIVSNDCLNVATEETVFYALESWIKYDVQERQKYLAQLLNSVRLPLLSVKFLTRLYEANHLIRDDRTCKHLLNEALKYHFMPEHRLSHQTVLMTRPRCAPKVLCAVGGKSGLFACLDS

SEQ ID NO: 35189 - protein, 609 aa, Homo sapiens
MEGKPMRRCTNIRPGETGMDVTSRCTLGDPNKLPEGVPQPARMPYISDKHPRQTLEVINLLRKHRELCDVVLVVGAKKIYAHRVILSACSPYFRAMFTGELAESRQTEVVIRDIDERAMELLIDFAYTSQITVEEGNVQTLLPAACLLQLAEIQEACCEFLKRQLDPSNCLGIRAFADTHSCRELLRIADKFTQHNFQEVMESEEFMLLPANQLIDIISSDELNVRSEEQVFNAVMAWVKYSIQERRPQLPQVLQHVRLPLLSPKFLVGTVGSDPLIKSDEECRDLVDEAKNYLLLPQERPLMQGPRTRPRKPIRCGEVLFAVGGWCSGDAISSVERYDPQTNEWRMVASMSKRRCGVGVSVLDDLLYAVGGHDGSSYLNSVERYDPKTNQWSSDVAPTSTCRTSVGVAVLGGFLYAVGGQDGVSCLNIVERYDPKENKWTRVASMSTRRLGVAVAVLGGFLYAVGGSDGTSPLNTVERYNPQENRWHTIAPMGTRRKHLGCAVYQDMIYAVGGRDDTTELSSAERYNPRTNQWSPVVAMTSRRSGVGLAVVNGQLMAVGGFDGTTYLKTIEVFDPDANTWRLYGGMNYRRLGGGVGVIKMTHCESHIW

SEQ ID NO: 35190 - protein, 420 aa, Homo sapiens
MVHGRKANAQVMESEEFMLLPANQLIDIISSDELNVRSEEQVFNAVMAWVKYSIQERRPQLPQVLQHVRLPLLSPKFLVGTVGSDPLIKSDEECRDLVDEAKNYLLLPQERPLMQGPRTRPRKPIRCGEVLFAVGGWCSGDAISSVERYDPQTNEWRMVASMSKRRCGVGVSVLDDLLYAVGGHDGSSYLNSVERYDPKTNQWSSDVAPTSTCRTSVGVAVLGGFLYAVGGQDGVSCLNIVERYDPKENKWTRVASMSTRRLGVAVAVLGGFLYAVGGSDGTSPLNTVERYNPQENRWHTIAPMGTRRKHLGCAVYQDMIYAVGGRDDTTELSSAERYNPRTNQWSPVVAMTSRRSGVGLAVVNGQLMAVGGFDGTTYLKTIEVFDPDANTWRLYGGMNYRRLGGGVGVIKMTHCESHIW

SEQ ID NO: 35191 - protein, 221 aa, Homo sapiens
MHFLTIYPNCSSGVVRAQSRTEQKNPLGLDDLGIQNLGQTVSLAPAVEAASMLKMEPLNSTHPGTAASSSPLESRAAGGGSGNGNEYFYILVVMSFYGIFLIGIMLGYMKSKRREKKSSLLLLYKDEERLWGEAMKPLPVVSGLRSVQVPLMLNMLQESVAPALSCTLCSMEGDSVSSESSSPDVHLTIQEEGADDELEETSETPLNESSEGSSENIHQNS

SEQ ID NO: 35192 - protein, 103 aa, Homo sapiens
METTNGTETWYESLHAVLKALNATLHSNLLCRPGPGLGPDNQTEERRASLPGRDDNSYMYILFVMFLFAVTVGSLILGYTRSRKVDKRSDPYHVYIKNRVSMI

SEQ ID NO: 35193 - protein, 436 aa, Homo sapiens
MMGEAAVAAGPCPLREDSFTRFSSQSNVYGLAGGAGGRGELLAATLKGKVLGFRYQDLRQKIRPVAKELQFNYIPVDAEIVSIDTFNKSPPKRGLVVGITFIKDSGDKGSPFLNIYCDYEPGSEYNLDSIAQSCLNLELQFTPFQLCHAEVQVGDQLETVFLLSGNDPAIHLYKENEGLHQFEEQPVENLFPELTNLTSSVLWLDVHNFPGTSRRLSALGCQSGYVRVAHVDQRSREVLQMWSVLQDGPISRVIVFSLSAAKETKDRPLQDEYSVLVASMLEPAVVYRDLLNRGLEDQLLLPGSDQFDSVLCSLVTDVDLDGRPEVLVATYGQELLCYKYRGPESGLPEAQHGFHLLWQRSFSSPLLAMAHVDLTGDGLQELAVVSLKGVHILQHSLIQASELVLTRLRHQVEQRRRRLQGLEDGAGAGPAENAAS

SEQ ID NO: 35194 - protein, 196 aa, Homo sapiens
MWSVLQDGPISRVIVFSLSAAKETKDRPLQDEYSVLVASMLEPAVVYRDLLNRGLEDQLLLPGSDQFDSVLCSLVTDVDLDGRPEVLVATYGQELLCYKYRGPESGLPEAQHGFHLLWQRSFSSPLLAMAHVDLTGDGLQELAVVSLKGVHILQHSLIQASELVLTRLRHQVEQRRRRLQGLEDGAGAGPAENAAS

SEQ ID NO: 35195 - protein, 427 aa, Homo sapiens
MGSVRTNRYSIVSSEEDGMKLATMAVANGFGNGKSKVHTRQQCRSRFVKKDGHCNVQFINVGEKGQRYLADIFTTCVDIRWRWMLVIFCLAFVLSWLFFGCVFWLIALLHGDLDASKEGKACVSEVNSFTAAFLFSIETQTTIGYGFRCVTDECPIAVFMVVFQSIVGCIIDAFIIGAVMAKMAKPKKRNETLVFSHNAVIAMRDGKLCLMWRVGNLRKSHLVEAHVRAQLLKSRITSEGEYIPLDQIDINVGFDSGIDRIFLVSPITIVHEIDEDSPLYDLSKQDIDNADFEIVVILEGMVEATAMTTQCRSSYLANEILWGHRYEPVLFEEKHYYKVDYSRFHKTYEVPNTPLCSARDLAEKKYILSNANSFCYENEVALTSKEEDDSENGVPESTSTDTPPDIDLHNQASVPLEPRPLRRESEI

SEQ ID NO: 35196 - protein, 261 aa, Homo sapiens
MWVPVVFLTLSVTWIGAAPLILSRIVGGWECEKHSQPWQVLVASRGRAVCGGVLVHPQWVLTAAHCIRNKSVILLGRHSLFHPEDTGQVFQVSHSFPHPLYDMSLLKNRFLRPGDDSSHDLMLLRLSEPAELTDAVKVMDLPTQEPALGTTCYASGWGSIEPEEFLTPKKLQCVDLHVISNDVCAQVHPQKVTKFMLCAGRWTGGKSTCSGDSGGPLVCNGVLQGITSWGSEPCALPERPSLYTKVVHYRKWIKDTIVANP

SEQ ID NO: 35197 - protein, 238 aa, Homo sapiens
MWVPVVFLTLSVTWIGAAPLILSRIVGGWECEKHSQPWQVLVASRGRAVCGGVLVHPQWVLTAAHCIRNKSVILLGRHSLFHPEDTGQVFQVSHSFPHPLYDMSLLKNRFLRPGDDSSHDLMLLRLSEPAELTDAVKVMDLPTQEPALGTTCYASGWGSIEPEEFLTPKKLQCVDLHVISNDVCAQVHPQKVTKFMLCAGRWTGGKSTCSWVILITELTMPALPMVLHGSLVPWRGGV

SEQ ID NO: 35198 - protein, 218 aa, Homo sapiens
MWVPVVFLTLSVTWIGAAPLILSRIVGGWECEKHSQPWQVLVASRGRAVCGGVLVHPQWVLTAAHCIRKPGDDSSHDLMLLRLSEPAELTDAVKVMDLPTQEPALGTTCYASGWGSIEPEEFLTPKKLQCVDLHVISNDVCAQVHPQKVTKFMLCAGRWTGGKSTCSGDSGGPLVCNGVLQGITSWGSEPCALPERPSLYTKVVHYRKWIKDTIVANP

SEQ ID NO: 35199 - protein, 69 aa, Homo sapiens
MWVPVVFLTLSVTWIGAAPLILSRIVGGWECEKHSQPWQVLVASRGRAVCGGVLVHPQWVLTAAHCIRK

SEQ ID NO: 35200 - protein, 227 aa, Homo sapiens
MWVPVVFLTLSVTWIGAAPLILSRIVGGWECEKHSQPWQVLVASRGRAVCGGVLVHPQWVLTAAHCIRNKSVILLGRHSLFHPEDTGQVFQVSHSFPHPLYDMSLLKNRFLRPGDDSSHDLMLLRLSEPAELTDAVKVMDLPTQEPALGTTCYASGWGSIEPEEFLTPKKLQCVDLHVISNDVCAQVHPQKVTKFMLCAGRWTGGKSTCSVSHPYSQDLEGKGEWGP

SEQ ID NO: 35201 - protein, 445 aa, Homo sapiens
MHGHSRNGQAHVPRRKRRNRFVKKNGQCNVYFANLSNKSQRYMADIFTTCVDTRWRYMLMIFSAAFLVSWLFFGLLFWCIAFFHGDLEASPGVPAAGGPAAGGGGAAPVAPKPCIMHVNGFLGAFLFSVETQTTIGYGFRCVTEECPLAVIAVVVQSIVGCVIDSFMIGTIMAKMARPKKRAQTLLFSHHAVISVRDGKLCLMWRVGNLRKSHIVEAHVRAQLIKPYMTQEGEYLPLDQRDLNVGYDIGLDRIFLVSPIIIVHEIDEDSPLYGMGKEELESEDFEIVVILEGMVEATAMTTQARSSYLASEILWGHRFEPVVFEEKSHYKVDYSRFHKTYEVAGTPCCSARELQESKITVLPAPPPPPSAFCYENELALMSQEEEEMEEEAAAAAAVAAGLGLEAGSKEEAGIIRMLEFGSHLDLERMQASLPLDNISYRRESAI

SEQ ID NO: 35202 - protein, 108 aa, Homo sapiens
MSTPRPAPPQPGAAEGAGGPEGKAVAGAWEKGPRLGQRLPSIVVEPSEADPVESGELRWPLESAQRGPSQSRAAAAPSPSLPGEPGKAADNAGSECACSEDPAAPARG

SEQ ID NO: 35203 - protein, 117 aa, Homo sapiens
MDMRVPAQLLGLLLLWLPGARCAIQMTQSPSSLSASVGDRVTITCRASQGIRNDLGWYQQKPGKAPKLLIYAASSLQSGVPSRFSGSGSGTDFTLTISSLQPEDFATYYCLQDYNYP

SEQ ID NO: 35204 - protein, 802 aa, Homo sapiens
MEEEGGSSGGAAGTSADGGDGGEQLLTVKHELRTANLTGHAEKVGIENFELLKVLGTGAYGKVFLVRKISGHDTGKLYAMKVLKKATIVQKAKTTEHTRTERQVLEHIRQSPFLVTLHYAFQTETKLHLILDYINGGELFTHLSQRERFTEHEVQIYVGEIVLALEHLHKLGIIYRDIKLENILLDSNGHVVLTDFGLSKEFVADETERAYSFCGTIEYMAPDIVRGGDSGHDKAVDWWSLGVLMYELLTGASPFTVDGEKNSQAEISRRILKSEPPYPQEMSALAKDLIQRLLMKDPKKRLGCGPRDADEIKEHLFFQKINWDDLAAKKVPAPFKPVIRDELDVSNFAEEFTEMDPTYSPAALPQSSEKLFQGYSFVAPSILFKRNAAVIDPLQFHMGVERPGVTNVARSAMMKDSPFYQHYDLDLKDKPLGEGSFSICRKCVHKKSNQAFAVKIISKRMEANTQKEITALKLCEGHPNIVKLHEVFHDQLHTFLVMELLNGGELFERIKKKKHFSETEASYIMRKLVSAVSHMHDVGVVHRDLKPENLLFTDENDNLEIKIIDFGFARLKPPDNQPLKTPCFTLHYAAPELLNQNGYDESCDLWSLGVILYTMLSGQVPFQSHDRSLTCTSAVEIMKKIKKGDFSFEGEAWKNVSQEAKDLIQGLLTVDPNKRLKMSGLRYNEWLQDGSQLSSNPLMTPDILGSSGAAVHTCVKATFHAFNKYKREGFCLQNVDKAPLAKRRKMKKTSTSTETRSSSSESSHSSSSHSHGKTTPTKTLQPSNPADSNNPETLFQFSDSVA

SEQ ID NO: 35205 - protein, 549 aa, Homo sapiens
MEEEGGSSGGAAGTSADGGDGGEQLLTVKHELRTANLTGHAEKVGIENFELLKVLGTGAYGKVFLVRKISGHDTGKLYAMKVLKKATIVQKAKTTEHTRTERQVLEHIRQSPFLVTLHYAFQTETKLHLILDYINGGELFTHLSQRERFTEHEVQIYVGEIVLALEHLHKLGIIYRDIKLENILLDSNGHVVLTDFGLSKEFVADETERAYSFCGTIEYMAPDIVRGGDSGHDKAVDWWSLGVLMYELLTGASPFTVDGEKNSQAEISRRILKSEPPYPQEMSALAKDLIQRLLMKDPKKRLGCGPRDADEIKEHLFFQKINWDDLAAKKVPAPFKPVIRDELDVSNFAEEFTEMDPTYSPAALPQSSEKLFQGYSFVAPSILFKRNAAVIDPLQFHMGVERPGVTNVARSAMMKDSPFYQHYDLDLKDKPLGEGSFSICRKCVHKKSNQAFAVKIISKRMEANTQKEITALKLCEGHPNIVKLHEVFHDQLHTFLVMELLNGGELFERIKKKKHFSETEASYIMRKLVSAVSHMHDVGVVHRDLKPEV

SEQ ID NO: 35206 - protein, 723 aa, Homo sapiens
MKVLKKATIVQKAKTTEHTRTERQVLEHIRQSPFLVTLHYAFQTETKLHLILDYINGGELFTHLSQRERFTEHEVQIYVGEIVLALEHLHKLGIIYRDIKLENILLDSNGHVVLTDFGLSKEFVADETERAYSFCGTIEYMAPDIVRGGDSGHDKAVDWWSLGVLMYELLTGASPFTVDGEKNSQAEISRRILKSEPPYPQEMSALAKDLIQRLLMKDPKKRLGCGPRDADEIKEHLFFQKINWDDLAAKKVPAPFKPVIRDELDVSNFAEEFTEMDPTYSPAALPQSSEKLFQGYSFVAPSILFKRNAAVIDPLQFHMGVERPGVTNVARSAMMKDSPFYQHYDLDLKDKPLGEGSFSICRKCVHKKSNQAFAVKIISKRMEANTQKEITALKLCEGHPNIVKLHEVFHDQLHTFLVMELLNGGELFERIKKKKHFSETEASYIMRKLVSAVSHMHDVGVVHRDLKPENLLFTDENDNLEIKIIDFGFARLKPPDNQPLKTPCFTLHYAAPELLNQNGYDESCDLWSLGVILYTMLSGQVPFQSHDRSLTCTSAVEIMKKIKKGDFSFEGEAWKNVSQEAKDLIQGLLTVDPNKRLKMSGLRYNEWLQDGSQLSSNPLMTPDILGSSGAAVHTCVKATFHAFNKYKREGFCLQNVDKAPLAKRRKMKKTSTSTETRSSSSESSHSSSSHSHGKTTPTKTLQPSNPADSNNPETLFQFSDSVA

SEQ ID NO: 35207 - protein, 354 aa, Homo sapiens
MPLVVFCGLPYSGKSRRAEELRVALAAEGRAVYVVDDAAVLGAEDPAVYGDSAREKALRGALRASVERRLSRHDVVILDSLNYIKGFRYELYCLARAARTPLCLVYCVRPGGPIAGPQVAGANENPGRNVSVSWRPRAEEDGRAQAAGSSVLRELHTADSVVNGSAQADVPKELEREESGAAESPALVTPDSEKSAKHGSGAFYSPELLEALTLRFEAPDSRNRWDRPLFTLVGLEEPLPLAGIRSALFENRAPPPHQSTQSQPLASGSFLHQLDQVTSQVLAGLMEAQKSAVPGDLLTLPGTTEHLRFTRPLTMAELSRLRRQFISYTKMHPNNENLPQLANMFLQYLSQSLH

SEQ ID NO: 35208 - protein, 304 aa, Homo sapiens
MASETHNVKKRNFCNKIEDHFIDLPRKKISNFTNKNMKEVKKSPKQLAAYINRTVGQTVKSPDKLRKVIYRRKKVHHPFPNPCYRKKQSPGSGGCDMANKENELACAGHLPEKLHHDSRTYLVNSSDSGSSQTESPSSKYSGFFSEVSQDHETMAQVLFSRNMRLNVALTFWRKRSISELVAYLLRIEDLGVVVDCLPVLTNCLQEEKQYISLGCCVDLLPLVKSLLKSKFEEYVIVGLNWLQAVIKRWWSELSSKTEIINDGNIQILKQQLSGLWEQENHLTLVPGYTGNIAKDVDAYLLQLH

SEQ ID NO: 35209 - protein, 288 aa, Homo sapiens
MSSRKQGSQPRGQQSAEEENFKKPTRSNMQRSKMRGASSGKKTAGPQQKNLEPALPGRWGGRSAENPPSGSVRKTRKNKQKTPGNGDGGSTSEAPQPPRKKRARADPTVESEEAFKNRMEVKVKIPEELKPWLVEDWDLVTRQKQLFQLPAKKNVDAILEEYANCKKSQGNVDNKEYAVNEVVAGIKEYFNVMLGTQLLYKFERPQYAEILLAHPDAPMSQVYGAPHLLRLFVRIGAMLAYTPLDEKSLALLLGYLHDFLKYLAKNSASLFTASDYKVASAEYHRKAL

SEQ ID NO: 35210 - protein, 354 aa, Homo sapiens
MTAAIRRQRELSILPKVTLEAMNTTVMQGFNRSERCPRDTRIVQLVFPALYTVVFLTGILLNTLALWVFVHIPSSSTFIIYLKNTLVADLIMTLMLPFKILSDSHLAPWQLRAFVCRFSSVIFYETMYVGIVLLGLIAFDRFLKIIRPLRNIFLKKPVFAKTVSIFIWFFLFFISLPNTILSNKEATPSSVKKCASLKGPLGLKWHQMVNNICQFIFWTVFILMLVFYVVIAKKVYDSYRKSKSKDRKNNKKLEGKVFVVVAVFFVCFAPFHFARVPYTHSQTNNKTDCRLQNQLFIAKETTLFLAATNICMDPLIYIFLCKKFTEKLPCMQGRKTTASSQENHSSQTDNITLG

SEQ ID NO: 35211 - protein, 333 aa, Homo sapiens
MNTTVMQGFNRSERCPRDTRIVQLVFPALYTVVFLTGILLNTLALWVFVHIPSSSTFIIYLKNTLVADLIMTLMLPFKILSDSHLAPWQLRAFVCRFSSVIFYETMYVGIVLLGLIAFDRFLKIIRPLRNIFLKKPVFAKTVSIFIWFFLFFISLPNTILSNKEATPSSVKKCASLKGPLGLKWHQMVNNICQFIFWTVFILMLVFYVVIAKKVYDSYRKSKSKDRKNNKKLEGKVFVVVAVFFVCFAPFHFARVPYTHSQTNNKTDCRLQNQLFIAKETTLFLAATNICMDPLIYIFLCKKFTEKLPCMQGRKTTASSQENHSSQTDNITLG

SEQ ID NO: 35212 - protein, 383 aa, Homo sapiens
MEPRAVGVSKQDIREQIWGYMESQNLADFPRPVHHRIPNFKGSYLACQNIKDLDVFARTQEVKVDPDKPLEGVRLLVLQSKKTLLVPTPRLRTGLFNKITPPPGATKDILRKCATSQGVRNYSVPIGLDSRVLVDLVVVGSVAVSEKGWRIGKGEGYADLEYAMMVSMGAVSKETPVVTIVHDCQVVDIPEELVEEHDITVDYILTPTRVIATGCKRPKPMGITWFKISLEMMEKIPILRSLRAREQQAGKDVTLQGEHQHLPEPGCQQTVPLSVGRRPPDTPGPETNSMEAAPGSPPGEGAPLAADVYVGNLPGDARVSDLKRALRELGSVPLRLTWQGPRRRAFLHYPDSAAAQQAVSCLQGLRLGTDTLRVALARQQRDK

SEQ ID NO: 35213 - protein, 382 aa, Homo sapiens
MEPRAGVSKQDIREQIWGYMESQNLADFPRPVHHRIPNFKGSYLACQNIKDLDVFARTQEVKVDPDKPLEGVRLLVLQSKKTLLVPTPRLRTGLFNKITPPPGATKDILRKCATSQGVRNYSVPIGLDSRVLVDLVVVGSVAVSEKGWRIGKGEGYADLEYAMMVSMGAVSKETPVVTIVHDCQVVDIPEELVEEHDITVDYILTPTRVIATGCKRPKPMGITWFKISLEMMEKIPILRSLRAREQQAGKDVTLQGEHQHLPEPGCQQTVPLSVGRRPPDTPGPETNSMEAAPGSPPGEGAPLAADVYVGNLPGDARVSDLKRALRELGSVPLRLTWQGPRRRAFLHYPDSAAAQQAVSCLQGLRLGTDTLRVALARQQRDK

SEQ ID NO: 35214 - protein, 383 aa, Homo sapiens
MEPRAVGVSKQDIREQIWGYMESQNLADFPRPVHHRIPNFKGASHAAEQLPRLQAFKTARTIKVNPDAPQKSARFFVLESKKTLLVPTPRLRTGLFNKITPPPGATKDILRKCATSQGVRNYSVPIGLDSRVLVDLVVVGSVAVSEKGWRIGKGEGYADLEYAMMVSMGAVSKETPVVTIVHDCQVVDIPEELVEEHDITVDYILTPTRVIATGCKRPKPMGITWFKISLEMMEKIPILRSLRAREQQAGKDVTLQGEHQHLPEPGCQQTVPLSVGRRPPDTPGPETNSMEAAPGSPPGEGAPLAADVYVGNLPGDARVSDLKRALRELGSVPLRLTWQGPRRRAFLHYPDSAAAQQAVSCLQGLRLGTDTLRVALARQQRDK

SEQ ID NO: 35215 - protein, 382 aa, Homo sapiens
MEPRAGVSKQDIREQIWGYMESQNLADFPRPVHHRIPNFKGASHAAEQLPRLQAFKTARTIKVNPDAPQKSARFFVLESKKTLLVPTPRLRTGLFNKITPPPGATKDILRKCATSQGVRNYSVPIGLDSRVLVDLVVVGSVAVSEKGWRIGKGEGYADLEYAMMVSMGAVSKETPVVTIVHDCQVVDIPEELVEEHDITVDYILTPTRVIATGCKRPKPMGITWFKISLEMMEKIPILRSLRAREQQAGKDVTLQGEHQHLPEPGCQQTVPLSVGRRPPDTPGPETNSMEAAPGSPPGEGAPLAADVYVGNLPGDARVSDLKRALRELGSVPLRLTWQGPRRRAFLHYPDSAAAQQAVSCLQGLRLGTDTLRVALARQQRDK

SEQ ID NO: 35216 - protein, 261 aa, Homo sapiens
MELLQVTILFLLPSICSSNSTGVLEAANNSLVVTTTKPSITTPNTESLQKNVVTPTTGTTPKGTITNELLKMSLMSTATFLTSKDEGLKATTTDVRKNDSIISNVTVTSVTLPNAVSTLQSSKPKTETQSSIKTTEIPGSVLQPDASPSKTGTLTSIPVTIPENTSQSQVIGTEGGKNASTSATSRSYSSIILPVVIALIVITLSVFVLVGLYRMCWKADPGTPENGNDQPQSDKESVKLLTVKTISHESGEHSAQGKTKN

SEQ ID NO: 35217 - protein, 178 aa, Homo sapiens
MELLQVTILFLLPSICSSNSTGVLEAANNSLVVTTTKPSITTPNTESLQKNVVTPTTGTTPKGTITNELLKMSLMSTATFLTSKDEGLKATTTDVRKNDSIISNVTVTSVTLPNAVSTLQSSKPKTETQSSIKTTEIPGTPENGNDQPQSDKESVKLLTVKTISHESGEHSAQGKTKN

SEQ ID NO: 35218 - protein, 248 aa, Homo sapiens
MELLQVTILFLLPSICSSNSTGVLEAANNSLVVTTTKPSITTPNTESLQKNVVTPTTGTTPKGTITNELLKMSLMSTATFLTSKDEGLKATTTDVRKNDSIISNVTVTSVTLPNAVSTLQSSKPKSSVLQPDASPSKTGTLTSIPVTIPENTSQSQVIGTEGGKNASTSATSRSYSSIILPVVIALIVITLSVFVLVGLYRMCWKADPGTPENGNDQPQSDKESVKLLTVKTISHESGEHSAQGKTKN

SEQ ID NO: 35219 - protein, 5654 aa, Homo sapiens
MSVGRRKLALLWALALALACTRHTGHAQDGSSESSYKHHPALSPIARGPSGVPLRGATVFPSLRTIPVVRASNPAHNGRVCSTWGSFHYKTFDGDVFRFPGLCNYVFSEHCGAAYEDFNIQLRRSQESAAPTLSRVLMKVDGVVIQLTKGSVLVNGHPVLLPFSQSGVLIQQSSSYTKVEARLGLVLMWNHDDSLLLELDTKYANKTCGLCGDFNGMPVVSELLSHNTKLTPMEFGNLQKMDDPTDQCQDPVPEPPRNCSTGFGICEELLHGQLFSGCVALVDVGSYLEACRQDLCFCEDTDLLSCVCHTLAEYSRQCTHAGGLPQDWRGPDFCPQKCPNNMQYHECRSPCADTCSNQEHSRACEDHCVAGCFCPEGTVLDDIGQTGCVPVSKCACVYNGAAYAPGATYSTDCTNCTCSGGRWSCQEVPCPGTCSVLGGAHFSTFDGKQYTVHGDCSYVLTKPCDSSAFTVLAELRRCGLTDSETCLKSVTLSLDGAQTVVVIKASGEVFLNQIYTQLPISAANVTIFRPSTFFIIAQTSLGLQLNLQLVPTMQLFMQLAPKLRGQTCGLCGNFNSIQADDFRTLSGVVEATAAAFFNTFKTQAACPNIRNSFEDPCSLSVENEKYAQHWCSQLTDADGPFGRCHAAVKPGTYYSNCMFDTCNCERSEDCLCAALSSYVHACAAKGVQLGGWRDGVCTKPMTTCPKSMTYHYHVSTCQPTCRSLSEGDITCSVGFIPVDGCICPKGTFLDDTGKCVQASNCPCYHRGSMIPNGESVHDSGAICTCTHGKLSCIGGQAPAPVCAAPMVFFDCRNATPGDTGAGCQKSCHTLDMTCYSPQCVPGCVCPDGLVADGEGGCITAEDCPCVHNEASYRAGQTIRVGCNTCTCDSRMWRCTDDPCLATCAVYGDGHYLTFDGQSYSFNGDCEYTLVQNHCGGKDSTQDSFRVVTENVPCGTTGTTCSKAIKIFLGGFELKLSHGKVEVIGTDESQEVPYTIRQMGIYLVVDTDIGLVLLWDKKTSIFINLSPEFKGRVCGLCGNFDDIAVNDFATRSRSVVGDVLEFGNSWKLSPSCPDALAPKDPCTANPFRKSWAQKQCSILHGPTFAACHAHVEPARYYEACVNDACACDSGGDCECFCTAVAAYAQACHEVGLCVSWRTPSICPLFCDYYNPEGQCEWHYQPCGVPCLRTCRNPRGDCLRDVRGLEGCYPKCPPEAPIFDEDKMQCVATCPTPPLPPRCHVHGKSYRPGAVVPSDKNCQSCLCTERGVECTYKAEACVCTYNGQRFHPGDVIYHTTDGTGGCISARCGANGTIERRVYPCSPTTPVPPTTFSFSTPPLVVSSTHTPSNGPSSAHTGPPSSAWPTTAGTSPRTRLPTASASLPPVCGEKCLWSPWMDVSRPGRGTDSGDFDTLENLRAHGYRVCESPRSVECRAEDAPGVPLRALGQRVQCSPDVGLTCRNREQASGLCYNYQIRVQCCTPLPCSTSSSPAQTTPPTTSKTTETRASGSSAPSSTPGTVSLSTARTTPAPGTATSVKKTFSTPSPPPVPATSTSSMSTTAPGTSVVSSKPTPTEPSTSSCLQELCTWTEWIDGSYPAPGINGGDFDTFQNLRDEGYTFCESPRSVQCRAESFPNTPLADLGQDVICSHTEGLICLNKNQLPPICYNYEIRIQCCETVNVCRDITRLPKTVATTRPTPHPTGAQTQTTFTTHMPSASTEQPTATSRGGPTATSVTQGTHTTLVTRNCHPRCTWTKWFDVDFPSPGPHGGDKETYNNIIRSGEKICRRPEEITRLQCRAKSHPEVSIEHLGQVVQCSREEGLVCRNQDQQGPFKMCLNYEVRVLCCETPRGCHMTSTPGSTSSSPAQTTPSTTSKTTETQASGSSAPSSTPGTVSLSTARTTPAPGTATSVKKTFSTPSPPPVPATSTSSMSTTAPGTSVVSSKPTPTEPSTSSCLQELCTWTEWIDGSYPAPGINGGDFDTFQNLRDEGYTFCESPRSVQCRAESFPNTPLADLGQDVICSHTEGLICLNKNQLPPICYNYEIRIQCCETVNVCRDITRPPKTVATTRPTPHPTGAQTQTTFTTHMPSASTEQPTATSRGGPTATSVTQGTHTTPVTRNCHPRCTWTTWFDVDFPSPGPHGGDKETYNNIIRSGEKICRRPEEITRLQCRAKSHPEVSIEHLGQVVQCSREEGLVCRNQDQQGPFKMCLNYEVRVLCCETPKGCPVTSTPVTAPSTPSGRATSPTQSTSSWQKSRTTTLVTTSTTSTPQTSTTYAHTTSTTSAPTARTTSAPTTRTTSASPASTTSGPGNTPSPVPTTSTISAPTTSITSAPTTSTTSAPTSSTTSGPGTTPSPVPTTSITSAPTTSTTSAPTTSTTSARTSSTTSATTTSRISGPETTPSPVPTTSTTSATTTSTTSAPTTSTTSAPTSSTTSSPQTSTTSAPTTSTTSGPGTTPSPVPTTSTTSAPTTRTTSAPKSSTTSAATTSTTSGPETTPRPVPTTSTTSSPTTSTTSAPTTSTTSASTTSTTSGAGTTPSPVPTTSTTSAPTTSTTSAPISSTTSATTTSTTSGPGTTPSPVPTTSTTSAPTTSTTSGPGTTPSAVPTTSITSAPTTSTNSAPISSTTSATTTSRISGPETTPSPVPTASTTSASTTSTTSGPGTTPSPVPTTSTISVPTTSTTSASTTSTTSASTTSTTSGPGTTPSPVPTTSTTSAPTTSTTSAPTTSTISAPTTSTTSATTTSTTSAPTPRRTSAPTTSTISASTTSTTSATTTSTTSATTTSTISAPTTSTTLSPTTSTTSTTITSTTSAPISSTTSTPQTSTTSAPTTSTTSGPGTTSSPVPTTSTTSAPTTSTTSAPTTRTTSVPTSSTTSTATTSTTSGPGTTPSPVPTTSTTSAPTTRTTSAPTTSTTSAPTTSTTSAPTSSTTSATTTSTISVPTTSTTSVPGTTPSPVPTTSTISVPTTSTTSASTTSTTSGPGTTPSPVPTTSTTSAPTTSTTSAPTTSTISAPTTSTPSAPTTSTTLAPTTSTTSAPTTSTTSTPTSSTTSSPQTSTTSASTTSITSGPGTTPSPVPTTSTTSAPTTSTTSAATTSTISAPTTSTTSAPTTSTTSASTASKTSGLGTTPSPIPTTSTTSPPTTSTTSASTASKTSGPGTTPSPVPTTSTIFAPRTSTTSASTTSTTPGPGTTPSPVPTTSTASVSKTSTSHVSISKTTHSQPVTRDCHLRCTWTKWFDIDFPSPGPHGGDKETYNNIIRSGEKICRRPEEITRLQCRAESHPEVSIEHLGQVVQCSREEGLVCRNQDQQGPFKMCLNYEVRVLCCETPKGCPVTSTPVTAPSTPSGRATSPTQSTSSWQKSRTTTLVTTSTTSTPQTSTTSAPTTSTTSAPTTSTTSAPTTSTTSTPQTSISSAPTSSTTSAPTSSTISARTTSIISAPTTSTTSSPTTSTTSATTTSTTSAPTSSTTSTPQTSKTSAATSSTTSGSGTTPSPVTTTSTASVSKTSTSHVSVSKTTHSQPVTRDCHPRCTWTKWFDVDFPSPGPHGGDKETYNNIIRSGEKICRRPEEITRLQCRAKSHPEVSIEHLGQVVQCSREEGLVCRNQDQQGPFKMCLNYEVRVLCCETPKGCPVTSTSVTAPSTPSGRATSPTQSTSSWQKSRTTTLVTSSITSTTQTSTTSAPTTSTTPASIPSTTSAPTTSTTSAPTTSTTSAPTTSTTSTPQTTTSSAPTSSTTSAPTTSTISAPTTSTISAPTTSTTSAPTASTTSAPTSTSSAPTTNTTSAPTTSTTSAPITSTISAPTTSTTSTPQTSTISSPTTSTTSTPQTSTTSSPTTSTTSAPTTSTTSAPTTSTTSTPQTSISSAPTSSTTSAPTASTISAPTTSTTSFHTTSTTSPPTSSTSSTPQTSKTSAATSSTTSGSGTTPSPVPTTSTASVSKTSTSHVSVSKTTHSQPVTRDCHPRCTWTKWFDVDFPSPGPHGGDKETYNNIIRSGEKICRRPEEITRLQCRAESHPEVSIEHLGQVVQCSREEGLVCRNQDQQGPFKMCLNYEVRVLCCETPKGCPVTSTPVTAPSTPSGRATSPTQSTSSWQKSRTTTLVTTSTTSTPQTSTTSAPTTSTIPASTPSTTSAPTTSTTSAPTTSTTSAPTHRTTSGPTTSTTLAPTTSTTSAPTTSTNSAPTTSTISASTTSTISAPTTSTISSPTSSTTSTPQTSKTSAATSSTTSGSGTTPSPVPTTSTTSASTTSTTSAPTTSTTSGPGTTPSPVPSTSTTSAATTSTTSAPTTRTTSAPTSSMTSGPGTTPSPVPTTSTTSAPTTSTTSGPGTTPSPVPTTSTTSAPITSTTSGPGSTPSPVPTTSTTSAPTTSTTSASTASTTSGPGTTPSPVPTTSTTSAPTTRTTSASTASTTSGPGSTPSPVPTTSTTSAPTTRTTPASTASTTSGPGTTPSPVPTTSTTSASTTSTISLPTTSTTSAPITSMTSGPGTTPSPVPTTSTTSAPTTSTTSASTASTTSGPGTTPSPVPTTSTTSAPTTSTTSASTASTTSGPGTSLSPVPTTSTTSAPTTSTTSGPGTTPSPVPTTSTTSAPTTSTTSGPGTTPSPVPTTSTTPVSKTSTSHLSVSKTTHSQPVTSDCHPLCAWTKWFDVDFPSPGPHGGDKETYNNIIRSGEKICRRPEEITRLQCRAESHPEVNIEHLGQVVQCSREEGLVCRNQDQQGPFKMCLNYEVRVLCCETPRGCPVTSVTPYGTSPTNALYPSLSTSMVSASVASTSVASSSVASSSVAYSTQTCFCNVADRLYPAGSTIYRHRDLAGHCYYALCSQDCQVVRGVDSDCPSTTLPPAPATSPSISTSEPVTELGCPNAVPPRKKGETWATPNCSEATCEGNNVISLRPRTCPRVEKPTCANGYPAVKVADQDGCCHHYQCQCVCSGWGDPHYITFDGTYYTFLDNCTYVLVQQIVPVYGHFRVLVDNYFCGAEDGLSCPRSIILEYHQDRVVLTRKPVHGVMTNEIIFNNKVVSPGFRKNGIVVSRIGVKMYATIPELGVQVMFSGLIFSVEVPFSKFANNTEGQCGTCTNDRKDECRTPRGTVVASCSEMSGLWNVSIPDQPACHRPHPTPTTVGPTTVGSTTVGPTTVGSTTVGPTTPPAPCLPSPICQLILSKVFEPCHTVIPPLLFYEGCVFDRCHMTDLDVVCSSLELYAALCASHDICIDWRGRTGHMCPFTCPADKVYQPCGPSNPSYCYGNDSASLGALPEAGPITEGCFCPEGMTLFSTSAQVCVPTGCPRCLGPHGEPVKVGHTVGMDCQECTCEAATWTLTCRPKLCPLPPACPLPGFVPVPAAPQAGQCCPQYSCACNTSRCPAPVGCPEGARAIPTYQEGACCPVQNCSWTVCSINGTLYQPGAVVSSSLCETCRCELPGGPPSDAFVVSCETQICNTHCPVGFEYQEQSGQCCGTCVQVACVTNTSKSPAHLFYPGETWSDAGNHCVTHQCEKHQDGLVVVTTKKACPPLSCSLDEARMSKDGCCRFCPPPPPPYQNQSTCAVYHRSLIIQQQGCSSSEPVRLAYCRGNCGDSSSMYSLEGNTVEHRCQCCQELRTSLRNVTLHCTDGSSRAFSYTEVEECGCMGRRCPAPGDTQHSEEAEPEPSQEAESGSWERGVPVSPMH

SEQ ID NO: 35220 - protein, 2439 aa, Homo sapiens
MVQRWLLLSCCGALLSAGLANTSYTSPGLQRLKDSPQTAPDKGQCSTWGAGHFSTFDHHVYDFSGTCNYIFAATCKDAFPTFSVQLRRGPDGSISRIIVELGASVVTVSEAIISVKDIGVISLPYTSNGLQITPFGQSVRLVAKQLELELEVVWGPDSHLMVLVERKYMGQMCGLCGNFDGKVTNEFVSEEGKFLEPHKFAALQKLDDPGEICTFQDIPSTHVRQAQHARICTQLLTLVAPECSVSKEPFVLSCQADVAAAPQPGPQNSSCATLSEYSRQCSMVGQPVRRWRSPGLCSVGQCPANQVYQECGSACVKTCSNPQHSCSSSCTFGCFCPEGTVLNDLSNNHTCVPVTQCPCVLHGAMYAPGEVTIAACQTCRCTLGRWVCTERPCPGHCSLEGGSFVTTFDARPYRFHGTCTYILLQSPQLPEDGALMAVYDKSGVSHSETSLVAVVYLSRQDKIVISQDEVVTNNGEAKWLPYKTRNITVFRQTSTHLQMATSFGLELVVQLRPIFQAYVTVGPQFRGQTRGLCGNFNGDTTDDFTTSMGIAEGTASLFVDSWRAGNCPAALERETDPCSMSQLNKVCAETHCSMLLRTGTVFERCHATVNPAPFYKRCVYQACNYEETFPHICAALGDYVHACSLRGVLLWGWRSSVDNCTIPCTGNTTFSYNSQACERTCLSLSDRATECHHSAVPVDGCNCPDGTYLNQKGECVRKAQCPCILEGYKFILAEQSTVINGITCHCINGRLSCPQRPQMFLASCQAPKTFKSCSQSSENKFGAACAPTCQMLATGVACVPTKCEPGCVCAEGLYENADGQCVPPEECPCEFSGVSYPGGAELHTDCRTCSCSRGRWACQQGTHCPSTCTLYGEGHVITFDGQRFVFDGNCEYILATDVCGVNDSQPTFKILTENVICGNSGVTCSRAIKIFLGGLSVVLADRNYTVTGEEPHVQLGVTPGALSLVVDISIPGRYNLTLIWNRHMTILIRIARASQDPLCGLCGNFNGNMKDDFETRSRYVASSELELVNSWKESPLCGDVSFVTDPCSLNAFRRSWAERKCSVINSQTFATCHSKVYHLPYYEACVRDACGCDSGGDCECLCDAVAAYAQACLDKGVCVDWRTPAFCPIYCGFYNTHTQDGHGEYQYTQEANCTWHYQPCLCPSQPQSVPGSNIEGCYNCSQDEYFDHEEGVCVPCMPPTTPQPPTTPQLPTTGSRPTQVWPMTGTSTTIGLLSSTGPSPSSNHTPASPTQTPLLPATLTSSKPTASSGEPPRPTTAVTPQATSGLPPTATLRSTATKPTVTQATTRATASTASPATTSTAQSTTRTTMTLPTPATSGTSPTLPKSTNQELPGTTATQTTGPRPTPASTTGPTTPQPGQPTRPTATETTQTRTTTEYTTPQTPHTTHSPPTAGSPVPSTGPVTATSFHATTTYPTPSHPETTLPTHVPPFSTSLVTPSTHTVITPTHAQMATSASNHSAPTGTIPPPTTLKATGSTHTAPPITPTTSGTSQAHSSFSTNKTPTSLHSHTSSTHHPEVTPTSTTTITPNPTSTRTRTPVAHTNSATSSRPPPPFTTHSPPTGSSPFSSTGPMTATSFKTTTTYPTPSHPQTTLPTHVPPFSTSLVTPSTHTVITPTHAQMATSASIHSMPTGTIPPPTTLKATGSTHTAPTMTLTTSGTSQALSSLNTAKTSTSLHSHTSSTHHAEATSTSTTNITPNPTSTGTPPMTVTTSGTSQSRSSFSTAKTSTSLHSHTSSTHHPEVTSTSTTSITPNHTSTGTRTPVAHTTSATSSRLPTPFTTHSPPTGTTPISSTGPVTATSFQTTTTYPTPSHPHTTLPTHVPSFSTSLVTPSTHTVIIPTHTQMATSASIHSMPTGTIPPPTTIKATGSTHTAPPMTPTTSGTSQSPSSFSTAKTSTSLPYHTSSTHHPEVTPTSTTNITPKHTSTGTRTPVAHTTSASSSRLPTPFTTHSPPTGSSPFSSTGPMTATSFQTTTTYPTPSHPQTTLPTHVPPFSTSLVTPSTHTVIITTHTQMATSASIHSTPTGTVPPPTTLKATGSTHTAPPMTVTTSGTSQTHSSFSTATASSSFISSSSWLPQNSSSRPPSSPITTQLPHLSSATTPVSTTNQLSSSFSPSPSAPSTVSSYVPSSHSSPQTSSPSVGTSSSFVSAPVHSTTLSSGSHSSLSTHPTTASVSASPLFPSSPAASTTIRATLPHTISSPFTLSALLPISTVTVSPTPSSHLASSTIAFPSTPRTTASTHTAPAFSSQSTTSRSTSLTTRVPTSGFVSLTSGVTGIPTSPVTNLTTRHPGPTLSPTTRFLTSSLTAHGSTPASAPVSSLGTPTPTSPGVCSVREQQEEITFKGCMANVTVTRCEGACISAASFNIITQQVDARCSCCRPLHSYEQQLELPCPDPSTPGRRLVLTLQVFSHCVCSSVACGD

SEQ ID NO: 35221 - protein, 235 aa, Homo sapiens
MRRGAPQDQELVGPGPPGRGSRGAPPPLGPVVPVLVFPPDLVFRADQRSGPRQLLTLYNPTGTALRFRVLCTAPAKYTVFDAEGYVKPQSCIDIVIRHVAPIPSHYDVQDRFRIELSEEGAEGRVVGRKDITSILRAPAYPLELQGQPDPAPRPGPPAGTPPPTARHFQEHPRQQLATSSFLLFLLTGIVSVAFLLLPLPDELGSQLPQVLHVSLGQKLVAAYVLGLLTMVFLRT

SEQ ID NO: 35222 - protein, 221 aa, Homo sapiens
MSDRPEPACAPPPLGPVVPVLVFPPDLVFRADQRSGPRQLLTLYNPTGTALRFRVLCTAPAKYTVFDAEGYVKPQSCIDIVIRHVAPIPSHYDVQDRFRIELSEEGAEGRVVGRKDITSILRAPAYPLELQGQPDPAPRPGPPAGTPPPTARHFQEHPRQQLATSSFLLFLLTGIVSVAFLLLPLPDELGSQLPQVLHVSLGQKLVAAYVLGLLTMVFLRT

SEQ ID NO: 35223 - protein, 182 aa, Homo sapiens
MTHMAGLVCVCLYPPVLCTAPAKYTVFDAEGYVKPQSCIDIVIRHVAPIPSHYDVQDRFRIELSEEGAEGRVVGRKDITSILRAPAYPLELQGQPDPAPRPGPPAGTPPPTARHFQEHPRQQLATSSFLLFLLTGIVSVAFLLLPLPDELGSQLPQVLHVSLGQKLVAAYVLGLLTMVFLRT

SEQ ID NO: 35224 - protein, 225 aa, Homo sapiens
MRRGAPQDQELVGPGPPGRGSRGAPPPLGPVVPVLVFPPDLVFRADQRSGPRQLLTLYNPTGTALRFRVLCTAPAKYTVFDAEGYVKPQSCIDIHYDVQDRFRIELSEEGAEGRVVGRKDITSILRAPAYPLELQGQPDPAPRPGPPAGTPPPTARHFQEHPRQQLATSSFLLFLLTGIVSVAFLLLPLPDELGSQLPQVLHVSLGQKLVAAYVLGLLTMVFLRT

SEQ ID NO: 35225 - protein, 715 aa, Homo sapiens
MAPAPVTLLAPGAASSMSCSQPGQRSPSNDFQVLRGTELQHLLHAVVPGPWQEDVADAEECAGRCGPLMDCWAFHYNVSSHGCQLLPWTQHSPHSRLWHSGRCDLFQEKGEWGYMPTLRNGLEENFCRNPDGDPGGPWCHTTDPAVRFQSCSIKSCRVAACVWCNGEEYRGAVDRTESGRECQRWDLQHPHQHPFEPGKFLDQGLDDNYCRNPDGSERPWCYTTDPQIEREFCDLPRCGSEAQPRQEATSVSCFRGKGEGYRGTANTTTAAYLASVGTRKSHISTDLRQKNTRASEVGGGAGVGTCCCGDLRENFCWNLDGSEAPWCFTLRPGTRVGFCYQIRRCTDDVRPQDCYHGAGEQYRGTVSKTRKGVQCQRWSAETPHKLQALTLGRHALMSGTRAWKWLRLPCHDFAPAPASVHIYLRTACTTGGELLPDPDGDSHGPWCYTMDPRTPFDYCALRRCDQVQFEKCGKRVDRLDQRRSKLRVAGGHPGNSPWTVSLRNRQGQHFCAGSLVKEQWILTARQCFSSCHMPLTGYEVWLGTLFQNPQHGEPGLQRVPVAKMLCGPSGSQLVLLKLERSVTLNQRVALICLPPEWYVVPPGTKCEIAGWGETKGTGNDTVLNVALLNVISNQECNIKHRGHVRESEMCTEGLLAPVGACEGDYGGPLACFTHNCWVLKGIRIPNRVCTRSRWPAVFTRVSVFVDWIHKVMRLG

SEQ ID NO: 35226 - protein, 689 aa, Homo sapiens
MAPAPVTLLAPGAASSMSCSQPGQRSPSNDFQVLRGTELQHLLHAVVPGPWQEDVADAEECAGRCGPLMDCWAFHYNVSSHGCQLLPWTQHSPHSRLWHSGRCDLFQEKGEWGYMPTLRNGLEENFCRNPDGDPGGPWCHTTDPAVRFQSCSIKSCRVAACVWCNGEEYRGAVDRTESGRECQRWDLQHPHQHPFEPGKFLDQGLDDNYCRNPDGSERPWCYTTDPQIEREFCDLPRCGSEAQPRQEATSVSCFRGKGEGYRGTANTTTAAYLASVGTRKSHISTDLRQKNTRASEVGGGAGVGTCCCGDLRENFCWNLDGSEAPWCFTLRPGTRVGFCYQIRRCTDDVRPQDCYHGAGEQYRGTVSKTRKGVQCQRWSAETPHKLQALTLGRHALMSGTRAWKWLRLPCHDFAPAPASVHIYLRTACTTGGELLPDPDGDSHGPWCYTMDPRTPFDYCALRRCDQVQFEKCGKRVDRLDQRRSKLRVAGGHPGNSPWTVSLRNRHMPLTGYEVWLGTLFQNPQHGEPGLQRVPVAKMLCGPSGSQLVLLKLERSVTLNQRVALICLPPEWYVVPPGTKCEIAGWGETKGTGNDTVLNVALLNVISNQECNIKHRGHVRESEMCTEGLLAPVGACEGDYGGPLACFTHNCWVLKGIRIPNRVCTRSRWPAVFTRVSVFVDWIHKVMRLG

SEQ ID NO: 35227 - protein, 2828 aa, Homo sapiens
MPKRAHWGALSVVLILLWGHPRVALACPHPCACYVPSEVHCTFRSLASVPAGIAKHVERINLGFNSIQALSETSFAGLTKLELLMIHGNEIPSIPDGALRDLSSLQVFKFSYNKLRVITGQTLQGLSNLMRLHIDHNKIEFIHPQAFNGLTSLRLLHLEGNLLHQLHPSTFSTFTFLDYFRLSTIRHLYLAENMVRTLPASMLRNMPLLENLYLQGNPWTCDCEMRWFLEWDAKSRGILKCKKDKAYEGGQLCAMCFSPKKLYKHEIHKLKDMTCLKPSIESPLRQNRSRSIEEEQEQEEDGGSQLILEKFQLPQWSISLNMTDEHGNMVNLVCDIKKPMDVYKIHLNQTDPPDIDINATVALDFECPMTRENYEKLWKLIAYYSEVPVKLHRELMLSKDPRVSYQYRQDADEEALYYTGVRAQILAEPEWVMQPSIDIQLNRRQSTAKKVLLSYYTQYSQTISTKDTRQARGRSWVMIEPSGAVQRDQTVLEGGPCQLSCNVKASESPSIFWVLPDGSILKAPMDDPDSKFSILSSGWLRIKSMEPSDSGLYQCIAQVRDEMDRMVYRVLVQSPSTQPAEKDTVTIGKNPGESVTLPCNALAIPEAHLSWILPNRRIINDLANTSHVYMLPNGTLSIPKVQVSDSGYYRCVAVNQQGADHFTVGITVTKKGSGLPSKRGRRPGAKALSRVREDIVEDEGGSGMGDEENTSRRLLHPKDQEVFLKTKDDAINGDKKAKKGRRKLKLWKHSEKEPETNVAEGRRVFESRRRINMANKQINPERWADILAKVRGKNLPKGTEVPPLIKTTSPPSLSLEVTPPFPAISPPSASPVQTVTSAEESSADVPLLGEEEHVLGTISSASMGLEHNHNGVILVEPEVTSTPLEEVVDDLSEKTEEITSTEGDLKGTAAPTLISEPYEPSPTLHTLDTVYEKPTHEETATEGWSAADVGSSPEPTSSEYEPPLDAVSLAESEPMQYFDPDLETKSQPDEDKMKEDTFAHLTPTPTIWVNDSSTSQLFEDSTIGEPGVPGQSHLQGLTDNIHLVKSSLSTQDTLLIKKGMKEMSQTLQGGNMLEGDPTHSRSSESEGQESKSITLPDSTLGIMSSMSPVKKPAETTVGTLLDKDTTTATTTPRQKVAPSSTMSTHPSRRRPNGRRRLRPNKFRHRHKQTPPTTFAPSETFSTQPTQAPDIKISSQVESSLVPTAWVDNTVNTPKQLEMEKNAEPTSKGTPRRKHGKRPNKHRYTPSTVSSRASGSKPSPSPENKHRNIVTPSSETILLPRTVSLKTEGPYDSLDYMTTTRKIYSSYPKVQETLPVTYKPTSDGKEIKDDVATNVDKHKSDILVTGESITNAIPTSRSLVSTMGEFKEESSPVGFPGTPTWNPSRTAQPGRLQTGIPVTTSGENLTDPPLLKELEDVDFTSEFLSSLTVSTPFHQEEAGSSTTLSSIKVEVASSQAETTTLDQDHLETTVAILLSETRPQNHTPTAARMKEPASSSPSTILMSLGQTTTTKPALPSPRISQASRDSKENVFLNYVGNPETEATPVNNEGTQHMSGPNELSTPSSDQDAFNLSTKLELEKQVFGSRSLPRGPDSQRQDGRVHASHQLTRVPAKPILPTATVRLPEMSTQSASRYFVTSQSPRHWTNKPEITTYPSGALPENKQFTTPRLSSTTIPLPLHMSKPSIPSKFTDRRTDQFNGYSKVFGNNNIPEARNPVGKPPSPRIPHYSNGRLPFFTNKTLSFPQLGVTRRPQIPTSPAPVMRERKVIPGSYNRIHSHSTFHLDFGPPAPPLLHTPQTTGSPSTNLQNIPMVSSTQSSISFITSSVQSSGSFHQSSSKFFAGGPPASKFWSLGEKPQILTKSPQTVSVTAETDTVFPCEATGKPKPFVTWTKVSTGALMTPNTRIQRFEVLKNGTLVIRKVQVQDRGQYMCTASNLHGLDRMVVLLSVTVQQPQILASHYQDVTVYLGDTIAMECLAKGTPAPQISWIFPDRRVWQTVSPVEGRITLHENRTLSIKEASFSDRGVYKCVASNAAGADSLAIRLHVAALPPVIHQEKLENISLPPGLSIHIHCTAKAAPLPSVRWVLGDGTQIRPSQFLHGNLFVFPNGTLYIRNLAPKDSGRYECVAANLVGSARRTVQLNVQRAAANARITGTSPRRTDVRYGGTLKLDCSASGDPWPRILWRLPSKRMIDALFSFDSRIKVFANGTLVVKSVTDKDAGDYLCVARNKVGDDYVVLKVDVVMKPAKIEHKEENDHKVFYGGDLKVDCVATGLPNPEISWSLPDGSLVNSFMQSDDSGGRTKRYVVFNNGTLYFNEVGMREEGDYTCFAENQVGKDEMRVRVKVVTAPATIRNKTYLAVQVPYGDVVTVACEAKGEPMPKVTWLSPTNKVIPTSSEKYQIYQDGTLLIQKAQRSDSGNYTCLVRNSAGEDRKTVWIHVNVQPPKINGNPNPITTVREIAAGGSRKLIDCKAEGIPTPRVLWAFPEGVVLPAPYYGNRITVHGNGSLDIRSLRKSDSVQLVCMARNEGGEARLILQLTVLEPMEKPIFHDPISEKITAMAGHTISLNCSAAGTPTPSLVWVLPNGTDLQSGQQLQRFYHKADGMLHISGLSSVDAGAYRCVARNAAGHTERLVSLKVGLKPEANKQYHNLVSIINGETLKLPCTPPGAGQGRFSWTLPNGMHLEGPQTLGRVSLLDNGTLTVREASVFDRGTYVCRMETEYGPSVTSIPVIVIAYPPRITSEPTPVIYTRPGNTVKLNCMAMGIPKADITWELPDKSHLKAGVQARLYGNRFLHPQGSLTIQHATQRDAGFYKCMAKNILGSDSKTTYIHVF

SEQ ID NO: 35228 - protein, 2215 aa, Homo sapiens
MVILQQGDHVWMDLRLGQEFDVPIGAVVKLCDSGQVQVVDDEDNEHWISPQNATHIKPMHPTSVHGVEDMIRLGDLNEAGILRNLLIRYRDHLIYTYTGSILVAVNPYQLLSIYSPEHIRQYTNKKIGEMPPHIFAIADNCYFNMKRNSRDQCCIISGESGAGKTESTKLILQFLAAISGQHSWIEQQVLEATPILEAFGNAKTIRNDNSSRFGKYIDIHFNKRGAIEGAKIEQYLLEKSRVCRQALDERNYHVFYCMLEGMSEDQKKKLGLGQASDYNYLAMGNCITCEGRVDSQEYANIRSAMKVLMFTDTENWEISKLLAAILHLGNLQYEARTFENLDACEVLFSPSLATAASLLEVNPPDLMSCLTSRTLITRGETVSTPLSREQALDVRDAFVKGIYGRLFVWIVDKINAAIYKPPSQDVKNSRRSIGLLDIFGFENFAVNSFEQLCINFANEHLQQFFVRHVFKLEQEEYDLESIDWLHIEFTDNQDALDMIANKPMNIISLIDEESKFPKGTDTTMLHKLNSQHKLNANYIPPKNNHETQFGINHFAGIVYYETQGFLEKNRDTLHGDIIQLVHSSRNKFIKQIFQADVAMGAETRKRSPTLSSQFKRSLELLMRTLGACQPFFVRCIKPNEFKKPMLFDRHLCVRQLRYSGMMETIRIRRAGYPIRYSFVEFVERYRVLLPGVKPAYKQGDLRGTCQRMAEAVLGTHDDWQIGKTKIFLKDHHDMLLEVERDKAITDRVILLQKVIRGFKDRSNFLKLKNAATLIQRHWRGHNCRKNYGLMRLGFLRLQALHRSRKLHQQYRLARQRIIQFQARCRAYLVRKAFRHRLWAVLTVQAYARGMIARRLHQRLRAEYLWRLEAEKMRLAEEEKLRKEMSAKKAKEEAERKHQERLAQLAREDAERELKEKEAARRKKELLEQMERARHEPVNHSDMVDKMFGFLGTSGGLPGQEGQAPSGFEDLERGRREMVEEDLDAALPLPDEDEEDLSEYKFAKFAATYFQGTTTHSYTRRPLKQPLLYHDDEGDQLAALAVWITILRFMGDLPEPKYHTAMSDGSEKIPVMTKIYETLGKKTYKRELQALQGEGEAQLPEGQKKSSVRHKLVHLTLKKKSKLTEEVTKRLHDGESTVQGNSMLEDRPTSNLEKLHFIIGNGILRPALRDEIYCQISKQLTHNPSKSSYARGWILVSLCVGCFAPSEKFVKYLRNFIHGGPPGYAPYCEERLRRTFVNGTRTQPPSWLELQATKSKKPIMLPVTFMDGTTKTLLTDSATTAKELCNALADKISLKDRFGFSLYIALFDKVSSLGSGSDHVMDAISQCEQYAKEQGAQERNAPWRLFFRKEVFTPWHSPSEDNVATNLIYQQVVRGVKFGEYRCEKEDDLAELASQQYFVDYGSEMILERLLNLVPTYIPDREITPLKTLEKWAQLAIAAHKKGIYAQRRTDAQKVKEDVVSYARFKWPLLFSRFYEAYKFSGPSLPKNDVIVAVNWTGVYFVDEQEQVLLELSFPEIMAVSSSRECRVWLSLGCSDLGCAAPHSGWAGLTPAGPCSPCWSCRGAKTTAPSFTLATIKGDEYTFTSSNAEDIRDLVVTFLEGLRKRSKYVVALQDNPNPAGEESGFLSFAKGDLIILDHDTGEQVMNSGWANGINERTKQRGDFPTDSVYVMPTVTMPPREIVALVTMTPDQRQDVVRLLQLRTAEPEVRAKPYTLEEFSYDYFRPPPKHTLSRVMVSKARGKDRLWSHTREPLKQALLKKLLGSEELSQEACLAFIAVLKYMGDYPSKRTRSVNELTDQIFEGPLKAEPLKDEAYVQILKQLTDNHIRYSEERGWELLWLCTGLFPPSNILLPHVQRFLQSRKHCPLAIDCLQRLQKALRNGSRKYPPHLVEVEAIQHKTTQIFHKVYFPDDTDEAFEVESSTKAKDFCQNIATRLLLKSSEGFSLFVKIADKVLSVPENDFFFDFVRHLTDWIKKARPIKDGIVPSLTYQVFFMKKLWTTTVPGKDPMADSIFHYYQELPKYLRGYHKCTREEVLQLGALIYRVKFEEDKSYFPSIPKLLRELVPQDLIRQVSPDDWKRSIVAYFNKHAGKSKEEAKLAFLKLIFKWPTFGSAFFEVKQTTEPNFPEILLIAINKYGVSLIDPKTKDILTTHPFTKISNWSSGNTYFHITIGNLVRGSKLLCETSLGYKMDDLLTSYISQMLTAMSKQRGSRSGK

SEQ ID NO: 35229 - protein, 2175 aa, Homo sapiens
MVILQQGDHVWMDLRLGQEFDVPIGAVVKLCDSGQVQVVDDEDNEHWISPQNATHIKPMHPTSVHGVEDMIRLGDLNEAGILRNLLIRYRDHLIYTYTGSILVAVNPYQLLSIYSPEHIRQYTNKKIGEMPPHIFAIADNCYFNMKRNSRDQCCIISGESGAGKTESTKLILQFLAAISGQHSWIEQQVLEATPILEAFGNAKTIRNDNSSRFGKYIDIHFNKRGAIEGAKIEQYLLEKSRVCRQALDERNYHVFYCMLEGMSEDQKKKLGLGQASDYNYLAMGNCITCEGRVDSQEYANIRSAMKVLMFTDTENWEISKLLAAILHLGNLQYEARTFENLDACEVLFSPSLATAASLLEVNPPDLMSCLTSRTLITRGETVSTPLSREQALDVRDAFVKGIYGRLFVWIVDKINAAIYKPPSQDVKNSRRSIGLLDIFGFENFAVNSFEQLCINFANEHLQQFFVRHVFKLEQEEYDLESIDWLHIEFTDNQDALDMIANKPMNIISLIDEESKFPKGTDTTMLHKLNSQHKLNANYIPPKNNHETQFGINHFAGIVYYETQGFLEKNRDTLHGDIIQLVHSSRNKFIKQIFQADVAMGAETRKRSPTLSSQFKRSLELLMRTLGACQPFFVRCIKPNEFKKPMLFDRHLCVRQLRYSGMMETIRIRRAGYPIRYSFVEFVERYRVLLPGVKPAYKQGDLRGTCQRMAEAVLGTHDDWQIGKTKIFLKDHHDMLLEVERDKAITDRVILLQKVIRGFKDRSNFLKLKNAATLIQRHWRGHNCRKNYGLMRLGFLRLQALHRSRKLHQQYRLARQRIIQFQARCRAYLVRKAFRHRLWAVLTVQAYARGMIARRLHQRLRAEYLWRLEAEKMRLAEEEKLRKEMSAKKAKEEAERKHQERLAQLAREDAERELKEKEAARRKKELLEQMERARHEPVNHSDMVDKMFGFLGTSGGLPGQEGQAPSGFEDLERGRREMVEEDLDAALPLPDEDEEDLSEYKFAKFAATYFQGTTTHSYTRRPLKQPLLYHDDEGDQLAALAVWITILRFMGDLPEPKYHTAMSDGSEKIPVMTKIYETLGKKTYKRELQALQGEGEAQLPEGQKKSSVRHKLVHLTLKKKSKLTEEVTKRLHDGESTVQGNSMLEDRPTSNLEKLHFIIGNGILRPALRDEIYCQISKQLTHNPSKSSYARGWILVSLCVGCFAPSEKFVKYLRNFIHGGPPGYAPYCEERLRRTFVNGTRTQPPSWLELQATKSKKPIMLPVTFMDGTTKTLLTDSATTAKELCNALADKISLKDRFGFSLYIALFDKVSSLGSGSDHVMDAISQCEQYAKEQGAQERNAPWRLFFRKEVFTPWHSPSEDNVATNLIYQQVVRGVKFGEYRCEKEDDLAELASQQYFVDYGSEMILERLLNLVPTYIPDREITPLKTLEKWAQLAIAAHKKGIYAQRRTDAQKVKEDVVSYARFKWPLLFSRFYEAYKFSGPSLPKNDVIVAVNWTGVYFVDEQEQVLLELSFPEIMAVSSSRGAKTTAPSFTLATIKGDEYTFTSSNAEDIRDLVVTFLEGLRKRSKYVVALQDNPNPAGEESGFLSFAKGDLIILDHDTGEQVMNSGWANGINERTKQRGDFPTDSVYVMPTVTMPPREIVALVTMTPDQRQDVVRLLQLRTAEPEVRAKPYTLEEFSYDYFRPPPKHTLSRVMVSKARGKDRLWSHTREPLKQALLKKLLGSEELSQEACLAFIAVLKYMGDYPSKRTRSVNELTDQIFEGPLKAEPLKDEAYVQILKQLTDNHIRYSEERGWELLWLCTGLFPPSNILLPHVQRFLQSRKHCPLAIDCLQRLQKALRNGSRKYPPHLVEVEAIQHKTTQIFHKVYFPDDTDEAFEVESSTKAKDFCQNIATRLLLKSSEGFSLFVKIADKVLSVPENDFFFDFVRHLTDWIKKARPIKDGIVPSLTYQVFFMKKLWTTTVPGKDPMADSIFHYYQELPKYLRGYHKCTREEVLQLGALIYRVKFEEDKSYFPSIPKLLRELVPQDLIRQVSPDDWKRSIVAYFNKHAGKSKEEAKLAFLKLIFKWPTFGSAFFEQTTEPNFPEILLIAINKYGVSLIDPKTKDILTTHPFTKISNWSSGNTYFHITIGNLVRGSKLLCETSLGYKMDDLLTSYISQMLTAMSKQRGSRSGK

SEQ ID NO: 35230 - protein, 1200 aa, Homo sapiens
MVILQQGDHVWMDLRLGQEFDVPIGAVVKLCDSGQVQVVDDEDNEHWISPQNATHIKPMHPTSVHGVEDMIRLGDLNEAGILRNLLIRYRDHLIYTYTGSILVAVNPYQLLSIYSPEHIRQYTNKKIGEMPPHIFAIADNCYFNMKRNSRDQCCIISGESGAGKTESTKLILQFLAAISGQHSWIEQQVLEATPILEAFGNAKTIRNDNSSRFGKYIDIHFNKRGAIEGAKIEQYLLEKSRVCRQALDERNYHVFYCMLEGMSEDQKKKLGLGQASDYNYLAMGNCITCEGRVDSQEYANIRSAMKVLMFTDTENWEISKLLAAILHLGNLQYEARTFENLDACEVLFSPSLATAASLLEVNPPDLMSCLTSRTLITRGETVSTPLSREQALDVRDAFVKGIYGRLFVWIVDKINAAIYKPPSQDVKNSRRSIGLLDIFGFENFAVNSFEQLCINFANEHLQQFFVRHVFKLEQEEYDLESIDWLHIEFTDNQDALDMIANKPMNIISLIDEESKFPKGTDTTMLHKLNSQHKLNANYIPPKNNHETQFGINHFAGIVYYETQGFLEKNRDTLHGDIIQLVHSSRNKFIKQIFQADVAMGAETRKRSPTLSSQFKRSLELLMRTLGACQPFFVRCIKPNEFKKPMLFDRHLCVRQLRYSGMMETIRIRRAGYPIRYSFVEFVERYRVLLPGVKPAYKQGDLRGTCQRMAEAVLGTHDDWQIGKTKIFLKDHHDMLLEVERDKAITDRVILLQKVIRGFKDRSNFLKLKNAATLIQRHWRGHNCRKNYGLMRLGFLRLQALHRSRKLHQQYRLARQRIIQFQARCRAYLVRKAFRHRLWAVLTVQAYARGMIARRLHQRLRAEYLWRLEAEKMRLAEEEKLRKEMSAKKAKEEAERKHQERLAQLAREDAERELKEKEAARRKKELLEQMERARHEPVNHSDMVDKMFGFLGTSGGLPGQEGQAPSGFEDLERGRREMVEEDLDAALPLPDEDEEDLSEYKFAKFAATYFQGTTTHSYTRRPLKQPLLYHDDEGDQLAALAVWITILRFMGDLPEPKYHTAMSDGSEKIPVMTKIYETLGKKTYKRELQALQGEGEAQLPEGQKKSSVRHKLVHLTLKKKSKLTEEVTKRLHDGESTVQGNSMLEDRPTSNLEKLHFIIGNGILRPALRSVPESLLVAEWCLCQPSKRLSQAWPGFGFAAS

SEQ ID NO: 35231 - protein, 1203 aa, Homo sapiens
MVILQQGDHVWMDLRLGQEFDVPIGAVVKLCDSGQVQVVDDEDNEHWISPQNATHIKPMHPTSVHGVEDMIRLGDLNEAGILRNLLIRYRDHLIYTYTGSILVAVNPYQLLSIYSPEHIRQYTNKKIGEMPPHIFAIADNCYFNMKRNSRDQCCIISGESGAGKTESTKLILQFLAAISGQHSWIEQQVLEATPILEAFGNAKTIRNDNSSRFGKYIDIHFNKRGAIEGAKIEQYLLEKSRVCRQALDERNYHVFYCMLEGMSEDQKKKLGLGQASDYNYLAMGNCITCEGRVDSQEYANIRSAMKVLMFTDTENWEISKLLAAILHLGNLQYEARTFENLDACEVLFSPSLATAASLLEVNPPDLMSCLTSRTLITRGETVSTPLSREQALDVRDAFVKGIYGRLFVWIVDKINAAIYKPPSQDVKNSRRSIGLLDIFGFENFAVNSFEQLCINFANEHLQQFFVRHVFKLEQEEYDLESIDWLHIEFTDNQDALDMIANKPMNIISLIDEESKFPKGTDTTMLHKLNSQHKLNANYIPPKNNHETQFGINHFAGIVYYETQGFLEKNRDTLHGDIIQLVHSSRNKFIKQIFQADVAMGAETRKRSPTLSSQFKRSLELLMRTLGACQPFFVRCIKPNEFKKPMLFDRHLCVRQLRYSGMMETIRIRRAGYPIRYSFVEFVERYRVLLPGVKPAYKQGDLRGTCQRMAEAVLGTHDDWQIGKTKIFLKDHHDMLLEVERDKAITDRVILLQKVIRGFKDRSNFLKLKNAATLIQRHWRGHNCRKNYGLMRLGFLRLQALHRSRKLHQQYRLARQRIIQFQARCRAYLVRKAFRHRLWAVLTVQAYARGMIARRLHQRLRAEYLWRLEAEKMRLAEEEKLRKEMSAKKAKEEAERKHQERLAQLAREDAERELKEKEAARRKKELLEQMERARHEPVNHSDMVDKMFGFLGTSGGLPGQEGQAPSGFEDLERGRREMVEEDLDAALPLPDEDEEDLSEYKFAKFAATYFQGTTTHSYTRRPLKQPLLYHDDEGDQLAALAVWITILRFMGDLPEPKYHTAMSDGSEKIPVMTKIYETLGKKTYKRELQALQGEGEVLQAQLPEGQKKSSVRHKLVHLTLKKKSKLTEEVTKRLHDGESTVQGNSMLEDRPTSNLEKLHFIIGNGILRPALRSVPESLLVAEWCLCQPSKRLSQAWPGFGFAAS

SEQ ID NO: 35232 - protein, 2092 aa, Homo sapiens
MVILQQGDHVWMDLRLGQEFDVPIGAVVKLCDSGQVQVVDDEDNEHWISPQNATHIKPMHPTSVHGVEDMIRLGDLNEAGILRNLLIRYRDHLIYTYTGSILVAVNPYQLLSIYSPEHIRQYTNKKIGEMPPHIFAIADNCYFNMKRNSRDQCCIISGESGAGKTESTKLILQFLAAISGQHSWIEQQVLEATPILEAFGNAKTIRNDNSSRFGKYIDIHFNKRGAIEGAKIEQYLLEKSRVCRQALDERNYHVFYCMLEGMSEDQKKKLGLGQASDYNYLAMVNPPDLMSCLTSRTLITRGETVSTPLSREQALDVRDAFVKGIYGRLFVWIVDKINAAIYKPPSQDVKNSRRSIGLLDIFGFENFAVNSFEQLCINFANEHLQQFFVRHVFKLEQEEYDLESIDWLHIEFTDNQDALDMIANKPMNIISLIDEESKFPKFLEKNRDTLHGDIIQLVHSSRNKFIKQIFQADVAMGAETRKRSPTLSSQFKRSLELLMRTLGACQPFFVRCIKPNEFKKPMLFDRHLCVRQLRYSGMMETIRIRRAGYPIRYSFVEFVERYRVLLPGVKPAYKQGDLRGTCQRMAEAVLGTHDDWQIGKTKIFLKDHHDMLLEVERDKAITDRVILLQKVIRGFKDRSNFLKLKNAATLIQRHWRGHNCRKNYGLMRLGFLRLQALHRSRKLHQQYRLARQRIIQFQARCRAYLVRKAFRHRLWAVLTVQAYARGMIARRLHQRLRAEYLWRLEAEKMRLAEEEKLRKEMSAKKAKEEAERKHQERLAQLAREDAERELKEKEAARRKKELLEQMERARHEPVNHSDMVDKMFGFLGTSGGLPGQEGQAPSGFEDLERGRREMVEEDLDAALPLPDEDEEDLSEYKFAKFAATYFQGTTTHSYTRRPLKQPLLYHDDEGDQLAALAVWITILRFMGDLPEPKYHTAMSDGSEKIPVMTKIYETLGKKTYKRELQALQGEGEAQLPEGQKKSSVRHKLVHLTLKKKSKLTEEVTKRLHDGESTVQGNSMLEDRPTSNLEKLHFIIGNGILRPALRDEIYCQISKQLTHNPSKSSYARGWILVSLCVGCFAPSEKFVKYLRNFIHGGPPGYAPYCEERLRRTFVNGTRTQPPSWLELQATKSKKPIMLPVTFMDGTTKTLLTDSATTAKELCNALADKISLKDRFGFSLYIALFDKVSSLGSGSDHVMDAISQCEQYAKEQGAQERNAPWRLFFRKEVFTPWHSPSEDNVATNLIYQQVVRGVKFGEYRCEKEDDLAELASQQYFVDYGSEMILERLLNLVPTYIPDREITPLKTLEKWAQLAIAAHKKGIYAQRRTDAQKVKEDVVSYARFKWPLLFSRFYEAYKFSGPSLPKNDVIVAVNWTGVYFVDEQEQVLLELSFPEIMAVSSSRECRVWLSLGCSDLGCAAPHSGWAGLTPAGPCSPCWSCRGAKTTAPSFTLATIKGDEYTFTSSNAEDIRDLVVTFLEGLRKRSKYVVALQDNPNPAGEESGFLSFAKGDLIILDHDTGEQVMNSGWANGINERTKQRGDFPTDSVYVMPTVTMPPREIVALVTMTPDQRQDVVRLLQLRTAEPEVRAKPYTLEEFSYDYFRPPPKHTLSRVMVSKARGKDRLWSHTREPLKQALLKKLLGSEELSQEACLAFIAVLKYMGDYPSKRTRSVNELTDQIFEGPLKAEPLKDEAYVQILKQLTDNHIRYSEERGWELLWLCTGLFPPSNILLPHVQRFLQSRKHCPLAIDCLQRLQKALRNGSRKYPPHLVEVEAIQHKTTQIFHKVYFPDDTDEAFEVESSTKAKDFCQNIATRLLLKSSEGFSLFVKIADKVLSVPENDFFFDFVRHLTDWIKKARPIKDGIVPSLTYQVFFMKKLWTTTVPGKDPMADSIFHYYQELPKYLRGYHKCTREEVLQLGALIYRVKFEEDKSYFPSIPKLLRELVPQDLIRQVSPDDWKRSIVAYFNKHAGKSKEEAKLAFLKLIFKWPTFGSAFFEVKQTTEPNFPEILLIAINKYGVSLIDPKTKDILTTHPFTKISNWSSGNTYFHITIGNLVRGSKLLCETSLGYKMDDLLTSYISQMLTAMSKQRGSRSGK

SEQ ID NO: 35233 - protein, 2185 aa, Homo sapiens
MVILQQGDHVWMDLRLGQEFDVPIGAVVKLCDSGQVQVVDDEDNEHWISPQNATHIKPMHPTSVHGVEDMIRLGDLNEAGILRNLLIRYRDHLIYTYTGSILVAVNPYQLLSIYSPEHIRQYTNKKIGEMPPHIFAIADNCYFNMKRNSRDQCCIISGESGAGKTESTKLILQFLAAISGQHSWIEQQVLEATPILEAFGNAKTIRNDNSSRFGKYIDIHFNKRGAIEGAKIEQYLLEKSRVCRQALDERNYHVFYCMLEGMSEDQKKKLGLGQASDYNYLAMGNCITCEGRVDSQEYANIRSAMKVLMFTDTENWEISKLLAAILHLGNLQYEARTFENLDACEVLFSPSLATAASLLEVNPPDLMSCLTSRTLITRGETVSTPLSREQALDVRDAFVKGIYGRLFVWIVDKINAAIYKPPSQDVKNSRRSIGLLDIFGFENFAVNSFEQLCINFANEHLQQFFVRHVFKLEQEEYDLESIDWLHIEFTDNQDALDMIANKPMNIISLIDEESKFPKGTDTTMLHKLNSQHKLNANYIPPKNNHETQFGINHFAGIVYYETQGFLEKNRDTLHGDIIQLVHSSRNKFIKQIFQADVAMGAETRKRSPTLSSQFKRSLELLMRTLGACQPFFVRCIKPNEFKKPMLFDRHLCVRQLRYSGMMETIRIRRAGYPIRYSFVEFVERYRVLLPGVKPAYKQGDLRGTCQRMAEAVLGTHDDWQIGKTKIFLKDHHDMLLEVERDKAITDRVILLQKVIRGFKDRSNFLKLKNAATLIQRHWRGHNCRKNYGLMRLGFLRLQALHRSRKLHQQYRLARQRIIQFQARCRAYLVRKAFRHRLWAVLTVQAYARGMIARRLHQRLRAEYLWRLEAEKMRLAEEEKLRKEMSAKKAKEEAERKHQERLAQLAREDAERELKEKEAARRKKELLEQMERARHEPVNHSDMVDKMFGFLGTSGGLPGQEGQAPSGFEDLERGRREMVEEDLDAALPLPDEDEEDLSEYKFAKFAATYFQGTTTHSYTRRPLKQPLLYHDDEGDQLAALAVWITILRFMGDLPEPKYHTAMSDGSEKIPVMTKIYETLGKKTYKRELQALQGEGEVTKRLHDGESTVQGNSMLEDRPTSNLEKLHFIIGNGILRPALRDEIYCQISKQLTHNPSKSSYARGWILVSLCVGCFAPSEKFVKYLRNFIHGGPPGYAPYCEERLRRTFVNGTRTQPPSWLELQATKSKKPIMLPVTFMDGTTKTLLTDSATTAKELCNALADKISLKDRFGFSLYIALFDKVSSLGSGSDHVMDAISQCEQYAKEQGAQERNAPWRLFFRKEVFTPWHSPSEDNVATNLIYQQVVRGVKFGEYRCEKEDDLAELASQQYFVDYGSEMILERLLNLVPTYIPDREITPLKTLEKWAQLAIAAHKKGIYAQRRTDAQKVKEDVVSYARFKWPLLFSRFYEAYKFSGPSLPKNDVIVAVNWTGVYFVDEQEQVLLELSFPEIMAVSSSRECRVWLSLGCSDLGCAAPHSGWAGLTPAGPCSPCWSCRGAKTTAPSFTLATIKGDEYTFTSSNAEDIRDLVVTFLEGLRKRSKYVVALQDNPNPAGEESGFLSFAKGDLIILDHDTGEQVMNSGWANGINERTKQRGDFPTDSVYVMPTVTMPPREIVALVTMTPDQRQDVVRLLQLRTAEPEVRAKPYTLEEFSYDYFRPPPKHTLSRVMVSKARGKDRLWSHTREPLKQALLKKLLGSEELSQEACLAFIAVLKYMGDYPSKRTRSVNELTDQIFEGPLKAEPLKDEAYVQILKQLTDNHIRYSEERGWELLWLCTGLFPPSNILLPHVQRFLQSRKHCPLAIDCLQRLQKALRNGSRKYPPHLVEVEAIQHKTTQIFHKVYFPDDTDEAFEVESSTKAKDFCQNIATRLLLKSSEGFSLFVKIADKVLSVPENDFFFDFVRHLTDWIKKARPIKDGIVPSLTYQVFFMKKLWTTTVPGKDPMADSIFHYYQELPKYLRGYHKCTREEVLQLGALIYRVKFEEDKSYFPSIPKLLRELVPQDLIRQVSPDDWKRSIVAYFNKHAGKSKEEAKLAFLKLIFKWPTFGSAFFEVKQTTEPNFPEILLIAINKYGVSLIDPKTKDILTTHPFTKISNWSSGNTYFHITIGNLVRGSKLLCETSLGYKMDDLLTSYISQMLTAMSKQRGSRSGK

SEQ ID NO: 35234 - protein, 2177 aa, Homo sapiens
MVILQQGDHVWMDLRLGQEFDVPIGAVVKLCDSGQVQVVDDEDNEHWISPQNATHIKPMHPTSVHGVEDMIRLGDLNEAGILRNLLIRYRDHLIYTYTGSILVAVNPYQLLSIYSPEHIRQYTNKKIGEMPPHIFAIADNCYFNMKRNSRDQCCIISGESGAGKTESTKLILQFLAAISGQHSWIEQQVLEATPILEAFGNAKTIRNDNSSRFGKYIDIHFNKRGAIEGAKIEQYLLEKSRVCRQALDERNYHVFYCMLEGMSEDQKKKLGLGQASDYNYLAMGNCITCEGRVDSQEYANIRSAMKVLMFTDTENWEISKLLAAILHLGNLQYEARTFENLDACEVLFSPSLATAASLLEVNPPDLMSCLTSRTLITRGETVSTPLSREQALDVRDAFVKGIYGRLFVWIVDKINAAIYKPPSQDVKNSRRSIGLLDIFGFENFAVNSFEQLCINFANEHLQQFFVRHVFKLEQEEYDLESIDWLHIEFTDNQDALDMIANKPMNIISLIDEESKFPKGTDTTMLHKLNSQHKLNANYIPPKNNHETQFGINHFAGIVYYETQGFLEKNRDTLHGDIIQLVHSSRNKFIKQIFQADVAMGAETRKRSPTLSSQFKRSLELLMRTLGACQPFFVRCIKPNEFKKPMLFDRHLCVRQLRYSGMMETIRIRRAGYPIRYSFVEFVERYRVLLPGVKPAYKQGDLRGTCQRMAEAVLGTHDDWQIGKTKIFLKDHHDMLLEVERDKAITDRVILLQKVIRGFKDRSNFLKLKNAATLIQRHWRGHNCRKNYGLMRLGFLRLQALHRSRKLHQQYRLARQRIIQFQARCRAYLVRKAFRHRLWAVLTVQAYARGMIARRLHQRLRAEYLWRLEAEKMRLAEEEKLRKEMSAKKAKEEAERKHQERLAQLAREDAERELKEKEAARRKKELLEQMERARHEPVNHSDMVDKMFGFLGTSGGLPGQEGQAPSGFEDLERGRREMVEEDLDAALPLPDEDEEDLSEYKFAKFAATYFQGTTTHSYTRRPLKQPLLYHDDEGDQLAALAVWITILRFMGDLPEPKYHTAMSDGSEKIPVMTKIYETLGKKTYKRELQALQGEGEAQLPEGQKKSSVRHKLVHLTLKKKSKLTEEVTKRLHDGESTVQGNSMLEDRPTSNLEKLHFIIGNGILRPALRDEIYCQISKQLTHNPSKSSYARGWILVSLCVGCFAPSEKFVKYLRNFIHGGPPGYAPYCEERLRRTFVNGTRTQPPSWLELQATKSKKPIMLPVTFMDGTTKTLLTDSATTAKELCNALADKISLKDRFGFSLYIALFDKVSSLGSGSDHVMDAISQCEQYAKEQGAQERNAPWRLFFRKEVFTPWHSPSEDNVATNLIYQQVVRGVKFGEYRCEKEDDLAELASQQYFVDYGSEMILERLLNLVPTYIPDREITPLKTLEKWASRFYEAYKFSGPSLPKNDVIVAVNWTGVYFVDEQEQVLLELSFPEIMAVSSSRECRVWLSLGCSDLGCAAPHSGWAGLTPAGPCSPCWSCRGAKTTAPSFTLATIKGDEYTFTSSNAEDIRDLVVTFLEGLRKRSKYVVALQDNPNPAGEESGFLSFAKGDLIILDHDTGEQVMNSGWANGINERTKQRGDFPTDSVYVMPTVTMPPREIVALVTMTPDQRQDVVRLLQLRTAEPEVRAKPYTLEEFSYDYFRPPPKHTLSRVMVSKARGKDRLWSHTREPLKQALLKKLLGSEELSQEACLAFIAVLKYMGDYPSKRTRSVNELTDQIFEGPLKAEPLKDEAYVQILKQLTDNHIRYSEERGWELLWLCTGLFPPSNILLPHVQRFLQSRKHCPLAIDCLQRLQKALRNGSRKYPPHLVEVEAIQHKTTQIFHKVYFPDDTDEAFEVESSTKAKDFCQNIATRLLLKSSEGFSLFVKIADKVLSVPENDFFFDFVRHLTDWIKKARPIKDGIVPSLTYQVFFMKKLWTTTVPGKDPMADSIFHYYQELPKYLRGYHKCTREEVLQLGALIYRVKFEEDKSYFPSIPKLLRELVPQDLIRQVSPDDWKRSIVAYFNKHAGKSKEEAKLAFLKLIFKWPTFGSAFFEVKQTTEPNFPEILLIAINKYGVSLIDPKTKDILTTHPFTKISNWSSGNTYFHITIGNLVRGSKLLCETSLGYKMDDLLTSYISQMLTAMSKQRGSRSGK

SEQ ID NO: 35235 - protein, 2166 aa, Homo sapiens
MDLRLGQEFDVPIGAVVKLCDSGQVQVVDDEDNEHWISPQNATHIKPMHPTSVHGVEDMIRLGDLNEAGILRNLLIRYRDHLIYTYTGSILVAVNPYQLLSIYSPEHIRQYTNKKIGEMPPHIFAIADNCYFNMKRNSRDQCCIISGESGAGKTESTKLILQFLAAISGQHSWIEQQVLEATPILEAFGNAKTIRNDNSSRFGKYIDIHFNKRGAIEGAKIEQYLLEKSRVCRQALDERNYHVFYCMLEGMSEDQKKKLGLGQASDYNYLAMGNCITCEGRVDSQEYANIRSAMKVLMFTDTENWEISKLLAAILHLGNLQYEARTFENLDACEVLFSPSLATAASLLEVNPPDLMSCLTSRTLITRGETVSTPLSREQALDVRDAFVKGIYGRLFVWIVDKINAAIYKPPSQDVKNSRRSIGLLDIFGFENFAVNSFEQLCINFANEHLQQFFVRHVFKLEQEEYDLESIDWLHIEFTDNQDALDMIANKPMNIISLIDEESKFPKGTDTTMLHKLNSQHKLNANYIPPKNNHETQFGINHFAGIVYYETQGFLEKNRDTLHGDIIQLVHSSRNKFIKQIFQADVAMGAETRKRSPTLSSQFKRSLELLMRTLGACQPFFVRCIKPNEFKKPMLFDRHLCVRQLRYSGMMETIRIRRAGYPIRYSFVEFVERYRVLLPGVKPAYKQGDLRGTCQRMAEAVLGTHDDWQIGKTKIFLKDHHDMLLEVERDKAITDRVILLQKVIRGFKDRSNFLKLKNAATLIQRHWRGHNCRKNYGLMRLGFLRLQALHRSRKLHQQYRLARQRIIQFQARCRAYLVRKAFRHRLWAVLTVQAYARGMIARRLHQRLRAEYLWRLEAEKMRLAEEEKLRKEMSAKKAKEEAERKHQERLAQLAREDAERELKEKEAARRKKELLEQMERARHEPVNHSDMVDKMFGFLGTSGGLPGQEGQAPSGFEDLERGRREMVEEDLDAALPLPDEDEEDLSEYKFAKFAATYFQGTTTHSYTRRPLKQPLLYHDDEGDQLAALAVWITILRFMGDLPEPKYHTAMSDGSEKIPVMTKIYETLGKKTYKRELQALQGEGEAQLPEGQKKSSVRHKLVHLTLKKKSKLTEEVTKRLHDGESTVQGNSMLEDRPTSNLEKLHFIIGNGILRPALRDEIYCQISKQLTHNPSKSSYARGWILVSLCVGCFAPSEKFVKYLRNFIHGGPPGYAPYCEERLRRTFVNGTRTQPPSWLELQATKSKKPIMLPVTFMDGTTKTLLTDSATTAKELCNALADKISLKDRFGFSLYIALFDKVSSLGSGSDHVMDAISQCEQYAKEQGAQERNAPWRLFFRKEVFTPWHSPSEDNVATNLIYQQVVRGVKFGEYRCEKEDDLAELASQQYFVDYGSEMILERLLNLVPTYIPDREITPLKTLEKWAQLAIAAHKKGIYAQRRTDAQKVKEDVVSYARFKWPLLFSRFYEAYKFSGPSLPKNDVIVAVNWTGVYFVDEQEQVLLELSFPEIMAVSSSRGAKTTAPSFTLATIKGDEYTFTSSNAEDIRDLVVTFLEGLRKRSKYVVALQDNPNPAGEESGFLSFAKGDLIILDHDTGEQVMNSGWANGINERTKQRGDFPTDSVYVMPTVTMPPREIVALVTMTPDQRQDVVRLLQLRTAEPEVRAKPYTLEEFSYDYFRPPPKHTLSRVMVSKARGKDRLWSHTREPLKQALLKKLLGSEELSQEACLAFIAVLKYMGDYPSKRTRSVNELTDQIFEGPLKAEPLKDEAYVQILKQLTDNHIRYSEERGWELLWLCTGLFPPSNILLPHVQRFLQSRKHCPLAIDCLQRLQKALRNGSRKYPPHLVEVEAIQHKTTQIFHKVYFPDDTDEAFEVESSTKAKDFCQNIATRLLLKSSEGFSLFVKIADKVLSVPENDFFFDFVRHLTDWIKKARPIKDGIVPSLTYQVFFMKKLWTTTVPGKDPMADSIFHYYQELPKYLRGYHKCTREEVLQLGALIYRVKFEEDKSYFPSIPKLLRELVPQDLIRQVSPDDWKRSIVAYFNKHAGKSKEEAKLAFLKLIFKWPTFGSAFFEVKQTTEPNFPEILLIAINKYGVSLIDPKTKDILTTHPFTKISNWSSGNTYFHITIGNLVRGSKLLCETSLGYKMDDLLTSYISQMLTAMSKQRGSRSGK

SEQ ID NO: 35236 - protein, 1939 aa, Homo sapiens
MTDAQMADFGAAAQYLRKSEKERLEAQTRPFDIRTECFVPDDKEEFVKAKILSREGGKVIAETENGKTVTVKEDQVLQQNPPKFDKIEDMAMLTFLHEPAVLFNLKERYAAWMIYTYSGLFCVTVNPYKWLPVYNAEVVAAYRGKKRSEAPPHIFSISDNAYQYMLTDRENQSILITGESGAGKTVNTKRVIQYFASIAAIGDRGKKDNANANKGTLEDQIIQANPALEAFGNAKTVRNDNSSRFGKFIRIHFGATGKLASADIETYLLEKSRVIFQLKAERNYHIFYQILSNKKPELLDMLLVTNNPYDYAFVSQGEVSVASIDDSEELMATDSAFDVLGFTSEEKAGVYKLTGAIMHYGNMKFKQKQREEQAEPDGTEDADKSAYLMGLNSADLLKGLCHPRVKVGNEYVTKGQSVQQVYYSIGALAKAVYEKMFNWMVTRINATLETKQPRQYFIGVLDIAGFEIFDFNSFEQLCINFTNEKLQQFFNHHMFVLEQEEYKKEGIEWTFIDFGMDLQACIDLIEKPMGIMSILEEECMFPKATDMTFKAKLYDNHLGKSNNFQKPRNIKGKQEAHFSLIHYAGTVDYNILGWLEKNKDPLNETVVALYQKSSLKLMATLFSSYATADTGDSGKSKGGKKKGSSFQTVSALHRENLNKLMTNLRTTHPHFVRCIIPNERKAPGVMDNPLVMHQLRCNGVLEGIRICRKGFPNRILYGDFRQRYRILNPVAIPEGQFIDSRKGTEKLLSSLDIDHNQYKFGHTKVFFKAGLLGLLEEMRDERLSRIITRMQAQARGQLMRIEFKKIVERRDALLVIQWNIRAFMGVKNWPWMKLYFKIKPLLKSAETEKEMATMKEEFGRIKETLEKSEARRKELEEKMVSLLQEKNDLQLQVQAEQDNLNDAEERCDQLIKNKIQLEAKVKEMNERLEDEEEMNAELTAKKRKLEDECSELKKDIDDLELTLAKVEKEKHATENKVKNLTEEMAGLDEIIAKLTKEKKALQEAHQQALDDLQVEEDKVNSLSKSKVKLEQQVDDLEGSLEQEKKVRMDLERAKRKLEGDLKLTQESIMDLENDKLQLEEKLKKKEFDINQQNSKIEDEQVLALQLQKKLKENQARIEELEEELEAERTARAKVEKLRSDLSRELEEISERLEEAGGATSVQIEMNKKREAEFQKMRRDLEEATLQHEATAAALRKKHADSVAELGEQIDNLQRVKQKLEKEKSEFKLELDDVTSNMEQIIKAKANLEKVSRTLEDQANEYRVKLEEAQRSLNDFTTQRAKLQTENGELARQLEEKEALISQLTRGKLSYTQQMEDLKRQLEEEGKAKNALAHALQSARHDCDLLREQYEEETEAKAELQRVLSKANSEVAQWRTKYETDAIQRTEELEEAKKKLAQRLQDAEEAVEAVNAKCSSLEKTKHRLQNEIEDLMVDVERSNAAAAALDKKQRNFDKILAEWKQKYEESQSELESSQKEARSLSTELFKLKNAYEESLEHLETFKRENKNLQEEISDLTEQLGEGGKNVHELEKVRKQLEVEKLELQSALEEAEASLEHEEGKILRAQLEFNQIKAEIERKLAEKDEEMEQAKRNHQRVVDSLQTSLDAETRSRNEVLRVKKKMEGDLNEMEIQLSHANRMAAEAQKQVKSLQSLLKDTQIQLDDAVRANDDLKENIAIVERRNNLLQAELEELRAVVEQTERSRKLAEQELIETSERVQLLHSQNTSLINQKKKMESDLTQLQSEVEEAVQECRNAEEKAKKAITDAAMMAEELKKEQDTSAHLERMKKNMEQTIKDLQHRLDEAEQIALKGGKKQLQKLEARVRELEGELEAEQKRNAESVKGMRKSERRIKELTYQTEEDKKNLLRLQDLVDKLQLKVKAYKRQAEEAEEQANTNLSKFRKVQHELDEAEERADIAESQVNKLRAKSRDIGAKQKMHDEE

SEQ ID NO: 35237 - protein, 315 aa, Homo sapiens
MMAEREEDDDTEEAWMQLRPTEPLPSQCCGSGCSPCVFDLYHRDLARWEAAQASKDRSLLRGPESQSCPSKLNPETFVAFCIIAMDRLTKDTYRVRFALPGNSQLGLRPGQHLILRGIVDDLEIQRAYTPISPANAEGYFEVLIKCYQMGLMSRYVESWRVGDTAFWRGPFGDFFYKPNQYGELLLLAAGTGLAPMVPILQSITDNENDETFVTLVGCFKTFESIYLKTFLQEQARFWNVRTFFVLSQESSSEQLPWSYQEKTHFGHLGQDLIKELVSCCRRKPFALVCGSAEFTKDIARCLLCAGLTEDSYFLF

SEQ ID NO: 35238 - protein, 167 aa, Homo sapiens
MGLMSRYVESWRVGDTAFWRGPFGDFFYKPNQYGELLLLAAGTGLAPMVPILQSITDNENDETFVTLVGCFKTFESIYLKTFLQEQARFWNVRTFFVLSQESSSEQLPWSYQEKTHFGHLGQDLIKELVSCCRRKPFALVCGSAEFTKDIARCLLCAGLTEDSYFLF

SEQ ID NO: 35239 - protein, 247 aa, Homo sapiens
MMAEREEDDDTEEAWMQLRPTEPLPSQCCGSGCSPCVFDLYHRDLARWEAAQASKDRSLLRGPESQSCPSKLNPETFVAFCIIAMDRLTKDTYRVRFALPGNSQLGLRPGQHLILRGIVDDLEIQRAYTPISPANAEGYFEVLIKCYQMGLMSRYVESWRVGDTAFWRGPFGDFFYKPNQESSSEQLPWSYQEKTHFGHLGQDLIKELVSCCRRKPFALVCGSAEFTKDIARCLLCAGLTEDSYFLF

SEQ ID NO: 35240 - protein, 2946 aa, Homo sapiens
MASEKPGPGPGLEPQPVGLIAVGAAGGGGGGSGGGGTGGSGMGELRGASGSGSVMLPAGMINPSVPIRNIRMKFAVLIGLIQVGEVSNRDIVETVLNLLVGGEFDLEMNFIIQDAESITCMTELLEHCDVTCQAEIWSMFTAILRKSVRNLQTSTEVGLIEQVLLKMSAVDDMIADLLVDMLGVLASYSITVKELKLLFSMLRGESGIWPRHAVKLLSVLNQMPQRHGPDTFFNFPGCSAAAIALPPIAKWPYQNGFTLNTWFRMDPLNNINVDKDKPYLYCFRTSKGVGYSAHFVGNCLIVTSLKSKGKGFQHCVKYDFQPRKWYMISIVHIYNRWRNSEIRCYVNGQLVSYGDMAWHVNTNDSYDKCFLGSSETADANRVFCGQLGAVYVFSEALNPAQIFAIHQLGPGYKSTFKFKSESDIHLAEHHKQVLYDGKLASSIAFTYNAKATDAQLCLESSPKENASIFVHSPHALMLQDVKAIVTHSIHSAIHSIGGIQVLFPLFAQLDNRQLNDSQVETTVCATLLAFLVELLKSSVAMQEQMLGGKGFLVIGYLLEKSSRVHITRAVLEQFLSFAKYLDGLSHGAPLLKQLCDHILFNPAIWIHTPAKVQLSLYTYLSAEFIGTATIYTTIRRVGTVLQLMHTLKYYYWVINPADSSGITPKGLDGPRPSQKEIISLRAFMLLFLKQLILKDRGVKEDELQSILNYLLTMHEDENIHDVLQLLVALMSEHPASMIPAFDQRNGIRVIYKLLASKSESIWVQALKVLGYFLKHLGHKRKVEIMHTHSLFTLLGERLMLHTNTVTVTTYNTLYEILTEQVCTQVVHKPHPEPDSTVKIQNPMILKVVATLLKNSTPSAELMEVRRLFLSDMIKLFSNSRENRRCLLQCSVWQDWMFSLGYINPKNSEEQKITEMVYNIFRILLYHAIKYEWGGWRVWVDTLSIAHSKVTYEAHKEYLAKMYEEYQRQEEENIKKGKKGNVSTISGLSSQTTGAKGGMEIREIEDLSQSQSPESETDYPVSTDTRDLLMSTKVSDDILGNSDRPGSGVHVEVHDLLVDIKAEKVEATEVKLDDMDLSPETLVGGENGALVEVESLLDNVYSAAVEKLQNNVHGSVGIIKKNEEKDNGPLITLADEKEDLPNSSTSFLFDKIPKQEEKLLPELSSNHIIPNIQDTQVHLGVSDDLGLLAHMTGSVDLTCTSSIIEEKEFKIHTTSDGMSSISERDLASSTKGLEYAEMTATTLETESSSSKIVPNIDAGSIISDTERSDDGKESGKEIRKIQTTTTTQAVQGRSITQQDRDLRVDLGFRGMPMTEEQRRQFSPGPRTTMFRIPEFKWSPMHQRLLTDLLFALETDVHVWRSHSTKSVMDFVNSNENIIFVHNTIHLISQMVDNIIIACGGILPLLSAATSPTGSKTELENIEVTQGMSAETAVTFLSRLMAMVDVLVFASSLNFSEIEAEKNMSSGGLMRQCLRLVCCVAVRNCLECRQRQRDRGNKSSHGSSKPQEVPQSVTATAASKTPLENVPGNLSPIKDPDRLLQDVDINRLRAVVFRDVDDSKQAQFLALAVVYFISVLMVSKYRDILEPQRETTRTGSQPGRNIRQEINSPTSTVVVIPSIPHPSLNHGFLAKLIPEQSFGHSFYKETPAAFPDTIKEKETPTPGEDIQVESSIPHTDSGIGEEQVASILNGAELETSTGPDAMSELLSTLSSEVKKSQESLTENPSETLKPATSISSISQTKGINVKEILKSLVAAPVEIAECGPEPIPYPDPALKRETQAILPMQFHSFDRSVVVPVKKPPPGSLAVTTVGATTAGSGLPTGSTSNIFAATGATPKSMINTTGAVDSGSSSSSSSSSFVNGATSKNLPAVQTVAPMPEDSAENMSITAKLERALEKVAPLLREIFVDFAPFLSRTLLGSHGQELLIEGLVCMKSSTSVVELVMLLCSQEWQNSIQKNAGLAFIELINEGRLLCHAMKDHIVRVANEAEFILNRQRAEDVHKHAEFESQCAQYAADRREEEKMCDHLISAAKHRDHVTANQLKQKILNILTNKHGAWGAVSHSQLHDFWRLDYWEDDLRRRRRFVRNAFGSTHAEALLKAAIEYGTEEDVVKSKKTFRSQAIVNQNAETELMLEGDDDAVSLLQEKEIDNLAGPVVLSTPAQLIAPVVVAKGTLSITTTEIYFEVDEDDSAFKKIDTKVLAYTEGLHGKWMFSEIRAVFSRRYLLQNTALEVFMANRTSVMFNFPDQATVKKVVYSLPRVGVGTSYGLPQARRISLATPRQLYKSSNMTQRWQRREISNFEYLMFLNTIAGRTYNDLNQYPVFPWVLTNYESEELDLTLPGNFRDLSKPIGALNPKRAVFYAERYETWEDDQSPPYHYNTHYSTATSTLSWLVRIEPFTTFFLNANDGKFDHPDRTFSSVARSWRTSQRDTSDVKELIPEFYYLPEMFVNSNGYNLGVREDEVVVNDVDLPPWAKKPEDFVRINRMALESEFVSCQLHQWIDLIFGYKQRGPEAVRALNVFHYLTYEGSVNLDSITDPVLREAMEAQIQNFGQTPSQLLIEPHPPRSSAMHLCFLPQSPLMFKDQMQQDVIMVLKFPSNSPVTHVAANTLPHLTIPAVVTVTCSRLFAVNRWHNTVGLRGAPGYSLDQAHHLPIEMDPLIANNSGVNKRQITDLVDQSIQINAHCFVVTADNRYILICGFWDKSFRVYSTETGKLTQIVFGHWDVVTCLARSESYIGGDCYIVSGSRDATLLLWYWSGRHHIIGDNPNSSDYPAPRAVLTGHDHEVVCVSVCAELGLVISGAKEGPCLVHTITGDLLRALEGPENCLFPRLISVSSEGHCIIYYERGRFSNFSINGKLLAQMEINDSTRAILLSSDGQNLVTGGDNGVVEVWQACDFKQLYIYPGCDAGIRAMDLSHDQRTLITGMASGSIVAFNIDFNRWHYEHQNRY

SEQ ID NO: 35241 - protein, 524 aa, Homo sapiens
MFVNSNGYNLGVREDEVVVNDVDLPPWAKKPEDFVRINRMALESEFVSCQLHQWIDLIFGYKQRGPEAVRALNVFHYLTYEGSVNLDSITDPVLREIPEAYFIRDPHTFLLTKDFIKAMEAQIQNFGQTPSQLLIEPHPPRSSAMHLCFLPQSPLMFKDQMQQDVIMVLKFPSNSPVTHVAANTLPHLTIPAVVTVTCSRLFAVNRWHNTVGLRGAPGYSLDQAHHLPIEMDPLIANNSGVNKRQITDLVDQSIQINAHCFVVTADNRYILICGFWDKSFRVYSTETGKLTQIVFGHWDVVTCLARSESYIGGDCYIVSGSRDATLLLWYWSGRHHIIGDNPNSSDYPAPRAVLTGHDHEVVCVSVCAELGLVISGAKEGPCLVHTITGDLLRALEGPENCLFPRLISVSSEGHCIIYYERGRFSNFSINGKLLAQMEINDSTRAILLSSDGQNLVTGGDNGVVEVWQACDFKQLYIYPGCDAGIRAMDLSHDQRTLITGMASGSIVAFNIDFNRWHYEHQNRY

SEQ ID NO: 35242 - protein, 739 aa, Homo sapiens
MFSEIRAVFSRRYLLQNTALEVFMANRTSVMFNFPDQATVKKVVYSLPRVGVGTSYGLPQARRISLATPRQLYKSSNMTQRWQRREISNFEYLMFLNTIAGRTYNDLNQYPVFPWVLTNYESEELDLTLPGNFRDLSKPIGALNPKRAVFYAERYETWEDDQSPPYHYNTHYSTATSTLSWLVRIEPFTTFFLNANDGKFDHPDRTFSSVARSWRTSQRDTSDVKELIPEFYYLPEMFVNSNGYNLGVREDEVVVNDVDLPPWAKKPEDFVRINRMALESEFVSCQLHQWIDLIFGYKQRGPEAVRALNVFHYLTYEGSVNLDSITDPVLREAMEAQIQNFGQTPSQLLIEPHPPRSSAMHLCFLPQSPLMFKDQMQQDVIMVLKFPSNSPVTHVAANTLPHLTIPAVVTVTCSRLFAVNRWHNTVGLRGAPGYSLDQAHHLPIEMDPLIANNSGVNKRQITDLVDQSIQINAHCFVVTADNRYILICGFWDKSFRVYSTETGKLTQIVFGHWDVVTCLARSESYIGGDCYIVSGSRDATLLLWYWSGRHHIIGDNPNSSDYPAPRAVLTGHDHEVVCVSVCAELGLVISGAKEGPCLVHTITGDLLRALEGPENCLFPRLISVSSEGHCIIYYERGRFSNFSINGKLLAQMEINDSTRAILLSSDGQNLVTGGDNGVVEVWQACDFKQLYIYPGCDAGIRAMDLSHDQRTLITGMASGSIVAFNIDFNRWHYEHQNRY

SEQ ID NO: 35243 - protein, 2371 aa, Homo sapiens
MAAPESGPALSPGTAEGEEETILYDLLVNTEWPPETEVQPRGNQKHGASFIITKAIRDRLLFLRQYIWYSPAPFLLPDGLVRLVNKQINWHLVLASNGKLLAAVQDQCVEIRSAKDDFTSIIGKCQVPKDPKPQWRRVAWSYDCTLLAYAESTGTVRVFDLMGSELFVISPASSFIGDLSYAIAGLIFLEYKASAQWSAELLVINYRGELRSYLVSVGTNQSYQESHCFSFSSHYPHGINTAIYHPGHRLLLVGGCETAEVGMSKASSCGLSAWRVLSGSPYYKQVTNGGDGVTAVPKTLGLLRMLSVKFYSRQGQEQDGIFKMSLSPDGMLLAAIHFSGKLSIWAIPSLKQQGEWGQNEQPGYDDLNPDWRLSTEKRKKIKDKESFYPLIDVNWWADSAVTLARCSGALTVSSVKTLKNLLGKSCEWFEPSPQVTATHDGGFLSLECEIKLAPKRSRLETRAGEEDEGEEDSDSDYEISAKARYFGYIKQGLYLVTEMERFAPPRKRPRTITKNYRLVSLRSTTPEELYQRKIESEEYEEALSLAHTYGLDTDLVYQRQWRKSAVNVASIQNYLSKIKKRSWVLHECLERVPENVDAAKELLQYGLKGTDLEALLAIGKGADDGRFTLPGEIDIDSISYEELSPPDEEPAKNKKEKELKKRQELLKLVNFSKLTLEQKELCRCRRKLLTYLDRLATYEEILGVPHASEQRYDAEFFKKFRNQNIVLSARTYAQESNVQALEILFTYHGSDLLPHRLAILSNFPETTSPHEYSVLLPEACFNGDSLMIIPWHEHKHRAKDWCEELACRMVVEPNLQDESEFLYAAQPELLRFRMTQLTVEKVMDWYQTRAEEIEHYARQVDCALSLIRLGMERNIPGLLVLCDNLVTLETLVYEARCDVTLTLKELQQMKDIEKLRLLMNSCSEDKYVTSAYQWMVPFLHRCEKQSPGVANELLKEYLVTLAKGDLKFPLKIFQHSKPDLQQKIIPDQDQLMAIALECIYTCERNDQLCLCYDLLECLPERGYGDKTEATTKLHDMVDQLEQILSVSELLEKHGLEKPISFVKNTQSSSEEARKLMVRLTRHTGRKQPPVSESHWRTLLQDMLTMQQNVYTCLDSDACYEIFTESLLCSSRLENIHLAGQMMHCSACSENPPAGIAHKGKPHYRVSYEKSIDLVLAASREYFNSSTNLTDSCMDLARCCLQLITDRPPAIQEELDLIQAVGCLEEFGVKILPLQVRLCPDRISLIKECISQSPTCYKQSTKLLGLAELLRVAGENPEERRGQVLILLVEQALRFHDYKAASMHCQELMATGYPKSWDVCSQLGQSEGYQDLATRQELMAFALTHCPPSSIELLLAASSSLQTEILYQRVNFQIHHEGGENISASPLTSKAVQEDEVGVPGSNSADLLRWTTATTMKVLSNTTTTTKAVLQAVSDGQWWKKSLTYLRPLQGQKCGGAYQIGTTANEDLEKQGCHPFYESVISNPFVAESEGTYDTYQHVPVESFAEVLLRTGKLAEAKNKGEVFPTTEVLLQLASEALPNDMTLALAYLLALPQVLDANRCFEKQSPSALSLQLAAYYYSLQIYARLAPCFRDKCHPLYRADPKELIKMVTRHVTRHEHEAWPEDLISLTKQLHCYNERLLDFTQAQILQGLRKGVDVQRFTADDQYKRETILGLAETLEESVYSIAISLAQRYSVSRWEVFMTHLEFLFTDSGLSTLEIENRAQDLHLFETLKTDPEAFHQHMVKYIYPTIGGFDHERLQYYFTLLENCGCADLGNCAIKPETHIRLLKKFKVVASGLNYKKLTDENMSPLEALEPVLSSQNILSISKLVPKIPEKDGQMLSPSSLYTIWLQKLFWTGDPHLIKQVPGSSPEWLHAYDVCMKYFDRLHPGDLITVVDAVTFSPKAVTKLSVEARKEMTRKAIKTVKHFIEKPRKRNSEDEAQEAKDSKVTYADTLNHLEKSLAHLETLSHSFILSLKNSEQETLQKYSHLYDLSRSEKEKLHDEAVAICLDGQPLAMIQQLLEVAVGPLDISPKDIVQSAIMKIISALSGGSADLGGPRDPLKVLEGVVAAVHASVDKGEELVSPEDLLEWLRPFCADDAWPVRPRIHVLQILGQSFHLTEEDSKLLVFFRTEAILKASWPQRQVDIADIENEENRYCLFMELLESSHHEAEFQHLVLLLQAWPPMKSEYVITNNPWVRLATVMLTRCTMENKEGLGNEVLKMCRSLYNTKQMLPAEGVKELCLLLLNQSLLLPSLKLLLESRDEHLHEMALEQITAVTTVNDSNCDQELLSLLLDAKLLVKCVSTPFYPRIVDHLLASLQQGRWDAEELGRHLREAGHEAEAGSLLLAVRGTHQAFRTFSTALRAAQHWV

SEQ ID NO: 35244 - protein, 2251 aa, Homo sapiens
MAAPESGPALSPGTAEGEEETILYDLLVNTEWPPETEVQPRGNQKHGASFIITKAIRDRLLFLRQYIWYSPAPFLLPDGLVRLVNKQINWHLVLASNGKLLAAVQDQCVEIRSAKDDFTSIIGKCQVPKDPKPQWRRVAWSYDCTLLAYAESTGTVRVFDLMGSELFVISPASSFIGDLSYAIAGLIFLEYKASAQWSAELLVINYRGELRSYLVSVGTNQSYQESHCFSFSSHYPHGINTAIYHPGHRLLLVGGCETAEVGMSKASSCGLSAWRVLSGSPYYKQVTNGGDGVTAVPKTLGLLRMLSVKFYSRQGQEQDGIFKMSLSPDGMLLAAIHFSGKLSIWAIPSLKQQGEWGQNEQPGYDDLNPDWRLSTEKRKKIKDKESFYPLIDVNWWADSAVTLARCSGALTVSSVKTLKNLLGKSCEWFEPSPQVTATHDGGFLSLECEIKLAPKRSRLETRAGEEDEGEEDSDSDYEISAKARYFGYIKQGLYLVTEMERFAPPRKRPRTITKNYRLVSLRSTTPEELYQRKIESEEYEEALSLAHTYGLDTDLVYQRQWRKSAVNVASIQNYLSKIKKRSWVLHECLERVPENVDAAKELLQYGLKGTDLEALLAIGKGADDGRFTLPGEIDIDSISYEELSPPDEEPAKNKKEKELKKRQELLKLVNFSKLTLEQKELCRCRRKLLTYLDRLATYEEILGVPHASEQRYDAEFFKKFRNQNIVLSARTYAQESNVQALEILFTYHGSDLLPHRLAILSNFPETTSPHEYSVLLPEACFNGDSLMIIPWHEHKHRAKDWCEELACRMVVEPNLQDESEFLYAAQPELLRFRMTQLTVEKVMDWYQTRAEEIEHYARQLQQKIIPDQDQLMAIALECIYTCERNDQLCLCYDLLECLPERGYGDKTEATTKLHDMVDQLEQILSVSELLEKHGLEKPISFVKNTQSSSEEARKLMVRLTRHTGRKQPPVSESHWRTLLQDMLTMQQNVYTCLDSDACYEIFTESLLCSSRLENIHLAGQMMHCSACSENPPAGIAHKGKPHYRVSYEKSIDLVLAASREYFNSSTNLTDSCMDLARCCLQLITDRPPAIQEELDLIQAVGCLEEFGVKILPLQVRLCPDRISLIKECISQSPTCYKQSTKLLGLAELLRVAGENPEERRGQVLILLVEQALRFHDYKAASMHCQELMATGYPKSWDVCSQLGQSEGYQDLATRQELMAFALTHCPPSSIELLLAASSSLQTEILYQRVNFQIHHEGGENISASPLTSKAVQEDEVGVPGSNSADLLRWTTATTMKVLSNTTTTTKAVLQAVSDGQWWKKSLTYLRPLQGQKCGGAYQIGTTANEDLEKQGCHPFYESVISNPFVAESEGTYDTYQHVPVESFAEVLLRTGKLAEAKNKGEVFPTTEVLLQLASEALPNDMTLALAYLLALPQVLDANRCFEKQSPSALSLQLAAYYYSLQIYARLAPCFRDKCHPLYRADPKELIKMVTRHVTRHEHEAWPEDLISLTKQLHCYNERLLDFTQAQILQGLRKGVDVQRFTADDQYKRETILGLAETLEESVYSIAISLAQRYSVSRWEVFMTHLEFLFTDSGLSTLEIENRAQDLHLFETLKTDPEAFHQHMVKYIYPTIGGFDHERLQYYFTLLENCGCADLGNCAIKPETHIRLLKKFKVVASGLNYKKLTDENMSPLEALEPVLSSQNILSISKLVPKIPEKDGQMLSPSSLYTIWLQKLFWTGDPHLIKQVPGSSPEWLHAYDVCMKYFDRLHPGDLITVVDAVTFSPKAVTKLSVEARKEMTRKAIKTVKHFIEKPRKRNSEDEAQEAKDSKVTYADTLNHLEKSLAHLETLSHSFILSLKNSEQETLQKYSHLYDLSRSEKEKLHDEAVAICLDGQPLAMIQQLLEVAVGPLDISPKDIVQSAIMKIISALSGGSADLGGPRDPLKVLEGVVAAVHASVDKGEELVSPEDLLEWLRPFCADDAWPVRPRIHVLQILGQSFHLTEEDSKLLVFFRTEAILKASWPQRQVDIADIENEENRYCLFMELLESSHHEAEFQHLVLLLQAWPPMKSEYVITNNPWVRLATVMLTRCTMENKEGLGNEVLKMCRSLYNTKQMLPAEGVKELCLLLLNQSLLLPSLKLLLESRDEHLHEMALEQITAVTTVNDSNCDQELLSLLLDAKLLVKCVSTPFYPRIVDHLLASLQQGRWDAEELGRHLREAGHEAEAGSLLLAVRGTHQAFRTFSTALRAAQHWV

SEQ ID NO: 35245 - protein, 2058 aa, Homo sapiens
MDNFFTEGTRVWLRENGQHFPSTVNSCAEGIVVFRTDYGQVFTYKQSTITHQKVTAMHPTNEEGVDDMASLTELHGGSIMYNLFQRYKRNQIYTYIGSILASVNPYQPIAGLYEPATMEQYSRRHLGELPPHIFAIANECYRCLWKRHDNQCILISGESGAGKTESTKLILKFLSVISQQSLELSLKEKTSCVERAILESSPIMEAFGNAKTVYNNNSSRFGKFVQLNICQKGNIQGGRIVDYLLEKNRVVRQNPGERNYHIFYALLAGLEHEEREEFYLSTPENYHYLNQSGCVEDKTISDQESFREVITAMDVMQFSKEEVREVSRLLAGILHLGNIEFITAGGAQVSFKTALGRSAELLGLDPTQLTDALTQRSMFLRGEEILTPLNVQQAVDSRDSLAMALYACCFEWVIKKINSRIKGNEDFKSIGILDIFGFENFEVNHFEQFNINYANEKLQEYFNKHIFSLEQLEYSREGLVWEDIDWIDNGECLDLIEKKLGLLALINEESHFPQATDSTLLEKLHSQHANNHFYVKPRVAVNNFGVKHYAGEVQYDVRGILEKNRDTFRDDLLNLLRESRFDFIYDLFEHVSSRNNQDTLKCGSKHRRPTVSSQFKDSLHSLMATLSSSNPFFVRCIKPNMQKMPDQFDQAVVLNQLRYSGMLETVRIRKAGYAVRRPFQDFYKRYKVLMRNLALPEDVRGKCTSLLQLYDASNSEWQLGKTKVFLRESLEQKLEKRREEEVSHAAMVIRAHVLGFLARKQYRKVLYCVVIIQKNYRAFLLRRRFLHLKKAAIVFQKQLRGQIARRVYRQLLAEKREQEEKKKQEEEEKKKREEEERERERERREAELRAQQEEETRKQQELEALQKSQKEAELTRELEKQKENKQVEEILRLEKEIEDLQRMKEQQELSLTEASLQKLQERRDQELRRLEEEACRAAQEFLESLNFDEIDECVRNIERSLSVGSEFSSELAESACEEKPNFNFSQPYPEEEVDEGFEADDDAFKDSPNPSEHGHSDQRTSGIRTSDDSSEEDPYMNDTVVPTSPSADSTVLLAPSVQDSGSLHNSSSGESTYCMPQNAGDLPSPDGDYDYDQDDYEDGAITSGSSVTFSNSYGSQWSPDYRCSVGTYNSSGAYRFSSEGAQSSFEDSEEDFDSRFDTDDELSYRRDSVYSCVTLPYFHSFLYMKGGLMNSWKRRWCVLKDETFLWFRSKQEALKQGWLHKKGGGSSTLSRRNWKKRWFVLRQSKLMYFENDSEEKLKGTVEVRTAKEIIDNTTKENGIDIIMADRTFHLIAESPEDASQWFSVLSQVHASTDQEIQEMHDEQANPQNAVGTLDVGLIDSVCASDSPDRPNSFVIITANRVLHCNADTPEEMHHWITLLQRSKGDTRVEGQEFIVRGWLHKEVKNSPKMSSLKLKKRWFVLTHNSLDYYKSSEKNALKLGTLVLNSLCSVVPPDEKIFKETGYWNVTVYGRKHCYRLYTKLLNEATRWSSAIQNVTDTKAPIDTPTQQLIQDIKENCLNSDVVEQIYKRNPILRYTHHPLHSPLLPLPYGDINLNLLKDKGYTTLQDEAIKIFNSLQQLESMSDPIPIIQGILQTGHDLRPLRDELYCQLIKQTNKVPHPGSVGNLYSWQILTCLSCTFLPSRGILKYLKFHLKRIREQFPGSEMEKYALFTYESLKKTKCREFVPSRDEIEALIHRQEMTSTVYCHGGGSCKITINSHTTAGEVVEKLIRGLAMEDSRNMFALFEYNGHVDKAIESRTVVADVLAKFEKLAATSEVGDLPWKFYFKLYCFLDTDNVPKDSVEFAFMFEQAHEAVIHGHHPAPEENLQVLAALRLQYLQGDYTLHAAIPPLEEVYSLQRLKARISQSTKTFTPCERLEKRRTSFLEGTLRRSFRTGSVVRQKVEEEQMLDMWIKEEVSSARASIIDKWRKFQGMNQEQAMAKYMALIKEWPGYGSTLFDVECKEGGFPQELWLGVSADAVSVYKRGEGRPLEVFQYEHILSFGAPLANTYKIVVDERELLFETSEVVDVAKLMKAYISMIVKKRYSTTRSASSQGSSR

SEQ ID NO: 35246 - protein, 97 aa, Homo sapiens
MDNFFTEGTRVWLRENGQHFPSTVNSCAEGIVVFRTDYGQVFTYKQSTITHQKVTAMHPTNEEGVDDMASLTELHGGSIMYNLFQRYKRNQIYVQIG

SEQ ID NO: 35247 - protein, 1415 aa, Homo sapiens
MPDQFDQAVVLNQLRYSGMLETVRIRKAGYAVRRPFQDFYKRYKVLMRNLALPEDVRGKCTSLLQLYDASNSEWQLGKTKVFLRESLEQKLEKRREEEVSHAAMVIRAHVLGFLARKQYRKVLYCVVIIQKNYRAFLLRRRFLHLKKAAIVFQKQLRGQIARRVYRQLLAEKREQEEKKKQEEEEKKKREEEERERERERREAELRAQQEEETRKQQELEALQKSQKEAELTRELEKQKENKQVEEILRLEKEIEDLQRMKEQQELSLTEASLQKLQERRDQELRRLEEEACRAAQEFLESLNFDEIDECVRNIERSLSVGSEFSSELAESACEEKPNFNFSQPYPEEEVDEGFEADDDAFKDSPNPSEHGHSDQRTSGIRTSDDSSEEDPYMNDTVVPTSPSADSTVLLAPSVQDSGSLHNSSSGESTYCMPQNAGDLPSPDGDYDYDQDDYEDGAITSGSSVTFSNSYGSQWSPDYRCSVGTYNSSGAYRFSSEGAQSSFEDSEEDFDSRFDTDDELSYRRDSVYSCVTLPYFHSFLYMKGGLMNSWKRRWCVLKDETFLWFRSKQEALKQGWLHKKGGGSSTLSRRNWKKRWFVLRQSKLMYFENDSEEKLKGTVEVRTAKEIIDNTTKENGIDIIMADRTFHLIAESPEDASQWFSVLSQVHASTDQEIQEMHDEQANPQNAVGTLDVGLIDSVCASDSPDRPNSFVIITANRVLHCNADTPEEMHHWITLLQRSKGDTRVEGQEFIVRGWLHKEVKNSPKMSSLKLKKRWFVLTHNSLDYYKSSEKNALKLGTLVLNSLCSVVPPDEKIFKETGYWNVTVYGRKHCYRLYTKLLNEATRWSSAIQNVTDTKAPIDTPTQQLIQDIKENCLNSDVVEQIYKRNPILRYTHHPLHSPLLPLPYGDINLNLLKDKGYTTLQDEAIKIFNSLQQLESMSDPIPIIQGILQTGHDLRPLRDELYCQLIKQTNKVPHPGSVGNLYSWQILTCLSCTFLPSRGILKYLKFHLKRIREQFPGSEMEKYALFTYESLKKTKCREFVPSRDEIEALIHRQEMTSTVYCHGGGSCKITINSHTTAGEVVEKLIRGLAMEDSRNMFALFEYNGHVDKAIESRTVVADVLAKFEKLAATSEVGDLPWKFYFKLYCFLDTDNVPKDSVEFAFMFEQAHEAVIHGHHPAPEENLQVLAALRLQYLQGDYTLHAAIPPLEEVYSLQRLKARISQSTKTFTPCERLEKRRTSFLEGTLRRSFRTGSVVRQKVEEEQMLDMWIKEEVSSARASIIDKWRKFQGMNQEQAMAKYMALIKEWPGYGSTLFDVECKEGGFPQELWLGVSADAVSVYKRGEGRPLEVFQYEHILSFGAPLANTYKIVVDERELLFETSEVVDVAKLMKAYISMIVKKRYSTTRSASSQGSSR

SEQ ID NO: 35248 - protein, 3530 aa, Homo sapiens
MAKEEDEEKKAKKGKKGKKAPEPEKPKRSLKGTSRLFMGFRDRTPKISKKGQFRSASAFFWGLHTGPQKTKRKRKARTVLKSTSKLMTQMRMGKKKRAMKGKKPSFMVIRFPGRRGYGRLRPRARSLSKASTAINWLTKKFLLKKAEESGSEQATVDAWLQRSSSRMGSRKLPFPSGAEILRPGGRLRRFPRSRSIYASGEPLGFLPFEDEAPFHHSGSRKSLYGLEGFQDLGEYYDYHRDGDDYYDRQSLHRYEEQEPYLAGLGPYSPAWPPYGDHYYGYPPEDPYDYYHPDYYGGPFDPGYTYGYGYDDYEPPYAPPSGYSSPYSYHDGYEGEAHPYGYYLDPYAPYDAPYPPYDLPYHTPYDVPYFDPYGVHYTVPYAEGVYGGGDEAIYPPEVPYFYPEESASAFVYPWVPPPIPSPHNPYAHAMDDIAELEEPEDAGVERQGTSFRLPSAAFFEQQGMDKPARSKLSLIRKFRLFPRPQVKLFGKEKLEVPLPPSLDIPLPLGDADEEEDEEELPPVSAVPYGHPFWGFLTPRQRNLQRALSAFGAHRGLGFGPEFGRPVPRPATSLARFLKKTLSEKKPIARLRGSQKARAGGPAVREAAYKRFGYKLAGMDPEKPGTPIVLRRAQPRARSSNDARRPPAPQPAPRTLSHWSALLSPPVPPRPPSSGPPPAPPLSPALSGLPRPASPYGSLRRHPPPWAAPAHVPPAPQASWWAFVEPPAVSPEVPPDLLAFPGPRPSFRGSRRRGAAFGFPGASPRASRRRAWSPLASPQPSLRSSPGLGYCSPLAPPSPQLSLRTGPFQPPFLPPARRPRSLQESPAPRRAAGRLGPPGSPLPGSPRPPSPPLGLCHSPRRSSLNLPSRLPHTWRRLSEPPTRAVKPQVRLPFHRPPRAGAWRAPLEHRESPREPEDSETPWTVPPLAPSWDVDMPPTQRPPSPWPGGAGSRRGFSRPPPVPENPFLQLLGPVPSPTLQPEDPAADMTRVFLGRHHEPGPGQLTKSAGPTPEKPEEEATLGDPQLPAETKPPTPAPPKDVTPPKDITPPKDVLPEQKTLRPSLSYPLAACDQTRATWPPWHRWGTLPQAAAPLAPIRAPEPLPKGGERRQAAPGRFAVVMPRVQKLSSFQRVGPATLKPQVQPIQDPKPRACSLRWSCLWLRADAYGPWPRVHTHPQSCHLGPGAACLSLRGSWEEVGPPSWRNKMHSIRNLPSMRFREQHGEDGVEDMTQLEDLQETTVLSNLKIRFERNLIYTYIGSILVSVNPYQMFGIYGPEQVQQYNGRALGENPPHLFAVANLAFAKMLDAKQNQCIIISGESGSGKTEATKLILRYLAAMNQKREVMQQIKILEATPLLESFGNAKTVRNDNSSRFGKFVEIFLEGGVISGAITSQYLLEKSRIVFQAKNERNYHIFYELLAGLPAQLRQAFSLQEAETYYYLNQGGNCEIAGKSDADDFRRLLAAMEVLGFSSEDQDSIFRILASILHLGNVYFEKYETDAQEVASVVSAREIQAVAELLQISPEGLQKAITFKVTETMREKIFTPLTVESAVDARDAIAKVLYALLFSWLITRVNALVSPRQDTLSIAILDIYGFEDLSFNSFEQLCINYANENLQYLFNKIVFQEEQEEYIREQIDWQEITFADNQPCINLISLKPYGILRILDDQCCFPQATDHTFLQKCHYHHGANPLYSKPKMPLPEFTIKHYAGKVTYQVHKFLDKNHDQVRQDVLDLFVRSRTRVVAHLFSSHAPQAAPQRLGKSSSVTRLYKAHTVAAKFQQSLLDLVEKMERCNPLFMRCLKPNHKKEPGLFEPDVVMAQLRYSGVLETVRIRKEGFPVRLPFQGFIDRYCCLVALKHDLPANGDMCVSVLSRLCKVMPNMYRVGVSKLFLKEHLYQLLESMREHVLNLAALTLQRCLRGFFIKRRFRSLRHKIILLQSRARGYLARQRYQQMRRSLVKFRSLVHAYVSRRRYLKLRAEWRCQVEGALLWEQEELSKREVVAVGHLEVPAELAGLLQAVAGLGLAQVPQVAPVRTPRLQAEPRVTLPLDINNYPMAKFVQCHFKEPAFGMLTVPLRTPLTQLPAEHHAEAVSIFKLILRFMGDPHLHGARENIFGNYIVQKGLAVPELRDEILAQLANQVWHNHNAHNAERGWLLLAACLSGFAPSPCFNKYLLKFVSDYGRNGFQAVCQHRLMQAMGRAQQQGSGAARTLPPTQLEWTATYEKASMALDVGCFNGDQFSCPVHSWSTGEEVAGDILRHRGLADGWRGWTVAMKNGVQWAELAGHDYVLDLVSDLELLRDFPRQKSYFIVGTEGPAASRGGPKVVFGNSWDSDEDMSTRPQPQEHMPKVLDSDGYSSHNQDGTNGETEAQRGTATHQESDSLGEPAVPHKGLDCYLDSLFDPVLSYGDADLEKPTAIAYRMKGGGQPGGGSSSGTEDTPRRPPEPKPIPGLDASTLALQQAFIHKQAVLLAREMTLQATALQQQPLSAALRSLPAEKPPAPEAQPTSVGTGPPAKPVLLRATPKPLAPAPLAKAPRLPIKPVAAPVLAQDQASPETTSPSPELVRYSTLNSEHFPQPTQQIKNIVRQYQQPFRGGRPEALRKDGGKVFMKRPDPHEEALMILKGQMTHLAAAPGTQVSREAVALVKPVTSAPRPSMAPTSALPSRSLEPPEELTQTRLHRLINPNFYGYQDAPWKIFLRKEVFYPKDSYSHPVQLDLLFRQILHDTLSEACLRISEDERLRMKALFAQNQLDTQKPLVTESVKRAVVSTARDTWEVYFSRIFPATGSVGTGVQLLAVSHVGIKLLRMVKGGQEAGGQLRVLRAYSFADILFVTMPSQNMLEFNLASEKVILFSARAHQVKTLVDDFILELKKDSDYVVAVRNFLPEDPALLAFHKGDIIHLQPLEPPRVGYSAGCVVRRKVVYLEELRRRGPDFGWRFGTIHGRVGRFPSELVQPAAAPDFLQLPTEPGRGRAAAVAAAVASAAAAQEVGRRREGPPVRARSADHGEDALALPPYTMLEFAQKYFRDPQRRPQDGLRLKSKEPRESRTLEDMLCFTKTPLQESLIELSDSSLSKMATDMFLAVMRFMGDAPLKGQSDLDVLCNLLKLCGDHEVMRDECYCQVVKQITDNTSSKQDSCQRGWRLLYIVTAYHSCSEVLHPHLTRFLQDVSRTPGLPFQGIAKACEQNLQKTLRFGGRLELPSSIELRAMLAGRSSKRQLFLLPGGLERHLKIKTCTVALDVVEEICAEMALTRPEAFNEYVIFVVTNRGQHVCPLSRRAYILDVASEMEQVDGGYMLWFRRVLWDQPLKFENELYVTMHYNQVLPDYLKGLFSSVPASRPSEQLLQQVSKLASLQHRAKDHFYLPSVREVQEYIPAQLYRTTAGSTWLNLVSQHRQQTQALSPHQARAQFLGLLSALPMFGSSFFFIQSCSNIAVPAPCILAINHNGLNFLSTETHELMVKFPLKEIQSTRTQRPTANSSYPYVEIALGDVAAQRTLQLQLEQGLELCRVVAVHVENLLSAHEKRLTLPPSEITLL

SEQ ID NO: 35249 - protein, 797 aa, Homo sapiens
MKALFAQNQLDTQKPLVTESVKRAVVSTARDTWEVYFSRIFPATGSVGTGVQLLAVSHVGIKLLRMVKGGQEAGGQLRVLRAYSFADILFVTMPSQNMLEFNLASEKVILFSARAHQVKTLVDDFILELKKDSDYVVAVRNFLPEDPALLAFHKGDIIHLQPLEPPRVGYSAGCVVRRKVVYLEELRRRGPDFGWRFGTIHGRVGRFPSELVQPAAAPDFLQLPTEPGRGRAAAVAAAVASAAAAQEVGRRREGPPVRARSADHGEDALALPPYTMLEFAQKYFRDPQRRPQDGLRLKSKEPRESRTLEDMLCFTKTPLQESLIELSDSSLSKMATDMFLAVMRFMGDAPLKGQSDLDVLCNLLKLCGDHEVMRDECYCQVVKQITDNTSSKQDSCQRGWRLLYIVTAYHSCSEVLHPHLTRFLQDVSRTPGLPFQGIAKACEQNLQKTLRFGGRLELPSSIELRAMLAGRSSKRQLFLLPGGLERHLKIKTCTVALDVVEEICAEMALTRPEAFNEYVIFVVTNRGQHVCPLSRRAYILDVASEMEQVDGGYMLWFRRVLWDQPLKFENELYVTMHYNQVLPDYLKGLFSSVPASRPSEQLLQQVSKLASLQHRAKDHFYLPSVREVQEYIPAQLYRTTAGSTWLNLVSQHRQQTQALSPHQARAQFLGLLSALPMFGSSFFFIQSCSNIAVPAPCILAINHNGLNFLSTETHELMVKFPLKEIQSTRTQRPTANSSYPYVEIALGDVAAQRTLQLQLEQVRAGEVLDGRGLSLSPAGTGTVSCGGRARGEPAQCP

SEQ ID NO: 35250 - protein, 644 aa, Homo sapiens
MRPSGDEDRARRRRRRRRRRDLLLSQLCFLASVALLLWSLSSLREQKELDLMDLVGEDRKWMMARKLMQVNDTLTSEDAGLRNSKNCTEPALHEFPNDIFTNEDRRQGAVVLHVLCAIYMFYALAIVCDDFFVPSLEKICERLHLSEDVAGATFMAAGSSAPELFTSVIGVFITKGDVGVGTIVGSAVFNILCIIGVCGLFAGQVVALSSWCLLRDSIYYTLSVIALIVFIYDEKVSWWESLVLVLMYLIYIVIMKYNACIHQCFERRTKGAGNMVNGLANNAEIDDSSNCDATVVLLKKANFHRKASVIMVDELLSAYPHQLSFSEAGLRIMITSHFPPKTRLSMASRMLINERQRLINSRAYTNGESEVAIKIPIKHTVENGTGPSSAPDRGVNGTRRDDVVAEAGNETENENEDNENDEEEEEDEDDDEGPYTPFDTPSGKLETVKWAFTWPLSFVLYFTVPNCNKPRWEKWFMVTFASSTLWIAAFSYMMVWMVTIIGYTLGIPDVIMGITFLAAGTSVPDCMASLIVARQGMGDMAVSNSIGSNVFDILIGLGLPWALQTLAVDYGSYIRLNSRGLIYSVGLLLASVFVTVFGVHLNKWQLDKKLGCGCLLLYGVFLCFSIMTEFNVFTFVNLPMCGDH

SEQ ID NO: 35251 - protein, 1048 aa, Homo sapiens
MSDVNPPSDTPIPFSSSSTHSSHIPPWTFSCYPGSPCENGVMLYMRNVSHEELQRFKQLLLTELSTGTMPITWDQVETASWAEVVHLLIERFPGRRAWDVTSNIFAIMNCDKMCVVVRREINAILPTLEPEDLNVGETQVNLEEGESGKIRRYKSNVMEKFFPIWDITTWPGNQRDFFYQGVHRHEEYLPCLLLPKRPQGRQPKTVAIQGAPGIGKTILAKKVMFEWARNKFYAHKRWCAFYFHCQEVNQTTDQSFSELIEQKWPGSQDLVSKIMSKPDQLLLLLDGFEELTSTLIDRLEDLSEDWRQKLPGSVLLSSLLSKTMLPEATLLIMIRFTSWQTCKPLLKCPSLVTLPGFNTMEKIKYFQMYFGHTEEGDQVLSFAMENTILFSMCRVPVVCWMVCSGLKQQMERGNNLTQSCPNATSVFVRYISSLFPTRAENFSRKIHQAQLEGLCHLAADSMWHRKWVLGKEDLEEAKLDQTGVTAFLGMSILRRIAGEEDHYVFTLVTFQEFFAALFYVLCFPQRLKNFHVLSHVNIQRLIASPRGSKSYLSHMGLFLFGFLNEACASAVEQSFQCKVSFGNKRKLLKVIPLLHKCDPPSPGSGVPQLFYCLHEIREEAFVSQALNDYHKVVLRIGNNKEVQVSAFCLKRCQYLHEVELTVTLNFMNVWKLSSSSHPGSEAPESNGLHRWWQDLCSVFATNDKLEVLTMTNSVLGPPFLKALAAALRHPQCKLQKLLLRRVNSTMLNQDLIGVLTGNQHLRYLEIQHVEVESKAVKLLCRVLRSPRCRLQCLRLEDCLATPRIWTDLGNNLQGNGHLKTLILRKNSLENCGAYYLSVAQLERLSIENCNLTQLTCESLASCLRQSKMLTHLSLAENALKDEGAKHIWNALPHLRCPLQRLVLRKCDLTFNCCQDMISALCKNKTLKSLDLSFNSLKDDGVILLCEALKNPDCTLQILELENCLFTSICCQAMASMLRKNQHLRHLDLSKNAIGVYGILTLCEAFSSQKKREEVIFCIPAWTRITSFSPTPHPPDFTGKSDCLSQINP

SEQ ID NO: 35252 - protein, 1029 aa, Homo sapiens
MSDVNPPSDTPIPFSSSSTHSSHIPPWTFSCYPGSPCENGVMLYMRNVSHEELQRFKQLLLTELSTGTMPITWDQVETASWAEVVHLLIERFPGRRAWDVTSNIFAIMNCDKMCVVVRREINAILPTLEPEDLNVGETQVNLEEGESGKIRRYKSNVMEKFFPIWDITTWPGNQRDFFYQGVHRHEEYLPCLLLPKRPQGRQPKTVAIQGAPGIGKTILAKKVMFEWARNKFYAHKRWCAFYFHCQEVNQTTDQSFSELIEQKWPGSQDLVSKIMSKPDQLLLLLDGFEELTSTLIDRLEDLSEDWRQKLPGSVLLSSLLSKTMLPEATLLIMIRFTSWQTCKPLLKCPSLVTLPGFNTMEKIKYFQMYFGHTEEGDQVLSFAMENTILFSMCRVPVVCWMVCSGLKQQMERGNNLTQSCPNATSVFVRYISSLFPTRAENFSRKIHQAQLEGLCHLAADSMWHRKWVLGKEDLEEAKLDQTGVTAFLGMSILRRIAGEEDHYVFTLVTFQEFFAALFYVLCFPQRLKNFHVLSHVNIQRLIASPRGSKSYLSHMGLFLFGFLNEACASAVEQSFQCKVSFGNKRKLLKVIPLLHKCDPPSPGSGVPQLFYCLHEIREEAFVSQALNDYHKVVLRIGNNKEVQVSAFCLKRCQYLHEVELTVTLNFMNVWKLSSSSHPGSEAPESNGLHRWWQDLCSVFATNDKLEVLTMTNSVLGPPFLKALAAALRHPQCKLQKLLLRRVNSTMLNQDLIGVLTGNQHLRYLEIQHVEVESKAVKLLCRVLRSPRCRLQCLRLEDCLATPRIWTDLGNNLQGNGHLKTLILRKNSLENCGAYYLSVAQLERLSQSKMLTHLSLAENALKDEGAKHIWNALPHLRCPLQRLVLRKCDLTFNCCQDMISALCKNKTLKSLDLSFNSLKDDGVILLCEALKNPDCTLQILELENCLFTSICCQAMASMLRKNQHLRHLDLSKNAIGVYGILTLCEAFSSQKKREEVIFCIPAWTRITSFSPTPHPPDFTGKSDCLSQINP

SEQ ID NO: 35253 - protein, 1062 aa, Homo sapiens
MVSSAQMGFNLQALLEQLSQDELSKFKYLITTFSLAHELQKIPHKEVDKADGKQLVEILTTHCDSYWVEMASLQVFEKMHRMDLSERAKDEVREAALKSFNKRKPLSLGITRKERPPLDVDEMLERFKTEAQAFTETKGNVICLGKEVFKGKKPDKDNRCRYILKTKFREMWKSWPGDSKEVQVMAERYKMLIPFSNPRVLPGPFSYTVVLYGPAGLGKTTLAQKLMLDWAEDNLIHKFKYAFYLSCRELSRLGPCSFAELVFRDWPELQDDIPHILAQARKILFVIDGFDELGAAPGALIEDICGDWEKKKPVPVLLGSLLNRVMLPKAALLVTTRPRALRDLRILAEEPIYIRVEGFLEEDRRAYFLRHFGDEDQAMRAFELMRSNAALFQLGSAPAVCWIVCTTLKLQMEKGEDPVPTCLTRTGLFLRFLCSRFPQGAQLRGALRTLSLLAAQGLWAQTSVLHREDLERLGVQESDLRLFLDGDILRQDRVSKGCYSFIHLSFQQFLTALFYTLEKEEEEDRDGHTWDIGDVQKLLSGVERLRNPDLIQAGYYSFGLANEKRAKELEATFGCRMSPDIKQELLRCDISCKGGHSTVTDLQELLGCLYESQEEELVKEVMAQFKEISLHLNAVDVVPSSFCVKHCRNLQKMSLQVIKENLPENVTASESDAEVERSQDDQHMLPFWTDLCSIFGSNKDLMGLAINDSFLSASLVRILCEQIASDTCHLQRVVFKNISPADAHRNLCLALRGHKTVTYLTLQGNDQDDMFPALCEVLRHPECNLRYLGLVSCSATTQQWADLSLALEVNQSLTCVNLSDNELLDEGAKLLYTTLRHPKCFLQRLSLENCHLTEANCKDLAAVLVVSRELTHLCLAKNPIGNTGVKFLCEGLRYPECKLQTLVLWNCDITSDGCCDLTKLLQEKSSLLCLDLGLNHIGVKGMKFLCEALRKPLCNLRCLWLWGCSIPPFSCEDLCSALSCNQSLVTLDLGQNPLGSSGVKMLFETLTCSSGTLRTLRLKIDDFNDELNKLLEEIEEKNPQLIIDTEKHHPWAERPSSHDFMI

SEQ ID NO: 35254 - protein, 1040 aa, Homo sapiens
MVSSAQMGFNLQALLEQLSQDELSKFKYLITTFSLAHELQKIPHKEVDKADGKQLVEILTTHCDSYWVEMASLQVFEKMHRMDLSERAKDEVREAALKSFNKRKPLSLGITRKERPPLDVDEMLERFKTEAQDKDNRCRYILKTKFREMWKSWPGDSKEVQVMAERYKMLIPFSNPRVLPGPFSYTVVLYGPAGLGKTTLAQKLMLDWAEDNLIHKFKYAFYLSCRELSRLGPCSFAELVFRDWPELQDDIPHILAQARKILFVIDGFDELGAAPGALIEDICGDWEKKKPVPVLLGSLLNRVMLPKAALLVTTRPRALRDLRILAEEPIYIRVEGFLEEDRRAYFLRHFGDEDQAMRAFELMRSNAALFQLGSAPAVCWIVCTTLKLQMEKGEDPVPTCLTRTGLFLRFLCSRFPQGAQLRGALRTLSLLAAQGLWAQTSVLHREDLERLGVQESDLRLFLDGDILRQDRVSKGCYSFIHLSFQQFLTALFYTLEKEEEEDRDGHTWDIGDVQKLLSGVERLRNPDLIQAGYYSFGLANEKRAKELEATFGCRMSPDIKQELLRCDISCKGGHSTVTDLQELLGCLYESQEEELVKEVMAQFKEISLHLNAVDVVPSSFCVKHCRNLQKMSLQVIKENLPENVTASESDAEVERSQDDQHMLPFWTDLCSIFGSNKDLMGLAINDSFLSASLVRILCEQIASDTCHLQRVVFKNISPADAHRNLCLALRGHKTVTYLTLQGNDQDDMFPALCEVLRHPECNLRYLGLVSCSATTQQWADLSLALEVNQSLTCVNLSDNELLDEGAKLLYTTLRHPKCFLQRLSLENCHLTEANCKDLAAVLVVSRELTHLCLAKNPIGNTGVKFLCEGLRYPECKLQTLVLWNCDITSDGCCDLTKLLQEKSSLLCLDLGLNHIGVKGMKFLCEALRKPLCNLRCLWLWGCSIPPFSCEDLCSALSCNQSLVTLDLGQNPLGSSGVKMLFETLTCSSGTLRTLRLKIDDFNDELNKLLEEIEEKNPQLIIDTEKHHPWAERPSSHDFMI

SEQ ID NO: 35255 - protein, 846 aa, Homo sapiens
MVSSAQMGFNLQALLEQLSQDELSKFKYLITTFSLAHELQKIPHKEVDKADGKQLVEILTTHCDSYWVEMASLQVFEKMHRMDLSERAKDEVREAALKSFNKRKPLSLGITRKERPPLDVDEMLERFKTEAQAFTETKGNVICLGKEVFKGKKPDKDNRCRYILKTKFREMWKSWPGDSKEVQVMAERYKMLIPFSNPRVLPGPFSYTVVLYGPAGLGKTTLAQKLMLDWAEDNLIHKFKYAFYLSCRELSRLGPCSFAELVFRDWPELQDDIPHILAQARKILFVIDGFDELGAAPGALIEDICGDWEKKKPVPVLLGSLLNRVMLPKAALLVTTRPRALRDLRILAEEPIYIRVEGFLEEDRRAYFLRHFGDEDQAMRAFELMRSNAALFQLGSAPAVCWIVCTTLKLQMEKGEDPVPTCLTRTGLFLRFLCSRFPQGAQLRGALRTLSLLAAQGLWAQTSVLHREDLERLGVQESDLRLFLDGDILRQDRVSKGCYSFIHLSFQQFLTALFYTLEKEEEEDRDGHTWDIGDVQKLLSGVERLRNPDLIQAGYYSFGLANEKRAKELEATFGCRMSPDIKQELLRCDISCKGGHSTVTDLQELLGCLYESQEEELVKEVMAQFKEISLHLNAVDVVPSSFCVKHCRNLQKMSLQVIKENLPENVTASESDAEVERSQDDQHMLPFWTDLCSIFGSNKDLMGLAINDSFLSASLVRILCEQIASDTCHLQRVVFKNISPADAHRNLCLALRGHKTVTYLTLQGNDQDDMFPALCEVLRHPECNLRYLGLVSCSATTQQWADLSLALEVNQSLTCVNLSDNELLDEGAKLLYTTLRHPKCFLQRLS

SEQ ID NO: 35256 - protein, 1038 aa, Homo sapiens
MVSSAQMGFNLQALLEQLSQDELSKFKYLITTFSLAHELQKIPHKEVDKADGKQLVEILTTHCDSYWVEMASLQVFEKMHRMDLSERAKDEVREAALKSFNKRKPLSLAFTETKGNVICLGKEVFKGKKPDKDNRCRYILKTKFREMWKSWPGDSKEVQVMAERYKMLIPFSNPRVLPGPFSYTVVLYGPAGLGKTTLAQKLMLDWAEDNLIHKFKYAFYLSCRELSRLGPCSFAELVFRDWPELQDDIPHILAQARKILFVIDGFDELGAAPGALIEDICGDWEKKKPVPVLLGSLLNRVMLPKAALLVTTRPRALRDLRILAEEPIYIRVEGFLEEDRRAYFLRHFGDEDQAMRAFELMRSNAALFQLGSAPAVCWIVCTTLKLQMEKGEDPVPTCLTRTGLFLRFLCSRFPQGAQLRGALRTLSLLAAQGLWAQTSVLHREDLERLGVQESDLRLFLDGDILRQDRVSKGCYSFIHLSFQQFLTALFYTLEKEEEEDRDGHTWDIGDVQKLLSGVERLRNPDLIQAGYYSFGLANEKRAKELEATFGCRMSPDIKQELLRCDISCKGGHSTVTDLQELLGCLYESQEEELVKEVMAQFKEISLHLNAVDVVPSSFCVKHCRNLQKMSLQVIKENLPENVTASESDAEVERSQDDQHMLPFWTDLCSIFGSNKDLMGLAINDSFLSASLVRILCEQIASDTCHLQRVVFKNISPADAHRNLCLALRGHKTVTYLTLQGNDQDDMFPALCEVLRHPECNLRYLGLVSCSATTQQWADLSLALEVNQSLTCVNLSDNELLDEGAKLLYTTLRHPKCFLQRLSLENCHLTEANCKDLAAVLVVSRELTHLCLAKNPIGNTGVKFLCEGLRYPECKLQTLVLWNCDITSDGCCDLTKLLQEKSSLLCLDLGLNHIGVKGMKFLCEALRKPLCNLRCLWLWGCSIPPFSCEDLCSALSCNQSLVTLDLGQNPLGSSGVKMLFETLTCSSGTLRTLRLKIDDFNDELNKLLEEIEEKNPQLIIDTEKHHPWAERPSSHDFMI

SEQ ID NO: 35257 - protein, 1039 aa, Homo sapiens
MVSSAQMGFNLQALLEQLSQDELSKFKYLITTFSLAHELQKIPHKEMASLQVFEKMHRMDLSERAKDEVREAALKSFNKRKPLSLGITRKERPPLDVDEMLERFKTEAQAFTETKGNVICLGKEVFKGKKPDKDNRCRYILKTKFREMWKSWPGDSKEVQVMAERYKMLIPFSNPRVLPGPFSYTVVLYGPAGLGKTTLAQKLMLDWAEDNLIHKFKYAFYLSCRELSRLGPCSFAELVFRDWPELQDDIPHILAQARKILFVIDGFDELGAAPGALIEDICGDWEKKKPVPVLLGSLLNRVMLPKAALLVTTRPRALRDLRILAEEPIYIRVEGFLEEDRRAYFLRHFGDEDQAMRAFELMRSNAALFQLGSAPAVCWIVCTTLKLQMEKGEDPVPTCLTRTGLFLRFLCSRFPQGAQLRGALRTLSLLAAQGLWAQTSVLHREDLERLGVQESDLRLFLDGDILRQDRVSKGCYSFIHLSFQQFLTALFYTLEKEEEEDRDGHTWDIGDVQKLLSGVERLRNPDLIQAGYYSFGLANEKRAKELEATFGCRMSPDIKQELLRCDISCKGGHSTVTDLQELLGCLYESQEEELVKEVMAQFKEISLHLNAVDVVPSSFCVKHCRNLQKMSLQVIKENLPENVTASESDAEVERSQDDQHMLPFWTDLCSIFGSNKDLMGLAINDSFLSASLVRILCEQIASDTCHLQRVVFKNISPADAHRNLCLALRGHKTVTYLTLQGNDQDDMFPALCEVLRHPECNLRYLGLVSCSATTQQWADLSLALEVNQSLTCVNLSDNELLDEGAKLLYTTLRHPKCFLQRLSLENCHLTEANCKDLAAVLVVSRELTHLCLAKNPIGNTGVKFLCEGLRYPECKLQTLVLWNCDITSDGCCDLTKLLQEKSSLLCLDLGLNHIGVKGMKFLCEALRKPLCNLRCLWLWGCSIPPFSCEDLCSALSCNQSLVTLDLGQNPLGSSGVKMLFETLTCSSGTLRTLRLKIDDFNDELNKLLEEIEEKNPQLIIDTEKHHPWAERPSSHDFMI

SEQ ID NO: 35258 - protein, 491 aa, Homo sapiens [sequence omitted]

SEQ ID NO: 35259 - protein, 303 aa, Homo sapiens
MASWAKGRSYLAPGLLQGQVAIVTGGATGIGKAIVKELLELGSNVVIASRKLERLKSAADELQANLPPTKQARVIPIQCNIRNEEEVNNLVKSTLDTFGKINFLVNNGGGQFLSPAEHISSKGWHAVLETNLTGTFYMCKAVYSSWMKEHGGSIVNIIVPTKAGFPLAVHSGAARAGVYNLTKSLALEWACSGIRINCVAPGVIYSQTAVENYGSWGQSFFEGSFQKIPAKRIGVPEEVSSVVCFLLSPAASFITGQSVDVDGGRSLYTHSYEVPDHDNWPKGAGDLSVVKKMKETFKEKAKL

SEQ ID NO: 35260 - protein, 157 aa, Homo sapiens
MKEHGGSIVNIIVPTKAGFPLAVHSGAARAGVYNLTKSLALEWACSGIRINCVAPGVIYSQTAVENYGSWGQSFFEGSFQKIPAKRIGVPEEVSSVVCFLLSPAASFITGQSVDVDGGRSLYTHSYEVPDHDNWPKGAGDLSVVKKMKETFKEKAKL

SEQ ID NO: 35261 - protein, 2440 aa, Homo sapiens
MSSSGYPPNQGAFSTEQSRYPPHSVQYTFPNTRHQQEFAVPDYRSSHLEVSQASQLLQQQQQQQLRRRPSLLSEFHPGSDRPQERRTSYEPFHPGPSPVDHDSLESKRPRLEQVSDSHFQRVSAAVLPLVHPLPEGLRASADAKKDPAFGGKHEAPSSPISGQPCGDDQNASPSKLSKEELIQSMDRVDREIAKVEQQILKLKKKQQQLEEEAAKPPEPEKPVSPPPVEQKHRSIVQIIYDENRKKAEEAHKIFEGLGPKVELPLYNQPSDTKVYHENIKTNQVMRKKLILFFKRRNHARKQREQKICQRYDQLMEAWEKKVDRIENNPRRKAKESKTREYYEKQFPEIRKQREQQERFQRVGQRGAGLSATIARSEHEISEIIDGLSEQENNEKQMRQLSVIPPMMFDAEQRRVKFINMNGLMEDPMKVYKDRQFMNVWTDHEKEIFKDKFIQHPKNFGLIASYLERKSVPDCVLYYYLTKKNENYKALVRRNYGKRRGRNQQIARPSQEEKVEEKEEDKAEKTEKKEEEKKDEEEKDEKEDSKENTKEKDKIDGTAEETEEREQATPRGRKTANSQGRRKGRITRSMTNEAAAASAAAAAATEEPPPPLPPPPEPISTEPVETSRWTEEEMEVAKKGLVEHGRNWAAIAKMVGTKSEAQCKNFYFNYKRRHNLDNLLQQHKQKTSRKPREERDVSQCESVASTVSAQEDEDIEASNEEENPEDSEVEAVKPSEDSPENATSRGNTEPAVELEPTTETAPSTSPSLAVPSTKPAEDESVETQVNDSISAETAEQMDVDQQEHSAEEGSVCDPPPATKADSVDVEVRVPENHASKVEGDNTKERDLDRASEKVEPRDEDLVVAQQINAQRPEPQSDNDSSATCSADEDVDGEPERQRMFPMDSKPSLLNPTGSILVSSPLKPNPLDLPQLQHRAAVIPPMVSCTPCNIPIGTPVSGYALYQRHIKAMHESALLEEQRQRQEQIDLECRSSTSPCGTSKSPNREWEVLQPAPHQVITNLPEGVRLPTTRPTRPPPPLIPSSKTTVASEKPSFIMGGSISQGTPGTYLTSHNQASYTQETPKPSVGSISLGLPRQQESAKSATLPYIKQEEFSPRSQNSQPEGLLVRAQHEGVVRGTAGAIQEGSITRGTPTSKISVESIPSLRGSITQGTPALPQTGIPTEALVKGSISRMPIEDSSPEKGREEAASKGHVIYEGKSGHILSYDNIKNAREGTRSPRTAHEISLKRSYESVEGNIKQGMSMRESPVSAPLEGLICRALPRGSPHSDLKERTVLSGSIMQGTPRATTESFEDGLKYPKQIKRESPPIRAFEGAITKGKPYDGITTIKEMGRSIHEIPRQDILTQESRKTPEVVQSTRPIIEGSISQGTPIKFDNNSGQSAIKHNVKSLITGPSKLSRGMPPLEIVPENIKVVERGKYEDVKAGETVRSRHTSVVSSGPSVLRSTLHEAPKAQLSPGIYDDTSARRTPVSYQNTMSRGSPMMNRTSDVTISSNKSTNHERKSTLTPTQRESIPAKSPVPGVDPVVSHSPFDPHHRGSTAGEVYRSHLPTHLDPAMPFHRALDPAAAAYLFQRQLSPTPGYPSQYQLYAMENTRQTILNDYITSQQMQVNLRPDVARGLSPREQPLGLPYPATRGIIDLTNMPPTILVPHPGGTSTPPMDRITYIPGTQITFPPRPYNSASMSPGHPTHLAAAASAEREREREREKERERERIAAASSDLYLRPGSEQPGRPGSHGYVRSPSPSVRTQETMLQQRPSVFQGTNGTSVITPLDPTAQLRIMPLPAGGPSISQGLPASRYNTAADALAALVDAAASAPQMDVSKTKESKHEAARLEENLRSRSAAVSEQQQLEQKTLEVEKRSVQCLYTSSAFPSGKPQPHSSVVYSEAGKDKGPPPKSRYEEELRTRGKTTITAANFIDVIITRQIASDKDARERGSQSSDSSSSLSSHRYETPSDAIEVISPASSPAPPQEKLQTYQPEVVKANQAENDPTRQYEGPLHHYRPQQESPSPQQQLPPSSQAEGMGQVPRTHRLITLADHICQIITQDFARNQVSSQTPQQPPTSTFQNSPSALVSTPVRTKTSNRYSPESQAQSVHHQRPGSRVSPENLVDKSRGSRPGKSPERSHVSSEPYEPISPPQVPVVHEKQDSLLLLSQRGAEPAEQRNDARSPGSISYLPSFFTKLENTSPMVKSKKQEIFRKLNSSGGGDSDMAAAQPGTEIFNLPAVTTSGSVSSRGHSFADPASNLGLEDIIRKALMGSFDDKVEDHGVVMSQPMGVVPGTANTSVVTSGETRREEGDPSPHSGGVCKPKLISKSNSRKSKSPIPGQGYLGTERPSSVSSVHSEGDYHRQTPGWAWEDRPSSTGSTQFPYNPLTMRMLSSTPPTPIACAPSAVNQAAPHQQNRIWEREPAPLLSAQYETLSDSDD

SEQ ID NO: 35262 - protein, 2337 aa, Homo sapiens
MSSSGYPPNQGAFSTEQSRYPPHSVQYTFPNTRHQQEFAVPDYRSSHLEVSQASQLLQQQQQQQLRRRPSLLSEFHPGSDRPQERRTSYEPFHPGPSPVDHDSLESKRPRLEQVSDSHFQRVSAAVLPLVHPLPEGLRASADAKKDPAFGGKHEAPSSPISGQPCGDDQNASPSKLSKEELIQSMDRVDREIAKVEQQILKLKKKQQQLEEEAAKPPEPEKPVSPPPVEQKHRSIVQIIYDENRKKAEEAHKIFEGLGPKVELPLYNQPSDTKVYHENIKTNQVMRKKLILFFKRRNHARKQREQKICQRYDQLMEAWEKKVDRIENNPRRKAKESKTREYYEKQFPEIRKQREQQERFQRVGQRGAGLSATIARSEHEISEIIDGLSEQENNEKQMRQLSVIPPMMFDAEQRRVKFINMNGLMEDPMKVYKDRQFMNVWTDHEKEIFKDKFIQHPKNFGLIASYLERKSVPDCVLYYYLTKKNENYKALVRRNYGKRRGRNQQIARPSQEEKVEEKEEDKAEKTEKKEEEKKDEEEKDEKEDSKENTKEKDKIDGTAEETEEREQATPRGRKTANSQGRRKGRITRSMTNEAAAASAAAAAATEEPPPPLPPPPEPISTEPVETSRWTEEEMEVAKKGLVEHGRNWAAIAKMVGTKSEAQCKNFYFNYKRRHNLDNLLQQHKQKTSRKPREERDVSQCESVASTVSAQEDEDIEASNEEENPEDSEGAENSSDTESAPSPSPVEAVKPSEDSPENATSRGNTEPAVELEPTTETAPSTSPSLAVPSTKPAEDESVETQVNDSISAETAEQMDVDQQEHSAEEGSVCDPPPATKADSVDVEVRVPENHASKVEGDNTKERDLDRASEKVEPRDEDLVVAQQINAQRPEPQSDNDSSATCSADEDVDGEPERQRMFPMDSKPSLLNPTGSILVSSPLKPNPLDLPQLQHRAAVIPPMVSCTPCNIPIGTPVSGYALYQRHIKAMHESALLEEQRQRQEQIDLECRSSTSPCGTSKSPNREWEVLQPAPHQVITNLPEGVRLPTTRPTRPPPPLIPSSKTTVASEKPSFIMGGSISQGTPGTYLTSHNQASYTQETPKPSVGSISLGLPRQQESAKSATLPYIKQEEFSPRSQNSQPEGLLVRAQHEGVVRGTAGAIQEGSITRGTPTSKISVESIPSLRGSITQGTPALPQTGIPTEALVKGSISRMPIEDSSPEKGREEAASKGHVIYEGKSGHILSYDNIKNAREGTRSPRTAHEISLKRSYESVEGNIKQGMSMRESPVSAPLEGLICRALPRGSPHSDLKERTVLSGSIMQGTPRATTESFEDGLKYPKQIKRESPPIRAFEGAITKGKPYDGITTIKEMGRSIHEIPRQDILTQESRKTPEVVQSTRPIIEGSISQGTPIKFDNNSGQSAIKHNVKSLITGPSKLSRGMPPLEIVPENIKVVERGKYEDVKAGETVRSRHTSVVSSGPSVLRSTLHEAPKAQLSPGIYDDTSARRTPVSYQNTMSRGSPMMNRTSDVTISSNKSTNHERKSTLTPTQRESIPAKSPVPGVDPVVSHSPFDPHHRGSTAGEVYRSHLPTHLDPAMPFHRALDPAAAAYLFQRQLSPTPGYPSQYQLYAMENTRQTILNDYITSQQMQVNLRPDVARGLSPREQPLGLPYPATRGIIDLTNMPPTILVPHPGGTSTPPMDRITYIPGTQITFPPRPYNSASMSPGHPTHLAAAASAEREREREREKERERERIAAASSDLYLRPGSEQPGRPGSHGYVRSPSPSVRTQETMLQQRPSVFQGTNGTSVITPLDPTAQLRIMPLPAGGPSISQGLPASRYNTAADALAALVDAAASAPQMDVSKTKEISSHRYETPSDAIEVISPASSPAPPQEKLQTYQPEVVKANQAENDPTRQYEGPLHHYRPQQESPSPQQQLPPSSQAEGMGQVPRTHRLITLADHICQIITQDFARNQVSSQTPQQPPTSTFQNSPSALVSTPVRTKTSNRYSPESQAQSVHHQRPGSRVSPENLVDKSRGSRPGKSPERSHVSSEPYEPISPPQVPVVHEKQDSLLLLSQRGAEPAEQRNDARSPGSISYLPSFFTKLENTSPMVKSKKQEIFRKLNSSGGGDSDMAAAQPGTEIFNLPAVTTSGSVSSRGHSFADPASNLGLEDIIRKALMGSFDDKVEDHGVVMSQPMGVVPGTANTSVVTSGETRREEGDPSPHSGGVCKPKLISKSNSRKSKSPIPGQGYLGTERPSSVSSVHSEGDYHRQTPGWAWEDRPSSTGSTQFPYNPLTMRMLSSTPPTPIACAPSAVNQAAPHQQNRIWEREPAPLLSAQYETLSDSDD

SEQ ID NO: 35263 - protein, 914 aa, Homo sapiens
MSSSGYPPNQGAFSTEQSRYPPHSVQYTFPNTRHQQDPAFGGKHEAPSSPISGQPCGDDQNASPSKLSKEELIQSMDRVDREIAKVEQQILKLKKKQQQLEEEAAKPPEPEKPVSPPPVEQKHRSIVQIIYDENRKKAEEAHKIFEGLGPKVELPLYNQPSDTKVYHENIKTNQVMRKKLILFFKRRNHARKQREQKICQRYDQLMEAWEKKVDRIENNPRRKAKESKTREYYEKQFPEIRKQREQQERFQRVGQRGAGLSATIARSEHEISEIIDGLSEQENNEKQMRQLSVIPPMMFDAEQRRVKFINMNGLMEDPMKVYKDRQFMNVWTDHEKEIFKDKFIQHPKNFGLIASYLERKSVPDCVLYYYLTKKNENYKALVRRNYGKRRGRNQQIARPSQEEKVEEKEEDKAEKTEKKEEEKKDEEEKDEKEDSKENTKEKDKIDGTAEETEEREQATPRGRKTANSQGRRKGRITRSMTNEAAAASAAAAAATEEPPPPLPPPPEPISTEPVETSRWTEEEMEVAKKGLVEHGRNWAAIAKMVGTKSEAQCKNFYFNYKRRHNLDNLLQQHKQKTSRKPREERDVSQCESVASTVSAQEDEDIEASNEEENPEDSEGAENSSDTESAPSPSPVEAVKPSEDSPENATSRGNTEPAVELEPTTETAPSTSPSLAVPSTKPAEDESVETQVNDSISAETAEQMDVDQQEHSAEEGSVCDPPPATKADSVDVEVRVPENHASKVEGDNTKERDLDRASEKVEPRDEDLVVAQQINAQRPEPQSDNDSSATCSADEDVDGEPERQRMFPMDSKPSLLNPTGSILVSSPLKPNPLDLPQLQHRAAVIPPMVSCTPCNIPIGTPVSGYALYQRHIKAMHESALLEEQRQRQEQIDLECRSSTSPCGTSKSPNREWEGR

SEQ ID NO: 35264 - protein, 454 aa, Homo sapiens
MVFCLSSEEPRRPLRSDMVHFQASEVQQLLHNKFVVILGDSIQRAVYKDLVLLLQKDSLLTAAQLKAKGELSFEQDQLVAGGQLGELHNGTQYREVRQFCSGSGHHLVRFYFLTRVYSEYLEDVLEELTYGPAPDLVIINSCLWDLSRYGRCSMESYRENLERVFVRMDQVLPDSCLLVWNMAMPLGERITGGFLLPELQPLAGSLRRDVVEGNFYSATLAGDHCFDVLDLHFHFRHAVQHRHRDGVHWDQHAHRHLSHLLLTHVADAWGVELPKRGYPPDPWIEDWAEMNHPFQGSHRQTPDFGEHLALLPPPPSSLPPPMPFPYPLPQPSPPPLFPPLPQDTPFFPGQPFPPHEFFNYNPVEDFSMPPHLGCGPGVNFVPGPLPPPIPGPNPHGQHWGPVVHRGMPRYVPNSPYHVRRMGGPCRQRLRHSERLIHTYKLDRRPPAHSGTWPG

SEQ ID NO: 35265 - protein, 403 aa, Homo sapiens
MVFCLSSEEPRRPLRSDMVHFQASEVQQLLHNKFVVILGDSIQRAVYKDLVLLLQKDSLLTAAQLKAKYLEDVLEELTYGPAPDLVIINSCLWDLSRYGRCSMESYRENLERVFVRMDQVLPDSCLLVWNMAMPLGERITGGFLLPELQPLAGSLRRDVVEGNFYSATLAGDHCFDVLDLHFHFRHAVQHRHRDGVHWDQHAHRHLSHLLLTHVADAWGVELPKRGYPPDPWIEDWAEMNHPFQGSHRQTPDFGEHLALLPPPPSSLPPPMPFPYPLPQPSPPPLFPPLPQDTPFFPGQPFPPHEFFNYNPVEDFSMPPHLGCGPGVNFVPGPLPPPIPGPNPHGQHWGPVVHRGMPRYVPNSPYHVRRMGGPCRQRLRHSERLIHTYKLDRRPPAHSGTWPG

SEQ ID NO: 35266 - protein, 312 aa, Homo sapiens
MVFCLSSEEPRRPLRSDMVHFQASEVQQLLHNKFVVILGDSIQRAVYKDLVLLLQKDSLLTAAQLKAKYLEDVLEELTYGPAPDLVIINSCLWDLSRYGRCSMESYRENLERVFVRMDQVLPDSCLLVWNMAMPLGERITGGFLLPELQPLAGSLRRDVVEGNFYSATLAGDHCFDVLDLHFHFRHAVQHRHRDGVHWDQHAHRHLSHLLLTHEFFNYNPVEDFSMPPHLGCGPGVNFVPGPLPPPIPGPNPHGQHWGPVVHRGMPRYVPNSPYHVRRMGGPCRQRLRHSERLIHTYKLDRRPPAHSGTWPG

SEQ ID NO: 35267 - protein, 152 aa, Homo sapiens
MVFCLSSEEPRRPLRSDMVHFQASEVQQLLHNKFVVILGDSIQRAVYKDLVLLLQKDSLLTAAQLKAKGELSFEQDQLVAGGQLGELHNGTQYREVRQFCSGSGHHLVRFYFLTRVYSEYLEDVLEELTYGPSHPMNSSTIIQWRTSRCHPT

SEQ ID NO: 35268 - protein, 464 aa, Homo sapiens
MLATRRLLGWSLPARVSVRFSGDTTAPKKTSFGSLKDEDRIFTNLYGRHDWRLKGSLSRGDWYKTKEILLKGPDWILGEIKTSGLRGRGGAGFPTGLKWSFMNKPSDGRPKYLVVNADEGEPGTCKDREILRHDPHKLLEGCLVGGRAMGARAAYIYIRGEFYNEASNLQVAIREAYEAGLIGKNACGSGYDFDVFVVRGAGAYICGEETALIESIEGKQGKPRLKPPFPADVGVFGCPTTVANVETVAVSPTICRRGGTWFAGFGRERNSGTKLFNISGHVNHPCTVEEEMSVPLKELIEKHAGGVTGGWDNLLAVIPGGSSTPLIPKSVCETVLMDFDALVQAQTGLGTAAVIVMDRSTDIVKAIARLIEFYKHESCGQCTPCREGVDWMNKVMARFVRGDARPAEIDSLWEISKQIEGHTICALGDGAAWPVQGLIRHFRPELEERMQRFAQQHQARQAAS

SEQ ID NO: 35269 - protein, 455 aa, Homo sapiens
MLATRRLLGWSLPARTAPKKTSFGSLKDEDRIFTNLYGRHDWRLKGSLSRGDWYKTKEILLKGPDWILGEIKTSGLRGRGGAGFPTGLKWSFMNKPSDGRPKYLVVNADEGEPGTCKDREILRHDPHKLLEGCLVGGRAMGARAAYIYIRGEFYNEASNLQVAIREAYEAGLIGKNACGSGYDFDVFVVRGAGAYICGEETALIESIEGKQGKPRLKPPFPADVGVFGCPTTVANVETVAVSPTICRRGGTWFAGFGRERNSGTKLFNISGHVNHPCTVEEEMSVPLKELIEKHAGGVTGGWDNLLAVIPGGSSTPLIPKSVCETVLMDFDALVQAQTGLGTAAVIVMDRSTDIVKAIARLIEFYKHESCGQCTPCREGVDWMNKVMARFVRGDARPAEIDSLWEISKQIEGHTICALGDGAAWPVQGLIRHFRPELEERMQRFAQQHQARQAAS

SEQ ID NO: 35270 - protein, 186 aa, Homo sapiens
MAVARAGVLGVQWLQRASRNVMPLGARTASHMTKDMFPGPYPRTPEERAAAAKKYNMRVEDYEPYPDDGMGYGDYPKLPDRSQHERDPWYSWDQPGLRLNWGEPMHWHLDMYNRNRVDTSPTPVSWHVMCMQLFGFLAFMIFMCWVGDVYPVYQPVGPKQYPYNNLYLERGGDPSKEPERVVHYEI

SEQ ID NO: 35271 - protein, 172 aa, Homo sapiens
MAVARAGVLGVQWLQRASRNVMPLGARTASHMTKDMFPGPYPRTPEERAAAAKKYNMRVEDYEPYPDDGMGYGDYPKLPDRSQHERDPWYSWDQPGLRLNWGEPMHWHLDMYNRNRVDTSPTPVSWHVMCMQLFGFLAFMIFMCWVGDVYPVYQPVCRHHFSYNLGFLSALG

SEQ ID NO: 35272 - protein, 155 aa, Homo sapiens
MTKDMFPGPYPRTPEERAAAAKKYNMRVEDYEPYPDDGMGYGDYPKLPDRSQHERDPWYSWDQPGLRLNWGEPMHWHLDMYNRNRVDTSPTPVSWHVMCMQLFGFLAFMIFMCWVGDVYPVYQPVGPKQYPYNNLYLERGGDPSKEPERVVHYEI

SEQ ID NO: 35273 - protein, 208 aa, Homo sapiens
MGYCSGRCTLIFICGMQLVCVLERQIFDFLGYQWAPILANFVHIIIVILGLFGTIQYRPRYITGYAVWLVLWVTWNVFVICFYLEAGDLSKETDLILTFNISMHRSWWMENGPGCTVTSVTPAPDWAPEDHRYITVSGCLLEYQYIEVAHSSLQIVLALAGFIYACYVVKCITEEEDSFDFIGGFDSYGYQGPQKTSHLQLQPMYMSK

SEQ ID NO: 35274 - protein, 188 aa, Homo sapiens
MGYCSGRCTLIFICGMQLVCVLERQIFDFLGYQWAPILANFVHIIIVILGLFGTIQYRPRYITGYAVWLVLWVTWNVFVICFYLEAGDLSKETDLILTFNISMHRSWWMENGPGCTVTSVTPAPDWAPEDHRYITVSGCLLEYQYIEVAHSSLQIVLAVSVGSQPLLLVPLGLFYFCANSVHTNGICG

SEQ ID NO: 35275 - protein, 207 aa, Homo sapiens
MGIIRFLLLYCPTNILTVCVLERQIFDFLGYQWAPILANFVHIIIVILGLFGTIQYRPRYITGYAVWLVLWVTWNVFVICFYLEAGDLSKETDLILTFNISMHRSWWMENGPGCTVTSVTPAPDWAPEDHRYITVSGCLLEYQYIEVAHSSLQIVLALAGFIYACYVVKCITEEEDSFDFIGGFDSYGYQGPQKTSHLQLQPMYMSK

SEQ ID NO: 35276 - protein, 197 aa, Homo sapiens
MGCCTGRCSLICLCALQLVSALERQIFDFLGFQWAPILGNFLHIIVVILGLFGTIQYRPRYIMVYTVWTALWVTWNVFIICFYLEVGGLSKDTDLMTFNISVHRSWWREHGPGCVRRVLPPSAHGMMDDYTYVSVTGCIVDFQYLEVIHSAVQILLSLVGFVYACYVISISMEEEDTYSCDLQVCKHLFIQMLQIIE

SEQ ID NO: 35277 - protein, 292 aa, Homo sapiens
MSRIPLGKVLLRNVIRHTDAHNKIQEESDMWKIRELEKQMEDAYRGTKRKMLPSSSSRMRSDGFDEESQRYYWRPKNEISGTLEDDFLKAKSWNKKFYDYEANMPDRWGHSGYKELYPEEFETDSDQQDITNGKKTSPQVKSSTHESRKHKKSKKSHKKKQKKRSHKKQKKSKKEATDITADSSSEFSEETGASGTRKGKQPHKRKKKSRKKSLKKPALFLEAESNTSHSDDSASSSSEESEERDTKKTKRKKREKKAHTSVANNEIQERTNKRTNWKVATDERSAESSEDD

SEQ ID NO: 35278 - protein, 293 aa, Homo sapiens
MSRIPLGKVLLRNVIRHTDAHNKIQEESDMWKIRELEKQMEDAYRGTKRKMLPSSSSRMRSDGFDEESQRYYWRPKNEISGTLEDDFLKAKSWNKKFYDYEANMPDRWGHSGYKELYPEEFETDSSDQQDITNGKKTSPQVKSSTHESRKHKKSKKSHKKKQKKRSHKKQKKSKKEATDITADSSSEFSEETGASGTRKGKQPHKRKKKSRKKSLKKPALFLEAESNTSHSDDSASSSSEESEERDTKKTKRKKREKKAHTSVANNEIQERTNKRTNWKVATDERSAESSEDD

SEQ ID NO: 35279 - protein, 264 aa, Homo sapiens
MWKIRELEKQMEDAYRGTKRKMLPSSSSRMRSDGFDEESQRYYWRPKNEISGTLEDDFLKAKSWNKKFYDYEANMPDRWGHSGYKELYPEEFETDSSDQQDITNGKKTSPQVKSSTHESRKHKKSKKSHKKKQKKRSHKKQKKSKKEATDITADSSSEFSEETGASGTRKGKQPHKRKKKSRKKSLKKPALFLEAESNTSHSDDSASSSSEESEERDTKKTKRKKREKKAHTSVANNEIQERTNKRTNWKVATDERSAESSEDD

SEQ ID NO: 35280 - protein, 402 aa, Homo sapiens
MPPVSRSSYSEDIVGSRRRRRSSSGSPPSPQSRCSSWDGCSRSHSRGREGLRPPWSELDVGALYPFSRSGSRGRLPRFRNYAFASSWSTSYSGYRYHRHCYAEERQSAEDYEKEESHRQRRLKERERIGELGAPEVWGPSPKFPQLDSDEHTPVEDEEEVTHQKSSSSDSNSEEHRKKKTSRSRNKKKRKNKSSKRKHRKYSDSDSNSESDTNSDSDDDKKRVKAKKKKKKKKHKTKKKKNKKTKKESSDSSCKDSEEDLSEATWMEQPNVADTMDLIGPEAPIIHTSQDEKPLKYGHALLPGEGAAMAEYVKAGKRIPRRGEIGLTSEEIGSFECSGYVMSGSRHRRMEAVRLRKENQIYSADEKRALASFNQEERRKRESKILASFREMVHKKTKEKDDK

SEQ ID NO: 35281 - protein, 415 aa, Homo sapiens
MAPVSGSRSPDREASGSGGRRRSSSKSPKPSKSARSPRGRRSRSHSCSRSGDRNGLTHQLGGLSQGSRNQSYRSRSRSRSRERPSAPRGIPFASASSSVYYGSYSRPYGSDKPWPSLLDKEREESLRQKRLSERERIGELGAPEVWGLSPKNPEPDSDEHTPVEDEEPKKSTTSASTSEEEKKKKSSRSKERSKKRRKKKSSKRKHKKYSEDSDSDSDSETDSSDEDNKRRAKKAKKKEKKKKHRSKKYKKKRSKKSRKESSDSSSKESQEEFLENPWKDRTKAEEPSDLIGPEAPKTLTSQDDKPLNYGHALLPGEGAAMAEYVKAGKRIPRRGEIGLTSEEIASFECSGYVMSGSRHRRMEAVRLRKENQIYSADEKRALASFNQEERRKRENKILASFREMVYRKTKGKDDK

SEQ ID NO: 35282 - protein, 1098 aa, Homo sapiens
MLKTESSGERTTLRSASPHRNAYRTEFQALKSTFDKPKSDGEQKTKEGEGSQQSRGRKYGSNVNRIKNLFMQMGMEPNENAAVIAKTRGKGGHSSPQRRMKPKEFLEKTDGSVVKLESSVSERISRFDTMYDGPSYSKFTETRKMFERSVHESGQNNRYSPKKEKAGGSEPQDEWGGSKSNRGSTDSLDSLSSRTEAVSPTVSQLSAVFENTDSPSAIISEKAENNEYSVTGHYPLNLPSVTVTNLDTFGHLKDSNSWPPSNKRGVDTEDAHKSNATPVPEVASKSTSLASIPGEEIQQSKEPEDSTSNQQTPDSIDKDGPEEPCAESKAMPKSEIPSPQSQLLEDAEANLVGREAAKQQRKELAGGDFTSPDASASSCGKEVPEDSNNFDGSHVYMHSDYNVYRVRSRYNSDWGETGTEQDEEEDSDENSYYQPDMEYSEIVGLPEEEEIPANRKIKFSSAPIKVFNTYSNEDYDRRNDEVDPVAASAEYELEKRVEKLELFPVELEKDEDGLGISIIGMGVGADAGLEKLGIFVKTVTEGGAAQRDGRIQVNDQIVEVDGISLVGVTQNFAATVLRNTKGNVRFVIGREKPGQVSEVAQLISQTLEQERRQRELLEQHYAQYDADDDETGEYATDEEEDEVGPVLPGSDMAIEVFELPENEDMFSPSELDTSKLSHKFKELQIKHAVTEAEIQKLKTKLQAAENEKVRWELEKTQLQQNIEENKERMLKLESYWIEAQTLCHTVNEHLKETQSQYQALEKKYNKAKKLIKDFQQKELDFIKRQEAERKKIEDLEKAHLVEVQGLQVRIRDLEAEVFRLLKQNGTQVNNNNNIFERRTSLGEVSKGDTMENLDGKQTSCQDGLSQDLNEAVPETERLDSKALKTRAQLSVKNRRQRPSRTRLYDSVSSTDGEDSLERKNFTFNDDFSPSSTSSADLSGLGAEPKTPGLSQSLALSSDESLDMIDDEILDDGQSPKHSQCQNRAVQEWSVQQVSHWLMSLNLEQYVSEFSAQNITGEQLLQLDGNKLKALGMTASQDRAVVKKKLKEMKMSLEKARKAQEKMEKQREKLRRKEQEQMQRKSKKTEKMTSTTAEGAGEQ

SEQ ID NO: 35283 - protein, 387 aa, Homo sapiens
MHITKLLPPKGLRTSSPESDSGVPPLTPVDSNVPFSSDHIAEFQEEPLDPEMGPLSSMWGDTSLFSTSKSDHDVEESPCHHQTTNKKILREKDDAKDPKSLRASSSLAVQGGKIKRKFVDLGAPLRRNSSKGKKWKEKEKEASRFSAGSRIFRGRLENWTPKPCSTAQTSTRSPCMPFSWFNDSRKGSYSFRNLPAPTSSLQPSPETLISDKKGSKNFTFNDDFSPSSTSSADLSGLGAEPKTPGLSQSLALSSDEILDDGQSPKHSQCQNRAVQEWSVQQVSHWLMSLNLEQYVSEFSAQNITGEQLLQLDGNKLKALGMTASQDRAVVKKKLKEMKMSLEKARKAQEKMEKQREKLRRKEQEQMQRKSKKTEKMTSTTAEGAGEQ

SEQ ID NO: 35284 - protein, 1374 aa, Homo sapiens
MLKTESSGERTTLRSASPHRNAYRTEFQALKSTFDKPKSDGEQKTKEGEGSQQSRGRKYGSNVNRIKNLFMQMGMEPNENAAVIAKTRGKGGHSSPQRRMKPKEFLEKTDGSVVKLESSVSERISRFDTMYDGPSYSKFTETRKMFERSVHESGQNNRYSPKKEKAGGSEPQDEWGGSKSNRGSTDSLDSLSSRTEAVSPTVSQLSAVFENTDSPSAIISEKAENNEYSVTGHYPLNLPSVTVTNLDTFGHLKDSNSWPPSNKRGVDTEDAHKSNATPVPEVASKSTSLASIPGEEIQQSKEPEDSTSNQQTPDSIDKDGPEEPCAESKAMPKSEIPSPQSQLLEDAEANLVGREAAKQQRKELAGGDFTSPDASASSCGKEVPEDSNNFDGSHVYMHSDYNVYRVRSRYNSDWGETGTEQDEEEDSDENSYYQPDMEYSEIVGLPEEEEIPANRKIKFSSAPIKVFNTYSNEDYDRRNDEVDPVAASAEYELEKRVEKLELFPVELEKDEDGLGISIIGMGVGADAGLEKLGIFVKTVTEGGAAQRDGRIQVNDQIVEVDGISLVGVTQNFAATVLRNTKGNVRFVIGREKPGQVSEVAQLISQTLEQERRQRELLEQHYAQYDADDDENTVAELQGMSGNCNNNNNYFLKTGEYATDEEEDEVGPVLPGSDMAIEVFELPENEDMFSPSELDTSKLSHKFKELQIKHAVTEAEIQKLKTKLQAAENEKVRWELEKTQLQQNIEENKERMLKLESYWIEAQTLCHTVNEHLKETQSQYQALEKKYNKAKKLIKDFQQKELDFIKRQEAERKKIEDLEKAHLVEVQGLQVRIRDLEAEVFRLLKQNGTQVNNNNNIFERRTSLGEVSKGDTMENLDGKQTSCQDGLSQDLNEAVPETERLDSKALKTRAQLSVKNRRQRPSRTRLYDSVSSTDGEDSLERKPSNSFYNHMHITKLLPPKGLRTSSPESDSGVPPLTPVDSNVPFSSDHIAEFQEEPLDPEMGPLSSMWGDTSLFSTSKSDHDVEESPCHHQTTNKKILREKDDAKDPKSLRASSSLAVQGGKIKRKFVDLGAPLRRNSSKGKKWKEKEKEASRFSAGSRIFRGRLENWTPKPCSTAQTSTRSPCMPFSWFNDSRKGSYSFRNLPAPTSSLQPSPETLISDKKGSKVENTWITKANKRNPNPSSSSIFGRHSQLMSVVWIQETNNFTFNDDFSPSSTSSADLSGLGAEPKTPGLSQSLALSSDEILDDGQSPKHSQCQNRAVQEWSVQQVSHWLMSLNLEQYVSEFSAQNITGEQLLQLDGNKLKALGMTASQDRAVVKKKLKEMKMSLEKARKAQEKMEKQREKLRRKEQEQMQRKSKKTEKMTSTTAEGAGEQ

SEQ ID NO: 35285 - protein, 1253 aa, Homo sapiens
MLKTESSGERTTLRSASPHRNAYRTEFQALKSTFDKPKSDGEQKTKEGEGSQQSRGRKYGSNVNRIKNLFMQMGMEPNENAAVIAKTRGKGGHSSPQRRMKPKEFLEKTDGSVVKLESSVSERISRFDTMYDGPSYSKFTETRKMFERSVHESGQNNRYSPKKEKAGGSEPQDEWGGSKSNRGSTDSLDSLSSRTEAVSPTVSQLSAVFENTDSPSAIISEKAENNEYSVTGHYPLNLPSVTVTNLDTFGHLKDSNSWPPSNKRGVDTEDAHKSNATPVPEVASKSTSLASIPGEEIQQSKEPEDSTSNQQTPDSIDKDGPEEPCAESKAMPKSEIPSPQSQLLEDAEANLVGREAAKQQRKELAGGDFTSPDASASSCGKEVPEDSNNFDGSHVYMHSDYNVYRVRSRYNSDWGETGTEQDEEEDSDENSYYQPDMEYSEIVGLPEEEEIPANRKIKFSSAPIKVFNTYSNEDYDRRNDEVDPVAASAEYELEKRVEKLELFPVELEKDEDGLGISIIGMGVGADAGLEKLGIFVKTVTEGGAAQRDGRIQVNDQIVEVDGISLVGVTQNFAATVLRNTKGNVRFVIGREKPGQVSEVAQLISQTLEQERRQRELLEQHYAQYDADDDETGEYATDEEEDEVGPVLPGSDMAIEVFELPENEDMFSPSELDTSKLSHKFKELQIKHAVTEAEIQKLKTKLQAAENEKVRWELEKTQLQQNIEENKERMLKLESYWIEAQTLCHTVNEHLKETQSQYQALEKKYNKAKKLIKDFQQKELDFIKRQEAERKKIEDLEKAHLVEVQGLQVRIRDLEAEVFRLLKQNGTQVNNNNNIFERRTSLGEVSKGDTMENLDGKQTSCQDGLSQDLNEAVPETERLDSKALKTRAQLSVKNRRQRPSRTRLYDSVSSTDGEDSLERKPSNSFYNHMHITKLLPPKGLRTSSPESDSGVPPLTPVDSNVPFSSDHIAEFQEEPLDPEMGPLSSMWGDTSLFSTSKSDHDVEESPCHHQTTNKKILREKDDAKDPKSLRASSSLAVQGGKIKRKFVDLGAPLRRNSSKGKKWKEKEKEASRFSAGSRIFRGRLENWTPKPCSTAQTSTRSPCMPFSWFNDSRKGSYSFRNLPAPTSSLQPSPETLISDKKGSKNFTFNDDFSPSSTSSADLSGLGAEPKTPGLSQSLALSSDEALGMTASQDRAVVKKKLKEMKMSLEKARKAQEKMEKQREKLRRKEQEQMQRKSKKTEKMTSTTAEGAGEQ

SEQ ID NO: 35286 - protein, 1296 aa, Homo sapiens
MLKTESSGERTTLRSASPHRNAYRTEFQALKSTFDKPKSDGEQKTKEGEGSQQSRGRKYGSNVNRIKNLFMQMGMEPNENAAVIAKTRGKGGHSSPQRRMKPKEFLEKTDGSVVKLESSVSERISRFDTMYDGPSYSKFTETRKMFERSVHESGQNNRYSPKKEKAGGSEPQDEWGGSKSNRGSTDSLDSLSSRTEAVSPTVSQLSAVFENTDSPSAIISEKAENNEYSVTGHYPLNLPSVTVTNLDTFGHLKDSNSWPPSNKRGVDTEDAHKSNATPVPEVASKSTSLASIPGEEIQQSKEPEDSTSNQQTPDSIDKDGPEEPCAESKAMPKSEIPSPQSQLLEDAEANLVGREAAKQQRKELAGGDFTSPDASASSCGKEVPEDSNNFDGSHVYMHSDYNVYRVRSRYNSDWGETGTEQDEEEDSDENSYYQPDMEYSEIVGLPEEEEIPANRKIKFSSAPIKVFNTYSNEDYDRRNDEVDPVAASAEYELEKRVEKLELFPVELEKDEDGLGISIIGMGVGADAGLEKLGIFVKTVTEGGAAQRDGRIQVNDQIVEVDGISLVGVTQNFAATVLRNTKGNVRFVIGREKPGQVSEVAQLISQTLEQERRQRELLEQHYAQYDADDDETGEYATDEEEDEVGPVLPGSDMAIEVFELPENEDMFSPSELDTSKLSHKFKELQIKHAVTEAEIQKLKTKLQAAENEKVRWELEKTQLQQNIEENKERMLKLESYWIEAQTLCHTVNEHLKETQSQYQALEKKYNKAKKLIKDFQQKELDFIKRQEAERKKIEDLEKAHLVEVQGLQVRIRDLEAEVFRLLKQNGTQVNNNNNIFERRTSLGEVSKGDTMENLDGKQTSCQDGLSQDLNEAVPETERLDSKALKTRAQLSVKNRRQRPSRTRLYDSVSSTDGEDSLERKGLRTSSPESDSGVPPLTPVDSNVPFSSDHIAEFQEEPLDPEMGPLSSMWGDTSLFSTSKSDHDVEESPCHHQTTNKKILREKDDAKDPKSLRASSSLAVQGGKIKRKFVDLGAPLRRNSSKGKKWKEKEKEASRFSAGSRIFRGRLENWTPKPCSTAQTSTRSPCMPFSWFNDSRKGSYSFRNLPAPTSSLQPSPETLISDKKGSKNFTFNDDFSPSSTSSADLSGLGAEPKTPGLSQSLALSSDEILDDGQSPKHSQCQNRAVQEWSVQQVSHWLMSLNLEQYVSEFSAQNITGEQLLQLDGNKLKALGMTASQDRAVVKKKLKEMKMSLEKARKAQEKMEKQREKLRRKEQEQMQRKSKKTEKMTSTTAEGAGEQ

SEQ ID NO: 35287 - protein, 189 aa, Homo sapiens
MALLSRPALTLLLLLMAAVVRCQEQAQTTDWRATLKTIRNGVHKIDTYLNAALDLLGGEDGLCQYKCSDGSKPFPRYGYKPSPPNGCGSPLFGVHLNIGIPSLTKCCNQHDRCYETCGKSKNDCDEEFQYCLSKICRDVQKTLGLTQHVQACETTVELLFDSVIHLGCKPYLDSQRAACRCHYEEKTDL

SEQ ID NO: 35288 - protein, 119 aa, Homo sapiens
MIARRNPEPLRFLPDEARSLPPPKLTDPRLLYIGFLGYCSGLIDNLIRRRPIATAGLHRQLLYITAFFFAGYYLVKREDYLYAVRDREMFGYMKLHPEDFPEEDKKTYGEIFEKFHPIR

SEQ ID NO: 35289 - protein, 96 aa, Homo sapiens
MIARRNPEPLRFLPDEARSLPPPKLTDPRLLYIGFLGYCSGLIDNLIRRRPIATADYLYAVRDREMFGYMKLHPEDFPEEDKKTYGEIFEKFHPIR

SEQ ID NO: 35290 - protein, 88 aa, Homo sapiens
MIARRNPEPLRFLPDEARSLPPPKLTDPRLLYIGFLGYCSGLIDNLIRRRPIATAGLHRQLLYITAFFFAGYYLVKLEAYANLYVDTL

SEQ ID NO: 35291 - protein, 76 aa, Homo sapiens
MAPSALLRPLSRLLAPARLPSGPSVRSKFYVREPPNAKPDWLKVGFTLGTTVFLWIYLIKQHNEDILEYKRRNGLE

SEQ ID NO: 35292 - protein, 603 aa, Homo sapiens
MTMHTTMTTLTLTSLIPPILTTLVNPNKKNSYPHYVKSIVASTFIISLFPTTMFMCLDQEVIISNWHWATTQTTQLSLSFKLDYFSMMFIPVALFVTWSIMEFSLWYMNSDPNINQFFKYLLIFLITMLILVTANNLFQLFIGWEGVGIMSFLLISWWYARADANTAAIQAILYNRIGDIGFILALAWFILHSNSWDPQQMALLNANPSLTPLLGLLLAAAGKSAQLGLHPWLPSAMEGPTPVSALLHSSTMVVAGIFLLIRFHPLAENSPLIQTLTLCLGAITTLFAAVCALTQNDIKKIVAFSTSSQLGLMMVTIGINQPHLAFLHICTHAFFKAMLFMCSGSIIHNLNNEQDIRKMGGLLKTMPLTSTSLTIGSLALAGMPFLTGFYSKDHIIETANMSYTNAWALSITLIATSLTSAYSTRMILLTLTGQPRFPTLTNINENNPTLLNPIKRLAAGSLFAGFLITNNISPASPFQTTIPLYLKLTALAVTFLGLLTALDLNYLTNKLKMKSPLCTFYFSNMLGFYPSITHRTIPYLGLLTSQNLPLLLLDLTWLEKLLPKTISQHQISTSIITSTQKGMIKLYFLSFFFPLILTLLLIT

SEQ ID NO: 35293 - protein, 1712 aa, Homo sapiens
MASGSRWRPTPPPLLLLLLLALAARADGLEFGGGPGQWARYARWAGAASSGELSFSLRTNATRALLLYLDDGGDCDFLELLLVDGRLRLRFTLSCAEPATLQLDTPVADDRWHMVLLTRDARRTALAVDGEARAAEVRSKRREMQVASDLFVGGIPPDVRLSALTLSTVKYEPPFRGLLANLKLGERPPALLGSQGLRGATADPLCAPARNPCANGGLCTVLAPGEVGCDCSHTGFGGKFCSEEEHPMEGPAHLTLNSEVGSLLFSEGGAGRGGAGDVHQPTKGKEEFVATFKGNEFFCYDLSHNPIQSSTDEITLAFRTLQRNGLMLHTGKSADYVNLSLKSGAVWLVINLGSGAFEALVEPVNGKFNDNAWHDVRVTRNLRQHAGIGHAMVNKLHYLVTISVDGILTTTGYTQEDYTMLGSDDFFYIGGSPNTADLPGSPVSNNFMGCLKDVVYKNNDFKLELSRLAKEGDPKMKLQGDLSFRCEDVAALDPVTFESPEAFVALPRWSAKRTGSISLDFRTTEPNGLLLFSQGRRAGGGAGSHSSAQRADYFAMELLDGHLYLLLDMGSGGIKLRASSRKVNDGEWCHVDFQRDGRKGSISVNSRSTPFLATGDSEILDLESELYLGGLPEGGRVDLPLPPEVWTAALRAGYVGCVRDLFIDGRSRDLRGLAEAQGAVGVAPFCSRETLKQCASAPCRNGGVCREGWNRFICDCIGTGFLGRVCEREATVLSYDGSMYMKIMLPNAMHTEAEDVSLRFMSQRAYGLMMATTSRESADTLRLELDGGQMKLTVNLDCLRVGCAPSKGPETLFAGHKLNDNEWHTVRVVRRGKSLQLSVDNVTVEGQMAGAHMRLEFHNIETGIMTERRFISVVPSNFIGHLSGLVFNGQPYMDQCKDGDITYCELNARFGLRAIVADPVTFKSRSSYLALATLQAYASMHLFFQFKTTAPDGLLLFNSGNGNDFIVIELVKGYIHYVFDLGNGPSLMKGNSDKPVNDNQWHNVVVSRDPGNVHTLKIDSRTVTQHSNGARNLDLKGELYIGGLSKNMFSNLPKLVASRDGFQGCLASVDLNGRLPDLIADALHRIGQVERGCDGPSTTCTEESCANQGVCLQQWDGFTCDCTMTSYGGPVCNDPGTTYIFGKGGALITYTWPPNDRPSTRMDRLAVGFSTHQRSAVLVRVDSASGLGDYLQLHIDQGTVGVIFNVGTDDITIDEPNAIVSDGKYHVVRFTRSGGNATLQVDSWPVNERYPAGNFDNERLAIARQRIPYRLGRVVDEWLLDKGRQLTIFNSQAAIKIGGRDQGRPFQGQVSGLYYNGLKVLALAAESDPNVRTEGHLRLVGEGPSVLLSAETTATTLLADMATTIMETTTTMATTTTRRGRSPTLRDSTTQNTDDLLVASAECPSDDEDLEECEPSTGGELILPIITEDSLDPPPVATRSPFVPPPPTFYPFLTGVGATQDTLPPPAARRPPSGGPCQAERDDSDCEEPIEASGFASGEVFDSSLPPTDDEDFYTTFPLVTDRTTLLSPRKPAPRPNLRTDGATGAPGVLFAPSAPAPNLPAGKMNHRDPLQPLLENPPLGPGAPTSFEPRRPPPLRPGVTSAPGFPHLPTANPTGPGERGPPGAVEVIRESSSTTGMVVGIVAAAALCILILLYAMYKYRNRDEGSYQVDQSRNYISNSAQSNGAVVKEKAPAAPKTPSKAKKNKDKEYYV

SEQ ID NO: 35294 - protein, 1642 aa, Homo sapiens
MASGSRWRPTPPPLLLLLLLALAARADGLEFGGGPGQWARYARWAGAASSGELSFSLRTNATRALLLYLDDGGDCDFLELLLVDGRLRLRFTLSCAEPATLQLDTPVADDRWHMVLLTRDARRTALAVDGEARAAEVRSKRREMQVASDLFVGGIPPDVRLSALTLSTVKYEPPFRGLLANLKLGERPPALLGSQGLRGATADPLCAPARNPCANGGLCTVLAPGEVGCDCSHTGFGGKFCSEEEHPMEGPAHLTLNSEGKEEFVATFKGNEFFCYDLSHNPIQSSTDEITLAFRTLQRNGLMLHTGKSADYVNLSLKSGAVWLVINLGSGAFEALVEPVNGKFNDNAWHDVRVTRNLRQHAGIGHAMVTISVDGILTTTGYTQEDYTMLGSDDFFYIGGSPNTADLPGSPVSNNFMGCLKDVVYKNNDFKLELSRLAKEGDPKMKLQGDLSFRCEDVAALDPVTFESPEAFVALPRWSAKRTGSISLDFRTTEPNGLLLFSQGRRAGGGAGSHSSAQRADYFAMELLDGHLYLLLDMGSGGIKLRASSRKVNDGEWCHVDFQRDGRKGSISVNSRSTPFLATGDSEILDLESELYLGGLPEGGRVDLPLPPEVWTAALRAGYVGCVRDLFIDGRSRDLRGLAEAQGAVGVAPFCSRETLKQCASAPCRNGGVCREGWNRFICDCIGTGFLGRVCEREATVLSYDGSMYMKIMLPNAMHTEAEDVSLRFMSQRAYGLMMATTSRESADTLRLELDGGQMKLTVNLGKGPETLFAGHKLNDNEWHTVRVVRRGKSLQLSVDNVTVEGQMAGAHMRLEFHNIETGIMTERRFISVVPSNFIGHLSGLVFNGQPYMDQCKDGDITYCELNARFGLRAIVADPVTFKSRSSYLALATLQAYASMHLFFQFKTTAPDGLLLFNSGNGNDFIVIELVKGYIHYVFDLGNGPSLMKGNSDKPVNDNQWHNVVVSRDPGNVHTLKIDSRTVTQHSNGARNLDLKGELYIGGLSKNMFSNLPKLVASRDGFQGCLASVDLNGRLPDLIADALHRIGQVERGCDGPSTTCTEESCANQGVCLQQWDGFTCDCTMTSYGGPVCNDPGTTYIFGKGGALITYTWPPNDRPSTRMDRLAVGFSTHQRSAVLVRVDSASGLGDYLQLHIDQGTVGVIFNVGTDDITIDEPNAIVSDGKYHVVRFTRSGGNATLQVDSWPVNERYPAGRQLTIFNSQAAIKIGGRDQGRPFQGQVSGLYYNGLKVLALAAESDPNVRTEGHLRLVGEGPSVLLSAETTATTLLADMATTIMETTTTMATTTTRRGRSPTLRDSTTQNTDDLLVASAECPSDDEDLEECEPSTGGELILPIITEDSLDPPPVATRSPFVPPPPTFYPFLTGVGATQDTLPPPAARRPPSGGPCQAERDDSDCEEPIEASGFASGEVFDSSLPPTDDEDFYTTFPLVTDRTTLLSPRKPAPRPNLRTDGATGAPGVLFAPSAPAPNLPAGKMNHRDPLQPLLENPPLGPGAPTSFEPRRPPPLRPGVTSAPGFPHLPTANPTGPGERGPPGAVEVIRESSSTTGMVVGIVAAAALCILILLYAMYKYRNRDEGSYQVDQSRNYISNSAQSNGAVVKEKAPAAPKTPSKAKKNKDKEYYV

SEQ ID NO: 35295 - protein, 423 aa, Homo sapiens
MKPNFSLRLRIFNLNCWGIPYLSKHRADRMRRLGDFLNQESFDLALLEEVWSEQDFQYLRQKLSPTYPAAHHFRSGIIGSGLCVFSKHPIQELTQHIYTLNGYPYMIHHGDWFSGKAVGLLVLHLSGMVLNAYVTHLHAEYNRQKDIYLAHRVAQAWELAQFIHHTSKKADVVLLCGDLNMHPEDLGCCLLKEWTGLHDAYLETRDFKGSEEGNTMVPKNCYVSQQELKPFPFGVRIDYVLYKAVSGFYISCKSFETTTGFDPHRGTPLSDHEALMATLFVRHSPPQQNPSSTHGPAERSPLMCVLKEAWTELGLGMAQARWWATFASYVIGLGLLLLALLCVLAAGGGAGEAAILLWTPSVGLVLWAGAFYLFHVQEVNGLYRAQAELQHVLGRAREAQDLGPEPQPALLLGQQEGDRTKEQ

SEQ ID NO: 35296 - protein, 185 aa, Homo sapiens
MVKLGNNFAEKGTKQPLLEDGFDTIPLMTPLDVNQLQFPPPDKVVVKTKTEYEPDRKKGKARPPQIAEFTVSITEGVTERFKVSVLVLFALAFLTCVVFLVVYKVYKYDRACPDGFVLKNTQCIPEGLESYYAEQDSSAREKFYTVINHYNLAKQSITRSVSPWMSVLSEEKLSEQETEAAEKSA

SEQ ID NO: 35297 - protein, 146 aa, Homo sapiens
MVKLGNNFAEKGTKQPLLEDGFDTIPLMTPLDVNQLQFPPPDKVSVLVLFALAFLTCVVFLVVYKVYKYDRACPDGFVLKNTQCIPEGLESYYAEQDSSAREKFYTVINHYNLAKQSITRSVSPWMSVLSEEKLSEQETEAAEKSA

SEQ ID NO: 35298 - protein, 453 aa, Homo sapiens
MEDYLQGCRAALQESRPLHVVLGNEACDLDSTVSALALAFYLAKTTEAEEVFVPVLNIKRSELPLRGDIVFFLQKVHIPESILIFRDEIDLHALYQAGQLTLILVDHHILSKSDTALEEAVAEVLDHRPIEPKHCPPCHVSVELVGSCATLVTERILQGAPEILDRQTAALLHGTIILDCVNMDLKIGKATPKDSKYVEKLEALFPDLPKRNDIFDSLQKAKFDVSGLTTEQMLRKDQKTIYRQGVKVAISAIYMDLEAFLQRSNLLADLHAFCQAHSYDVLVAMTIFFNTHNEPVRQLAIFCPHVALQTTICEVLERSHSPPLKLTPASSTHPNLHAYLQGNTQVSRKKLLPLLQEALSAYFDSMKIPSGQPETADVSREQVDKELDRASNSLISGLSQDEEDPPLPPTPMNSLVDECPLDQGLPKLSAEAVFEKCSQISLSQSTTASLSKK

SEQ ID NO: 35299 - protein, 386 aa, Homo sapiens
MEDYLQGCRAALQESRPLHVVLGNEACDLDSTVSALALAFYLAKASDTALEEAVAEVLDHRPIEPKHCPPCHVSVELVGSCATLVTERILQGAPEILDRQTAALLHGTIILDCVNMDLKIGKATPKDSKYVEKLEALFPDLPKRNDIFDSLQKAKFDVSGLTTEQMLRKDQKTIYRQGVKVAISAIYMDLEAFLQRSNLLADLHAFCQAHSYDVLVAMTIFFNTHNEPVRQLAIFCPHVALQTTICEVLERSHSPPLKLTPASSTHPNLHAYLQGNTQVSRKKLLPLLQEALSAYFDSMKIPSGQPETADVSREQVDKELDRASNSLISGLSQDEEDPPLPPTPMNSLVDECPLDQGLPKLSAEAVFEKCSQISLSQSTTASLSKK

SEQ ID NO: 35300 - protein, 271 aa, Homo sapiens
MDLKIGKATPKDSKYVEKLEALFPDLPKRNDIFDSLQKAKFDVSGLTTEQMLRKDQKTIYRQGVKVAISAIYMDLEAFLQRSNLLADLHAFCQAHSYDVLVAMTIFFNTHNEPVRQLAIFCPHVALQTTICEVLERSHSPPLKLTPASSTHPNLHAYLQGNTQVSRKKLLPLLQEALSAYFDSMKIPSGQPETADVSREQVDKELDRASNSLISGLSQDEEDPPLPPTPMNSLVDECPLDQGLPKLSAEAVFEKCSQISLSQSTTASLSKK

SEQ ID NO: 35301 - protein, 240 aa, Homo sapiens
MEDYLQGCRAALQETIILDCVNMDLKIGKATPKDSKYVEKLEALFPDLPKRNDIFDSLQKAKFDVSGLTTEQMLRKDQKTIYRQGVKVAISAIYMDLEICEVLERSHSPPLKLTPASSTHPNLHAYLQGNTQVSRKKLLPLLQEALSAYFDSMKIPSGQPETADVSREQVDKELDRASNSLISGLSQDEEDPPLPPTPMNSLVDECPLDQGLPKLSAEAVFEKCSQISLSQSTTASLSKK

SEQ ID NO: 35302 - protein, 218 aa, Homo sapiens
MDLKIGKATPKDSKYVEKLEALFPDLPKRNDIFDSLQKAKFDVSGLTTEQMLRKDQKTIYRQGVKVAISAIYMDLEICEVLERSHSPPLKLTPASSTHPNLHAYLQGNTQVSRKKLLPLLQEALSAYFDSMKIPSGQPETADVSREQVDKELDRASNSLISGLSQDEEDPPLPPTPMNSLVDECPLDQGLPKLSAEAVFEKCSQISLSQSTTASLSKK

SEQ ID NO: 35303 - protein, 168 aa, Homo sapiens
MLRKDQKTIYRQGVKVAISAIYMDLEICEVLERSHSPPLKLTPASSTHPNLHAYLQGNTQVSRKKLLPLLQEALSAYFDSMKIPSGQPETADVSREQVDKELDRASNSLISGLSQDEEDPPLPPTPMNSLVDECPLDQGLPKLSAEAVFEKCSQISLSQSTTASLSKK

SEQ ID NO: 35304 - protein, 221 aa, Homo sapiens
MLRKDQKTIYRQGVKVAISAIYMDLEAFLQRSNLLADLHAFCQAHSYDVLVAMTIFFNTHNEPVRQLAIFCPHVALQTTICEVLERSHSPPLKLTPASSTHPNLHAYLQGNTQVSRKKLLPLLQEALSAYFDSMKIPSGQPETADVSREQVDKELDRASNSLISGLSQDEEDPPLPPTPMNSLVDECPLDQGLPKLSAEAVFEKCSQISLSQSTTASLSKK

SEQ ID NO: 35305 - protein, 369 aa, Homo sapiens; identical to SEQ ID NO: 31737

SEQ ID NO: 35306 - protein, 285 aa, Homo sapiens
MMAVDIEYRYNCMAPSLRQERFAFKISPKPSKPLRPCIQLSSKNEASGMVAPAVQEKKVKKRVSFADNQGLALTMVKVFSEFDDPLDMPFNITELLDNIVSLTTAESESFVLDFSQPSADYLDFRNRLQADHVCLENCVLKDKAIAGTVKVQNLAFEKTVKIRMTFDTWKSYTDFPCQYVKDTYAGSDRDTFSFDISLPEKIQSYERMEFAVYYECNGQTYWDSNRGKNYRIIRAELKSTQGMTKPHSGPDLGISFDQFGSPRCSYGLFPEWPSYLGYEKLGPYY

SEQ ID NO: 35307 - protein, 398 aa, Homo sapiens
MSGSSLPSALALSLLLVSGSLLPGPGAAQNAGFVKSPMSETKLTGDAFELYCDVVGSPTPEIQWWYAEVNRAESFRQLWDGARKRRVTVNTAYGSNGVSVLRITRLTLEDSGTYECRASNDPKRNDLRQNPSITWIRAQATISVLQKPRIVTSEEVIIRDSPVLPVTLQCNLTSSSHTLTYSYWTKNGVELSATRKNASNMEYRINKPRAEDSGEYHCVYHFVSAPKANATIEVKAAPDITGHKRSENKNEGQDATMYCKSVGYPHPDWIWRKKENGMPMDIVNTSGRFFIINKENYTELNIVNLQITEDPGEYECNATNAIGSASVVTVLRVRSHLAPLWPFLGILAEIIILVVIIVVYEKRKRPDEVPDDDEPAGPMKTNSTNNHKDKNLRQRNTN

SEQ ID NO: 35308 - protein, 282 aa, Homo sapiens
MSGSSLPSALALSLLLVSGSLLPGPGAAQNEPRIVTSEEVIIRDSPVLPVTLQCNLTSSSHTLTYSYWTKNGVELSATRKNASNMEYRINKPRAEDSGEYHCVYHFVSAPKANATIEVKAAPDITGHKRSENKNEGQDATMYCKSVGYPHPDWIWRKKENGMPMDIVNTSGRFFIINKENYTELNIVNLQITEDPGEYECNATNAIGSASVVTVLRVRSHLAPLWPFLGILAEIIILVVIIVVYEKRKRPDEVPDDDEPAGPMKTNSTNNHKDKNLRQRNTN

SEQ ID NO: 35309 - protein, 278 aa, Homo sapiens
MSGSSLPSALALSLLLVSGSLLPGPGAAQNEPRIVTSEEVIIRDSPVLPVTLQCNLTSSSHTLTYSYWTKNGVELSATRKNASNMEYRINKPRAEDSGEYHCVYHFVSAPKANATIEVKAAPDITGHKRSENKNEGQDATMYCKSVGYPHPDWIWRKKENGMPMDIVNTSGRFFIINKENYTELNIVNLQITEDPGEYECNATNAIGSASVVTVLRVRSHLAPLWPFLGILAEIIILVVIIVVYEKRKRPDEVPDAGPMKTNSTNNHKDKNLRQRNTN

SEQ ID NO: 35310 - protein, 337 aa, Homo sapiens
MSGSSLPSALALSLLLVSGSLLPGPGAAQNAGFVKSPMSETKLTGDAFELYCDVVGSPTPEIQWWYAEVNRAESFRQLWDGARKRRVTVNTAYGSNGVSVLRITRLTLEDSGTYECRASNDPKRNDLRQNPSITWIRAQATISVLQKPRIVTSEEVIIRDSPVLPVTLQCNLTSSSHTLTYSYWTKNGVELSATRKNASNMEYRINKPRAEDSGEYHCVYHFVSAPKANATIEVKAAPDITGHKRSENKNEGQDATMYCKSVGYPHPDWIWRKKENGMPMDIVNTSGRFFIINKENYTELNIVNLQITEDPGEYECNATWPHSGLSWEFWLKLSSLW

SEQ ID NO: 35311 - protein, 394 aa, Homo sapiens
MSGSSLPSALALSLLLVSGSLLPGPGAAQNAGFVKSPMSETKLTGDAFELYCDVVGSPTPEIQWWYAEVNRAESFRQLWDGARKRRVTVNTAYGSNGVSVLRITRLTLEDSGTYECRASNDPKRNDLRQNPSITWIRAQATISVLQKPRIVTSEEVIIRDSPVLPVTLQCNLTSSSHTLTYSYWTKNGVELSATRKNASNMEYRINKPRAEDSGEYHCVYHFVSAPKANATIEVKAAPDITGHKRSENKNEGQDATMYCKSVGYPHPDWIWRKKENGMPMDIVNTSGRFFIINKENYTELNIVNLQITEDPGEYECNATNAIGSASVVTVLRVRSHLAPLWPFLGILAEIIILVVIIVVYEKRKRPDEVPDAGPMKTNSTNNHKDKNLRQRNTN

SEQ ID NO: 35312 - protein, 599 aa, Homo sapiens
MPSSLPGSQVPHPTLDAVDLVEKTLRNEGTSSSAPVLEEGDTDPWTLPQLKDTSQPWKELRVAGRLRRVAGSVLKACGLLGSLYFFICSLDVLSSAFQLLGSKVAGDIFKDNVVLSNPVAGLVIGVLVTALVQSSSTSSSIVVSMVAAKLLTVRVSVPIIMGVNVGTSITSTLVSMAQSGDRDEFQRAFSGSAVHGIFNWLTVLVLLPLESATALLERLSELALGAASLTPRAQAPDILKVLTKPLTHLIVQLDSDMIMSSATGNATNSSLIKHWCGTTGQPTQENSSCGAFGPCTEKNSTAPADRLPCRHLFAGTELTDLAVGCILLAGSLLVLCGCLVLIVKLLNSVLRGRVAQVVRTVINADFPFPLGWLGGYLAVLAGAGLTFALQSSSVFTAAVVPLMGVGVISLDRAYPLLLGSNIGTTTTALLAALASPADRMLSALQVALIHFFFNLAGILLWYLVPALRLPIPLARHFGVVTARYRWVAGVYLLLGFLLLPLAAFGLSLAGGMELAAVGGPLVGLVLLVILVTVLQRRRPAWLPVRLRSWAWLPVWLHSLEPWDRLVTRCCPCNVCSPPKATTKEAYCYENPEILASQQL

SEQ ID NO: 35313 - protein, 7968 aa, Homo sapiens
MDQPQFSGAPRFLTRPKAFVVSVGKDATLSCQIVGNPTPQVSWEKDQQPVAAGARFRLAQDGDLYRLTILDLALGDSGQYVCRARNAIGEAFAAVGLQVDAEAACAEQAPHFLLRPTSIRVREGSEATFRCRVGGSPRPAVSWSKDGRRLGEPDGPRVRVEELGEASALRIRAARPRDGGTYEVRAENPLGAASAAAALVVDSDAADTASRPGTSTAALLAHLQRRREAMRAEGAPASPPSTGTRTCTVTEGKHARLSCYVTGEPKPETVWKKDGQLVTEGRRHVVYEDAQENFVLKILFCKQSDRGLYTCTASNLVGQTYSSVLVVVREPAVPFKKRLQDLEVREKESATFLCEVPQPSTEAAWFKEETRLWASAKYGIEEEGTERRLTVRNVSADDDAVYICETPEGSRTVAELAVQGNLLRKLPRKTAVRVGDTAMFCVELAVPVGPVHWLRNQEEVVAGGRVAISAEGTRHTLTISQCCLEDVGQVAFMAGDCQTSTQFCVSAPRKPPLQPPVDPVVKARMESSVILSWSPPPHGERPVTIDGYLVEKKKLGTYTWIRCHEAEWVATPELTVADVAEEGNFQFRVSALNSFGQSPYLEFPGTVHLAPKLAVRTPLKAVQAVEGGEVTFSVDLTVASAGEWFLDGQALKASSVYEIHCDRTRHTLTIREVPASLHGAQLKFVANGIESSIRMEVRAAPGLTANKPPAAAAREVLARLHEEAQLLAELSDQAAAVTWLKDGRTLSPGPKYEVQASAGRRVLLVRDVARDDAGLYECVSRGGRIAYQLSVQGLARFLHKDMAGSCVDAVAGGPAQFECETSEAHVHVHWYKDGMELGHSGERFLQEDVGTRHRLVAATVTRQDEGTYSCRVGEDSVDFRLRVSEPKVVFAKEQLARRKLQAEAGASATLSCEVAQAQTEVTWYKDGKKLSSSSKVCMEATGCTRRLVVQQAGQADAGEYSCEAGGQRLSFHLDVKEPKVVFAKDQVAHSEVQAEAGASATLSCEVAQAQTEVMWYKDGKKLSSSLKVHVEAKGCRRRLVVQQAGKTDAGDYSCEARGQRVSFRLHITEPKMMFAKEQSVHNEVQAEAGASAMLSCEVAQAQTEVTWYKDGKKLSSSSKVGMEVKGCTRRLVLPQAGKADAGEYSCEAGGQRVSFHLHITEPKGVFAKEQSVHNEVQAEAGTTAMLSCEVAQPQTEVTWYKDGKKLSSSSKVRMEVKGCTRRLVVQQVGKADAGEYSCEAGGQRVSFQLHITEPKAVFAKEQLVHNEVRTEAGASATLSCEVAQAQTEVTWYKDGKKLSSSSKVRIEAAGCMRQLVVQQAGQADAGEYTCEAGGQRLSFHLDVSEPKAVFAKEQLAHRKVQAEAGAIATLSCEVAQAQTEVTWYKDGKKLSSSSKVRMEAVGCTRRLVVQQACQADTGEYSCEAGGQRLSFSLDVAEPKVVFAKEQPVHREVQAQAGASTTLSCEVAQAQTEVMWYKDGKKLSFSSKVRMEAVGCTRRLVVQQAGQAVAGEYSCEAGSQRLSFHLHVAEPKAVFAKEQPASREVQAEAGTSATLSCEVAQAQTEVTWYKDGKKLSSSSKVRMEAVGCTRRLVVQEAGQADAGEYSCKAGDQRLSFHLHVAEPKVVFAKEQPAHREVQAEAGASATLSCEVAQAQTEVTWYKDGKKLSSSSKVRVEAVGCTRRLVVQQAGQAEAGEYSCEAGGQQLSFRLQVAELEPQISERPCRREPLVVKEHEDIILTATLATPSAATVTWLKDGVEIRRSKRHETASQGDTHTLTVHGAQVLDSAIYSCRVGAEGQDFPVQVEEVAAKFCRLLEPVCGELGGTVTLACELSPACAEVVWRCGNTQLRVGKRFQMVAEGPVRSLTVLGLRAEDAGEYVCESRDDHTSAQLTVSVPRVVKFMSGLSTVVAEEGGEATFQCVVSPSDVAVVWFRDGALLQPSEKFAISQSGASHSLTISDLVLEDAGQITVEAEGASSSAALRVREAPVLFKKKLEPQTVEERSSVTLEVELTRPWPELRWTRNATALAPGKNVEIHAEGARHRLVLHNVGFADRGFFGCETPDDKTQAKLTVEMRQVRLVRGLQAVEAREQGTATMEVQLSHADVDGSWTRDGLRFQQGPTCHLAVRGPMHTLTLSGLRPEDSGLMVFKAEGVHTSARLVVTELPVSFSRPLQDVVTTEKEKVTLECELSRPNVDVRWLKDGVELRAGKTMAIAAQGACRSLTIYRCEFADQGVYVCDAHDAQSSASVKVQGRTYTLIYRRVLAEDAGEIQFVAENAESRAQLRVKELPVTLVRPLRDKIAMEKHRGVLECQVSRASAQVRWFKGSQELQPGPKYELVSDGLYRKLIISDVHAEDEDTYTCDAGDVKTSAQFFVEEQSITIVRGLQDVTVMEPAPAWFECETSIPSVRPPKWLLGKTVLQAGGNVGLEQEGTVHRLMLRRTCSTMTGPVHFTVGKSRSSARLVVSDIPVVLTRPLEPKTGRELQSVVLSCDFRPAPKAVQWYKDDTPLSPSEKFKMSLEGQMAELRILRLMPADAGVYRCQAGSAHSSTEVTVEAREVTVTGPLQDAEATEEGWASFSCELSHEDEEVEWSLNGMPLYNDSFHEISHKGRRHTLVLKSIQRADAGIVRASSLKVSTSARLEVRVKPVVFLKALDDLSAEERGTLALQCEVSDPEAHVVWRKDGVQLGPSDKYDFLHTAGTRGLVVHDVSPEDAGLYTCHVGSEETRARVRVHDLHVGITKRLKTMEVLEGESCSFECVLSHESASDPAMWTVGGKTVGSSSRFQATRQGRKYILVVREAAPSDAGEVVFSVRGLTSKASLIVRERPAAIIKPLEDQWVAPGEDVELRCELSRAGTPVHWLKDRKAIRKSQKYDVVCEGTMAMLVIRGASLKDAGEYTCEVEASKSTASLHVEEKANCFTEELTNLQVEEKGTAVFTCKTEHPAATVTWRKGLLELRASGKHQPSQEGLTLRLTISALEKADSDTYTCDIGQAQSRAQLLVQGRRVHIIEDLEDVDVQEGSSATFRCRISPANYEPVHWFLDKTPLHANELNEIDAQPGGYHVLTLRQLALKDSGTIYFEAGDQRASAALRVTEKPSVFSRELTDATITEGEDLTLVCETSTCDIPVCWTKDGKTLRGSARCQLSHEGHRAQLLITGATLQDSGRYKCEAGGACSSSIVRVHARPVRFQEALKDLEVLEGGAATLRCVLSSVAAPVKWCYGNNVLRPGDKYSLRQEGAMLELVVRNLRPQDSGRYSCSFGDQTTSATLTVTALPAQFIGKLRNKEATEGATATLRCELSKAAPVEWRKGSETLRDGDRYCLRQDGAMCELQIRGLAMVDAAEYSCVCGEERTSASLTIRPMPAHFIGRLRHQESIEGATATLRCELSKAAPVEWRKGRESLRDGDRHSLRQDGAVCELQICGLAVADAGEYSCVCGEERTSATLTVKALPAKFTEGLRNEEAVEGATAMLWCELSKVAPVEWRKGPENLRDGDRYILRQEGTRCELQICGLAMADAGEYLCVCGQERTSATLTIRALPARFIEDVKNQEAREGATAVLQCELNSAAPVEWRKGSETLRDGDRYSLRQDGTKCELQIRGLAMADTGEYSCVCGQERTSAMLTVRALPIKFTEGLRNEEATEGATAVLRCELSKMAPVEWWKGHETLRDGDRHSLRQDGARCELQIRGLVAEDAGEYLCMCGKERTSAMLTVRAMPSKFIEGLRNEEATEGDTATLWCELSKAAPVEWRKGHETLRDGDRHSLRQDGSRCELQIRGLAVVDAGEYSCVCGQERTSATLTVRALPARFIEDVKNQEAREGATAVLQCELSKAAPVEWRKGSETLRGGDRYSLRQDGTRCELQIHGLSVADTGEYSCVCGQERTSATLTVRAPQPVFREPLQSLQAEEGSTATLQCELSEPTATVVWSKGGLQLQANGRREPRLQGCTAELVLQDLQREDTGEYTCTCGSQATSATLTVTAAPVRFLRELQHQEVDEGGTAHLCCELSRAGASVEWRKGSLQLFPCAKYQMVQDGAAAELLVRGVEQEDAGDYTCDTGHTQSMASLSVRVPRPKFKTRLQSLEQETGDIARLCCQLSDAESGAVVQWLKEGVELHAGPKYEMRSQGATRELLIHQLEAKDTGEYACVTGGQKTAASLRVTEPEVTIVRGLVDAEVTADEDVEFSCEVSRAGATGVQWCLQGLPLQSNEVTEVAVRDGRIHTLRLKGVTPEDAGTVSFHLGNHASSAQLTVRAPEVTILEPLQDVQLSEGQDASFQCRLSRASGQEARWALGGVPLQANEMNDITVEQGTLHLLTLHKVTLEDAGTVSFHVGTCSSEAQLKVTAKNTVVRGLENVEALEGGEALFECQLSQPEVAAHTWLLDDEPVHTSENAEVVFFENGLRHLLLLKNLRPQDSCRVTFLAGDMVTSAFLTVRGWRLEILEPLKNAAVRAGAQACFTCTLSEAVPVGEASWYINGAAVQPDDSDWTVTADGSHHALLLRSAQPHHAGEVTFACRDAVASARLTVLGLPDPPEDAEVVARSSHTVTLSWAAPMSDGGGGLCGYRVEVKEGATGQWRLCHELVPGPECVVDGLAPGETYRFRVAAVGPVGAGEPVHLPQTVRLAEPPKPVPPQPSAPESRQVAAGEDVSLELEVVAEAGEVIWHKGMERIQPGGRFEVVSQGRQQMLVIKGFTAEDQGEYHCGLAQGSICPAAATFQVALSPASVDEAPQPSLPPEAAQEGDLHLLWEALARKRRMSREPTLDSISELPEEDGRSQRLPQEAEEVAPDLSEGYSTADELARTGDADLSHTSSDDESRAGTPSLVTYLKKAGRPGTSPLASKVGAPAAPSVKPQQQQEPLAAVRPPLGDLSTKDLGDPSMDKAAVKIQAAFKGYKVRKEMKQQEGPMFSHTFGDTEAQVGDALRLECVVASKADVRARWLKDGVELTDGRHHHIDQLGDGTCSLLITGLDRADAGCYTCQVSNKFGQVTHSACVVVSGSESEAESSSGGELDDAFRRAARRLHRLFRTKSPAEVSDEELFLSADEGPAEPEEPADWQTYREDEHFICIRFEALTEARQAVTRFQEMFATLGIGVEIKLVEQGPRRVEMCISKETPAPVVPPEPLPSLLTSDAAPVFLTELQNQEVQDGYPVSFDCVVTGQPMPSVRWFKDGKLLEEDDHYMINEDQQGGHQLIITAVVPADMGVYRCLAENSMGVSSTKAELRVDLTSTDYDTAADATESSSYFSAQGYLSSREQEGTESTTDEGQLPQVVEELRDLQVAPGTRLAKFQLKVKGYPAPRLYWFKDGQPLTASAHIRMTDKKILHTLEIISVTREDSGQYAAYISNAMGAAYSSARLLVRGPDEPEEKPASDVHEQLVPPRMLERFTPKKVKKGSSITFSVKVEGRPVPTVHWLREEAERGVLWIGPDTPGYTVASSAQQHSLVLLDVGRQHQGTYTCIASNAAGQALCSASLHVSGLPKVEEQEKVKEALISTFLQGTTQAISAQGLETASFADLGGQRKEEPLAAKEALGHLSLAEVGTEEFLQKLTSQITEMVSAKITQAKLQVPGGDSDEDSKTPSASPRHGRSRPSSSIQESSSESEDGDARGEIFDIYVVTADYLPLGAEQDAITLREGQYVEVLDAAHPLRWLVRTKPTKSSPSRQGWVSPAYLDRRLKLSPEWGAAEAPEFPGEAVSEDEYKARLSSVIQELLSSEQAFVEELQFLQSHHLQHLERCPHVPIAVAGQKAVIFRNVRDIGRFHSSFLQELQQCDTDDDVAMCFIKNQAAFEQYLEFLVGRVQAESVVVSTAIQEFYKKYAEEALLAGDPSQPPPPPLQHYLEQPVERVQRYQALLKELIRNKARNRQNCALLEQAYAVVSALPQRAENKLHVSLMENYPGTLQALGEPIRQGHFIVWEGAPGARMPWKGHNRHVFLFRNHLVICKPRRDSRTDTVSYVFRNMMKLSSIDLNDQVEGDDRAFEVWQEREDSVRKYLLQARTAIIKSSWVKEICGIQQRLALPVWRPPDFEEELADCTAELGETVKLACRVTGTPKPVISWYKDGKAVQVDPHHILIEDPDGSCALILDSLTGVDSGQYMCFAASAAGNCSTLGKILVQVPPRFVNKVRASPFVEGEDAQFTCTIEGAPYPQIRWYKDGALLTTGNKFQTLSEPRSGLLVLVIRAASKEDLGLYECELVNRLGSARASAELRIQSPMLQAQEQCHREQLVAAVEDTTLERADQEVTSVLKRLLGPKAPGPSTGDLTGPGPCPRGAPALQETGSQPPVTGTSEAPAVPPRVPQPLLHEGPEQEPEAIARAQEWTVPIRMEGAAWPGAGTGELLWDVHSHVVRETTQRTYTYQAIDTHTARPPSMQVTIEDVQAQTGGTAQFEAIIEGDPQPSVTWYKDSVQLVDSTRLSQQQEGTTYSLVLRHVASKDAGVYTCLAQNTGGQVLCKAELLVLGGDNEPDSEKQSHRRKLHSFYEVKEEIGRGVFGFVKRVQHKGNKILCAAKFIPLRSRTRAQAYRERDILAALSHPLVTGLLDQFETRKTLILILELCSSEELLDRLYRKGVVTEAEVKVYIQQLVEGLHYLHSHGVLHLDIKPSNILMVHPAREDIKICDFGFAQNITPAELQFSQYGSPEFVSPEIIQQNPVSEASDIWAMGVISYLSLTCSSPFAGESDRATLLNVLEGRVSWSSPMAAHLSEDAKDFIKATLQRAPQARPSAAQCLSHPWFLKSMPAEEAHFINTKQLKFLLARSRWQRSLMSYKSILVMRSIPELLRGPPDSPSLGVARHLCRDTGGSSSSSSSSDNELAPFARAKSLPPSPVTHSPLLHPRGFLRPSASLPEEAEASERSTEAPAPPASPEGAGPPAAQGCVPRHSVIRSLFYHQAGESPEHGALAPGSRRHPARRRHLLKGGYIAGALPGLREPLMEHRVLEEEAAREEQATLLAKAPSFETALRLPASGTHLAPGHSHSLEHDSPSTPRPSSEACGEAQRLPSAPSGGAPIRDMGHPQGSKQLPSTGGHPGTAQPERPSPDSPWGQPAPFCHPKQGSAPQEGCSPHPAVAPCPPGSFPPGSCKEAPLVPSSPFLGQPQAPPAPAKASPPLDSKMGPGDISLPGRPKPGPCSSPGSASQASSSQVSSLRVGSSQVGTEPGPSLDAEGWTQEAEDLSDSTPTLQRPQEQATMRKFSLGGRGGYAGVAGYGTFAFGGDAGGMLGQGPMWARIAWAVSQSEEEEQEEARAESQSEEQQEARAESPLPQVSARPVPEVGRAPTRSSPEPTPWEDIGQVSLVQIRDLSGDAEAADTISLDISEVDPAYLNLSDLYDIKYLPFEFMIFRKVPKSAQPEPPSPMAEEELAEFPEPTWPWPGELGPHAGLEITEESEDVDALLAEAAVGRKRKWSSPSRSLFHFPGRHLPLDEPAELGLRERVKASVEHISRILKGRPEGLEKEGPPRKKPGLASFRLSGLKSWDRAPTFLRELSDETVVLGQSVTLACQVSAQPAAQATWSKDGAPLESSSRVLISATLKNFQLLTILVVVAEDLGVYTCSVSNALGTVTTTGVLRKAERPSSSPCPDIGEVYADGVLLVWKPVESYGPVTYIVQCSLEGGSWTTLASDIFDCCYLTSKLSRGGTYTFRTACVSKAGMGPYSSPSEQVLLGGPSHLASEEESQGRSAQPLPSTKTFAFQTQIQRGRFSVVRQCWEKASGRALAAKIIPYHPKDKTAVLREYEALKGLRHPHLAQLHAAYLSPRHLVLILELCSGPELLPCLAERASYSESEVKDYLWQMLSATQYLHNQHILHLDLRSENMIITEYNLLKVVDLGNAQSLSQEKVLPSDKFKDYLETMAPELLEGQGAVPQTDIWAIGVTAFIMLSAEYPVSSEGARDLQRGLRKGLVRLSRCYAGLSGGAVAFLRSTLCAQPWGRPCASSCLQCPWLTEEGPACSRPAPVTFPTARLRVFVRNREKRRALLYKRHNLAQVR

SEQ ID NO: 35314 - protein, 7969 aa, Homo sapiens
MDQPQFSGAPRFLTRPKAFVVSVGKDATLSCQIVGNPTPQVSWEKDQQPVAAGARFRLAQDGDLYRLTILDLALGDSGQYVCRARNAIGEAFAAVGLQVDAEAACAEQAPHFLLRPTSIRVREGSEATFRCRVGGSPRPAVSWSKDGRRLGEPDGPRVRVEELGEASALRIRAARPRDGGTYEVRAENPLGAASAAAALVVDSDAADTASRPGTSTAALLAHLQRRREAMRAEGAPASPPSTGTRTCTVTEGKHARLSCYVTGEPKPETVWKKDGQLVTEGRRHVVYEDAQENFVLKILFCKQSDRGLYTCTASNLVGQTYSSVLVVVREPAVPFKKRLQDLEVREKESATFLCEVPQPSTEAAWFKEETRLWASAKYGIEEEGTERRLTVRNVSADDDAVYICETPEGSRTVAELAVQGNLLRKLPRKTAVRVGDTAMFCVELAVPVGPVHWLRNQEEVVAGGRVAISAEGTRHTLTISQCCLEDVGQVAFMAGDCQTSTQFCVSAPRKPPLQPPVDPVVKARMESSVILSWSPPPHGERPVTIDGYLVEKKKLGTYTWIRCHEAEWVATPELTVADVAEEGNFQFRVSALNSFGQSPYLEFPGTVHLAPKLAVRTPLKAVQAVEGGEVTFSVDLTVASAGEWFLDGQALKASSVYEIHCDRTRHTLTIREVPASLHGAQLKFVANGIESSIRMEVRAAPGLTANKPPAAAAREVLARLHEEAQLLAELSDQAAAVTWLKDGRTLSPGPKYEVQASAGRRVLLVRDVARDDAGLYECVSRGGRIAYQLSVQGLARFLHKDMAGSCVDAVAGGPAQFECETSEAHVHVHWYKDGMELGHSGERFLQEDVGTRHRLVAATVTRQDEGTYSCRVGEDSVDFRLRVSEPKVVFAKEQLARRKLQAEAGASATLSCEVAQAQTEVTWYKDGKKLSSSSKVCMEATGCTRRLVVQQAGQADAGEYSCEAGGQRLSFHLDVKEPKVVFAKDQVAHSEVQAEAGASATLSCEVAQAQTEVMWYKDGKKLSSSLKVHVEAKGCRRRLVVQQAGKTDAGDYSCEARGQRVSFRLHITEPKMMFAKEQSVHNEVQAEAGASAMLSCEVAQAQTEVTWYKDGKKLSSSSKVGMEVKGCTRRLVLPQAGKADAGEYSCEAGGQRVSFHLHITEPKGVFAKEQSVHNEVQAEAGTTAMLSCEVAQPQTEVTWYKDGKKLSSSSKVRMEVKGCTRRLVVQQVGKADAGEYSCEAGGQRVSFQLHITEPKAVFAKEQLVHNEVRTEAGASATLSCEVAQAQTEVTWYKDGKKLSSSSKVRIEAAGCMRQLVVQQAGQADAGEYTCEAGGQRLSFHLDVSEPKAVFAKEQLAHRKVQAEAGAIATLSCEVAQAQTEVTWYKDGKKLSSSSKVRMEAVGCTRRLVVQQACQADTGEYSCEAGGQRLSFSLDVAEPKVVFAKEQPVHREVQAQAGASTTLSCEVAQAQTEVMWYKDGKKLSFSSKVRMEAVGCTRRLVVQQAGQAVAGEYSCEAGSQRLSFHLHVAEPKAVFAKEQPASREVQAEAGTSATLSCEVAQAQTEVTWYKDGKKLSSSSKVRMEAVGCTRRLVVQEAGQADAGEYSCKAGDQRLSFHLHVAEPKVVFAKEQPAHREVQAEAGASATLSCEVAQAQTEVTWYKDGKKLSSSSKVRVEAVGCTRRLVVQQAGQAEAGEYSCEAGGQQLSFRLQVAELEPQISERPCRREPLVVKEHEDIILTATLATPSAATVTWLKDGVEIRRSKRHETASQGDTHTLTVHGAQVLDSAIYSCRVGAEGQDFPVQVEEVAAKFCRLLEPVCGELGGTVTLACELSPACAEVVWRCGNTQLRVGKRFQMVAEGPVRSLTVLGLRAEDAGEYVCESRDDHTSAQLTVSVPRVVKFMSGLSTVVAEEGGEATFQCVVSPSDVAVVWFRDGALLQPSEKFAISQSGASHSLTISDLVLEDAGQITVEAEGASSSAALRVREAPVLFKKKLEPQTVEERSSVTLEVELTRPWPELRWTRNATALAPGKNVEIHAEGARHRLVLHNVGFADRGFFGCETPDDKTQAKLTVEMRQVRLVRGLQAVEAREQGTATMEVQLSHADVDGSWTRDGLRFQQGPTCHLAVRGPMHTLTLSGLRPEDSGLMVFKAEGVHTSARLVVTELPVSFSRPLQDVVTTEKEKVTLECELSRPNVDVRWLKDGVELRAGKTMAIAAQGACRSLTIYRCEFADQGVYVCDAHDAQSSASVKVQGRTYTLIYRRVLAEDAGEIQFVAENAESRAQLRVKELPVTLVRPLRDKIAMEKHRGVLECQVSRASAQVRWFKGSQELQPGPKYELVSDGLYRKLIISDVHAEDEDTYTCDAGDVKTSAQFFVEEQSITIVRGLQDVTVMEPAPAWFECETSIPSVRPPKWLLGKTVLQAGGNVGLEQEGTVHRLMLRRTCSTMTGPVHFTVGKSRSSARLVVSDIPVVLTRPLEPKTGRELQSVVLSCDFRPAPKAVQWYKDDTPLSPSEKFKMSLEGQMAELRILRLMPADAGVYRCQAGSAHSSTEVTVEAREVTVTGPLQDAEATEEGWASFSCELSHEDEEVEWSLNGMPLYNDSFHEISHKGRRHTLVLKSIQRADAGIVRASSLKVSTSARLEVRVKPVVFLKALDDLSAEERGTLALQCEVSDPEAHVVWRKDGVQLGPSDKYDFLHTAGTRGLVVHDVSPEDAGLYTCHVGSEETRARVRVHDLHVGITKRLKTMEVLEGESCSFECVLSHESASDPAMWTVGGKTVGSSSRFQATRQGRKYILVVREAAPSDAGEVVFSVRGLTSKASLIVRERPAAIIKPLEDQWVAPGEDVELRCELSRAGTPVHWLKDRKAIRKSQKYDVVCEGTMAMLVIRGASLKDAGEYTCEVEASKSTASLHVEEKANCFTEELTNLQVEEKGTAVFTCKTEHPAATVTWRKGLLELRASGKHQPSQEGLTLRLTISALEKADSDTYTCDIGQAQSRAQLLVQGRRVHIIEDLEDVDVQEGSSATFRCRISPANYEPVHWFLDKTPLHANELNEIDAQPGGYHVLTLRQLALKDSGTIYFEAGDQRASAALRVTEKPSVFSRELTDATITEGEDLTLVCETSTCDIPVCWTKDGKTLRGSARCQLSHEGHRAQLLITGATLQDSGRYKCEAGGACSSSIVRVHARPVRFQEALKDLEVLEGGAATLRCVLSSVAAPVKWCYGNNVLRPGDKYSLRQEGAMLELVVRNLRPQDSGRYSCSFGDQTTSATLTVTALPAQFIGKLRNKEATEGATATLRCELSKAAPVEWRKGSETLRDGDRYCLRQDGAMCELQIRGLAMVDAAEYSCVCGEERTSASLTIRPMPAHFIGRLRHQESIEGATATLRCELSKAAPVEWRKGRESLRDGDRHSLRQDGAVCELQICGLAVADAGEYSCVCGEERTSATLTVKALPAKFTEGLRNEEAVEGATAMLWCELSKVAPVEWRKGPENLRDGDRYILRQEGTRCELQICGLAMADAGEYLCVCGQERTSATLTIRALPARFIEDVKNQEAREGATAVLQCELNSAAPVEWRKGSETLRDGDRYSLRQDGTKCELQIRGLAMADTGEYSCVCGQERTSAMLTVRALPIKFTEGLRNEEATEGATAVLRCELSKMAPVEWWKGHETLRDGDRHSLRQDGARCELQIRGLVAEDAGEYLCMCGKERTSAMLTVRAMPSKFIEGLRNEEATEGDTATLWCELSKAAPVEWRKGHETLRDGDRHSLRQDGSRCELQIRGLAVVDAGEYSCVCGQERTSATLTVRALPARFIEDVKNQEAREGATAVLQCELSKAAPVEWRKGSETLRGGDRYSLRQDGTRCELQIHGLSVADTGEYSCVCGQERTSATLTVRAPQPVFREPLQSLQAEEGSTATLQCELSEPTATVVWSKGGLQLQANGRREPRLQGCTAELVLQDLQREDTGEYTCTCGSQATSATLTVTAAPVRFLRELQHQEVDEGGTAHLCCELSRAGASVEWRKGSLQLFPCAKYQMVQDGAAAELLVRGVEQEDAGDYTCDTGHTQSMASLSVRVPRPKFKTRLQSLEQETGDIARLCCQLSDAESGAVVQWLKEGVELHAGPKYEMRSQGATRELLIHQLEAKDTGEYACVTGGQKTAASLRVTEPEVTIVRGLVDAEVTADEDVEFSCEVSRAGATGVQWCLQGLPLQSNEVTEVAVRDGRIHTLRLKGVTPEDAGTVSFHLGNHASSAQLTVRAPEVTILEPLQDVQLSEGQDASFQCRLSRASGQEARWALGGVPLQANEMNDITVEQGTLHLLTLHKVTLEDAGTVSFHVGTCSSEAQLKVTAKNTVVRGLENVEALEGGEALFECQLSQPEVAAHTWLLDDEPVHTSENAEVVFFENGLRHLLLLKNLRPQDSCRVTFLAGDMVTSAFLTVRGWRLEILEPLKNAAVRAGAQACFTCTLSEAVPVGEASWYINGAAVQPDDSDWTVTADGSHHALLLRSAQPHHAGEVTFACRDAVASARLTVLGLPDPPEDAEVVARSSHTVTLSWAAPMSDGGGGLCGYRVEVKEGATGQWRLCHELVPGPECVVDGLAPGETYRFRVAAVGPVGAGEPVHLPQTVRLAEPPKPVPPQPSAPESRQVAAGEDVSLELEVVAEAGEVIWHKGMERIQPGGRFEVVSQGRQQMLVIKGFTAEDQGEYHCGLAQGSICPAAATFQVALSPASVDEAPQPSLPPEAAQEGDLHLLWEALARKRRMSREPTLDSISELPEEDGRSQRLPQEAEEVAPDLSEGYSTADELARTGDADLSHTSSDDESRAGTPSLVTYLKKAGRPGTSPLASKVGAPAAPSVKPQQQQEPLAAVRPPLGDLSTKDLGDPSMDKAAVKIQAAFKGYKVRKEMKQQEGPMFSHTFGDTEAQVGDALRLECVVASKADVRARWLKDGVELTDGRHHHIDQLGDGTCSLLITGLDRADAGCYTCQVSNKFGQVTHSACVVVSGSESEAESSSGGELDDAFRRAARRLHRLFRTKSPAEVSDEELFLSADEGPAEPEEPADWQTYREDEHFICIRFEALTEARQAVTRFQEMFATLGIGVEIKLVEQGPRRVEMCISKETPAPVVPPEPLPSLLTSDAAPVFLTELQNQEVQDGYPVSFDCVVTGQPMPSVRWFKDGKLLEEDDHYMINEDQQGGHQLIITAVVPADMGVYRCLAENSMGVSSTKAELRVDLTSTDYDTAADATESSSYFSAQGYLSSREQEGTESTTDEGQLPQVVEELRDLQVAPGTRLAKFQLKVKGYPAPRLYWFKDGQPLTASAHIRMTDKKILHTLEIISVTREDSGQYAAYISNAMGAAYSSARLLVRGPDEPEEKPASDVHEQLVPPRMLERFTPKKVKKGSSITFSVKVEGRPVPTVHWLREEAERGVLWIGPDTPGYTVASSAQQHSLVLLDVGRQHQGTYTCIASNAAGQALCSASLHVSGLPKVEEQEKVKEALISTFLQGTTQAISAQGLETASFADLGGQRKEEPLAAKEALGHLSLAEVGTEEFLQKLTSQITEMVSAKITQAKLQVPGGDSDEDSKTPSASPRHGRSRPSSSIQESSSESEDGDARGEIFDIYVVTADYLPLGAEQDAITLREGQYVEVLDAAHPLRWLVRTKPTKSSPSRQGWVSPAYLDRRLKLSPEWGAAEAPEFPGEAVSEDEYKARLSSVIQELLSSEQAFVEELQFLQSHHLQHLERCPHVPIAVAGQKAVIFRNVRDIGRFHSSSFLQELQQCDTDDDVAMCFIKNQAAFEQYLEFLVGRVQAESVVVSTAIQEFYKKYAEEALLAGDPSQPPPPPLQHYLEQPVERVQRYQALLKELIRNKARNRQNCALLEQAYAVVSALPQRAENKLHVSLMENYPGTLQALGEPIRQGHFIVWEGAPGARMPWKGHNRHVFLFRNHLVICKPRRDSRTDTVSYVFRNMMKLSSIDLNDQVEGDDRAFEVWQEREDSVRKYLLQARTAIIKSSWVKEICGIQQRLALPVWRPPDFEEELADCTAELGETVKLACRVTGTPKPVISWYKDGKAVQVDPHHILIEDPDGSCALILDSLTGVDSGQYMCFAASAAGNCSTLGKILVQVPPRFVNKVRASPFVEGEDAQFTCTIEGAPYPQIRWYKDGALLTTGNKFQTLSEPRSGLLVLVIRAASKEDLGLYECELVNRLGSARASAELRIQSPMLQAQEQCHREQLVAAVEDTTLERADQEVTSVLKRLLGPKAPGPSTGDLTGPGPCPRGAPALQETGSQPPVTGTSEAPAVPPRVPQPLLHEGPEQEPEAIARAQEWTVPIRMEGAAWPGAGTGELLWDVHSHVVRETTQRTYTYQAIDTHTARPPSMQVTIEDVQAQTGGTAQFEAIIEGDPQPSVTWYKDSVQLVDSTRLSQQQEGTTYSLVLRHVASKDAGVYTCLAQNTGGQVLCKAELLVLGGDNEPDSEKQSHRRKLHSFYEVKEEIGRGVFGFVKRVQHKGNKILCAAKFIPLRSRTRAQAYRERDILAALSHPLVTGLLDQFETRKTLILILELCSSEELLDRLYRKGVVTEAEVKVYIQQLVEGLHYLHSHGVLHLDIKPSNILMVHPAREDIKICDFGFAQNITPAELQFSQYGSPEFVSPEIIQQNPVSEASDIWAMGVISYLSLTCSSPFAGESDRATLLNVLEGRVSWSSPMAAHLSEDAKDFIKATLQRAPQARPSAAQCLSHPWFLKSMPAEEAHFINTKQLKFLLARSRWQRSLMSYKSILVMRSIPELLRGPPDSPSLGVARHLCRDTGGSSSSSSSSDNELAPFARAKSLPPSPVTHSPLLHPRGFLRPSASLPEEAEASERSTEAPAPPASPEGAGPPAAQGCVPRHSVIRSLFYHQAGESPEHGALAPGSRRHPARRRHLLKGGYIAGALPGLREPLMEHRVLEEEAAREEQATLLAKAPSFETALRLPASGTHLAPGHSHSLEHDSPSTPRPSSEACGEAQRLPSAPSGGAPIRDMGHPQGSKQLPSTGGHPGTAQPERPSPDSPWGQPAPFCHPKQGSAPQEGCSPHPAVAPCPPGSFPPGSCKEAPLVPSSPFLGQPQAPPAPAKASPPLDSKMGPGDISLPGRPKPGPCSSPGSASQASSSQVSSLRVGSSQVGTEPGPSLDAEGWTQEAEDLSDSTPTLQRPQEQATMRKFSLGGRGGYAGVAGYGTFAFGGDAGGMLGQGPMWARIAWAVSQSEEEEQEEARAESQSEEQQEARAESPLPQVSARPVPEVGRAPTRSSPEPTPWEDIGQVSLVQIRDLSGDAEAADTISLDISEVDPAYLNLSDLYDIKYLPFEFMIFRKVPKSAQPEPPSPMAEEELAEFPEPTWPWPGELGPHAGLEITEESEDVDALLAEAAVGRKRKWSSPSRSLFHFPGRHLPLDEPAELGLRERVKASVEHISRILKGRPEGLEKEGPPRKKPGLASFRLSGLKSWDRAPTFLRELSDETVVLGQSVTLACQVSAQPAAQATWSKDGAPLESSSRVLISATLKNFQLLTILVVVAEDLGVYTCSVSNALGTVTTTGVLRKAERPSSSPCPDIGEVYADGVLLVWKPVESYGPVTYIVQCSLEGGSWTTLASDIFDCCYLTSKLSRGGTYTFRTACVSKAGMGPYSSPSEQVLLGGPSHLASEEESQGRSAQPLPSTKTFAFQTQIQRGRFSVVRQCWEKASGRALAAKIIPYHPKDKTAVLREYEALKGLRHPHLAQLHAAYLSPRHLVLILELCSGPELLPCLAERASYSESEVKDYLWQMLSATQYLHNQHILHLDLRSENMIITEYNLLKVVDLGNAQSLSQEKVLPSDKFKDYLETMAPELLEGQGAVPQTDIWAIGVTAFIMLSAEYPVSSEGARDLQRGLRKGLVRLSRCYAGLSGGAVAFLRSTLCAQPWGRPCASSCLQCPWLTEEGPACSRPAPVTFPTARLRVFVRNREKRRALLYKRHNLAQVR

SEQ ID NO: 35315 - protein, 6620 aa, Homo sapiens
MDQPQFSGAPRFLTRPKAFVVSVGKDATLSCQIVGNPTPQVSWEKDQQPVAAGARFRLAQDGDLYRLTILDLALGDSGQYVCRARNAIGEAFAAVGLQVDAEAACAEQAPHFLLRPTSIRVREGSEATFRCRVGGSPRPAVSWSKDGRRLGEPDGPRVRVEELGEASALRIRAARPRDGGTYEVRAENPLGAASAAAALVVDSDAADTASRPGTSTAALLAHLQRRREAMRAEGAPASPPSTGTRTCTVTEGKHARLSCYVTGEPKPETVWKKDGQLVTEGRRHVVYEDAQENFVLKILFCKQSDRGLYTCTASNLVGQTYSSVLVVVREPAVPFKKRLQDLEVREKESATFLCEVPQPSTEAAWFKEETRLWASAKYGIEEEGTERRLTVRNVSADDDAVYICETPEGSRTVAELAVQGNLLRKLPRKTAVRVGDTAMFCVELAVPVGPVHWLRNQEEVVAGGRVAISAEGTRHTLTISQCCLEDVGQVAFMAGDCQTSTQFCVSAPRKPPLQPPVDPVVKARMESSVILSWSPPPHGERPVTIDGYLVEKKKLGTYTWIRCHEAEWVATPELTVADVAEEGNFQFRVSALNSFGQSPYLEFPGTVHLAPKLAVRTPLKAVQAVEGGEVTFSVDLTVASAGEWFLDGQALKASSVYEIHCDRTRHTLTIREVPASLHGAQLKFVANGIESSIRMEVRAAPGLTANKPPAAAAREVLARLHEEAQLLAELSDQAAAVTWLKDGRTLSPGPKYEVQASAGRRVLLVRDVARDDAGLYECVSRGGRIAYQLSVQGLARFLHKDMAGSCVDAVAGGPAQFECETSEAHVHVHWYKDGMELGHSGERFLQEDVGTRHRLVAATVTRQDEGTYSCRVGEDSVDFRLRVSEPKVVFAKEQLARRKLQAEAGASATLSCEVAQAQTEVTWYKDGKKLSSSSKVCMEATGCTRRLVVQQAGQADAGEYSCEAGGQRLSFHLDVKEPKVVFAKDQVAHSEVQAEAGASATLSCEVAQAQTEVMWYKDGKKLSSSLKVHVEAKGCRRRLVVQQAGKTDAGDYSCEARGQRVSFRLHITEPKMMFAKEQSVHNEVQAEAGASAMLSCEVAQAQTEVTWYKDGKKLSSSSKVGMEVKGCTRRLVLPQAGKADAGEYSCEAGGQRVSFHLHITEPKGVFAKEQSVHNEVQAEAGTTAMLSCEVAQPQTEVTWYKDGKKLSSSSKVRMEVKGCTRRLVVQQVGKADAGEYSCEAGGQRVSFQLHITEPKAVFAKEQLVHNEVRTEAGASATLSCEVAQAQTEVTWYKDGKKLSSSSKVRIEAAGCMRQLVVQQAGQADAGEYTCEAGGQRLSFHLDVSEPKAVFAKEQLAHRKVQAEAGAIATLSCEVAQAQTEVTWYKDGKKLSSSSKVRMEAVGCTRRLVVQQACQADTGEYSCEAGGQRLSFSLDVAEPKVVFAKEQPVHREVQAQAGASTTLSCEVAQAQTEVMWYKDGKKLSFSSKVRMEAVGCTRRLVVQQAGQAVAGEYSCEAGSQRLSFHLHVAEPKAVFAKEQPASREVQAEAGTSATLSCEVAQAQTEVTWYKDGKKLSSSSKVRMEAVGCTRRLVVQEAGQADAGEYSCKAGDQRLSFHLHVAEPKVVFAKEQPAHREVQAEAGASATLSCEVAQAQTEVTWYKDGKKLSSSSKVRVEAVGCTRRLVVQQAGQAEAGEYSCEAGGQQLSFRLQVAELEPQISERPCRREPLVVKEHEDIILTATLATPSAATVTWLKDGVEIRRSKRHETASQGDTHTLTVHGAQVLDSAIYSCRVGAEGQDFPVQVEEVAAKFCRLLEPVCGELGGTVTLACELSPACAEVVWRCGNTQLRVGKRFQMVAEGPVRSLTVLGLRAEDAGEYVCESRDDHTSAQLTVSVPRVVKFMSGLSTVVAEEGGEATFQCVVSPSDVAVVWFRDGALLQPSEKFAISQSGASHSLTISDLVLEDAGQITVEAEGASSSAALRVREAPVLFKKKLEPQTVEERSSVTLEVELTRPWPELRWTRNATALAPGKNVEIHAEGARHRLVLHNVGFADRGFFGCETPDDKTQAKLTVEMRQVRLVRGLQAVEAREQGTATMEVQLSHADVDGSWTRDGLRFQQGPTCHLAVRGPMHTLTLSGLRPEDSGLMVFKAEGVHTSARLVVTELPVSFSRPLQDVVTTEKEKVTLECELSRPNVDVRWLKDGVELRAGKTMAIAAQGACRSLTIYRCEFADQGVYVCDAHDAQSSASVKVQGRTYTLIYRRVLAEDAGEIQFVAENAESRAQLRVKELPVTLVRPLRDKIAMEKHRGVLECQVSRASAQVRWFKGSQELQPGPKYELVSDGLYRKLIISDVHAEDEDTYTCDAGDVKTSAQFFVEEQSITIVRGLQDVTVMEPAPAWFECETSIPSVRPPKWLLGKTVLQAGGNVGLEQEGTVHRLMLRRTCSTMTGPVHFTVGKSRSSARLVVSDIPVVLTRPLEPKTGRELQSVVLSCDFRPAPKAVQWYKDDTPLSPSEKFKMSLEGQMAELRILRLMPADAGVYRCQAGSAHSSTEVTVEAREVTVTGPLQDAEATEEGWASFSCELSHEDEEVEWSLNGMPLYNDSFHEISHKGRRHTLVLKSIQRADAGIVRASSLKVSTSARLEVRVKPVVFLKALDDLSAEERGTLALQCEVSDPEAHVVWRKDGVQLGPSDKYDFLHTAGTRGLVVHDVSPEDAGLYTCHVGSEETRARVRVHDLHVGITKRLKTMEVLEGESCSFECVLSHESASDPAMWTVGGKTVGSSSRFQATRQGRKYILVVREAAPSDAGEVVFSVRGLTSKASLIVRERPAAIIKPLEDQWVAPGEDVELRCELSRAGTPVHWLKDRKAIRKSQKYDVVCEGTMAMLVIRGASLKDAGEYTCEVEASKSTASLHVEEKANCFTEELTNLQVEEKGTAVFTCKTEHPAATVTWRKGLLELRASGKHQPSQEGLTLRLTISALEKADSDTYTCDIGQAQSRAQLLVQGRRVHIIEDLEDVDVQEGSSATFRCRISPANYEPVHWFLDKTPLHANELNEIDAQPGGYHVLTLRQLALKDSGTIYFEAGDQRASAALRVTEKPSVFSRELTDATITEGEDLTLVCETSTCDIPVCWTKDGKTLRGSARCQLSHEGHRAQLLITGATLQDSGRYKCEAGGACSSSIVRVHARPVRFQEALKDLEVLEGGAATLRCVLSSVAAPVKWCYGNNVLRPGDKYSLRQEGAMLELVVRNLRPQDSGRYSCSFGDQTTSATLTVTALPAQFIGKLRNKEATEGATATLRCELSKAAPVEWRKGSETLRDGDRYCLRQDGAMCELQIRGLAMVDAAEYSCVCGEERTSASLTIRPMPAHFIGRLRHQESIEGATATLRCELSKAAPVEWRKGRESLRDGDRHSLRQDGAVCELQICGLAVADAGEYSCVCGEERTSATLTVKALPAKFTEGLRNEEAVEGATAMLWCELSKVAPVEWRKGPENLRDGDRYILRQEGTRCELQICGLAMADAGEYLCVCGQERTSATLTIRALPARFIEDVKNQEAREGATAVLQCELNSAAPVEWRKGSETLRDGDRYSLRQDGTKCELQIRGLAMADTGEYSCVCGQERTSAMLTVRALPIKFTEGLRNEEATEGATAVLRCELSKMAPVEWWKGHETLRDGDRHSLRQDGARCELQIRGLVAEDAGEYLCMCGKERTSAMLTVRAMPSKFIEGLRNEEATEGDTATLWCELSKAAPVEWRKGHETLRDGDRHSLRQDGSRCELQIRGLAVVDAGEYSCVCGQERTSATLTVRALPARFIEDVKNQEAREGATAVLQCELSKAAPVEWRKGSETLRGGDRYSLRQDGTRCELQIHGLSVADTGEYSCVCGQERTSATLTVRAPQPVFREPLQSLQAEEGSTATLQCELSEPTATVVWSKGGLQLQANGRREPRLQGCTAELVLQDLQREDTGEYTCTCGSQATSATLTVTAAPVRFLRELQHQEVDEGGTAHLCCELSRAGASVEWRKGSLQLFPCAKYQMVQDGAAAELLVRGVEQEDAGDYTCDTGHTQSMASLSVRVPRPKFKTRLQSLEQETGDIARLCCQLSDAESGAVVQWLKEGVELHAGPKYEMRSQGATRELLIHQLEAKDTGEYACVTGGQKTAASLRVTEPEVTIVRGLVDAEVTADEDVEFSCEVSRAGATGVQWCLQGLPLQSNEVTEVAVRDGRIHTLRLKGVTPEDAGTVSFHLGNHASSAQLTVRAPEVTILEPLQDVQLSEGQDASFQCRLSRASGQEARWALGGVPLQANEMNDITVEQGTLHLLTLHKVTLEDAGTVSFHVGTCSSEAQLKVTAKNTVVRGLENVEALEGGEALFECQLSQPEVAAHTWLLDDEPVHTSENAEVVFFENGLRHLLLLKNLRPQDSCRVTFLAGDMVTSAFLTVRGWRLEILEPLKNAAVRAGAQACFTCTLSEAVPVGEASWYINGAAVQPDDSDWTVTADGSHHALLLRSAQPHHAGEVTFACRDAVASARLTVLGLPDPPEDAEVVARSSHTVTLSWAAPMSDGGGGLCGYRVEVKEGATGQWRLCHELVPGPECVVDGLAPGETYRFRVAAVGPVGAGEPVHLPQTVRLAEPPKPVPPQPSAPESRQVAAGEDVSLELEVVAEAGEVIWHKGMERIQPGGRFEVVSQGRQQMLVIKGFTAEDQGEYHCGLAQGSICPAAATFQVALSPASVDEAPQPSLPPEAAQEGDLHLLWEALARKRRMSREPTLDSISELPEEDGRSQRLPQEAEEVAPDLSEGYSTADELARTGDADLSHTSSDDESRAGTPSLVTYLKKAGRPGTSPLASKVGAPAAPSVKPQQQQEPLAAVRPPLGDLSTKDLGDPSMDKAAVKIQAAFKGYKVRKEMKQQEGPMFSHTFGDTEAQVGDALRLECVVASKADVRARWLKDGVELTDGRHHHIDQLGDGTCSLLITGLDRADAGCYTCQVSNKFGQVTHSACVVVSGSESEAESSSGGELDDAFRRAARRLHRLFRTKSPAEVSDEELFLSADEGPAEPEEPADWQTYREDEHFICIRFEALTEARQAVTRFQEMFATLGIGVEIKLVEQGPRRVEMCISKETPAPVVPPEPLPSLLTSDAAPVFLTELQNQEVQDGYPVSFDCVVTGQPMPSVRWFKDGKLLEEDDHYMINEDQQGGHQLIITAVVPADMGVYRCLAENSMGVSSTKAELRVDLTSTDYDTAADATESSSYFSAQGYLSSREQEGTESTTDEGQLPQVVEELRDLQVAPGTRLAKFQLKVKGYPAPRLYWFKDGQPLTASAHIRMTDKKILHTLEIISVTREDSGQYAAYISNAMGAAYSSARLLVRGPDEPEEKPASDVHEQLVPPRMLERFTPKKVKKGSSITFSVKVEGRPVPTVHWLREEAERGVLWIGPDTPGYTVASSAQQHSLVLLDVGRQHQGTYTCIASNAAGQALCSASLHVSGLPKVEEQEKVKEALISTFLQGTTQAISAQGLETASFADLGGQRKEEPLAAKEALGHLSLAEVGTEEFLQKLTSQITEMVSAKITQAKLQVPGGDSDEDSKTPSASPRHGRSRPSSSIQESSSESEDGDARGEIFDIYVVTADYLPLGAEQDAITLREGQYVEVLDAAHPLRWLVRTKPTKSSPSRQGWVSPAYLDRRLKLSPEWGAAEAPEFPGEAVSEDEYKARLSSVIQELLSSEQAFVEELQFLQSHHLQHLERCPHVPIAVAGQKAVIFRNVRDIGRFHSSFLQELQQCDTDDDVAMCFIKNQAAFEQYLEFLVGRVQAESVVVSTAIQEFYKKYAEEALLAGDPSQPPPPPLQHYLEQPVERVQRYQALLKELIRNKARNRQNCALLEQAYAVVSALPQRAENKLHVSLMENYPGTLQALGEPIRQGHFIVWEGAPGARMPWKGHNRHVFLFRNHLVICKPRRDSRTDTVSYVFRNMMKLSSIDLNDQVEGDDRAFEVWQEREDSVRKYLLQARTAIIKSSWVKEICGIQQRLALPVWRPPDFEEELADCTAELGETVKLACRVTGTPKPVISWYKDGKAVQVDPHHILIEDPDGSCALILDSLTGVDSGQYMCFAASAAGNCSTLGKILVQVPPRFVNKVRASPFVEGEDAQFTCTIEGAPYPQIRWYKDGALLTTGNKFQTLSEPRSGLLVLVIRAASKEDLGLYECELVNRLGSARASAELRIQSPMLQAQEQCHREQLVAAVEVTEQETKVPKKTVIIEETITTVVKSPRGQRRSPSKSPSRSPSRCSASPLRPGLLAPDLLYLPGAGQPRRPEAEPGQKPVVPTLYVTEAEAHSPALPGLSGPQPKWVEVEETIEVRVKKMGPQGVSPTTEVPRSSSGHLFTLPGATPGGDPNSNNSNNKLLAQEAWAQGTAMVGVREPLVFRVDARGSVDWAASGMGSLEEEGTMEEAGEEEGEDGDAFVTEESQDTHSLGDRDPKILTHNGRMLTLADLEDYVPGEGETFHCGGPGPGAPDDPPCEVSVIQREIGEPTVGQPVLLSVGHALGPRGPLGLFRPEPRGASPPGPQVRSLEGTSFLLREAPARPVGSAPWTQSFCTRIRRSADSGQSSFTTELSTQTVNFGTVGETVTLHICPDRDGDEAAQP

SEQ ID NO: 35316 - protein, 3911 aa, Homo sapiens
MDQPQFSGAPRFLTRPKAFVVSVGKDATLSCQIVGNPTPQVSWEKDQQPVAAGARFRLAQDGDLYRLTILDLALGDSGQYVCRARNAIGEAFAAVGLQVDAEAACAEQAPHFLLRPTSIRVREGSEATFRCRVGGSPRPAVSWSKDGRRLGEPDGPRVRVEELGEASALRIRAARPRDGGTYEVRAENPLGAASAAAALVVDSDAADTASRPGTSTAALLAHLQRRREAMRAEGAPASPPSTGTRTCTVTEGKHARLSCYVTGEPKPETVWKKDGQLVTEGRRHVVYEDAQENFVLKILFCKQSDRGLYTCTASNLVGQTYSSVLVVVREPAVPFKKRLQDLEVREKESATFLCEVPQPSTEAAWFKEETRLWASAKYGIEEEGTERRLTVRNVSADDDAVYICETPEGSRTVAELAVQGNLLRKLPRKTAVRVGDTAMFCVELAVPVGPVHWLRNQEEVVAGGRVAISAEGTRHTLTISQCCLEDVGQVAFMAGDCQTSTQFCVSAPRKPPLQPPVDPVVKARMESSVILSWSPPPHGERPVTIDGYLVEKKKLGTYTWIRCHEAEWVATPELTVADVAEEGNFQFRVSALNSFGQSPYLEFPGTVHLAPKLAVRTPLKAVQAVEGGEVTFSVDLTVASAGEWFLDGQALKASSVYEIHCDRTRHTLTIREVPASLHGAQLKFVANGIESSIRMEVRAAPGLTANKPPAAAAREVLARLHEEAQLLAELSDQAAAVTWLKDGRTLSPGPKYEVQASAGRRVLLVRDVARDDAGLYECVSRGGRIAYQLSVQGLARFLHKDMAGSCVDAVAGGPAQFECETSEAHVHVHWYKDGMELGHSGERFLQEDVGTRHRLVAATVTRQDEGTYSCRVGEDSVDFRLRVSEPKVVFAKEQLARRKLQAEAGASATLSCEVAQAQTEVTWYKDGKKLSSSSKVCMEATGCTRRLVVQQAGQADAGEYSCEAGGQRLSFHLDVKEPKVVFAKDQVAHSEVQAEAGASATLSCEVAQAQTEVMWYKDGKKLSSSLKVHVEAKGCRRRLVVQQAGKTDAGDYSCEARGQRVSFRLHITEPKMMFAKEQSVHNEVQAEAGASAMLSCEVAQAQTEVTWYKDGKKLSSSSKVGMEVKGCTRRLVLPQAGKADAGEYSCEAGGQRVSFHLHITEPKGVFAKEQSVHNEVQAEAGTTAMLSCEVAQPQTEVTWYKDGKKLSSSSKVRMEVKGCTRRLVVQQVGKADAGEYSCEAGGQRVSFQLHITEPKAVFAKEQLVHNEVRTEAGASATLSCEVAQAQTEVTWYKDGKKLSSSSKVRIEAAGCMRQLVVQQAGQADAGEYTCEAGGQRLSFHLDVSEPKAVFAKEQLAHRKVQAEAGAIATLSCEVAQAQTEVTWYKDGKKLSSSSKVRMEAVGCTRRLVVQQACQADTGEYSCEAGGQRLSFSLDVAEPKVVFAKEQPVHREVQAQAGASTTLSCEVAQAQTEVMWYKDGKKLSFSSKVRMEAVGCTRRLVVQQAGQAVAGEYSCEAGSQRLSFHLHVAEPKAVFAKEQPASREVQAEAGTSATLSCEVAQAQTEVTWYKDGKKLSSSSKVRMEAVGCTRRLVVQEAGQADAGEYSCKAGDQRLSFHLHVAEPKVVFAKEQPAHREVQAEAGASATLSCEVAQAQTEVTWYKDGKKLSSSSKVRVEAVGCTRRLVVQQAGQAEAGEYSCEAGGQQLSFRLQVAELEPQISERPCRREPLVVKEHEDIILTATLATPSAATVTWLKDGVEIRRSKRHETASQGDTHTLTVHGAQVLDSAIYSCRVGAEGQDFPVQVEEVAAKFCRLLEPVCGELGGTVTLACELSPACAEVVWRCGNTQLRVGKRFQMVAEGPVRSLTVLGLRAEDAGEYVCESRDDHTSAQLTVSVPRVVKFMSGLSTVVAEEGGEATFQCVVSPSDVAVVWFRDGALLQPSEKFAISQSGASHSLTISDLVLEDAGQITVEAEGASSSAALRVREAPVLFKKKLEPQTVEERSSVTLEVELTRPWPELRWTRNATALAPGKNVEIHAEGARHRLVLHNVGFADRGFFGCETPDDKTQAKLTVEMRQVRLVRGLQAVEAREQGTATMEVQLSHADVDGSWTRDGLRFQQGPTCHLAVRGPMHTLTLSGLRPEDSGLMVFKAEGVHTSARLVVTELPVSFSRPLQDVVTTEKEKVTLECELSRPNVDVRWLKDGVELRAGKTMAIAAQGACRSLTIYRCEFADQGVYVCDAHDAQSSASVKVQGRTYTLIYRRVLAEDAGEIQFVAENAESRAQLRVKELPVTLVRPLRDKIAMEKHRGVLECQVSRASAQVRWFKGSQELQPGPKYELVSDGLYRKLIISDVHAEDEDTYTCDAGDVKTSAQFFVEEQSITIVRGLQDVTVMEPAPAWFECETSIPSVRPPKWLLGKTVLQAGGNVGLEQEGTVHRLMLRRTCSTMTGPVHFTVGKSRSSARLVVSDIPVVLTRPLEPKTGRELQSVVLSCDFRPAPKAVQWYKDDTPLSPSEKFKMSLEGQMAELRILRLMPADAGVYRCQAGSAHSSTEVTVEAREVTVTGPLQDAEATEEGWASFSCELSHEDEEVEWSLNGMPLYNDSFHEISHKGRRHTLVLKSIQRADAGIVRASSLKVSTSARLEVRVKPVVFLKALDDLSAEERGTLALQCEVSDPEAHVVWRKDGVQLGPSDKYDFLHTAGTRGLVVHDVSPEDAGLYTCHVGSEETRARVRVHDLHVGITKRLKTMEVLEGESCSFECVLSHESASDPAMWTVGGKTVGSSSRFQATRQGRKYILVVREAAPSDAGEVVFSVRGLTSKASLIVRERPAAIIKPLEDQWVAPGEDVELRCELSRAGTPVHWLKDRKAIRKSQKYDVVCEGTMAMLVIRGASLKDAGEYTCEVEASKSTASLHVEEKANCFTEELTNLQVEEKGTAVFTCKTEHPAATVTWRKGLLELRASGKHQPSQEGLTLRLTISALEKADSDTYTCDIGQAQSRAQLLVQGRRVHIIEDLEDVDVQEGSSATFRCRISPANYEPVHWFLDKTPLHANELNEIDAQPGGYHVLTLRQLALKDSGTIYFEAGDQRASAALRVTEKPSVFSRELTDATITEGEDLTLVCETSTCDIPVCWTKDGKTLRGSARCQLSHEGHRAQLLITGATLQDSGRYKCEAGGACSSSIVRVHARPVRFQEALKDLEVLEGGAATLRCVLSSVAAPVKWCYGNNVLRPGDKYSLRQEGAMLELVVRNLRPQDSGRYSCSFGDQTTSATLTVTALPAQFIGKLRNKEATEGATATLRCELSKAAPVEWRKGSETLRDGDRYCLRQDGAMCELQIRGLAMVDAAEYSCVCGEERTSASLTIRPMPAHFIGRLRHQESIEGATATLRCELSKAAPVEWRKGRESLRDGDRHSLRQDGAVCELQICGLAVADAGEYSCVCGEERTSATLTVKALPAKFTEGLRNEEAVEGATAMLWCELSKVAPVEWRKGPENLRDGDRYILRQEGTRCELQICGLAMADAGEYLCVCGQERTSATLTIRALPARFIEDVKNQEAREGATAVLQCELNSAAPVEWRKGSETLRDGDRYSLRQDGTKCELQIRGLAMADTGEYSCVCGQERTSAMLTVRALPIKFTEGLRNEEATEGATAVLRCELSKMAPVEWWKGHETLRDGDRHSLRQDGARCELQIRGLVAEDAGEYLCMCGKERTSAMLTVRAMPSKFIEGLRNEEATEGDTATLWCELSKAAPVEWRKGHETLRDGDRHSLRQDGSRCELQIRGLAVVDAGEYSCVCGQERTSATLTVRALPARFIEDVKNQEAREGATAVLQCELSKAAPVEWRKGSETLRGGDRYSLRQDGTRCELQIHGLSVADTGEYSCVCGQERTSATLTVRALPARIHSRSEDQGGLRRGHSYTAV

SEQ ID NO: 35317 - protein, 8483 aa, Homo sapiens
MDQPQFSGAPRFLTRPKAFVVSVGKDATLSCQIVGNPTPQVSWEKDQQPVAAGARFRLAQDGDLYRLTILDLALGDSGQYVCRARNAIGEAFAAVGLQVDAEAACAEQAPHFLLRPTSIRVREGSEATFRCRVGGSPRPAVSWSKDGRRLGEPDGPRVRVEELGEASALRIRAARPRDGGTYEVRAENPLGAASAAAALVVDSDAADTASRPGTSTAALLAHLQRRREAMRAEGAPASPPSTGTRTCTVTEGKHARLSCYVTGEPKPETVWKKDGQLVTEGRRHVVYEDAQENFVLKILFCKQSDRGLYTCTASNLVGQTYSSVLVVVREPAVPFKKRLQDLEVREKESATFLCEVPQPSTEAAWFKEETRLWASAKYGIEEEGTERRLTVRNVSADDDAVYICETPEGSRTVAELAVQGNLLRKLPRKTAVRVGDTAMFCVELAVPVGPVHWLRNQEEVVAGGRVAISAEGTRHTLTISQCCLEDVGQVAFMAGDCQTSTQFCVSAPRKPPLQPPVDPVVKARMESSVILSWSPPPHGERPVTIDGYLVEKKKLGTYTWIRCHEAEWVATPELTVADVAEEGNFQFRVSALNSFGQSPYLEFPGTVHLAPKLAVRTPLKAVQAVEGGEVTFSVDLTVASAGEWFLDGQALKASSVYEIHCDRTRHTLTIREVPASLHGAQLKFVANGIESSIRMEVRAAPGLTANKPPAAAAREVLARLHEEAQLLAELSDQAAAVTWLKDGRTLSPGPKYEVQASAGRRVLLVRDVARDDAGLYECVSRGGRIAYQLSVQGLARFLHKDMAGSCVDAVAGGPAQFECETSEAHVHVHWYKDGMELGHSGERFLQEDVGTRHRLVAATVTRQDEGTYSCRVGEDSVDFRLRVSEPKVVFAKEQLARRKLQAEAGASATLSCEVAQAQTEVTWYKDGKKLSSSSKVCMEATGCTRRLVVQQAGQADAGEYSCEAGGQRLSFHLDVKEPKVVFAKDQVAHSEVQAEAGASATLSCEVAQAQTEVMWYKDGKKLSSSLKVHVEAKGCRRRLVVQQAGKTDAGDYSCEARGQRVSFRLHITEPKMMFAKEQSVHNEVQAEAGASAMLSCEVAQAQTEVTWYKDGKKLSSSSKVGMEVKGCTRRLVLPQAGKADAGEYSCEAGGQRVSFHLHITEPKGVFAKEQSVHNEVQAEAGTTAMLSCEVAQPQTEVTWYKDGKKLSSSSKVRMEVKGCTRRLVVQQVGKADAGEYSCEAGGQRVSFQLHITEPKAVFAKEQLVHNEVRTEAGASATLSCEVAQAQTEVTWYKDGKKLSSSSKVRIEAAGCMRQLVVQQAGQADAGEYTCEAGGQRLSFHLDVSEPKAVFAKEQLAHRKVQAEAGAIATLSCEVAQAQTEVTWYKDGKKLSSSSKVRMEAVGCTRRLVVQQACQADTGEYSCEAGGQRLSFSLDVAEPKVVFAKEQPVHREVQAQAGASTTLSCEVAQAQTEVMWYKDGKKLSFSSKVRMEAVGCTRRLVVQQAGQAVAGEYSCEAGSQRLSFHLHVAEPKAVFAKEQPASREVQAEAGTSATLSCEVAQAQTEVTWYKDGKKLSSSSKVRMEAVGCTRRLVVQEAGQADAGEYSCKAGDQRLSFHLHVAEPKVVFAKEQPAHREVQAEAGASATLSCEVAQAQTEVTWYKDGKKLSSSSKVRVEAVGCTRRLVVQQAGQAEAGEYSCEAGGQQLSFRLQVAELEPQISERPCRREPLVVKEHEDIILTATLATPSAATVTWLKDGVEIRRSKRHETASQGDTHTLTVHGAQVLDSAIYSCRVGAEGQDFPVQVEEVAAKFCRLLEPVCGELGGTVTLACELSPACAEVVWRCGNTQLRVGKRFQMVAEGPVRSLTVLGLRAEDAGEYVCESRDDHTSAQLTVSVPRVVKFMSGLSTVVAEEGGEATFQCVVSPSDVAVVWFRDGALLQPSEKFAISQSGASHSLTISDLVLEDAGQITVEAEGASSSAALRVREAPVLFKKKLEPQTVEERSSVTLEVELTRPWPELRWTRNATALAPGKNVEIHAEGARHRLVLHNVGFADRGFFGCETPDDKTQAKLTVEMRQVRLVRGLQAVEAREQGTATMEVQLSHADVDGSWTRDGLRFQQGPTCHLAVRGPMHTLTLSGLRPEDSGLMVFKAEGVHTSARLVVTELPVSFSRPLQDVVTTEKEKVTLECELSRPNVDVRWLKDGVELRAGKTMAIAAQGACRSLTIYRCEFADQGVYVCDAHDAQSSASVKVQGRTYTLIYRRVLAEDAGEIQFVAENAESRAQLRVKELPVTLVRPLRDKIAMEKHRGVLECQVSRASAQVRWFKGSQELQPGPKYELVSDGLYRKLIISDVHAEDEDTYTCDAGDVKTSAQFFVEEQSITIVRGLQDVTVMEPAPAWFECETSIPSVRPPKWLLGKTVLQAGGNVGLEQEGTVHRLMLRRTCSTMTGPVHFTVGKSRSSARLVVSDIPVVLTRPLEPKTGRELQSVVLSCDFRPAPKAVQWYKDDTPLSPSEKFKMSLEGQMAELRILRLMPADAGVYRCQAGSAHSSTEVTVEAREVTVTGPLQDAEATEEGWASFSCELSHEDEEVEWSLNGMPLYNDSFHEISHKGRRHTLVLKSIQRADAGIVRASSLKVSTSARLEVRVKPVVFLKALDDLSAEERGTLALQCEVSDPEAHVVWRKDGVQLGPSDKYDFLHTAGTRGLVVHDVSPEDAGLYTCHVGSEETRARVRVHDLHVGITKRLKTMEVLEGESCSFECVLSHESASDPAMWTVGGKTVGSSSRFQATRQGRKYILVVREAAPSDAGEVVFSVRGLTSKASLIVRERPAAIIKPLEDQWVAPGEDVELRCELSRAGTPVHWLKDRKAIRKSQKYDVVCEGTMAMLVIRGASLKDAGEYTCEVEASKSTASLHVEEKANCFTEELTNLQVEEKGTAVFTCKTEHPAATVTWRKGLLELRASGKHQPSQEGLTLRLTISALEKADSDTYTCDIGQAQSRAQLLVQGRRVHIIEDLEDVDVQEGSSATFRCRISPANYEPVHWFLDKTPLHANELNEIDAQPGGYHVLTLRQLALKDSGTIYFEAGDQRASAALRVTEKPSVFSRELTDATITEGEDLTLVCETSTCDIPVCWTKDGKTLRGSARCQLSHEGHRAQLLITGATLQDSGRYKCEAGGACSSSIVRVHARPVRFQEALKDLEVLEGGAATLRCVLSSVAAPVKWCYGNNVLRPGDKYSLRQEGAMLELVVRNLRPQDSGRYSCSFGDQTTSATLTVTALPAQFIGKLRNKEATEGATATLRCELSKAAPVEWRKGSETLRDGDRYCLRQDGAMCELQIRGLAMVDAAEYSCVCGEERTSASLTIRPMPAHFIGRLRHQESIEGATATLRCELSKAAPVEWRKGRESLRDGDRHSLRQDGAVCELQICGLAVADAGEYSCVCGEERTSATLTVKALPAKFTEGLRNEEAVEGATAMLWCELSKVAPVEWRKGPENLRDGDRYILRQEGTRCELQICGLAMADAGEYLCVCGQERTSATLTIRALPARFIEDVKNQEAREGATAVLQCELNSAAPVEWRKGSETLRDGDRYSLRQDGTKCELQIRGLAMADTGEYSCVCGQERTSAMLTVRALPIKFTEGLRNEEATEGATAVLRCELSKMAPVEWWKGHETLRDGDRHSLRQDGARCELQIRGLVAEDAGEYLCMCGKERTSAMLTVRAMPSKFIEGLRNEEATEGDTATLWCELSKAAPVEWRKGHETLRDGDRHSLRQDGSRCELQIRGLAVVDAGEYSCVCGQERTSATLTVRALPARFIEDVKNQEAREGATAVLQCELSKAAPVEWRKGSETLRGGDRYSLRQDGTRCELQIHGLSVADTGEYSCVCGQERTSATLTVRALPARFTQDLKTKEASEGATATLQCELSKVAPVEWKKGPETLRDGGRYSLKQDGTRCELQIHDLSVADAGEYSCMCGQERTSATLTVRALPARFTEGLRNEEAMEGATATLQCELSKAAPVEWRKGLEALRDGDKYSLRQDGAVCELQIHGLAMADNGVYSCVCGQERTSATLTVRALPARFIEDMRNQKATEGATVTLQCKLRKAAPVEWRKGPNTLKDGDRYSLKQDGTSCELQIRGLVIADAGEYSCICEQERTSATLTVRALPARFIEDVRNHEATEGATAVLQCELSKAAPVEWRKGSETLRDGDRYSLRQDGTRCELQIRGLAVEDTGEYLCVCGQERTSATLTVRALPARFIDNMTNQEAREGATATLHCELSKVAPVEWRKGPETLRDGDRHSLRQDGTRCELQIRGLSVADAGEYSCVCGQERTSATLTIREATEGATAMLQCELSKVAPVEWRKGPETLRDGDRYNLRQDGTRCELQIHGLSVADTGEYSCVCGQEKTSATLTVKAPQPVFREPLQSLQAEEGSTATLQCELSEPTATVVWSKGGLQLQANGRREPRLQGCTAELVLQDLQREDTGEYTCTCGSQATSATLTVTAAPVRFLRELQHQEVDEGGTAHLCCELSRAGASVEWRKGSLQLFPCAKYQMVQDGAAAELLVRGVEQEDAGDYTCDTGHTQSMASLSVRVPRPKFKTRLQSLEQETGDIARLCCQLSDAESGAVVQWLKEGVELHAGPKYEMRSQGATRELLIHQLEAKDTGEYACVTGGQKTAASLRVTEPEVTIVRGLVDAEVTADEDVEFSCEVSRAGATGVQWCLQGLPLQSNEVTEVAVRDGRIHTLRLKGVTPEDAGTVSFHLGNHASSAQLTVRAPEVTILEPLQDVQLSEGQDASFQCRLSRASGQEARWALGGVPLQANEMNDITVEQGTLHLLTLHKVTLEDAGTVSFHVGTCSSEAQLKVTAKNTVVRGLENVEALEGGEALFECQLSQPEVAAHTWLLDDEPVHTSENAEVVFFENGLRHLLLLKNLRPQDSCRVTFLAGDMVTSAFLTVRGWRLEILEPLKNAAVRAGAQACFTCTLSEAVPVGEASWYINGAAVQPDDSDWTVTADGSHHALLLRSAQPHHAGEVTFACRDAVASARLTVLGLPDPPEDAEVVARSSHTVTLSWAAPMSDGGGGLCGYRVEVKEGATGQWRLCHELVPGPECVVDGLAPGETYRFRVAAVGPVGAGEPVHLPQTVRLAEPPKPVPPQPSAPESRQVAAGEDVSLELEVVAEAGEVIWHKGMERIQPGGRFEVVSQGRQQMLVIKGFTAEDQGEYHCGLAQGSICPAAATFQVALSPASVDEAPQPSLPPEAAQEGDLHLLWEALARKRRMSREPTLDSISELPEEDGRSQRLPQEAEEVAPDLSEGYSTADELARTGDADLSHTSSDDESRAGTPSLVTYLKKAGRPGTSPLASKVGAPAAPSVKPQQQQEPLAAVRPPLGDLSTKDLGDPSMDKAAVKIQAAFKGYKVRKEMKQQEGPMFSHTFGDTEAQVGDALRLECVVASKADVRARWLKDGVELTDGRHHHIDQLGDGTCSLLITGLDRADAGCYTCQVSNKFGQVTHSACVVVSGSESEAESSSGGELDDAFRRAARRLHRLFRTKSPAEVSDEELFLSADEGPAEPEEPADWQTYREDEHFICIRFEALTEARQAVTRFQEMFATLGIGVEIKLVEQGPRRVEMCISKETPAPVVPPEPLPSLLTSDAAPVFLTELQNQEVQDGYPVSFDCVVTGQPMPSVRWFKDGKLLEEDDHYMINEDQQGGHQLIITAVVPADMGVYRCLAENSMGVSSTKAELRVDLTSTDYDTAADATESSSYFSAQGYLSSREQEGTESTTDEGQLPQVVEELRDLQVAPGTRLAKFQLKVKGYPAPRLYWFKDGQPLTASAHIRMTDKKILHTLEIISVTREDSGQYAAYISNAMGAAYSSARLLVRGPDEPEEKPASDVHEQLVPPRMLERFTPKKVKKGSSITFSVKVEGRPVPTVHWLREEAERGVLWIGPDTPGYTVASSAQQHSLVLLDVGRQHQGTYTCIASNAAGQALCSASLHVSGLPKVEEQEKVKEALISTFLQGTTQAISAQGLETASFADLGGQRKEEPLAAKEALGHLSLAEVGTEEFLQKLTSQITEMVSAKITQAKLQVPGGDSDEDSKTPSASPRHGRSRPSSSIQESSSESEDGDARGEIFDIYVVTADYLPLGAEQDAITLREGQYVEVLDAAHPLRWLVRTKPTKSSPSRQGWVSPAYLDRRLKLSPEWGAAEAPEFPGEAVSEDEYKARLSSVIQELLSSEQAFVEELQFLQSHHLQHLERCPHVPIAVAGQKAVIFRNVRDIGRFHSSFLQELQQCDTDDDVAMCFIKNQAAFEQYLEFLVGRVQAESVVVSTAIQEFYKKYAEEALLAGDPSQPPPPPLQHYLEQPVERVQRYQALLKELIRNKARNRQNCALLEQAYAVVSALPQRAENKLHVSLMENYPGTLQALGEPIRQGHFIVWEGAPGARMPWKGHNRHVFLFRNHLVICKPRRDSRTDTVSYVFRNMMKLSSIDLNDQVEGDDRAFEVWQEREDSVRKYLLQARTAIIKSSWVKEICGIQQRLALPVWRPPDFEEELADCTAELGETVKLACRVTGTPKPVISWYKDGKAVQVDPHHILIEDPDGSCALILDSLTGVDSGQYMCFAASAAGNCSTLGKILVQVPPRFVNKVRASPFVEGEDAQFTCTIEGAPYPQIRWYKDGALLTTGNKFQTLSEPRSGLLVLVIRAASKEDLGLYECELVNRLGSARASAELRIQSPMLQAQEQCHREQLVAAVEDTTLERADQEVTSVLKRLLGPKAPGPSTGDLTGPGPCPRGAPALQETGSQPPVTGTSEAPAVPPRVPQPLLHEGPEQEPEAIARAQEWTVPIRMEGAAWPGAGTGELLWDVHSHVVRETTQRTYTYQAIDTHTARPPSMQVTIEDVQAQTGGTAQFEAIIEGDPQPSVTWYKDSVQLVDSTRLSQQQEGTTYSLVLRHVASKDAGVYTCLAQNTGGQVLCKAELLVLGGDNEPDSEKQSHRRKLHSFYEVKEEIGRGVFGFVKRVQHKGNKILCAAKFIPLRSRTRAQAYRERDILAALSHPLVTGLLDQFETRKTLILILELCSSEELLDRLYRKGVVTEAEVKVYIQQLVEGLHYLHSHGVLHLDIKPSNILMVHPAREDIKICDFGFAQNITPAELQFSQYGSPEFVSPEIIQQNPVSEASDIWAMGVISYLSLTCSSPFAGESDRATLLNVLEGRVSWSSPMAAHLSEDAKDFIKATLQRAPQARPSAAQCLSHPWFLKSMPAEEAHFINTKQLKFLLARSRWQRSLMSYKSILVMRSIPELLRGPPDSPSLGVARHLCRDTGGSSSSSSSSDNELAPFARAKSLPPSPVTHSPLLHPRGFLRPSASLPEEAEASERSTEAPAPPASPEGAGPPAAQGCVPRHSVIRSLFYHQAGESPEHGALAPGSRRHPARRRHLLKGGYIAGALPGLREPLMEHRVLEEEAAREEQATLLAKAPSFETALRLPASGTHLAPGHSHSLEHDSPSTPRPSSEACGEAQRLPSAPSGGAPIRDMGHPQGSKQLPSTGGHPGTAQPERPSPDSPWGQPAPFCHPKQGSAPQEGCSPHPAVAPCPPGSFPPGSCKEAPLVPSSPFLGQPQAPPAPAKASPPLDSKMGPGDISLPGRPKPGPCSSPGSASQASSSQVSSLRVGSSQVGTEPGPSLDAEGWTQEAEDLSDSTPTLQRPQEQATMRKFSLGGRGGYAGVAGYGTFAFGGDAGGMLGQGPMWARIAWAVSQSEEEEQEEARAESQSEEQQEARAESPLPQVSARPVPEVGRAPTRSSPEPTPWEDIGQVSLVQIRDLSGDAEAADTISLDISEVDPAYLNLSDLYDIKYLPFEFMIFRKVPKSAQPEPPSPMAEEELAEFPEPTWPWPGELGPHAGLEITEESEDVDALLAEAAVGRKRKWSSPSRSLFHFPGRHLPLDEPAELGLRERVKASVEHISRILKGRPEGLEKEGPPRKKPGLASFRLSGLKSWDRAPTFLRELSDETVVLGQSVTLACQVSAQPAAQATWSKDGAPLESSSRVLISATLKNFQLLTILVVVAEDLGVYTCSVSNALGTVTTTGVLRKAERPSSSPCPDIGEVYADGVLLVWKPVESYGPVTYIVQCSLEGGSWTTLASDIFDCCYLTSKLSRGGTYTFRTACVSKAGMGPYSSPSEQVLLGGPSHLASEEESQGRSAQPLPSTKTFAFQTQIQRGRFSVVRQCWEKASGRALAAKIIPYHPKDKTAVLREYEALKGLRHPHLAQLHAAYLSPRHLVLILELCSGPELLPCLAERASYSESEVKDYLWQMLSATQYLHNQHILHLDLRSENMIITEYNLLKVVDLGNAQSLSQEKVLPSDKFKDYLETMAPELLEGQGAVPQTDIWAIGVTAFIMLSAEYPVSSEGARDLQRGLRKGLVRLSRCYAGLSGGAVAFLRSTLCAQPWGRPCASSCLQCPWLTEEGPACSRPAPVTFPTARLRVFVRNREKRRALLYKRHNLAQVR

SEQ ID NO: 35318 - protein, 1742 aa, Homo sapiens
MWPAGAGTKLPCPRDSALRRAAFSGNLTALPSHLVPAGRSVRVFISANPEDTGAERQALRENVYPKLREFCRENYGLEFQVIDLYWGVEEDEWDSPELQKTRMKLLENCLKTSAGPCFVGLLGEKYGNIRIPGEVEASEFEMILDAAIEAKLETKLLEEWYCRDENSVPAAYYLRPKSEMLRSNRNAMQPSTNAENEKTWQEISDEIKKIFKAAVKLLHEKGKMKHSQAKRYLFSAIEDEFDFALGKQTPAFLKKCVCYIRKIANIERFVKIPEMGKYMDITGTEPRIIRDPEAQEKLIKLRDEFIPTIVASSNLRVYTSVTHCDMKLGYSQEIENHYIEGLGKQFYEDMIDIIQATIQQNFDTETDTLYDEILQHSSLCKTYASFYEYKCESLNIVHNYILPSKAGHINPLIIYGGPCTGKTLLLAEVAKKAYGWLHEDTGPESDPVVIVRFLGTTDMSSDLRTLLLSVCEQLAVNYRCLVQSYPKKIHDLCDLFINLLNESSLQRPLVIIFDALEQLSENDDARKLWWLPAHLPRFVRIVLSTLPNKHGILQKLRCLIHEEDNYIELIPRDRKMCSQVLKHQLLRVKRKVTSGQQIYVNNALSKCTLPMFVNLTFREVRHWRSHKDVDESSLSVTVHESIEQLFWSLEKKCGQKLVSRALGYITMAKMGLSEMELEDVLALDNSVMSELKENTRPSNPLRVPYLYIARLKEGLSGYLIERHVKNVTLLVWANRHLQLIAQKLYLQDDNDLREMHTILADYFLGVWSGGRRKAFCLEDPYLNGCLDLENRSLLEEEKHFMEQASFDRQAPDQPWVFQCNPLEPDIFFVNHRKMSELLYHLTRCGKTDDLLYGIIMNFSWLYTMIKIGQFDKVLSDIELAYNYSQEKELKFLANTLRSIKNKVTAFPGSLSAELQQRLLPVVSSLPKLRHLLLECDKDGPKYCSIVPLHSSMDVTYSPERLPLSSSHLHVTEILPTCNPSTVLTALENGSISTWDVETRQLLRQITTAQSVILGMKLTSDEKYLVVATTNNTLLIYDNVNSCLLSEVEIKGTKHGSSATYINGFTLSANHALAWLEASKDVTVIDLLYGWPLYQFHCWYEVTCVQCSLDGLYAFCGQYLNTTTIFHLGSGEKLCTVTSEFSGGFVKFLLILDTAQEMVMVDSEGSLSVWNTEDISSPQLTDDFDCRREDSEVVSIELSEDQSAVLICKALSIELLDTGLWKVAEKFRAKHNERFISAVLSKNGDCIIATMENTSAVFFWRRDTGQCMASLQEISGSIVKLVKSSHHNMLLSLSTSGVLSIWDIDIITAMSNIDKTGKPIQSLLLPARGEIIYSLDGSDCVHKWNFSSGFIEAVFKHEGIVEHCVLTSTGDIMVTSDDKSSQYVWHTSSGENLFRINGQRISQLLITHNDQFVVSLCEENASRVWRLATGHRVCNILTTLQNAFITSANTFVVGMTKSKVLAVSLWTGSITKKFCCEDGTTIVNFKLIPDCPDIIVFITSAETVNIWSLTDEVICRRVQLPNNFLKNLEDFEISPNGKLGIIARGDENINVLDLYSGKLRVVHASGIIWRQRLSRDGRYLVYICFRNGEEEDENGAIFSLIVMRLADGKNIGACSLYKTPTFLALSQRHLNIIVGFDDGSIGIYTVVDRVDAALKIKIATSNSRQIFNNATHTSRPKCNSYCFKISVDCLWRESTEVFARDSPITVSDSTESNEATPSKKHNSCYERVCSALEARGHSYAPDN

SEQ ID NO: 35319 - protein, 346 aa, Homo sapiens
MIIYKQGITFLQKENNNTIHLNTMFFLSPAETHQRMAAENHSFVTKFILVGLTEKSELQLPLFLVFLGIYVVTVLGNLGMITLIGLSSHLHTPMYCFLSSLSFIDFCHSTVITPKMLVNFVTEKNIISYPECMTQLYFFLVFAIAECHMLAAMAYDGYVAICSPLLYSIIISNKACFSLILVVYVIGLICASAHIGCMFRVQFCKFDVINHYFCDLISILKLSCSSTYINELLILIFSGINILVPSLTILSSYIFIIASILRIRYTEGRSKAFSTCSSHISAVSVFFGSAAFMYLQPSSVSSMDQGKVSSVFYTIVVPMLNPLIYSLRNKDVHVALKKTLGKRTFL

SEQ ID NO: 35320 - protein, 310 aa, Homo sapiens
MGKTKNTSLDAVVTDFILLGLSHPPNLRSLLFLVFFIIYILTQLGNLLILLTMWADPKLCARPMYILLGVLSFLDMWLSSVTVPRLILDFTPSIKAIPFGGCVAQLYFFHFLGSTQCFLYTLMAYDRYLAICQPLHYPVLMNGRLCTVLVAGAWVAGSMHGSIQATLTFRLPYCGPNQVDYFICDIRAVLRLACADTTVNELVTFVDVRVVAASCFMLILLSYANIVHAILKIRTADGRRRAFSTCGSHLIVVTVYYVPCIFIYLRAGSKDPLDGAAAVFYTVVTPLLNPLIYTLRNQEVKSALKRITAG

SEQ ID NO: 35321 - protein, 736 aa, Homo sapiens
MASIMEGPLSKWTNVMKGWQYRWFVLDYNAGLLSYYTSKDKMMRGSRRGCVRLRGAVIGIDDEDDSTFTITVDQKTFHFQARDADEREKWIHALEETILRHTLQLQGLDSGFVPSVQDFDKKLTEADAYLQILIEQLKLFDDKLQNCKEDEQRKKIETLKETTNSMVESIKHCIVLLQIAKDQSNAEKHADGMISTINPVDAIYQPSPLEPVISTMPSQTVLPPEPVQLCKSEQRPSSLPVGPVLATLGHHQTPTPNSTGSGHSPPSSSLTSPSHVNLSPNTVPEFSYSSSEDEFYDADEFHQSGSSPKRLIDSSGSASVLTHSSSGNSLKRPDTTESLNSSLSNGTSDADLFDSHDDRDDDAEAGSVEEHKSVIMHLLSQVRLGMDLTKVVLPTFILERRSLLEMYADFFAHPDLFVSISDQKDPKDRMVQVVKWYLSAFHAGRKGSVAKKPYNPILGEIFQCHWTLPNDTEENTELVSEGPVPWVSKNSVTFVAEQVSHHPPISAFYAECFNKKIQFNAHIWTKSKFLGMSIGVHNIGQGCVSCLDYDEHYILTFPNGYGRSILTVPWVELGGECNINCSKTGYSANIIFHTKPFYGGKKHRITAEIFSPNDKKSFCSIEGEWNGVMYAKYATGENTVFVDTKKLPIIKKKVRKLEDQNEYESRSLWKDVTFNLKIRDIDAATEAKHRLEERQRAEARERKEKEIQWETRLFHEDGECWVYDEPLLKRLGAAKH

SEQ ID NO: 35322 - protein, 723 aa, Homo sapiens
MASIMEGPLSKWTNVMKGWQYRWFVLDYNAGLLSYYTSKDKMMRGSRRGCVRLRGAVIGIDDEDDSTFTITVDQKTFHFQARDADEREKWIHALEETILRHTLQLQGLDSGFVPSVQDFDKKLTEADAYLQILIEQLKLFDDKLQNCKEDEQRKKIETLKETTNSMVESIKHCIVLLQIAKSTINPVDAIYQPSPLEPVISTMPSQTVLPPEPVQLCKSEQRPSSLPVGPVLATLGHHQTPTPNSTGSGHSPPSSSLTSPSHVNLSPNTVPEFSYSSSEDEFYDADEFHQSGSSPKRLIDSSGSASVLTHSSSGNSLKRPDTTESLNSSLSNGTSDADLFDSHDDRDDDAEAGSVEEHKSVIMHLLSQVRLGMDLTKVVLPTFILERRSLLEMYADFFAHPDLFVSISDQKDPKDRMVQVVKWYLSAFHAGRKGSVAKKPYNPILGEIFQCHWTLPNDTEENTELVSEGPVPWVSKNSVTFVAEQVSHHPPISAFYAECFNKKIQFNAHIWTKSKFLGMSIGVHNIGQGCVSCLDYDEHYILTFPNGYGRSILTVPWVELGGECNINCSKTGYSANIIFHTKPFYGGKKHRITAEIFSPNDKKSFCSIEGEWNGVMYAKYATGENTVFVDTKKLPIIKKKVRKLEDQNEYESRSLWKDVTFNLKIRDIDAATEAKHRLEERQRAEARERKEKEIQWETRLFHEDGECWVYDEPLLKRLGAAKH

SEQ ID NO: 35323 - protein, 626 aa, Homo sapiens
MAFLLATCGGLDSGFVPSVQDFDKKLTEADAYLQILIEQLKLFDDKLQNCKEDEQRKKIETLKETTNSMVESIKHCIVLLQIAKSTINPVDAIYQPSPLEPVISTMPSQTVLPPEPVQLCKSEQRPSSLPVGPVLATLGHHQTPTPNSTGSGHSPPSSSLTSPSHVNLSPNTVPEFSYSSSEDEFYDADEFHQSGSSPKRLIDSSGSASVLTHSSSGNSLKRPDTTESLNSSLSNGTSDADLFDSHDDRDDDAEAGSVEEHKSVIMHLLSQVRLGMDLTKVVLPTFILERRSLLEMYADFFAHPDLFVSISDQKDPKDRMVQVVKWYLSAFHAGRKGSVAKKPYNPILGEIFQCHWTLPNDTEENTELVSEGPVPWVSKNSVTFVAEQVSHHPPISAFYAECFNKKIQFNAHIWTKSKFLGMSIGVHNIGQGCVSCLDYDEHYILTFPNGYGRSILTVPWVELGGECNINCSKTGYSANIIFHTKPFYGGKKHRITAEIFSPNDKKSFCSIEGEWNGVMYAKYATGENTVFVDTKKLPIIKKKVRKLEDQNEYESRSLWKDVTFNLKIRDIDAATEAKHRLEERQRAEARERKEKEIQWETRLFHEDGECWVYDEPLLKRLGAAKH

SEQ ID NO: 35324 - protein, 571 aa, Homo sapiens
MVESIKHCIVLLQIAKDQSNAEKHADGMISTINPVDAIYQPSPLEPVISTMPSQTVLPPEPVQLCKSEQRPSSLPVGPVLATLGHHQTPTPNSTGSGHSPPSSSLTSPSHVNLSPNTVPEFSYSSSEDEFYDADEFHQSGSSPKRLIDSSGSASVLTHSSSGNSLKRPDTTESLNSSLSNGTSDADLFDSHDDRDDDAEAGSVEEHKSVIMHLLSQVRLGMDLTKVVLPTFILERRSLLEMYADFFAHPDLFVSISDQKDPKDRMVQVVKWYLSAFHAGRKGSVAKKPYNPILGEIFQCHWTLPNDTEENTELVSEGPVPWVSKNSVTFVAEQVSHHPPISAFYAECFNKKIQFNAHIWTKSKFLGMSIGVHNIGQGCVSCLDYDEHYILTFPNGYGRSILTVPWVELGGECNINCSKTGYSANIIFHTKPFYGGKKHRITAEIFSPNDKKSFCSIEGEWNGVMYAKYATGENTVFVDTKKLPIIKKKVRKLEDQNEYESRSLWKDVTFNLKIRDIDAATEAKHRLEERQRAEARERKEKEIQWETRLFHEDGECWVYDEPLLKRLGAAKH

SEQ ID NO: 35325 - protein, 558 aa, Homo sapiens
MVESIKHCIVLLQIAKSTINPVDAIYQPSPLEPVISTMPSQTVLPPEPVQLCKSEQRPSSLPVGPVLATLGHHQTPTPNSTGSGHSPPSSSLTSPSHVNLSPNTVPEFSYSSSEDEFYDADEFHQSGSSPKRLIDSSGSASVLTHSSSGNSLKRPDTTESLNSSLSNGTSDADLFDSHDDRDDDAEAGSVEEHKSVIMHLLSQVRLGMDLTKVVLPTFILERRSLLEMYADFFAHPDLFVSISDQKDPKDRMVQVVKWYLSAFHAGRKGSVAKKPYNPILGEIFQCHWTLPNDTEENTELVSEGPVPWVSKNSVTFVAEQVSHHPPISAFYAECFNKKIQFNAHIWTKSKFLGMSIGVHNIGQGCVSCLDYDEHYILTFPNGYGRSILTVPWVELGGECNINCSKTGYSANIIFHTKPFYGGKKHRITAEIFSPNDKKSFCSIEGEWNGVMYAKYATGENTVFVDTKKLPIIKKKVRKLEDQNEYESRSLWKDVTFNLKIRDIDAATEAKHRLEERQRAEARERKEKEIQWETRLFHEDGECWVYDEPLLKRLGAAKH

SEQ ID NO: 35326 - protein, 746 aa, Homo sapiens
MASIMEGPLSKWTNVMKGWQYRWFVLDYNAGLLSYYTSKDKMMRGSRRGCVRLRGAVIGIDDEDDSTFTITVDQKTFHFQARDADEREKWIHALEETILRHTLQLQISTTLAFFQSSGISPVLEFSKIIGLDSGFVPSVQDFDKKLTEADAYLQILIEQLKLFDDKLQNCKEDEQRKKIETLKETTNSMVESIKHCIVLLQIAKSTINPVDAIYQPSPLEPVISTMPSQTVLPPEPVQLCKSEQRPSSLPVGPVLATLGHHQTPTPNSTGSGHSPPSSSLTSPSHVNLSPNTVPEFSYSSSEDEFYDADEFHQSGSSPKRLIDSSGSASVLTHSSSGNSLKRPDTTESLNSSLSNGTSDADLFDSHDDRDDDAEAGSVEEHKSVIMHLLSQVRLGMDLTKVVLPTFILERRSLLEMYADFFAHPDLFVSISDQKDPKDRMVQVVKWYLSAFHAGRKGSVAKKPYNPILGEIFQCHWTLPNDTEENTELVSEGPVPWVSKNSVTFVAEQVSHHPPISAFYAECFNKKIQFNAHIWTKSKFLGMSIGVHNIGQGCVSCLDYDEHYILTFPNGYGRSILTVPWVELGGECNINCSKTGYSANIIFHTKPFYGGKKHRITAEIFSPNDKKSFCSIEGEWNGVMYAKYATGENTVFVDTKKLPIIKKKVRKLEDQNEYESRSLWKDVTFNLKIRDIDAATEAKHRLEERQRAEARERKEKEIQWETRLFHEDGECWVYDEPLLKRLGAAKH

SEQ ID NO: 35327 - protein, 719 aa, Homo sapiens
MASIMEGPLSKWTNVMKGWQYRWFVLDYNAGLLSYYTGAVIGIDDEDDSTFTITVDQKTFHFQARDADEREKWIHALEETILRHTLQLQGLDSGFVPSVQDFDKKLTEADAYLQILIEQLKLFDDKLQNCKEDEQRKKIETLKETTNSMVESIKHCIVLLQIAKDQSNAEKHADGMISTINPVDAIYQPSPLEPVISTMPSQTVLPPEPVQLCKSEQRPSSLPVGPVLATLGHHQTPTPNSTGSGHSPPSSSLTSPSHVNLSPNTVPEFSYSSSEDEFYDADEFHQSGSSPKRLIDSSGSASVLTHSSSGNSLKRPDTTESLNSSLSNGTSDADLFDSHDDRDDDAEAGSVEEHKSVIMHLLSQVRLGMDLTKVVLPTFILERRSLLEMYADFFAHPDLFVSISDQKDPKDRMVQVVKWYLSAFHAGRKGSVAKKPYNPILGEIFQCHWTLPNDTEENTELVSEGPVPWVSKNSVTFVAEQVSHHPPISAFYAECFNKKIQFNAHIWTKSKFLGMSIGVHNIGQGCVSCLDYDEHYILTFPNGYGRSILTVPWVELGGECNINCSKTGYSANIIFHTKPFYGGKKHRITAEIFSPNDKKSFCSIEGEWNGVMYAKYATGENTVFVDTKKLPIIKKKVRKLEDQNEYESRSLWKDVTFNLKIRDIDAATEAKHRLEERQRAEARERKEKEIQWETRLFHEDGECWVYDEPLLKRLGAAKH

SEQ ID NO: 35328 - protein, 934 aa, Homo sapiens
MSSDEKGISPAHKTSTPTHRSASSSTSSQRDSRQSIHILERTASSSTEPSVSRQLLEPEPVPLSKEADSWEIIEGLKIGQTNVQKPDKHEGFMLKKRKWPLKGWHKRFFVLDNGMLKYSKAPLDIQKGKVHGSIDVGLSVMSIKKKARRIDLDTEEHIYHLKVKSQDWFDAWVSKLRHHRLYRQNEIVRSPRDASFHIFPSTSTAESSPAANVSVMDGKMQPNSFPWQSPLPCSNSLPATCTTGQSKVAAWLQDSEEMDRCAEDLAHCQSNLVELSKLLQNLEILQRTQSAPNFTDMQANCVDISKKDKRVTRRWRTKSVSKDTKIQLQVPFSATMSPVRLHSSNPNLCADIEFQTPPSHLTDPLESSTDYTKLQEEFCLIAQKVHSLLKSAFNSIAIEKEKLKQMVSEQDHSKGHSTQMARLRQSLSQALNQNAELRSRLNRIHSESIICDQVVSVNIIPSPDEAGEQIHVSLPLSQQVANESRLSMSESVSEFFDAQEVLLSASSSENEASDDESYISDVSDNISEDNTSVADNISRQILNGELTGGAFRNGRRACLPAPCPDTSNINLWNILRNNIGKDLSKVSMPVELNEPLNTLQHLCEEMEYSELLDKASETDDPYERMVLVAAFAVSGYCSTYFRAGSKPFNPVLGETYECIREDKGFRFFSEQVSHHPPISACHCESKNFVFWQDIRWKNKFWGKSMEILPVGTLNVMLPKYGDYYVWNKVTTCIHNILSGRRWIEHYGEVTIRNTKSSVCICKLTFVKVNYWNSNMNEVQGVVIDQEGKAVYRLFGKWHEGLYCGVAPSAKCIWRPGSMPTNYELYYGFTRFAIELNELDPVLKDLLPPTDARFRPDQRFLEEGNLEAAASEKQRVEELQRSRRRYMEENNLEHIPKFFKKVIDANQREAWVSNDTYWELRKDPGFSKVDSPVLW

SEQ ID NO: 35329 - protein, 898 aa, Homo sapiens
MSSDEKGISPAHKTSTPTHRSASSSTSSQRDSRQSIHILERTASSSTEPSVSRQLLEPEPVPLSKEADSWEIIEGLKIGQTNVQKPDKHEGFMLKKRKWPLKGWHKRFFVLDNGMLKYSKAPLDIQKGKVHGSIDVGLSVMSIKKKARRIDLDTEEHIYHLKVKSQDWFDAWVSKLRHHRLYRQNEIVRSPRDASFHIFPSTSTAESSPAANVSVMDGKMQPNSFPWQSPLPCSNSLPATCTTGQSKVAAWLQDSEEMDRCAEDLAHCQSNLVELSKLLQNLEILQRTQSAPNFTDMQANCVDISKKDKRVTRRWRTKSVSKDTKIQLQVPFSATMSPVRLHSSNPNLCADIEFQTPPSHLTDPLESSTDYTKLQEEFCLIAQKVHSLLKSAFNSIAIEKEKLKQMVSEQDHSKGHSTQMARLRQSLSQAGEQIHVSLPLSQQVANESRLSMSESVSEFFDAQEVLLSASSSENEASDDESYISDVSDNISEDNTSVADNISRQILNGELTGGAFRNGRRACLPAPCPDTSNINLWNILRNNIGKDLSKVSMPVELNEPLNTLQHLCEEMEYSELLDKASETDDPYERMVLVAAFAVSGYCSTYFRAGSKPFNPVLGETYECIREDKGFRFFSEQVSHHPPISACHCESKNFVFWQDIRWKNKFWGKSMEILPVGTLNVMLPKYGDYYVWNKVTTCIHNILSGRRWIEHYGEVTIRNTKSSVCICKLTFVKVNYWNSNMNEVQGVVIDQEGKAVYRLFGKWHEGLYCGVAPSAKCIWRPGSMPTNYELYYGFTRFAIELNELDPVLKDLLPPTDARFRPDQRFLEEGNLEAAASEKQRVEELQRSRRRYMEENNLEHIPKFFKKVIDANQREAWVSNDTYWELRKDPGFSKVDSPVLW

SEQ ID NO: 35330 - protein, 938 aa, Homo sapiens
MHQLSLIRGNRGRSIHILERTASSSTEPSVSRQLLEPEPVPLSKEADSWEIIEGLKIGQTNVQKPDKHEGFMLKKRKWPLKGWHKRFFVLDNGMLKYSKAPLDIQKGKVHGSIDVGLSVMSIKKKARRIDLDTEEHIYHLKVKSQDWFDAWVSKLRHHRLYRQNEIVRSPRDASFHIFPSTSTAESSPAANVSVMDGKMQPNSFPWQSPLPCSNSLPATCTTGQSKVAAWLQDSEEMDRCAEDLAHCQSNLVELSKLLQNLEILQRTQSAPNFTDMQANCVDISKKDKRVTRRWRTKSVSKDTKIQLQEGPPAKGQFSTTRRRQRLAAAVATTVPFSATMSPVRLHSSNPNLCADIEFQTPPSHLTDPLESSTDYTKLQEEFCLIAQKVHSLLKSAFNSIAIEKEKLKQMVSEQDHSKGHSTQMARLRQSLSQALNQNAELRSRLNRIHSESIICDQVVSVNIIPSPDEAGEQIHVSLPLSQQVANESRLSMSESVSEFFDAQEVLLSASSSENEASDDESYISDVSDNISEDNTSVADNISRQILNGELTGGAFRNGRRACLPAPCPDTSNINLWNILRNNIGKDLSKVSMPVELNEPLNTLQHLCEEMEYSELLDKASETDDPYERMVLVAAFAVSGYCSTYFRAGSKPFNPVLGETYECIREDKGFRFFSEQVSHHPPISACHCESKNFVFWQDIRWKNKFWGKSMEILPVGTLNVMLPKYGDYYVWNKVTTCIHNILSGRRWIEHYGEVTIRNTKSSVCICKLTFVKVNYWNSNMNEVQGVVIDQEGKAVYRLFGKWHEGLYCGVAPSAKCIWRPGSMPTNYELYYGFTRFAIELNELDPVLKDLLPPTDARFRPDQRFLEEGNLEAAASEKQRVEELQRSRRRYMEENNLEHIPKFFKKVIDANQREAWVSNDTYWELRKDPGFSKVDSPVLW

SEQ ID NO: 35331 - protein, 903 aa, Homo sapiens
MSSDEKGISPAHKTSTPTHRSASSSTSSQRDSRQSIHILERTASSSTEPSVSRQLLEPEPVPLSKEADSWEIIEGLKIGQTNVQKPDKHEGFMLKKRKWPLKGWHKRFFVLDNGMLKYSKAPLDIQKGKVHGSIDVGLSVMSIKKKARRIDLDTEEHIYHLKVKSQDWFDAWVSKLRHHRLYRQNEIVRSPRDASFHIFPSTSTAESSPAANVSVMDGKMQPNSFPWQSPLPCSNSLPATCTTGQSKVAAWLQDSEEMDRCAEDLAHCQSNLVELSKLLQNLEILQRTQSAPNFTDMQVPFSATMSPVRLHSSNPNLCADIEFQTPPSHLTDPLESSTDYTKLQEEFCLIAQKVHSLLKSAFNSIAIEKEKLKQMVSEQDHSKGHSTQMARLRQSLSQALNQNAELRSRLNRIHSESIICDQVVSVNIIPSPDEAGEQIHVSLPLSQQVANESRLSMSESVSEFFDAQEVLLSASSSENEASDDESYISDVSDNISEDNTSVADNISRQILNGELTGGAFRNGRRACLPAPCPDTSNINLWNILRNNIGKDLSKVSMPVELNEPLNTLQHLCEEMEYSELLDKASETDDPYERMVLVAAFAVSGYCSTYFRAGSKPFNPVLGETYECIREDKGFRFFSEQVSHHPPISACHCESKNFVFWQDIRWKNKFWGKSMEILPVGTLNVMLPKYGDYYVWNKVTTCIHNILSGRRWIEHYGEVTIRNTKSSVCICKLTFVKVNYWNSNMNEVQGVVIDQEGKAVYRLFGKWHEGLYCGVAPSAKCIWRPGSMPTNYELYYGFTRFAIELNELDPVLKDLLPPTDARFRPDQRFLEEGNLEAAASEKQRVEELQRSRRRYMEENNLEHIPKFFKKVIDANQREAWVSNDTYWELRKDPGFSKVDSPVLW

SEQ ID NO: 35332 - protein, 959 aa, Homo sapiens
MSSDEKGISPAHKTSTPTHRSASSSTSSQRDSRQSIHILERTASSSTEPSVSRQLLEPEPVPLSKEADSWEIIEGLKIGQTNVQKPDKHEGFMLKKRKWPLKGWHKRFFVLDNGMLKYSKAPLDIQKGKVHGSIDVGLSVMSIKKKARRIDLDTEEHIYHLKVKSQDWFDAWVSKLRHHRLYRQNEIVRSPRDASFHIFPSTSTAESSPAANVSVMDGKMQPNSFPWQSPLPCSNSLPATCTTGQSKVAAWLQDSEEMDRCAEDLAHCQSNLVELSKLLQNLEILQRTQSAPNFTDMQANCVDISKKDKRVTRRWRTKSVSKDTKIQLQEGPPAKGQFSTTRRRQRLAAAVATTVPFSATMSPVRLHSSNPNLCADIEFQTPPSHLTDPLESSTDYTKLQEEFCLIAQKVHSLLKSAFNSIAIEKEKLKQMVSEQDHSKGHSTQMARLRQSLSQALNQNAELRSRLNRIHSESIICDQVVSVNIIPSPDEAGEQIHVSLPLSQQVANESRLSMSESVSEFFDAQEVLLSASSSENEASDDESYISDVSDNISEDNTSVADNISRQILNGELTGGAFRNGRRACLPAPCPDTSNINLWNILRNNIGKDLSKVSMPVELNEPLNTLQHLCEEMEYSELLDKASETDDPYERMVLVAAFAVSGYCSTYFRAGSKPFNPVLGETYECIREDKGFRFFSEQVSHHPPISACHCESKNFVFWQDIRWKNKFWGKSMEILPVGTLNVMLPKYGDYYVWNKVTTCIHNILSGRRWIEHYGEVTIRNTKSSVCICKLTFVKVNYWNSNMNEVQGVVIDQEGKAVYRLFGKWHEGLYCGVAPSAKCIWRPGSMPTNYELYYGFTRFAIELNELDPVLKDLLPPTDARFRPDQRFLEEGNLEAAASEKQRVEELQRSRRRYMEENNLEHIPKFFKKVIDANQREAWVSNDTYWELRKDPGFSKVDSPVLW

SEQ ID NO: 35333 - protein, 508 aa, Homo sapiens
MSSDEKGISPAHKTSTPTHRSASSSTSSQRDSRQSIHILERTASSSTEPSVSRQLLEPEPVPLSKEADSWEIIEGLKIGQTNVQKPDKHEGFMLKKRKWPLKGWHKRFFVLDNGMLKYSKAPLDIQKGKVHGSIDVGLSVMSIKKKARRIDLDTEEHIYHLKVKSQDWFDAWVSKLRHHRLYRQNEIVRSPRDASFHIFPSTSTAESSPAANVSVMDGKMQPNSFPWQSPLPCSNSLPATCTTGQSKVAAWLQDSEEMDRCAEDLAHCQSNLVELSKLLQNLEILQRTQSAPNFTDMQVPFSATMSPVRLHSSNPNLCADIEFQTPPSHLTDPLESSTDYTKLQEEFCLIAQKVHSLLKSAFNSIAIEKEKLKQMVSEQDHSKGHSTQMARLRQSLSQAGEQIHVSLPLSQQVANESRLSMSESVSEFFDAQEVLLSASSSENEASDDESYISDVSDNISEDNTSVADNISRQSMHHLSFQVVLSTCQIATRRLNEQAFPLPRHPHPC

SEQ ID NO: 35334 - protein, 327 aa, Homo sapiens
MIFPSHDSQAFTSVDMEVGNCTILTEFILLGFSADSQWQPILFGVFLMLYLITLSGNMTLVILIRTDSHLHTPMYFFIGNLSFLDFWYTSVYTPKILASCVSEDKRISLAGCGAQLFFSCVVAYTECYLLAAMAYDRHAAICNPLLYSGTMSTALCTGLVAGSYIGGFLNAIAHTANTFRLHFCGKNIIDHFFCDAPPLVKMSCTNTRVYEKVLLGVVGFTVLSSILAILISYVNILLAILRIHSASGRHKAFSTCASHLISVMLFYGSLLFMYSRPSSTYSLERDKVAALFYTVINPLLNPLIYSLRNKDIKEAFRKATQTIQPQT

SEQ ID NO: 35335 - protein, 325 aa, Homo sapiens
MKTLCSFLQISRNMHQENQTTITEFILLGLSNQAEHQNLLFVLFLSMYVVTVVGNGLIIVAISLDIYLHTPMYLFLAYLSFADISSISNSVPKMLVNIQTNSQSISYESCITQMYFSIVFVVTDNLLLGTMAFDHFVAICHPLNYTTFMRARFGTLLTVISWFLSNIIALTHTLLLIQLLFCDHNTLPHFFCDLAPLLKLSCSDTMINELVLFIVGLSVIIFPFVLIFFSYVCIIRAVLGVSSTQGKWKAFSTCGSHLTIALLFYGTTVGVYFFPSSTHPEDTDKIGAVLFTVVTPMMNPFIYSLRNKDMKGALRKLINRKISSL

SEQ ID NO: 35336 - protein, 313 aa, Homo sapiens
MEGKNLTSISECFLLGFSEQLEEQKPLFGSFLFMYLVTVAGNLLIILVIITDTQLHTPMYFFLANLSLADACFVSTTVPKMLANIQIQSQAISYSGCLLQLYFFMLFVMLEAFLLAVMAYDCYVAICHPLHYILIMSPGLCIFLVSASWIMNALHSLLHTLLMNSLSFCANHEIPHFFCDINPLLSLSCTDPFTNELVIFITGGLTGLICVLCLIISYTNVFSTILKIPSAQGKRKAFSTCSSHLSVVSLFFGTSFCVDFSSPSTHSAQKDTVASVMYTVVTPMLNPFIYSLRNQEIKSSLRKLIWVRKIHSP

SEQ ID NO: 35337 - protein, 311 aa, Homo sapiens
METKNYSSSTSGFILLGLSSNPKLQKPLFAIFLIMYLLTAVGNVLIILAIYSDPRLHTPMYFFLSNLSFMDICFTTVIVPKMLVNFLSETKIISYVGCLIQMYFFMAFGNTDSYLLASMAIDRLVAICNPLHYDVVMKPWHCLLMLLGSCSISHLHSLFRVLLMSRLSFCASHIIKHFFCDTQPVLKLSCSDTSSSQMVVMTETLAVIVTPFLCTIFSYLQIIVTVLRIPSAAGKWKAFSTCGSHLTVVVLFYGSVIYVYFRPLSMYSVMKGRVATVMYTVVTPMLNPFIYSLRNKDMKRGLKKLRHRIYS

SEQ ID NO: 35338 - protein, 364 aa, Homo sapiens
MAQQWSLQRLAGRHPQDSYEDSTQSSIFTYTNSNSTRGPFEGPNYHIAPRWVYHLTSVWMIFVVTASVFTNGLVLAATMKFKKLRHPLNWILVNLAVADLAETVIASTISIVNQVSGYFVLGHPMCVLEGYTVSLCGITGLWSLAIISWERWLVVCKPFGNVRFDAKLAIVGIAFSWIWSAVWTAPPIFGWSRYWPHGLKTSCGPDVFSGSSYPGVQSYMIVLMVTCCIIPLAIIMLCYLQVWLAIRAVAKQQKESESTQKAEKEVTRMVVVMIFAYCVCWGPYTFFACFAAANPGYAFHPLMAALPAYFAKSATIYNPVIYVFMNRQFRNCILQLFGKKVDDGSELSSASKTEVSSVSSVSPA

SEQ ID NO: 35339 - protein, 400 aa, Homo sapiens
MMDLRNTPAKSLDKFIEDYLLPDTCFRMQINHAIDIICGFLKERCFRGSSYPVCVSKVVKGGSSGKGTTLRGRSDADLVVFLSPLTTFQDQLNRRGEFIQEIRRQLEACQRERAFSVKFEVQAPRWGNPRALSFVLSSLQLGEGVEFDVLPAFDALGQLTGGYKPNPQIYVKLIEECTDLQKEGEFSTCFTELQRDFLKQRPTKLKSLIRLVKHWYQNCKKKLGKLPPQYALELLTVYAWERGSMKTHFNTAQGFRTVLELVINYQQLCIYWTKYYDFKNPIIEKYLRRQLTKPRPVILDPADPTGNLGGGDPKGWRQLAQEAEAWLNYPCFKNWDGSPVSSWILLAESNSADDETDDPRRYQKYGYIGTHEYPHFSHRPSTLQAASTPQAEEDWTCTIL

SEQ ID NO: 35340 - protein, 364 aa, Homo sapiens
MMDLRNTPAKSLDKFIEDYLLPDTCFRMQINHAIDIICGFLKERCFRGSSYPVCVSKVVKGGSSGKGTTLRGRSDADLVVFLSPLTTFQDQLNRRGEFIQEIRRQLEACQRERAFSVKFEVQAPRWGNPRALSFVLSSLQLGEGVEFDVLPAFDALGQLTGGYKPNPQIYVKLIEECTDLQKEGEFSTCFTELQRDFLKQRPTKLKSLIRLVKHWYQNCKKKLGKLPPQYALELLTVYAWERGSMKTHFNTAQGFRTVLELVINYQQLCIYWTKYYDFKNPIIEKYLRRQLTKPRPVILDPADPTGNLGGGDPKGWRQLAQEAEAWLNYPCFKNWDGSPVSSWILLVRPPASSLPFIPAPLHEA

SEQ ID NO: 35341 - protein, 414 aa, Homo sapiens
MMDLRNTPAKSLDKFIEDYLLPDTCFRMQINHAIDIICGFLKERCFRGSSYPVCVSKVVKGGSSGKGTTLRGRSDADLVVFLSPLTTFQDQLNRRGEFIQEIRRQLEACQRERAFSVKFEVQAPRWGNPRALSFVLSSLQLGEGVEFDVLPAFDALGQLTGGYKPNPQIYVKLIEECTDLQKEGEFSTCFTELQRDFLKQRPTKLKSLIRLVKHWYQNCKKKLGKLPPQYALELLTVYAWERGSMKTHFNTAQGFRTVLELVINYQQLCIYWTKYYDFKNPIIEKYLRRQLTKPRPVILDPADPTGNLGGGDPKGWRQLAQEAEAWLNYPCFKNWDGSPVSSWILLTQHTPGSIHPTGRRGLDLHHPLNASASWGKGLQCYLDQFLHFQVGLLIQRGQSSSVSWCIIQDRTQVS

SEQ ID NO: 35342 - protein, 360 aa, Homo sapiens
MMDLRNTPAKSLDKFIEDYLLPDTCFRMQINHAIDIICGFLKERCFRGSSYPVCVSKVVKGGSSGKGTTLRGRSDADLVVFLSPLTTFQDQLNRRGEFIQEIRRQLEACQRERAFSVKFEVQAPRWGNPRALSFVLSSLQLGEGVEFDVLPAFDALGQLTGGYKPNPQIYVKLIEECTDLQKEGEFSTCFTELQRDFLKQRPTKLKSLIRLVKHWYQNCKKKLGKLPPQYALELLTVYAWERGSMKTHFNTAQGFRTVLELVINYQQLCIYWTKYYDFKNPIIEKYLRRQLTKPRPVILDPADPTGNLGGGDPKGWRQLAQEAEAWLNYPCFKNWDGSPVSSWILLVNLTLVGRRNYTNN

SEQ ID NO: 35343 - protein, 326 aa, Homo sapiens
MGFLSPMHPCRPPTQRRMAAGNHSTVTEFILKGLTKRADLQLPLFLLFLGIYLVTIVGNLGMITLICLNSQLHTPMYYFLSNLSLMDLCYSSVITPKMLVNFVSEKNIISYAGCMSQLYFFLVFVIAECYMLTVMAYDRYVAICHPLLYNIIMSHHTCLLLVAVVYAIGLIGSTIETGLMLKLPYCEHLISHYFCDILPLMKLSCSSTYDVEMTVFFSAGFNIIVTSLTVLVSYTFILSSILGISTTEGRSKAFSTCSSHLAAVGMFYGSTAFMYLKPSTISSLTQENVASVFYTTVIPMLNPLIYSLRNKEVKAAVQKTLRGKLF

SEQ ID NO: 35344 - protein, 320 aa, Homo sapiens
MDATACNESVDGSPVFYLLGIPSLPETFFLPVFFIFLLFYLLILMGNALILVAVVAEPSLHKPMYFFLINLSTLDILFTTTTVPKMLSLFLLGDRFLSFSSCLLQMYLFQSFTCSEAFILVVMAYDRYVAICHPLHYPVLMNPQTNATLAASAWLTALLLPIPAVVRTSQMAYNSIAYIYHCFCDHLAVVQASCSDTTPQTLMGFCIAMVVSFLPLLLVLLSYVHILASVLRISSLEGRAKAFSTCSSHLLVVGTYYSSIAIAYVAYRADLPLDFHIMGNVVYAILTPILNPLIYTLRNRDVKAAITKIMSQDPGCDRSI

SEQ ID NO: 35345 - protein, 342 aa, Homo sapiens
MTETSLSSQCFPMSVLNNTIAEPLIFLLMGIPGLKATQYWISIPFCLLYVVAVSGNSMILFVVLCERSLHKPMYYFLSMLSATDLSLSLCTLSTTLGVFWFEAREINLNACIAQMFFLHGFTFMESGVLLAMAFDRFVAICYPLRYTTILTNARIAKIGMSMLIRNVAVMLPVMLFVKRLSFCSSMVLSHSYCYHVDLIQLSCTDNRINSILGLFALLSTTGFDCPCILLSYILIIRSVLSIASSEERRKAFNTCTSHISAVSIFYLPLISLSLVHRYGHSAPPFVHIIMANVFLLIPPVLNPIIYSVKIKQIQKAIIKVLIQKHSKSNHQLFLIRDKAIYE

SEQ ID NO: 35346 - protein, 307 aa, Homo sapiens
MESENRTVIREFILLGLTQSQDIQLLVFVLVLIFYFIILPGNFLIIFTIKSDPGLTAPLYFFLGNLAFLDASYSFIVAPRMLVDFLSAKKIISYRGCITQLFFLHFLGGGEGLLLVVMAFDRYIAICRPLHYPTVMNPRTCYAMMLALWLGGFVHSIIQVVLILRLPFCGPNQLDNFFCDVPQVIKLACTDTFVVELLMVFNSGLMTLLCFLGLLASYAVILCRIRGSSSEAKNKAMSTCITHIIVIFFMFGPGIFIYTRPFRAFPADKVVSLFHTVIFPLLNPVIYTLRNQEVKASMKKVFNKHIA

SEQ ID NO: 35347 - protein, 319 aa, Homo sapiens
MEKANETSPVMGFVLLRLSAHPELEKTFFVLILLMYLVILLGNGVLILVTILDSRLHTPMYFFLGNLSFLDICFTTSSVPLVLDSFLTPQETISFSACAVQMALSFAMAGTECLLLSMMAFDRYVAICNPLRYSVIMSKAAYMPMAASSWAIGGAASVVHTSLAIQLPFCGDNVINHFTCEILAVLKLACADISINVISMEVTNVIFLGVPVLFISFSYVFIITTILRIPSAEGRKKVFSTCSAHLTVVIVFYGTLFFMYGKPKSKDSMGADKEDLSDKLIPLFYGVVTPMLNPIIYSLRNKDVKAAVRRLLRPKGFTQ

SEQ ID NO: 35348 - protein, 316 aa, Homo sapiens
MPTFNGSVFMPSAFILIGIPGLESVQCWIGIPFSAMYLIGVIGNSLILVIIKYENSLHIPMYIFLAMLAATDIALNTCILPKMLGIFWFHLPEISFDACLFQMWLIHSFQAIESGILLAMALDRYVAICIPLRHATIFSQQFLTHIGLGVTLRAAILIIPSLGLIKCCLKHYRTTVISHSYCEHMAIVKLATEDIRVNKIYGLFVAFAILGFDIIFITLSYVQIFITVFQLPQKEARFKAFNTCIAHICVFLQFYLLAFFSFFTHRFGSHIPPYIHILLSNLYLLVPPFLNPIVYGVKTKQIRDHIVKVFFFKKVT

SEQ ID NO: 35349 - protein, 656 aa, Homo sapiens
MEELDGEPTVTLIPGVNSKKNQMYFDWGPGEMLVCETSFNKKEKSEMVPSCPFIYIIRKDVDVYSQILRKLFNESHGIFLGLQRIDEELTGKSRKSQLVRVSKNYRSVIRACMEEMHQVAIAAKDPANGRQFSSQVSILSAMELIWNLCEILFIEVAPAGPLLLHLLDWVRLHVCEVDSLSADVLGSENPSKHDSFWNLVTILVLQGRLDEARQMLSKEADASPASAGICRIMGDLMRTMPILSPGNTQTLTELELKWQHWHEECERYLQDSTFATSPHLESLLKIMLGDEAALLEQKELLSNWYHFLVTRLLYSNPTVKPIDLHYYAQSSLDLFLGGESSPEPLDNILLAAFEFDIHQVIKECSIALSNWWFVAHLTDLLDHCKLLQSHNLYFGSNMREFLLLEYASGLFAHPSLWQLGVDYFDYCPELGRVSLELHIERIPLNTEQKALKVLRICEQRQMTEQVRSICKILAMKAVRNNRLGSALSWSIRAKDAAFATLVSDRFLRDYCERGCFSDLDLIDNLGPAMMLSDRLTFLGKYREFHRMYGEKRFADAASLLLSLMTSRIAPRSFWMTLLTDALPLLEQKQVIFSAEQTYELMRCLEDLTSRRPVHGESDTEQLQDDDIETTKVEMLRLSLARNLARAIIREGSLEGS

SEQ ID NO: 35350 - protein, 462 aa, Homo sapiens
MAASSAARSPFCQQWSSSGTCVRFFLLKWPQVTILVLQGRLDEARQMLSKEADASPASAGICRIMGDLMRTMPILSPGNTQTLTELELKWQHWHEECERYLQDSTFATSPHLESLLKIMLGDEAALLEQKELLSNWYHFLVTRLLYSNPTVKPIDLHYYAQSSLDLFLGGESSPEPLDNILLAAFEFDIHQVIKECSIALSNWWFVAHLTDLLDHCKLLQSHNLYFGSNMREFLLLEYASGLFAHPSLWQLGVDYFDYCPELGRVSLELHIERIPLNTEQKALKVLRICEQRQMTEQVRSICKILAMKAVRNNRLGSALSWSIRAKDAAFATLVSDRFLRDYCERGCFSDLDLIDNLGPAMMLSDRLTFLGKYREFHRMYGEKRFADAASLLLSLMTSRIAPRSFWMTLLTDALPLLEQKQVKVAAAVVFFACQSLLELSCIAVADVRVSSFVVLPVRVYSP

SEQ ID NO: 35351 - protein, 610 aa, Homo sapiens
MVPSCPFIYIIRKDVDVYSQILRKLFNESHGIFLGLQRIDEELTGKSRKSQLVRVSKNYRSVIRACMEEMHQVAIAAKDPANGRQFSSQVSILSAMELIWNLCEILFIEVAPAGPLLLHLLDWVRLHVCEVDSLSADVLGSENPSKHDSFWNLVTILVLQGRLDEARQMLSKEADASPASAGICRIMGDLMRTMPILSPGNTQTLTELELKWQHWHEECERYLQDSTFATSPHLESLLKIMLGDEAALLEQKELLSNWYHFLVTRLLYSNPTVKPIDLHYYAQSSLDLFLGGESSPEPLDNILLAAFEFDIHQVIKECSIALSNWWFVAHLTDLLDHCKLLQSHNLYFGSNMREFLLLEYASGLFAHPSLWQLGVDYFDYCPELGRVSLELHIERIPLNTEQKALKVLRICEQRQMTEQVRSICKILAMKAVRNNRLGSALSWSIRAKDAAFATLVSDRFLRDYCERGCFSDLDLIDNLGPAMMLSDRLTFLGKYREFHRMYGEKRFADAASLLLSLMTSRIAPRSFWMTLLTDALPLLEQKQVIFSAEQTYELMRCLEDLTSRRPVHGESDTEQLQDDDIETTKVEMLRLSLARNLARAIIREGSLEGS

SEQ ID NO: 35352 - protein, 309 aa, Homo sapiens
MENQNNVTEFILLGLTENLELWKIFSAVFLVMYVATVLENLLIVVTIITSQSLRSPMYFFLTFLSLLDVMFSSVVAPKVIVDTLSKSTTISLKGCLTQLFVEHFFGGVGIILLTVMAYDRYVAICKPLHYTIIMSPRVCCLMVGGAWVGGFMHAMIQLLFMYQIPFCGPNIIDHFICDLFQLLTLACTDTHILGLLVTLNSGMMCVAIFLILIASYTVILCSLKSYSSKGRHKALSTCSSHLTVVVLFFVPCIFLYMRPVVTHPIDKAMAVSDSIITPMLNPLIYTLRNAEVKSAMKKLWMKWEALAGK

SEQ ID NO: 35353 - protein, 313 aa, Homo sapiens
MEEENATLLTEFVLTGFLYQPQWKIPLFLAFLVIYLITIMGNLGLIAVIWKDPHLHIPMYLLLGNLAFVDAWISSTVTPKMLNNFLAKSKMISLSECKIQFFSIAIGVTTECFLLATMAYDRYVAICKPLLYPAIMTNGLCIRLLILSYIAGILHALIHEGFLFRLTFCNSNIVHHIYCDTIPLSKISCTDSSINFLMVFIFSGSIQVFSIVTILISYTFVLFTVLEKKSDKGVRKAFSTCGAHLFSVCLYYGPLLLMYVGPASPQADGQNMVEPLFYTVIIPLLNPIIYSLRNKQVIVSFIKMLKRNVKVSY

SEQ ID NO: 35354 - protein, 323 aa, Homo sapiens
MSHTNVTIFHPAVFVLPGIPGLEAYHIWLSIPLCLIYITAVLGNSILIVVIVMERNLHVPMYFFLSMLAVMDILLSTTTVPKALAIFWLQAHNIAFDACVTQGFFVHMMFVGESAILLAMAFDRFVAICAPLRYTTVLTWPVVGRIALAVITRSFCIIFPVIFLLKRLPFCLTNIVPHSYCEHIGVARLACADITVNIWYGFSVPIVMVILDVILIAVSYSLILRAVFRLPSQDARHKALSTCGSHLCVILMFYVPSFFTLLTHHFGRNIPQHVHILLANLYVAVPPMLNPIVYGVKTKQIREGVAHRFFDIKTWCCTSPLGS

SEQ ID NO: 35355 - protein, 326 aa, Homo sapiens
MCPLTLQVTGLMNVSEPNSSFAFVNEFILQGFTCEWTIQIFLFSLFTTTYALTITGNGAIAFVLWCDWRLHTPMYMFLGNFSFLEIWYVSSTVPKMLVNFLSEKKNISFAGCFLQFYFFFSLGTSECLLLTVMAFDQYLAICRPLLYPNIMTGHLCAKLVILCWVCGFLWFLIPIVLISQMPFCGPNIIDHVVCDPGPRFALDCVSAPRIQLFCYTLSSLVIFGNFLFIIGSYTLVLKAVLGMPSSTGRHKAFSTCGSHLAVVSLCYSSLMVMYVSPGLGHSTGMQKIETLFYAMVTPLFNPLIYSLQNKEIKAALRKVLGSSNII

SEQ ID NO: 35356 - protein, 315 aa, Homo sapiens
MEEAILLNQTSLVTYFRLRGLSVNHKARIAMFSMFLIFYVLTLIGNVLIVITIIYDHRLHTPMYFFLSNLSFIDVCHSTVTVPKMLRDVWSEEKLISFDACVTQMFFLHLFACTEIFLLTVMAYDRYVAICKPLQYMIVMNWKVCVLLAVALWTGGTIHSIALTSLTIKLPYCGPDEIDNFFCDVPQVIKLACIDTHVIEILIVSNSGLISVVCFVVLVVSYAVILVSLRQQISKGKRKALSTCAAHLTVVTLFLGHCIFIYSRPSTSLPEDKVVSVFFTAVTPLLNPIIYTLRNEEMKSALNKLVGRKERKEEK

SEQ ID NO: 35357 - protein, 312 aa, Homo sapiens
MADDNFTVVTEFILLGLTDHAELKAVLFVVFLVIYAITLLRNLGMILLIQITSKLHTPMYFLLSCLSFVDACYSSAIAPKMLVNLLVVKATISFSACMVQHLCFGVFITTEGFLLSVMAYDRYVAIVSPLLYTVAMSDRKCVELVTGSWIGGIVNTLIHTISLRRLSFCRLNAVSHFFCDIPSLLKLSCSDTSMNELLLLTFSGVIAMATFLTVIISYIFIAFASLRIHSASGRQQAFSTCASHLTAVTIFYGTLIFSYIQPSSQYFVEQEKVVSMFYTLGIPMLNLLIHSLRNKDVKEAVKRAIEMKHFLC

SEQ ID NO: 35358 - protein, 310 aa, Homo sapiens
MQLNNNVTEFILLGLTQDPFWKKIVFVIFLRLYLGTLLGNLLIIISVKTSQALKNPMFFFLFYLSLSDTCLSTSITPRMIVDALLKKTTISFSECMIQVFSSHVFGCLEIFILILTAVDRYVDICKPLHYMTIISQWVCGVLMAVAWVGSCVHSLVQIFLALSLPFCGPNVINHCFCDLQPLLKQACSETYVVNLLLVSNSGAICAVSYVMLIFSYVIFLHSLRNHSAEVIKKALSTCVSHIIVVILFFGPCIFMYTCLATVFPMDKMIAVFYTVGTSFLNPVIYTLKNTEVKSAMRKLWSKKLITDDKR

SEQ ID NO: 35359 - protein, 313 aa, Homo sapiens
MPIANDTQFHTSSFLLLGIPGLEDVHIWIGFPFFSVYLIALLGNAAIFFVIQTEQSLHEPMYYCLAMLDSIDLSLSTATIPKMLGIFWFNIKEISFGGYLSQMFFIHFFTVMESIVLVAMAFDRYIAICKPLWYTMILTSKIISLIAGIAVLRSLYMVIPLVFLLLRLPFCGHRIIPHTYCEHMGIARLACASIKVNIMFGLGSISLLLLDVLLIILSHIRILYAVFCLPSWEARLKALNTCGSHIGVILAFSTPAFFSFFTHCFGHDIPQYIHIFLANLYVVVPPTLNPVIYGVRTKHIRETVLRIFFKTDH

SEQ ID NO: 35360 - protein, 3298 aa, Homo sapiens
MQKELGIVPSCPGMKSPRPHLLLPLLLLLLLLLGAGVPGAWGQAGSLDLQIDEEQPAGTLIGDISAGLPAGTAAPLMYFISAQEGSGVGTDLAIDEHSGVVRTARVLDREQRDRYRFTAVTPDGATVEVTVRVADINDHAPAFPQARAALQVPEHTAFGTRYPLEPARDADAGRLGTQGYALSGDGAGETFRLETRPGPDGTPVPELVVTGELDRENRSHYMLQLEAYDGGSPPRRAQALLDVTLLDINDHAPAFNQSRYHAVVSESLAPGSPVLQVFASDADAGVNGAVTYEINRRQSEGDGPFSIDAHTGLLQLERPLDFEQRRVHELVVQARDGGAHPELGSAFVTVHVRDANDNQPSMTVIFLSADGSPQVSEAAPPGQLVARISVSDPDDGDFAHVNVSLEGGEGHFALSTQDSVIYLVCVARRLDREERDAYNLRVTATDSGSPPLRAEAAFVLHVTDVNDNAPAFDRQLYRPEPLPEVALPGSFVVRVTARDPDQGTNGQVTYSLAPGAHTHWFSIDPTSGIITTAASLDYELEPQPQLIVVATDGGLPPLASSATVSVALQDVNDNEPQFQRTFYNASLPEGTQPGTCFLQVTATDADSGPFGLLSYSLGAGLGSSGSPPFRIDAHSGDVCTTRTLDRDQGPSSFDFTVTAVDGGGLKSMVYVKVFLSDENDNPPQFYPREYAASISAQSPPGTAVLRLRAHDPDQGSHGRLSYHILAGNSPPLFTLDEQSGLLTVAWPLARRANSVVQLEIGAEDGGGLQAEPSARVDISIVPGTPTPPIFEQLQYVFSVPEDVAPGTSVGIVQAHNPPGRLAPVTLSLSGGDPRGLFSLDAVSGLLQTLRPLDRELLGPVLELEVRAGSGVPPAFAVARVRVLLDDVNDNSPAFPAPEDTVLLPPNTAPGTPIYTLRALDPDSGVNSRVTFTLLAGGGGAFTVDPTTGHVRLMRPLGPSGGPAHELELEARDGGSPPRTSHFRLRVVVQDVGTRGLAPRFNSPTYRVDLPSGTTAGTQVLQVQAQAPDGGPITYHLAAEGASSPFGLEPQSGWLWVRAALDREAQELYILKVMAVSGSKAELGQQTGTATVRVSILNQNEHSPRLSEDPTFLAVAENQPPGTSVGRVFATDRDSGPNGRLTYSLQQLSEDSKAFRIHPQTGEVTTLQTLDREQQSSYQLLVQVQDGGSPPRSTTGTVHVAVLDLNDNSPTFLQASGAAGGGLPIQVPDRVPPGTLVTTLQAKDPDEGENGTILYTLTGPGSELFSLHPHSGELLTAAPLIRAERPHYVLTLSAHDQGSPPRSASLQLLVQVLPSARLAEPPPDLAERDPAAPVPVVLTVTAAEGLRPGSLLGSVAAPEPAGVGALTYTLVGGADPEGTFALDAASGRLYLARPLDFEAGPPWRALTVRAEGPGGAGARLLRVQVQVQDENEHAPAFARDPLALALPENPEPGAALYTFRASDADGPGPNSDVRYRLLRQEPPVPALRLDARTGALSAPRGLDRETTPALLLLVEATDRPANASRRRAARVSARVFVTDENDNAPVFASPSRVRLPEDQPPGPAALHVVARDPDLGEAARVSYRLASGGDGHFRLHSSTGALSVVRPLDREQRAEHVLTVVASDHGSPPRSATQVLTVSVADVNDEAPTFQQQEYSVLLRENNPPGTSLLTLRATDPDVGANGQVTYGGVSSESFSLDPDTGVLTTLRALDREEQEEINLTVYAQDRGSPPQLTHVTVRVAVEDENDHAPTFGSAHLSLEVPEGQDPQTLTMLRASDPDVGANGQLQYRILDGDPSGAFVLDLASGEFGTMRPLDREVEPAFQLRIEARDGGQPALSATLLLTVTVLDANDHAPAFPVPAYSVEVPEDVPAGTLLLQLQAHDPDAGANGHVTYYLGAGTAGAFLLEPSSGELRTAAALDREQCPSYTFSVSAVDGAAAGPLSTTVSVTITVRDVNDHAPTFPTSPLRLRLPRPGPSFSTPTLALATLRAEDRDAGANASILYRLAGTPPPGTTVDSYTGEIRVARSPVALGPRDRVLFIVATDLGRPARSATGVIIVGLQGEAERGPRFPRASSEATIRENAPPGTPIVSPRAVHAGGTNGPITYSILSGNEKGTFSIQPSTGAITVRSAEGLDFEVSPRLRLVLQAESGGAFAFTVLTLTLQDANDNAPRFLRPHYVAFLPESRPLEGPLLQVEADDLDQGSGGQISYSLAASQPARGLFHVDPTTGTITTTAILDREIWAETRLVLMATDRGSPALVGSATLTVMVIDTNDNRPTIPQPWELRVSEDALLGSEIAQVTGNDVDSGPVLWYVLSPSGPQDPFSVGRYGGRVSLTGPLDFEQCDRYQLQLLAHDGPHEGRANLTVLVEDVNDNAPAFSQSLYQVMLLEHTPPGSAILSVSATDRDSGANGHISYHLASPADGFSVDPNNGTLFTIVGTVALGHDGSGAVDVVLEARDHGAPGRAARATVHVQLQDQNDHAPSFTLSHYRVAVTEDLPPGSTLLTLEATDADGSRSHAAVDYSIISGNWGRVFQLEPRLAEAGESAGPGPRALGCLVLLEPLDFESLTQYNLTVAAADRGQPPQSSVVPVTVTVLDVNDNPPVFTRASYRVTVPEDTPVGAELLHVEASDADPGPHGLVRFTVSSGDPSGLFELDESSGTLRLAHALDCETQARHQLVVQAADPAGAHFALAPVTIEVQDVNDHGPAFPLNLLSTSVAENQPPGTLVTTLHAIDGDAGAFGRLRYSLLEAGPGPEGREAFALNSSTGELRARVPFDYEHTESFRLLVGAADAGNLSASVTVSVLVTGEDEYDPVFLAPAFHFQVPEGARRGHSLGHVQATDEDGGADGLVLYSLATSSPYFGINQTTGALYLRVDSRAPGSGTATSGGGGRTRREAPRELRLEVIARGPLPGSRSATVPVTVDITHTALGLAPDLNLLLVGAVAASLGVVVVLALAALVLGLVRARSRKAEAAPGPMSQAAPLASDSLQKLGREPPSPPPSEHLYHQTLPSYGGPGAGGPYPRGGSLDPSHSSGRGSAEAAEDDEIRMINEFPRVASVASSLAARGPDSGIQQDADGLSDTSCEPPAPDTWYKGRKAGLLLPGAGATLYREEGPPATATAFLGGCGLSPAPTGDYGFPADGKPCVAGALTAIVAGEEELRGSYNWDYLLSWCPQFQPLASVFTEIARLKDEARPCPPAPRIDPPPLITAVAHPGAKSVPPKPANTAAARAIFPPASHRSPISHEGSLSSAAMSPSFSPSLSPLAARSPVVSPFGVAQGPSASALSAESGLEPPDDTELHI

SEQ ID NO: 35361 - protein, 128 aa, Homo sapiens
MARILLLFLPGLVAVCAVHGIFMDRLASKKLCADDECVYTISLASAQEDYNAPDCRFINVKKGQQIYVYSKLVKENGAGEFWAGSVYGDGQDEMGVVGYFPRNLVKEQRVYQEATKEVPTTDIDFFCE

SEQ ID NO: 35362 - protein, 318 aa, Homo sapiens
MNPANHSQVAGFVLLGLSQVWELRFVFFTVFSAVYFMTVVGNLLIVVIVTSDPHLHTTMYFLLGNLSFLDFCYSSITAPRMLVDLLSGNPTISFGGCLTQLFFFHFIGGIKIFLLTVMAYDRYIAISQPLHYTLIMNQTVCALLMAASWVGGFIHSIVQIALTIQLPFCGPDKLDNFYCDVPQLIKLACTDTFVLELLMVSNNGLVTLMCFLVLLGSYTALLVMLRSHSREGRSKALSTCASHIAVVTLIFVPCIYVYTRPFRTFPMDKAVSVLYTIVTPMLNPAIYTLRNKEVIMAMKKLWRRKKDPIGPLEHRPLH

SEQ ID NO: 35363 - protein, 239 aa, Homo sapiens
MAATLLAARGAGPAPAWGPEAFTPDWESREVSTGTTIMAVQFDGGVVLGADSRTTTGSYIANRVTDKLTPIHDRIFCCRSGSAADTQAVADAVTYQLGFHSIELNEPPLVHTAASLFKEMCYRYREDLMAGIIIAGWDPQEGGQVYSVPMGGMMVRQSFAIGGSGSSYIYGYVDATYREGMTKEECLQFTANALALAMERDGSSGGVIRLAAIAESGVERQVLLGDQIPKFAVATLPPA

SEQ ID NO: 35364 - protein, 158 aa, Homo sapiens
MAEQATKSVLFVCLGNICRSPIAEAVFRKLVTDQNISENWRVDSAATSGYEIGNPPDYRGQSCMKRHGIPMSHVARQITKEDFATFDYILCMDESNLRDLNRKSNQVKTCKAKIELLGSYDPQKQLIIEDPYYGNDSDFETVYQQCVRCCRAFLEKAH

SEQ ID NO: 35365 - protein, 158 aa, Homo sapiens
MAEQATKSVLFVCLGNICRSPIAEAVFRKLVTDQNISENWVIDSGAVSDWNVGRSPDPRAVSCLRNHGIHTAHKARQITKEDFATFDYILCMDESNLRDLNRKSNQVKTCKAKIELLGSYDPQKQLIIEDPYYGNDSDFETVYQQCVRCCRAFLEKAH

SEQ ID NO: 35366 - protein, 124 aa, Homo sapiens
MAEQATKSVLFVCLGNICRSPIAEAVFRKLVTDQNISENWARQITKEDFATFDYILCMDESNLRDLNRKSNQVKTCKAKIELLGSYDPQKQLIIEDPYYGNDSDFETVYQQCVRCCRAFLEKAH

SEQ ID NO: 35367 - protein, 112 aa, Homo sapiens
MAEQATKSVLFVCLGNICRSPIAEAVFRKLVTDQNISENWRVDSAATSGYEIGNPPDYRGQSCMKRHGIPMSHVARQVPSLDLKLCVLCFSGSLTAVLFLTGTWAGPQTQEL

SEQ ID NO: 35368 - protein, 276 aa, Homo sapiens
MALLDVCGAPRGQRPESALPVAGSGRRSDPGHYSFSMRSPELALPRGMQPTEFFQSLGGDGERNVQIEMAHGTTTLAFKFQHGVIAAVDSRASAGSYISALRVNKVIEINPYLLGTMSGCAADCQYWERLLAKECRLYYLRNGERISVSAASKLLSNMMCQYRGMGLSMGSMICGWDKKGPGLYYVDEHGTRLSGNMFSTGSGNTYAYGVMDSGYRPNLSPEEAYDLGRRAIAYATHRDSYSGGVVNMYHMKEDGWVKVESTDVSDLLHQYREANQ

SEQ ID NO: 35369 - protein, 272 aa, Homo sapiens
MLIGTPTPRDTTPSSWLTSSLLVEAAPLDDTTLPTPVSSGCPGLEPTEFFQSLGGDGERNVQIEMAHGTTTLAFKFQHGVIAAVDSRASAGSYISALRVNKVIEINPYLLGTMSGCAADCQYWERLLAKECRLYYLRNGERISVSAASKLLSNMMCQYRGMGLSMGSMICGWDKKGPGLYYVDEHGTRLSGNMFSTGSGNTYAYGVMDSGYRPNLSPEEAYDLGRRAIAYATHRDSYSGGVVNMYHMKEDGWVKVESTDVSDLLHQYREANQ

SEQ ID NO: 35370 - protein, 456 aa, Homo sapiens
MADGGSERADGRIVKMEVDYSATVDQRLPECAKLAKEGRLQEVIETLLSLEKQTRTASDMVSTSRILVAVVKMCYEAKEWDLLNENIMLLSKRRSQLKQAVAKMVQQCCTYVEEITDLPIKLRLIDTLRMVTEGKIYVEIERARLTKTLATIKEQNGDVKEAASILQELQVETYGSMEKKERVEFILEQMRLCLAVKDYIRTQIISKKINTKFFQEENTEKLKLKYYNLMIQLDQHEGSYLSICKHYRAIYDTPCIQAESEKWQQALKSVVLYVILAPFDNEQSDLVHRISGDKKLEEIPKYKDLLKLFTTMELMRWSTLVEDYGMELRKGSLESPATDVFGSTEEGEKRWKDLKNRVVEHNIRIMAKYYTRITMKRMAQLLDLSVDESEAFLSNLVVNKTIFAKVDRLAGIINFQRPKDPNNLLNDWSQKLNSLMSLVNKTTHLIAKEEMIHNLQ

SEQ ID NO: 35371 - protein, 436 aa, Homo sapiens
MADGGSERADGRIVKMEVDYSATVDQRLPECAKLAKASDMVSTSRILVAVVKMCYEAKEWDLLNENIMLLSKRRSQLKQAVAKMVQQCCTYVEEITDLPIKLRLIDTLRMVTEGKIYVEIERARLTKTLATIKEQNGDVKEAASILQELQVETYGSMEKKERVEFILEQMRLCLAVKDYIRTQIISKKINTKFFQEENTEKLKLKYYNLMIQLDQHEGSYLSICKHYRAIYDTPCIQAESEKWQQALKSVVLYVILAPFDNEQSDLVHRISGDKKLEEIPKYKDLLKLFTTMELMRWSTLVEDYGMELRKGSLESPATDVFGSTEEGEKRWKDLKNRVVEHNIRIMAKYYTRITMKRMAQLLDLSVDESEAFLSNLVVNKTIFAKVDRLAGIINFQRPKDPNNLLNDWSQKLNSLMSLVNKTTHLIAKEEMIHNLQ

SEQ ID NO: 35372 - protein, 1452 aa, Homo sapiens
MRGLGTCLATLAGLLLTAAGETFSGGCLFDEPYSTCGYSQSEGDDFNWEQVNTLTKPTSDPWMPSGSFMLVNASGRPEGQRAHLLLPQLKENDTHCIDFHYFVSSKSNSPPGLLNVYVKVNNGPLGNPIWNISGDPTRTWNRAELAISTFWPNFYQVIFEVITSGHQGYLAIDEVKVLGHPCTRTPHFLRIQNVEVNAGQFATFQCSAIGRTVAGDRLWLQGIDVRDAPLKEIKVTSSRRFIASFNVVNTTKRDAGKYRCMIRTEGGVGISNYAELVVKEPPVPIAPPQLASVGATYLWIQLNANSINGDGPIVAREVEYCTASGSWNDRQPVDSTSYKIGHLDPDTEYEISVLLTRPGEGGTGSPGPALRTRTKCADPMRGPRKLEVVEVKSRQITIRWEPFGYNVTRCHSYNLTVHYCYQVGGQEQVREEVSWDTENSHPQHTITNLSPYTNVSVKLILMNPEGRKESQELIVQTDEDLPGAVPTESIQGSTFEEKIFLQWREPTQTYGVITLYEITYKAVSSFDPEIDLSNQSGRVSKLGNETHFLFFGLYPGTTYSFTIRASTAKGFGPPATNQFTTKISAPSMPAYELETPLNQTDNTVTVMLKPAHSRGAPVSVYQIVVEEERPRRTKKTTEILKCYPVPIHFQNASLLNSQYYFAAEFPADSLQAAQPFTIGDNKTYNGYWNTPLLPYKSYRIYFQAASRANGETKIDCVQVATKGAATPKPVPEPEKQTDHTVKIAGVIAGILLFVIIFLGVVLVMKKRKLAKKRKETMSSTRQEMTVMVNSMDKSYAEQGTNCDEAFSFMDTHNLNGRSVSSPSSFTMKTNTLSTSVPNSYYPDETHTMASDTSSLVQSHTYKKREPADVPYQTGQLHPAIRVADLLQHITQMKCAEGYGFKEEYESFFEGQSAPWDSAKKDENRMKNRYGNIIAYDHSRVRLQTIEGDTNSDYINGNYIDGYHRPNHYIATQGPMQETIYDFWRMVWHENTASIIMVTNLVEVGRVKCCKYWPDDTEIYKDIKVTLIETELLAEYVIRTFAVEKRGVHEIREIRQFHFTGWPDHGVPYHATGLLGFVRQVKSKSPPSAGPLVVHCSAGAGRTGCFIVIDIMLDMAEREGVVDIYNCVRELRSRRVNMVQTEEQYVFIHDAILEACLCGDTSVPASQVRSLYYDMNKLDPQTNSSQIKEEFRTLNMVTPTLRVEDCSIALLPRNHEKNRCMDILPPDRCLPFLITIDGESSNYINAALMDSYKQPSAFIVTQHPLPNTVKDFWRLVLDYHCTSVVMLNDVDPAQLCPQYWPENGVHRHGPIQVEFVSADLEEDIISRIFRIYNAARPQDGYRMVQQFQFLGWPMYRDTPVSKRSFLKLIRQVDKWQEEYNGGEGRTVVHCLNGGGRSGTFCAISIVCEMLRHQRTVDVFHAVKTLRNNKPNMVDLLDQYKFCYEVALEYLNSG

SEQ ID NO: 35373 - protein, 1465 aa, Homo sapiens
MRGLGTCLATLAGLLLTAAGETFSGGCLFDEPYSTCGYSQSEGDDFNWEQVNTLTKPTSDPWMPSGSFMLVNASGRPEGQRAHLLLPQLKENDTHCIDFHYFVSSKSNSPPGLLNVYVKVNNGPLGNPIWNISGDPTRTWNRAELAISTFWPNFYQVIFEVITSGHQGYLAIDEVKVLGHPCTRTPHFLRIQNVEVNAGQFATFQCSAIGRTVAGDRLWLQGIDVRDAPLKEIKVTSSRRFIASFNVVNTTKRDAGKYRCMIRTEGGVGISNYAELVVKEPPVPIAPPQLASVGATYLWIQLNANSINGDGPIVAREVEYCTASGSWNDRQPVDSTSYKIGHLDPDTEYEISVLLTRPGEGGTGSPGPALRTRTKCADPMRGPRKLEVVEVKSRQITIRWEPFGYNVTRCHSYNLTVHYCYQVGGQEQVREEVSWDTENSHPQHTITNLSPYTNVSVKLILMNPEGRKESQELIVQTDEDLPGAVPTESIQGSTFEEKIFLQWREPTQTYGVITLYEITYKAVSSFDPEIDLSNQSGRVSKLGNETHFLFFGLYPGTTYSFTIRASTAKGFGPPATNQFTTKISAPSMPAYELETPLNQTDNTVTVMLKPAHSRGAPVSVYQIVVEEERPRRTKKTTEILKCYPVPIHFQNASLLNSQYYFAAEFPADSLQAAQPFTIGDNKTYNGYWNTPLLPYKSYRIYFQAASRANGETKIDCVQVATKGAATPKPVPEPEKQTDHTVKIAGVIAGILLFVIIFLGVVLVMKKRKLAKKRKETMSSTRQEMTVMVNSMDKSYAEQGTNCDEAFSFMDTHNLNGRSVSSPSSFTMKTNTLSTSVPNSYYPDPFVPTAILVPINDETHTMASDTSSLVQSHTYKKREPADVPYQTGQLHPAIRVADLLQHITQMKCAEGYGFKEEYESFFEGQSAPWDSAKKDENRMKNRYGNIIAYDHSRVRLQTIEGDTNSDYINGNYIDGYHRPNHYIATQGPMQETIYDFWRMVWHENTASIIMVTNLVEVGRVKCCKYWPDDTEIYKDIKVTLIETELLAEYVIRTFAVEKRGVHEIREIRQFHFTGWPDHGVPYHATGLLGFVRQVKSKSPPSAGPLVVHCSAGAGRTGCFIVIDIMLDMAEREGVVDIYNCVRELRSRRVNMVQTEEQYVFIHDAILEACLCGDTSVPASQVRSLYYDMNKLDPQTNSSQIKEEFRTLNMVTPTLRVEDCSIALLPRNHEKNRCMDILPPDRCLPFLITIDGESSNYINAALMDSYKQPSAFIVTQHPLPNTVKDFWRLVLDYHCTSVVMLNDVDPAQLCPQYWPENGVHRHGPIQVEFVSADLEEDIISRIFRIYNAARPQDGYRMVQQFQFLGWPMYRDTPVSKRSFLKLIRQVDKWQEEYNGGEGRTVVHCLNGGGRSGTFCAISIVCEMLRHQRTVDVFHAVKTLRNNKPNMVDLLDQYKFCYEVALEYLNSG

SEQ ID NO: 35374 - protein, 140 aa, Homo sapiens
MHRGVGPAFRVVRKMAASGAEPQVLVQYLVLRKDLSQAPFSWPAGALVAQACHAATAALHTHRDHPHTAAYLQELGRMRKVVLEAPDETTLKELAETLQQKNIDHMLWLEQPENIATCIALRPYPKEEVGQYLKKFRLFK

SEQ ID NO: 35375 - protein, 322 aa, Homo sapiens
MADRDSGSEQGGAALGSGGSLGHPGSGSGSGGGGGGGGGGGGSGGGGGGAPGGLQHETQELASKRVDIQNKRFYLDVKQNAKGRFLKIAEVGAGGNKSRLTLSMSVAVEFRDYLGDFIEHYAQLGPSQPPDLAQAQDEPRRALKSEFLVRENRKYYMDLKENQRGRFLRIRQTVNRGPGLGSTQGQTIALPAQGLIEFRDALAKLIDDYGVEEEPAELPEGTSLTVDNKRFFFDVGSNKYGVFMRVSEVKPTYRNSITVPYKVWAKFGHTFCKYSEEMKKIQEKQREKRAACEQLHQQQQQQQEETAAATLLLQGEEEGEED

SEQ ID NO: 35376 - protein, 530 aa, Homo sapiens
MADDIDIEAMLEAPYKKDENKLSSANGHEERSKKRKKSKSRSRSHERKRSKSKERKRSRDRERKKSKSRERKRSRSKERRRSRSRSRDRRFRGRYRSPYSGPKFNSAIRGKIGLPHSIKLSRRRSRSKSPFRKDKSPVREPIDNLTPEERDARTVFCMQLAARIRPRDLEEFFSTVGKVRDVRMISDRNSRRSKGIAYVEFVDVSSVPLAIGLTGQRVLGVPIIVQASQAEKNRAAAMANNLQKGSAGPMRLYVGSLHFNITEDMLRGIFEPFGRIESIQLMMDSETGRSKGYGFITFSDSECAKKALEQLNGFELAGRPMKVGHVTERTDASSASSFLDSDELERTGIDLGTTGRLQLMARLAEGTGLQIPPAAQQALQMSGSLAFGAVAEFSFVIDLQTRLSQQTEASALAAAASVQPLATQCFQLSNMFNPQTEEEVGWDTEIKDDVIEECNKHGGVIHIYVDKNSAQGNVYVKCPSIAAAIAAVNALHGRWFAGKMITAAYVPLPTYHNLFPDSMTATQLLVPSRR

SEQ ID NO: 35377 - protein, 524 aa, Homo sapiens
MADDIDIEAMLEAPYKKDENKLSSANGHEERSKKRKKSKSRSRSHERKRSKSKERKRSRDRERKKSKSRERKRSRSKERRRSRSRSRDRRFRGRYRSPYSGPKFNSAIRGKIGLPHSIKLSRRRSRSKSPFRKDKSPVREPIDNLTPEERDARTVFCMQLAARIRPRDLEEFFSTVGKVRDVRMISDRNSRRSKGIAYVEFVDVSSVPLAIGLTGQRVLGVPIIVQASQAEKNRAAAMANNLQKGSAGPMRLYVGSLHFNITEDMLRGIFEPFGRIESIQLMMDSETGRSKGYGFITFSDSECAKKALEQLNGFELAGRPMKVGHVTERTDASSASSFLDSDELERTGIDLGTTGRLQLMARLAEGTGLQIPPAAQQALQMSGSLAFGAVADLQTRLSQQTEASALAAAASVQPLATQCFQLSNMFNPQTEEEVGWDTEIKDDVIEECNKHGGVIHIYVDKNSAQGNVYVKCPSIAAAIAAVNALHGRWFAGKMITAAYVPLPTYHNLFPDSMTATQLLVPSRR

SEQ ID NO: 35378 - protein, 508 aa, Homo sapiens
MADDIDIEAMLEAPYKKDENKLSSANGHEERSKKRKKSKSRSRSHERKRSKSKERKRSRDRERKKSKSRERKRSRSKERRRSRSRSRDRRFRGRYRSPYRRRSRSKSPFRKDKSPVREPIDNLTPEERDARTVFCMQLAARIRPRDLEEFFSTVGKVRDVRMISDRNSRRSKGIAYVEFVDVSSVPLAIGLTGQRVLGVPIIVQASQAEKNRAAAMANNLQKGSAGPMRLYVGSLHFNITEDMLRGIFEPFGRIESIQLMMDSETGRSKGYGFITFSDSECAKKALEQLNGFELAGRPMKVGHVTERTDASSASSFLDSDELERTGIDLGTTGRLQLMARLAEGTGLQIPPAAQQALQMSGSLAFGAVAEFSFVIDLQTRLSQQTEASALAAAASVQPLATQCFQLSNMFNPQTEEEVGWDTEIKDDVIEECNKHGGVIHIYVDKNSAQGNVYVKCPSIAAAIAAVNALHGRWFAGKMITAAYVPLPTYHNLFPDSMTATQLLVPSRR

SEQ ID NO: 35379 - protein, 159 aa, Homo sapiens
MTLEEVRGQDTVPESTARMQGAGKALHELLLSAQRQGCLTAGVYESAKVLNVDPDNVTFCVLAAGEEDEGDIALQIHFTLIQAFCCENDIDIVRVGDVQRLAAIVGAGEEAGAPGDLHCILISNPNEDAWKDPALEKLSLFCEESRSVNDWVPSITLPE

SEQ ID NO: 35380 - protein, 363 aa, Homo sapiens
MQRAGGGSAPGGNGGGGGGGPGTAFSIDSLIGPPPPRSGHLLYTGYPMFMPYRPLVLPQALAPAPLPAGLPPLAPLASFAGRLTNTFCAGLGQAVPSMVALTTALPSFAEPPDAFYGPQELAAAAAAAAATAARNNPEPGGRRPEGGLEADELLPAREKVAEPPPPPPPHFSETFPSLPAEGKVYSSDEEKLEASAGDPAGSEQEEEGSGGDSEDDGFLDSSAGGPGALLGPKPKLKGSLGTGAEEGAPVTAGVTAPGGKSRRRRTAFTSEQLLELEKEFHCKKYLSLTERSQIAHALKLSEVQVKIWFQNRRAKWKRIKAGNVSSRSGEPVRNPKIVVPIPVHVNRFAVRSQHQQMEQGARP

SEQ ID NO: 35381 - protein, 551 aa, Homo sapiens
MARGAEGGRGDAGWGLRGALAAVALLSALNAAGTVFALCQWRGLSSALRALEAQRGREQREDSALRSFLAELSRAPRGASAPPQDPASSARNKRSHSGEPAPHIRAESHDMLMMMTYSMVPIRVMVDLCNSTKGICLTGPSGPPGPPGAGGLPGHNGLDGQPGPQGPKGEKGANGKRGKMGIPGAAGNPGERGEKGDHGELGLQGNEGPPGQKGEKGDKGDVSNDVLLAGAKGDQGPPGPPGPPGPPGPPGPPGSRRAKGPRQPSMFNGQCPGETCAIPNDDTLVGKADEKASEHHSPQAESMITSIGNPVQVLKVTETFGTWIRESANKSDDRIWVTEHFSGIMVKEFKDQPSLLNGSYTFIHLPYYFHGCGHVVYNNSLYYHKGGSNTLVRFEFGQETSQTLKLENALYFDRKYLFANSKTYFNLAVDEKGLWIIYASSVDGSSILVAQLDERTFSVVQHVNTTYPKSKAGNAFIARGILYVTDTKDMRVTFAFDLLGGKQINANFDLRTSQSVLAMLAYNMRDQHLYSWEDGHLMLYPVQFLSTTLNQ

SEQ ID NO: 35382 - protein, 427 aa, Homo sapiens
MVDLCNSTKGICLTGPSGPPGPPGAGGLPGHNGLDGQPGPQGPKGEKGANGKRGKMGIPGAAGNPGERGEKGDHGELGLQGNEGPPGQKGEKGDKGDVSNDVLLAGAKGDQGPPGPPGPPGPPGPPGPPGSRRAKGPRQPSMFNGQCPGETCAIPNDDTLVGKADEKASEHHSPQAESMITSIGNPVQVLKVTETFGTWIRESANKSDDRIWVTEHFSGIMVKEFKDQPSLLNGSYTFIHLPYYFHGCGHVVYNNSLYYHKGGSNTLVRFEFGQETSQTLKLENALYFDRKYLFANSKTYFNLAVDEKGLWIIYASSVDGSSILVAQLDERTFSVVQHVNTTYPKSKAGNAFIARGILYVTDTKDMRVTFAFDLLGGKQINANFDLRTSQSVLAMLAYNMRDQHLYSWEDGHLMLYPVQFLSTTLNQ

SEQ ID NO: 35383 - protein, 219 aa, Homo sapiens
MCPARSLLLVATLVLLDHLSLARNLPVATPDPGMFPCLHHSQNLLRAVSNMLQKARQTLEFYPCTSEEIDHEDITKDKTSTVEACLPLELTKNESCLNSRETSFITNGSCLASRKTSFMMALCLSSIYEDLKMYQVEFKTMNAKLLMDPKRQIFLDQNMLAVIDELMQALNFNSETVPQKSSLEEPDFYKTKIKLCILLHAFRIRAVTIDRVMSYLNAS

SEQ ID NO: 35384 - protein, 35 aa, Homo sapiens
MIPGNPSPGADLAVSKHFFSLSWFCGLLLLESKQK

SEQ ID NO: 35385 - protein, 2230 aa, Homo sapiens
MFKKLKQKISEEQQQLQQALAPAQASSNSSTPTRMRSRTSSFTEQLDEGTPNRESGDTQSFAQKLQLRVPSVESLFRSPIKESLFRSSSKESLVRTSSRESLNRLDLDSSTASFDPPSDMDSEAEDLVGNSDSLNKEQLIQRLRRMERSLSSYRGKYSELVTAYQMLQREKKKLQGILSQSQDKSLRRIAELREELQMDQQAKKHLQEEFDASLEEKDQYISVLQTQVSLLKQRLRNGPMNVDVLKPLPQLEPQAEVFTKEENPESDGEPVVEDGTSVKTLETLQQRVKRQENLLKRCKETIQSHKEQCTLLTSEKEALQEQLDERLQELEKIKDLHMAEKTKLITQLRDAKNLIEQLEQDKGMVIAETKRQMHETLEMKEEEIAQLRSRIKQMTTQGEELREQKEKSERAAFEELEKALSTAQKTEEARRKLKAEMDEQIKTIEKTSEEERISLQQELSRVKQEVVDVMKKSSEEQIAKLQKLHEKELARKEQELTKKLQTREREFQEQMKVALEKSQSEYLKISQEKEQQESLALEELELQKKAILTESENKLRDLQQEAETYRTRILELESSLEKSLQENKNQSKDLAVHLEAEKNKHNKEITVMVEKHKTELESLKHQQDALWTEKLQVLKQQYQTEMEKLREKCEQEKETLLKDKEIIFQAHIEEMNEKTLEKLDVKQTELESLSSELSEVLKARHKLEEELSVLKDQTDKMKQELEAKMDEQKNHHQQQVDSIIKEHEVSIQRTEKALKDQINQLELLLKERDKHLKEHQAHVENLEADIKRSEGELQQASAKLDVFQSYQSATHEQTKAYEEQLAQLQQKLLDLETERILLTKQVAEVEAQKKDVCTELDAHKIQVQDLMQQLEKQNSEMEQKVKSLTQVYESKLEDGNKEQEQTKQILVEKENMILQMREGQKKEIEILTQKLSAKEDSIHILNEEYETKFKNQEKKMEKVKQKAKEMQETLKKKLLDQEAKLKKELENTALELSQKEKQFNAKMLEMAQANSAGISDAVSRLETNQKEQIESLTEVHRRELNDVISIWEKKLNQQAEELQEIHEIQLQEKEQEVAELKQKILLFGCEKEEMNKEITWLKEEGVKQDTTLNELQEQLKQKSAHVNSLAQDETKLKAHLEKLEVDLNKSLKENTFLQEQLVELKMLAEEDKRKVSELTSKLKTTDEEFQSLKSSHEKSNKSLEDKSLEFKKLSEELAIQLDICCKKTEALLEAKTNELINISSSKTNAILSRISHCQHRTTKVKEALLIKTCTVSELEAQLRQLTEEQNTLNISFQQATHQLEEKENQIKSMKADIESLVTEKEALQKEGGNQQQAASEKESCITQLKKELSENINAVTLMKEELKEKKVEISSLSKQLTDLNVQLQNSISLSEKEAAISSLRKQYDEEKCELLDQVQDLSFKVDTLSKEKISALEQVDDWSNKFSEWKKKAQSRFTQHQNTVKELQIQLELKSKEAYEKDEQINLLKEELDQQNKRFDCLKGEMEDDKSKMEKKESNLETELKSQTARIMELEDHITQKTIEIESLNEVLKNYNQQKDIEHKELVQKLQHFQELGEEKDNRVKEAEEKILTLENQVYSMKAELETKKKELEHVNLSVKSKEEELKALEDRLESESAAKLAELKRKAEQKIAAIKKQLLSQMEEKEEQYKKGTESHLSELNTKLQEREREVHILEEKLKSVESSQSETLIVPRSAKNVAAYTEQEEADSQGCVQKTYEEKISVLQRNLTEKEKLLQRVGQEKEETVSSHFEMRCQYQERLIKLEHAEAKQHEDQSMIGHLQEELEEKNKKYSLIVAQHVEKEGGKNNIQAKQNLENVFDDVQKTLQEKELTCQILEQKIKELDSCLVRQKEVHRVEMEELTSKYEKLQALQQMDGRNKPTELLEENTEEKSKSHLVQPKLLSNMEAQHNDLEFKLAGAEREKQKLGKEIVRLQKDLRMLRKEHQQELEILKKEYDQEREEKIKQEQEDLELKHNSTLKQLMREFNTQLAQKEQELEMTIKETINKAQEVEAELLESHQEETNQLLKKIAEKDDDLKRTAKRYEEILDAREEEMTAKVRDLQTQLEELQKKYQQKLEQEENPGNDNVTIMELQTQLAQKTTLISDSKLKEQEFREQIHNLEDRLKKYEKNVYATTVGTPYKGGNLYHTDVSLFGEPTEFEYLRKVLFEYMMGRETKTMAKVITTVLKFPDDQTQKILEREDARLMFTSPRSGIF

SEQ ID NO: 35386 - protein, 2223 aa, Homo sapiens
MFKKLKQKISEEQQQLQQALAPAQASSNSSTPTRMRSRTSSFTEQLDEGTPNRESGDTQSFAQKLQLRVPSVESLFRSPIKESLFRSSSKESLVRTSSRESLNRLDLDSSTASFDPPSDMDSEAEDLVGNSDSLNKEQLIQRLRRMERSLSSYRGKYSELVTAYQMLQREKKKLQGILSQSQDKSLRRIAELREELQMDQQAKKHLQEEFDASLEEKDQYISVLQTQVSLLKQRLRNGPMNVDVLKPLPQLEPQAEVFTKEENPESDGEPVVEDGTSVKTLETLQQRVKRQENLLKRCKETIQSHKEQCTLLTSEKEALQEQLDERLQELEKIKDLHMAEKTKLITQLRDAKNLIEQLEQDKGMVIAETKRQMHETLEMKEEEIAQLRSRIKQMTTQGEELREQKEKSERAAFEELEKALSTAQKTEEARRKLKAEMDEQIKTIEKTSEEERISLQQELSRVKQEVVDVMKKSSEEQIAKLQKLHEKELARKEQELTKKLQTREREFQEQMKVALEKSQSEYLKISQEKEQQESLALEELELQKKAILTESENKLRDLQQEAETYRTRILELESSLEKSLQENKNQSKDLAVHLEAEKNKHNKEITVMVEKHKTELESLKHQQDALWTEKLQVLKQQYQTEMEKLREKCEQEKETLLKDKEIIFQAHIEEMNEKTLEKLDVKQTELESLSSELSEVLKARHKLEEELSVLKDQTDKMKQELEAKMDEQKNHHQQQVDSIIKEHEVSIQRTEKALKDQINQLELLLKERDKHLKEHQAHVENLEADIKRSEGELQQASAKLDVFQSYQSATHEQTKAYEEQLAQLQQKLLDLETERILLTKQVAEVEAQKKDVCTELDAHKIQVQDLMQQLEKQNSEMEQKVKSLTQVYESKLEDGNKEQEQTKQILVEKENMILQMREGQKKEIEILTQKLSAKEDSIHILNEEYETKFKNQEKKMEKVKQKAKEMQETLKKKLLDQEAKLKKELENTALELSQKEKQFNAKMLEMAQANSAGISDAVSRLETNQKEQIESLTEVHRRELNDVISIWEKKLNQQAEELQEIHEIQLQEKEQEVAELKQKILLFGCEKEEMNKEITWLKEEGVKQDTTLNELQEQLKQKSAHVNSLAQDETKLKAHLEKLEVDLNKSLKENTFLQEQLVELKMLAEEDKRKVSELTSKLKTTDEEFQSLKSSHEKSNKSLEDKSLEFKKLSEELAIQLDICCKKTEALLEAKTNELINISSSKTNAILSRISHCQHRTTKVKEALLIKTCTVSELEAQLRQLTEEQNTLNISFQQATHQLEEKENQIKSMKADIESLVTEKEALQKEGGNQQQAASEKESCITQLKKELSENINAVTLMKEELKEKKVEISSLSKQLTDLNVQLQNSISLSEKEAAISSLRKQYDEEKCELLDQVQDLSFKVDTLSKEKISALEQVDDWSNKFSEWKKKAQSRFTQHQNTVKELQIQLELKSKEAYEKDEQINLLKEELDQQNKRFDCLKGEMEDDKSKMEKKESNLETELKSQTARIMELEDHITQKTIEIESLNEVLKNYNQQKDIEHKELVQKLQHFQELGEEKDNRVKEAEEKILTLENQVYSMKAELETKKKELEHVNLSVKSKEEELKALEDRLESESAAKLAELKRKAEQKIAAIKKQLLSQMEEKEEQYKKGTESHLSELNTKLQEREREVHILEEKLKSVESSQSETLIVPRSAKNVAAYTEQEEADSQGCVQKTYEEKISVLQRNLTEKEKLLQRVGQEKEETVSSHFEMRCQYQERLIKLEHAEAKQHEDQSMIGHLQEELEEKNKKYSLIVAQHVEKEGGKNNIQAKQNLENVFDDVQKTLQEKELTCQILEQKIKELDSCLVRQKEVHRVEMEELTSKYEKLQALQQMDGRNKPTELLEENTEEKSKSHLVQPKLLSNMEAQHNDLEFKLAGAEREKQKLGKEIVRLQKDLRMLRKEHQQELEILKKEYDQEREEKIKQEQEDLELKHNSTLKQLMREFNTQLAQKEQELEMTIKETINKAQEVEAELLESHQEETNQLLKKIAEKDDDLKRTAKRYEEILDAREEEMTAKVRDLQTQLEELQKKYQQKLEQEENPGNDNTQLAQKTTLISDSKLKEQEFREQIHNLEDRLKKYEKNVYATTVGTPYKGGNLYHTDVSLFGEPTEFEYLRKVLFEYMMGRETKTMAKVITTVLKFPDDQTQKILEREDARLMFTSPRSGIF

SEQ ID NO: 35387 - protein, 2228 aa, Homo sapiens
MFKKLKQKISEEQQQLQQALAPAQASSNSSTPTRMRSRTSSFTEQLDEGTPNRESGDTQSFAQKLQLRVPSVESLFRSPIKESLFRSSSKESLVRTSSRESLNRLDLDSSTASFDPPSDMDSEAEDLVGNSDSLNKEQLIQRLRRMERSLSSYRGKYSELVTAYQMLQREKKKLQGILSQSQDKSLRRIAELREELQMDQQAKKHLQEEFDASLEEKDQYISVLQTQVSLLKQRLRNGPMNVDVLKPLPQLEPQAEVFTKEENPESDGEPVVEDGTSVKTLETLQQRVKRQENLLKRCKETIQSHKEQCTLLTSEKEALQEQLDERLQELEKIKDLHMAEKTKLITQLRDAKNLIEQLEQDKGMVIAETKRQMHETLEMKEEEIAQLRSRIKQMTTQGEELREQKEKSERAAFEELEKALSTAQKTEEARRKLKAEMDEQIKTIEKTSEEERISLQQELSRVKQEVVDVMKKSSEEQIAKLQKLHEKELARKEQELTKKLQTREREFQEQMKVALEKSQSEYLKISQEKEQQESLALEELELQKKAILTESENKLRDLQQEAETYRTRILELESSLEKSLQENKNQSKDLAVHLEAEKNKHNKEITVMVEKHKTELESLKHQQDALWTEKLQVLKQQYQTEMEKLREKCEQEKETLLKDKEIIFQAHIEEMNEKTLEKLDVKQTELESLSSELSEVLKARHKLEEELSVLKDQTDKMKQELEAKMDEQKNHHQQQVDSIIKEHEVSIQRTEKALKDQINQLELLLKERDKHLKEHQAHVENLEADIKRSEGELQQASAKLDVFQSYQSATHEQTKAYEEQLAQLQQKLLDLETERILLTKQVAEVEAQKKDVCTELDAHKIQVQDLMQQLEKQNSEMEQKVKSLTQVYESKLEDGNKEQEQTKQILVEKENMILQMREGQKKEIEILTQKLSAKEDSIHILNEEYETKFKNQEKKMEKVKQKAKEMQETLKKKLLDQEAKLKKELENTALELSQKEKQFNAKMLEMAQANSAGISDAVSRLETNQKEQIESLTEVHRRELNDVISIWEKKLNQQAEELQEIHEIQLQEKEQEVAELKQKILLFGCEKEEMNKEITWLKEEGVKQDTTLNELQEQLKQKSAHVNSLAQDETKLKAHLEKLEVDLNKSLKENTFLQEQLVELKMLAEEDKRKVSELTSKLKTTDEEFQSLKSSHEKSNKSLEDKSLEFKKLSEELAIQLDICCKKTEALLEAKTNELINISSSKTNAILSRISHCQHRTTKVKEALLIKTCTVSELEAQLRQLTEEQNTLNISFQQATHQLEEKENQIKSMKADIESLVTEKEALQKEGGNQQQAASEKESCITQLKKELSENINAVTLMKEELKEKKVEISSLSKQLTDLNVQLQNSISLSEKEAAISSLRKQYDEEKCELLDQVQDLSFKVDTLSKEKISALEQVDDWSNKFSEWKKKAQSRFTQHQNTVKELQIQLELKSKEAYEKDEQINLLKEELDQQNKRFDCLKGEMEDDKSKMEKKESNLETELKSQTARIMELEDHITQKTIEIESLNEVLKNYNQQKDIEHKELVQKLQHFQELGEEKDNRVKEAEEKILTLENQVYSMKAELETKKKELEHVNLSVKSKEEELKALEDRLESESAAKLAELKRKAEQKIAAIKKQLLSQMEEKEEQYKKGTESHLSELNTKLQEREREVHILEEKLKSVESSQSETLIVPRSAKNVAAYTEQEEADSQGCVQKTYEEKISVLQRNLTEKEKLLQRVGQEKEETVSSHFEMRCQYQERLIKLEHAEAKQHEDQSMIGHLQEELEEKNKKYSLIVAQHVEKEGGKNNIQAKQNLENVFDDVQKTLQEKELTCQILEQKIKELDSCLVRQKEVHRVEMEELTSKYEKLQALQQMDGRNKPTELLEENTEEKSKSHLVQPKLLSNMEAQHNDLEFKLAGAEREKQKLGKEIVRLQKDLRMLRKEHQQELEILKKEYDQEREEKIKQEQEDLELKHNSTLKQLMREFNTQLAQKEQELEMTIKETINKAQEVEAELLESHQEETNQLLKKIAEKDDDLKRTAKRYEEILDAREEEMTAKVRDLQTQLEELQKKYQQKLEQEENPGNDNVTIMELQTQLAQKTTLISDSKLKEQEFREQIHNLEDRLKKYEKNVYATTVGTPYKGGNLYHTDVSLFGEPTEFEYLRKVLFEYMMGRETKTMAKVITTVLKFPDDQTQKILEREDARLMSWLRSSS

SEQ ID NO: 35388 - protein, 2243 aa, Homo sapiens
MFKKLKQKISEEQQQLQQALAPAQASSNSSTPTRMRSRTSSFTEQLDEGTPNRENASTHASKSPDSVNGSEPSIPQSGDTQSFAQKLQLRVPSVESLFRSPIKESLFRSSSKESLVRTSSRESLNRLDLDSSTASFDPPSDMDSEAEDLVGNSDSLNKEQLIQRLRRMERSLSSYRGKYSELVTAYQMLQREKKKLQGILSQSQDKSLRRIAELREELQMDQQAKKHLQEEFDASLEEKDQYISVLQTQVSLLKQRLRNGPMNVDVLKPLPQLEPQAEVFTKEENPESDGEPVVEDGTSVKTLETLQQRVKRQENLLKRCKETIQSHKEQCTLLTSEKEALQEQLDERLQELEKIKDLHMAEKTKLITQLRDAKNLIEQLEQDKGMVIAETKRQMHETLEMKEEEIAQLRSRIKQMTTQGEELREQKEKSERAAFEELEKALSTAQKTEEARRKLKAEMDEQIKTIEKTSEEERISLQQELSRVKQEVVDVMKKSSEEQIAKLQKLHEKELARKEQELTKKLQTREREFQEQMKVALEKSQSEYLKISQEKEQQESLALEELELQKKAILTESENKLRDLQQEAETYRTRILELESSLEKSLQENKNQSKDLAVHLEAEKNKHNKEITVMVEKHKTELESLKHQQDALWTEKLQVLKQQYQTEMEKLREKCEQEKETLLKDKEIIFQAHIEEMNEKTLEKLDVKQTELESLSSELSEVLKARHKLEEELSVLKDQTDKMKQELEAKMDEQKNHHQQQVDSIIKEHEVSIQRTEKALKDQINQLELLLKERDKHLKEHQAHVENLEADIKRSEGELQQASAKLDVFQSYQSATHEQTKAYEEQLAQLQQKLLDLETERILLTKQVAEVEAQKKDVCTELDAHKIQVQDLMQQLEKQNSEMEQKVKSLTQVYESKLEDGNKEQEQTKQILVEKENMILQMREGQKKEIEILTQKLSAKEDSIHILNEEYETKFKNQEKKMEKVKQKAKEMQETLKKKLLDQEAKLKKELENTALELSQKEKQFNAKMLEMAQANSAGISDAVSRLETNQKEQIESLTEVHRRELNDVISIWEKKLNQQAEELQEIHEIQLQEKEQEVAELKQKILLFGCEKEEMNKEITWLKEEGVKQDTTLNELQEQLKQKSAHVNSLAQDETKLKAHLEKLEVDLNKSLKENTFLQEQLVELKMLAEEDKRKVSELTSKLKTTDEEFQSLKSSHEKSNKSLEDKSLEFKKLSEELAIQLDICCKKTEALLEAKTNELINISSSKTNAILSRISHCQHRTTKVKEALLIKTCTVSELEAQLRQLTEEQNTLNISFQQATHQLEEKENQIKSMKADIESLVTEKEALQKEGGNQQQAASEKESCITQLKKELSENINAVTLMKEELKEKKVEISSLSKQLTDLNVQLQNSISLSEKEAAISSLRKQYDEEKCELLDQVQDLSFKVDTLSKEKISALEQVDDWSNKFSEWKKKAQSRFTQHQNTVKELQIQLELKSKEAYEKDEQINLLKEELDQQNKRFDCLKGEMEDDKSKMEKKESNLETELKSQTARIMELEDHITQKTIEIESLNEVLKNYNQQKDIEHKELVQKLQHFQELGEEKDNRVKEAEEKILTLENQVYSMKAELETKKKELEHVNLSVKSKEEELKALEDRLESESAAKLAELKRKAEQKIAAIKKQLLSQMEEKEEQYKKGTESHLSELNTKLQEREREVHILEEKLKSVESSQSETLIVPRSAKNVAAYTEQEEADSQGCVQKTYEEKISVLQRNLTEKEKLLQRVGQEKEETVSSHFEMRCQYQERLIKLEHAEAKQHEDQSMIGHLQEELEEKNKKYSLIVAQHVEKEGGKNNIQAKQNLENVFDDVQKTLQEKELTCQILEQKIKELDSCLVRQKEVHRVEMEELTSKYEKLQALQQMDGRNKPTELLEENTEEKSKSHLVQPKLLSNMEAQHNDLEFKLAGAEREKQKLGKEIVRLQKDLRMLRKEHQQELEILKKEYDQEREEKIKQEQEDLELKHNSTLKQLMREFNTQLAQKEQELEMTIKETINKAQEVEAELLESHQEETNQLLKKIAEKDDDLKRTAKRYEEILDAREEEMTAKVRDLQTQLEELQKKYQQKLEQEENPGNDNTQLAQKTTLISDSKLKEQEFREQIHNLEDRLKKYEKNVYATTVGTPYKGGNLYHTDVSLFGEPTEFEYLRKVLFEYMMGRETKTMAKVITTVLKFPDDQTQKILEREDARLMSWLRSSS

SEQ ID NO: 35389 - protein, 515 aa, Homo sapiens [sequence omitted]

SEQ ID NO: 35390 - protein, 331 aa, Homo sapiens
MLLSQNAFIFRSLNLVLMVYISLVFGISYDSPDYTDESCTFKISLRNFRSILSWELKNHSIVPTHYTLLYTIMSKPEDLKVVKNCANTTRSFCDLTDEWRSTHEAYVTVLEGFSGNTTLFSCSHNFWLAIDMSFEPPEFEIVGFTNHINVMVKFPSIVEEELQFDLSLVIEEQSEGIVKKHKPEIKGNMSGNFTYIIDKLIPNTNYCVSVYLEHSDEQAVIKSPLKCTLLPPGQESESAESAKIGGIITVFLIALVLTSTIVTLKWIGYICLRNSLPKVLRQGLAKGWNAVAIHRCSHNALQSETPELKQSSCLSFPSSWDYKRASLCPSD

SEQ ID NO: 35391 - protein, 239 aa, Homo sapiens
MLLSQNAFIFRSLNLVLMVYISLVFGISYDSPDYTDESCTFKISLRNFRSILSWELKNHSIVPTHYTLLYTIMSKPEDLKVVKNCANTTRSFCDLTDEWRSTHEAYVTVLEGFSGNTTLFSCSHNFWLAIDMSFEPPEFEIVGFTNHINVMVKFPSIVEEELQFDLSLVIEEQSEGIVKKHKPEIKGNMSGNFTYIIDKLIPNTNYCVSVYLEHSDEQAVIKSPLKCTLLPPGQESEFS

SEQ ID NO: 35392 - protein, 112 aa, Homo sapiens
MGCRAASGLLPGVAVVLLLLLQSTQSVYIQYQGFRVQLESMKKLSDLEAQWAPSPRLQAQSLLPAVCHHPALPQDLQPVCASQEASSIFKTLRTIANDDCELCVNVACTGCL

SEQ ID NO: 35393 - protein, 200 aa, Homo sapiens
MGQEFSWEEAEAAGEIDVAELQEWYKKFVMECPSGTLFMHEFKRFFKVTDDEEASQYVEGMFRAFDKNGDNTIDFLEYVAALNLVLRGTLEHKLKWTFKIYDKDGNGCIDRLELLNIVEGIYQLKKACRRELQTEQGQLLTPEEVVDRIFLLVDENGDGQLSLNEFVEGARRDKWVMKMLQMDMNPSSWLAQQRRKSAMF

SEQ ID NO: 35394 - protein, 274 aa, Homo sapiens
MGTDSRAAKALLARARTLHLQTGNLLNWGRLRKKCPSTHSEELHDCIQKTLNEWSSQINPDLVREFPDVLECTVSHAVEKINPDEREEMKVSAKLFIVESNSSSSTRSAVDMACSVLGVAQLDSVIIASPPIEDGVNLSLEHLQPYWEELENLVQSKKIVAIGTSDLDKTQLEQLYQWAQVKPNSNQVNLASCCVMPPDLTAFAKQFDIQLLTHNDPKELLSEASFQEALQESIPDIQAHEWVPLWLLRYSVIVKSRGIIKSKGYILQAKRRGS

SEQ ID NO: 35395 - protein, 252 aa, Homo sapiens
MGTDSRAAKALLARARTLHLQTGNLLNWGRLRKKCPSTHSEEEFPDVLECTVSHAVEKINPDEREEMKVSAKLFIVESNSSSSTRSAVDMACSVLGVAQLDSVIIASPPIEDGVNLSLEHLQPYWEELENLVQSKKIVAIGTSDLDKTQLEQLYQWAQVKPNSNQVNLASCCVMPPDLTAFAKQFDIQLLTHNDPKELLSEASFQEALQESIPDIQAHEWVPLWLLRYSVIVKSRGIIKSKGYILQAKRRGS

SEQ ID NO: 35396 - protein, 147 aa, Homo sapiens
MVHFTAEEKAAVTSLWSKMNVEEAGGEALGRLLVVYPWTQRFFDSFGNLSSPSAILGNPKVKAHGKKVLTSFGDAIKNMDNLKPAFAKLSELHCDKLHVDPENFKLLGNVMVIILATHFGKEFTPEVQAAWQKLVSAVAIALAHKYH

SEQ ID NO: 35397 - protein, 474 aa, Homo sapiens
MATNWGSLLQDKQQLEELARQAVDRALAEGVLLRTSQEPTSSEVVSYAPFTLFPSLVPSALLEQAYAVQMDFNLLVDAVSQNAAFLEQTLSSTIKQDDFTARLFDIHKQVLKEGIAQTVFLGLNRSDYMFQRSADGSPALKQIEINTISASFGGLASRTPAVHRHVLSVLSKTKEAGKILSNNPSKGLALGIAKAWELYGSPNALVLLIAQEKERNIFDQRAIENELLARNIHVIRRTFEDISEKGSLDQDRRLFVDGQEIAVVYFRDGYMPRQYSLQNWEARLLLERSHAAKCPDIATQLAGTKKVQQELSRPGMLEMLLPGQPEAVARLRATFAGLYSLDVGEEGDQAIAEALAAPSRFVLKPQREGGGNNLYGEEMVQALKQLKDSEERASYILMEKIEPEPFENCLLRPGSPARVVQCISELGIFGVYVRQEKTLVMNKHVGHLLRTKAIEHADGGVAAGVAVLDNPYPV

SEQ ID NO: 35398 - protein, 363 aa, Homo sapiens
MATNWGSLLQDKQQLEELARQAVDRALAEGVLLRTSQEPTSSEVVSYAPFTLFPSLVPSALLEQAYAVQMDFNLLVDAVSQNAAFLEQTLSSALVLLIAQEKERNIFDQRAIENELLARNIHVIRRTFEDISEKGSLDQDRRLFVDGQEIAVVYFRDGYMPRQYSLQNWEARLLLERSHAAKCPDIATQLAGTKKVQQELSRPGMLEMLLPGQPEAVARLRATFAGLYSLDVGEEGDQAIAEALAAPSRFVLKPQREGGGNNLYGEEMVQALKQLKDSEERASYILMEKIEPEPFENCLLRPGSPARVVQCISELGIFGVYVRQEKTLVMNKHVGHLLRTKAIEHADGGVAAGVAVLDNPYPV

SEQ ID NO: 35399 - protein, 317 aa, Homo sapiens
MWLYLAAFVGLYYLLHWYRERQVVSHLQDKYVFITGCDSGFGNLLARQLDARGLRVLAACLTEKGAEQLRGQTSDRLETVTLDVTKMESIAAATQWVKEHVGDRGLWGLVNNAGILTPITLCEWLNTEDSMNMLKVNLIGVIQVTLSMLPLVRRARGRIVNVSSILGRVAFFVGGYCVSKYGVEAFSDILRREIQHFGVKISIVEPGYFRTGMTNMTQSLERMKQSWKEAPKHIKETYGQQYFDALYNIMKEGLLNCSTNLNLVTDCMEHALTSVHPRTRYSAGWDAKFFFIPLSYLPTSLADYILTRSWPKPAQAV

SEQ ID NO: 35400 - protein, 126 aa, Homo sapiens
MPEPVKSAPVPKKGSKKAINKAQKKDGKKRKRSRKESYSVYVYKVLKQVHPDTGISSKAMGIMNSFVNDIFERIAGEASRLAHYNKRSTITSREIQTAVRLLLPGELAKHAVSEGTKAVTKYTSSK

SEQ ID NO: 35401 - protein, 918 aa, Homo sapiens
MGTTAPGPIHLLELCDQKLMEFLCNMDNKDLVWLEEIQEEAERMFTREFSKEPELMPKTPSQKNRRKKRRISYVQDENRDPIRRRLSRRKSRSSQLSSRRLRSKDSVEKLATVVGENGSVLRRVTRAAAAAAAATMALAAPSSPTPESPTMLTKKPEDNHTQCQLVPVVEIGISERQNAEQHVTQLMSTEPLPRTLSPTPASATAPTSQGIPTSDEESTPKKSKARILESITVSSLMATPQDPKGQGVGTGRSASKLRIAQVSPGPRDSPAFPDSPWRERVLAPILPDNFSTPTGSRTDSQSVRHSPIAPSSPSPQVLAQKYSLVAKQESVVRRASRRLAKKTAEEPAASGRIICHSYLERLLNVEVPQKVGSEQKEPPEEAEPVAAAEPEVPENNGNNSWPHNDTEIANSTPNPKPAASSPETPSAGQQEAKTDQADGPREPPQSARRKRSYKQAVSELDEEQHLEDEELQPPRSKTPSSPCPASKVVRPLRTFLHTVQRNQMLMTPTSAPRSVMKSFIKRNTPLRMDPKCSFVEKERQRLENLRRKEEAEQLRRQKVEEDKRRRLEEVKLKREERLRKVLQARERVEQMKEEKKKQIEQKFAQIDEKTEKAKEERLAEEKAKKKAAAKKMEEVEARRKQEEEARRLRWLQQEEEERRHQELLQKKKEEEQERLRKAAEAKRLAEQREQERREQERREQERREQERREQERREQERQLAEQERRREQERLQAERELQEREKALRLQKEQLQRELEEKKKKEEQQRLAERQLQEEQEKKAKEAAGASKALNVTVDVQSPACTSYQMTPQGHRAPPKINPDNYGMDLNSDDSTDDEAHPRKPIPTWARGTPLSQAIIHQYYHPPNLLELFGTILPLDLEDIFKKSKPRYHKRTSSAVWNSPPLQGARVPSSLAYSLKKH

SEQ ID NO: 35402 - protein, 914 aa, Homo sapiens
MGTTAPGPIHLLELCDQKLMEFLCNMDNKDLVWLEEIQEEAERMFTREFSKEPELMPKTPSQKNRRKKRRISYVQDENRDPIRRRLSRRKSRSSQLSSRRLRSKDSVEKLATVVGENGSVLRRVTRAAAAAAAATMALAAPSSPTPESPTMLTKKPEDNHTQCQLVPVVEIGISERQNAEQHVTQLMSTEPLPRTLSPTPASATAPTSQGIPTSDEESTPKKSKARILESITVSSLMATPQDPKGQGVGTGRSASKLRIAQVSPGPRDSPAFPDSPWRERVLAPILPDNFSTPTGSRTDSQSVRHSPIAPSSPSPQVLAQKYSLVAKQESVVRRASRRLAKKTAEEPAASGRIICHSYLERLLNVEVPQKVGSEQKEPPEEAEPVAAAEPEVPENNGNNSWPHNDTEIANSTPNPKPAASSPETPSAGQQEAKTDQADGPREPPQSARRKRSYKQAVSELDEEQHLEDEELQPPRSKTPSSPCPASKVVRPLRTFLHTVQRNQMLMTPTSAPRSVMKSFIKRNTPLRMDPKEKERQRLENLRRKEEAEQLRRQKVEEDKRRRLEEVKLKREERLRKVLQARERVEQMKEEKKKQIEQKFAQIDEKTEKAKEERLAEEKAKKKAAAKKMEEVEARRKQEEEARRLRWLQQEEEERRHQELLQKKKEEEQERLRKAAEAKRLAEQREQERREQERREQERREQERREQERREQERQLAEQERRREQERLQAERELQEREKALRLQKEQLQRELEEKKKKEEQQRLAERQLQEEQEKKAKEAAGASKALNVTVDVQSPACTSYQMTPQGHRAPPKINPDNYGMDLNSDDSTDDEAHPRKPIPTWARGTPLSQAIIHQYYHPPNLLELFGTILPLDLEDIFKKSKPRYHKRTSSAVWNSPPLQGARVPSSLAYSLKKH

SEQ ID NO: 35403 - protein, 126 aa, Homo sapiens
MPEPAKSAPAPKKGSKKAVTKAQKKDGKKRKRSRKESYSIYVYKVLKQVHPDTGISSKAMGIMNSFVNDIFERIAGEASRLAHYNKRSTITSREIQTAVRLLLPGELAKHAVSEGTKAVTKYTSSK

SEQ ID NO: 35404 - protein, 126 aa, Homo sapiens [sequence omitted]

SEQ ID NO: 35405 - protein, 128 aa, Homo sapiens
MSGRGKQGGKARAKAKTRSSRAGLQFPVGRVHRLLRKGNYAERVGAGAPVYLAAVLEYLTAEILELAGNAARDNKKTRIIPRHLQLAIRNDEELNKLLGKVTIAQGGVLPNIQAVLLPKKTESHHKAK

SEQ ID NO: 35406 - protein, 136 aa, Homo sapiens
MARTKQTARKSTGGKAPRKQLATKAARKSAPATGGVKKPHRYRPGTVALREIRRYQKSTELLIRKLPFQRLVREIAQDFKTDLRFQSSAVMALQEACEAYLVGLFEDTNLCAIHAKRVTIMPKDIQLARRIRGERA

SEQ ID NO: 35407 - protein, 128 aa, Homo sapiens
MAGGKAGKDSGKAKAKAVSRSQRAGLQFPVGRIHRHLKTRTTSHGRVGATAAVYSAAILEYLTAEVLELAGNASKDLKVKRITPRHLQLAIRGDEELDSLIKATIAGGGVIPHIHKSLIGKKGQQKTA

SEQ ID NO: 35408 - protein, 114 aa, Homo sapiens
MAGGKAGKDSGKAKAKAVSRSQRAGLQFPVGRIHRHLKTRTTSHGRVGATAAVYSAAILEYLTAEVLELAGNASKDLKVKRITPRHLQLAIRGDEELDSLIKATIAGGEKRRCS

SEQ ID NO: 35409 - protein, 90 aa, Homo sapiens
MAGGKAGKDSGKAKAKAVSRSQRAGLQVLELAGNASKDLKVKRITPRHLQLAIRGDEELDSLIKATIAGGGVIPHIHKSLIGKKGQQKTA

SEQ ID NO: 35410 - protein, 102 aa, Homo sapiens
MFPVGRIHRHLKTRTTSHGRVGATAAVYSAAILEYLTAEVLELAGNASKDLKVKRITPRHLQLAIRGDEELDSLIKATIAGGGVIPHIHKSLIGKKGQQKTA

SEQ ID NO: 35411 - protein, 66 aa, Homo sapiens
MAGGKAGKDSGKAKAKAVSRSQRAGLQFPVGRIHRHLKTRTTSHGRVGATAAVYSAAILEYLTAEV

SEQ ID NO: 35412 - protein, 455 aa, Homo sapiens
MSLTVVSMACVGFFLLQGAWPLMGGQDKPFLSARPSTVVPRGGHVALQCHYRRGFNNFMLYKEDRSHVPIFHGRIFQESFIMGPVTPAHAGTYRCRGSRPHSLTGWSAPSNPLVIMVTGNHRKPSLLAHPGPLLKSGETVILQCWSDVMFEHFFLHREGISEDPSRLVGQIHDGVSKANFSIGPLMPVLAGTYRCYGSVPHSPYQLSAPSDPLDIVITGLYEKPSLSAQPGPTVQAGENVTLSCSSWSSYDIYHLSREGEAHERRLRAVPKVNRTFQADFPLGPATHGGTYRCFGSFRALPCVWSNSSDPLLVSVTGNPSSSWPSPTEPSSKSGICRHLHVLIGTSVVIFLFILLLFFLLYRWCSNKKNAAVMDQEPAGDRTVNRQDSDEQDPQEVTYAQLDHCVFIQRKISRPSQRPKTPLTDTSVYTELPNAEPRSKVVSCPRAPQSGLEGVF

SEQ ID NO: 35413 - protein, 438 aa, Homo sapiens
MSLTVVSMACVGFFLLQGAWPLMGGQDKPFLSARPSTVVPRGGHVALQCHYRRGFNNFMLYKEDRSHVPIFHGRIFQESFIMGPVTPAHAGTYRCRGSRPHSLTGWSAPSNPLVIMVTGNHRKPSLLAHPGPLLKSGETVILQCWSDVMFEHFFLHREGISEDPSRLVGQIHDGVSKANFSIGPLMPVLAGTYRCYGSVPHSPYQLSAPSDPLDIVITGLYEKPSLSAQPGPTVQAGENVTLSCSSWSSYDIYHLSREGEAHERRLRAVPKVNRTFQADFPLGPATHGGTYRCFGSFRALPCVWSNSSDPLLVSVTGICRHLHVLIGTSVVIFLFILLLFFLLYRWCSNKKNAAVMDQEPAGDRTVNRQDSDEQDPQEVTYAQLDHCVFIQRKISRPSQRPKTPLTDTSVYTELPNAEPRSKVVSCPRAPQSGLEGVF

SEQ ID NO: 35414 - protein, 540 aa, Homo sapiens
MTTSLQDGQSAASRAAARDSPLAAQVCGAAQGRGDAHDLAPAPWLHARALLPLPDGTRGCAADRRKKKDLDVPEMPSIPNPFPELCCSPFTSVLSADLFPKANSRKKQVIKVYSEDETSRALDVPSDITARDVCQLLILKNHYIDDHSWTLFEHLPHIGVERTIEDHELVIEVLSNWGIEEENKLYFRKNYAKYEFFKNPMYFFPEHMVSFATETNGEISPTQILQMFLSSSTYPEIHGFLHAKEQGKKSWKKIYFFLRRSGLYFSTKGTSKEPRHLQFFSEFGNSDIYVSLAGKKKHGAPTNYGFCFKPNKAGGPRDLKMLCAEEEQSRTCWVTAIRLLKYGMQLYQNYMHPYQGRSGCSSQSISPMRSISENSLVAMDFSGQKSRVIENPTEALSVAVEEGLAWRKKGCLRLGTHGSPTASSQSSATNMAIHRSQPWFHHKISRDEAQRLIIQQGLVDGVFLVRDSQSNPKTFVLSMSHGQKIKHFQIIPVEDDGEMFHTLDDGHTRFTDLIQLVEFYQLNKGVLPCKLKHYCARIAL

SEQ ID NO: 35415 - protein, 453 aa, Homo sapiens
MSLSARRVTLPAITPIILQKRVIKVYSEDETSRALDVPSDITARDVCQLLILKNHYIDDHSWTLFEHLPHIGVERTIEDHELVIEVLSNWGIEEENKLYFRKNYAKYEFFKNPMYFFPEHMVSFATETNGEISPTQILQMFLSSSTYPEIHGFLHAKEQGKKSWKKIYFFLRRSGLYFSTKGTSKEPRHLQFFSEFGNSDIYVSLAGKKKHGAPTNYGFCFKPNKAGGPRDLKMLCAEEEQSRTCWVTAIRLLKYGMQLYQNYMHPYQGRSGCSSQSISPMRSISENSLVAMDFSGQKSRVIENPTEALSVAVEEGLAWRKKGCLRLGTHGSPTASSQSSATNMAIHRSQPWFHHKISRDEAQRLIIQQGLVDGVFLVRDSQSNPKTFVLSMSHGQKIKHFQIIPVEDDGEMFHTLDDGHTRFTDLIQLVEFYQLNKGVLPCKLKHYCARIAL

SEQ ID NO: 35416 - protein, 147 aa, Homo sapiens
MVHLTPEEKSAVTALWGKVNVDEVGGEALGRLLVVYPWTQRFFESFGDLSTPDAVMGNPKVKAHGKKVLGAFSDGLAHLDNLKGTFATLSELHCDKLHVDPENFRLLGNVLVCVLAHHFGKEFTPPVQAAYQKVVAGVANALAHKYH

SEQ ID NO: 35417 - protein, 547 aa, Homo sapiens
MSTFGYRRGLSKYESIDEDELLASLSAEELKELERELEDIEPDRNLPVGLRQKSLTEKTPTGTFSREALMAYWEKESQKLLEKERLGECGKVAEDKEESEEELIFTESNSEVSEEVYTEEEEEESQEEEEEEDSDEEERTIETAKGINGTVNYDSVNSDNSKPKIFKSQIENINLTNGSNGRNTESPAAIHPCGNPTVIEDALDKIKSNDPDTTEVNLNNIENITTQTLTRFAEALKDNTVVKTFSLANTHADDSAAMAIAEMLKVNEHITNVNVESNFITGKGILAIMRALQHNTVLTELRFHNQRHIMGSQVEMEIVKLLKENTTLLRLGYHFELPGPRMSMTSILTRNMDKQRQKRLQEQKQQEGYDGGPNLRTKVWQRGTPSSSPYVSPRHSPWSSPKLPKKVQTVRSRPLSPVATPPPPPPPPPPPPPSSQRLPPPPPPPPPPLPEKKLITRNIAEVIKQQESAQRALQNGQKKKKGKKVKKQPNSILKEIKNSLRSVQEKKMEDSSRPSTPQRSAHENLMEAIRGSSIKQLKRVEVPEALR

SEQ ID NO: 35418 - protein, 138 aa, Homo sapiens
MSTFGYRRGLSKYESIDEDELLASLSAEELKELERELEDIEPDRNLPVGLRQKSLTEKTPTGTFSREALMAYWEKESQKLLEKERLGECGKVAEDKEESEEELIFTESNRRSPRRKRRKKTVTKRKEQLKLQKGLMEL

SEQ ID NO: 35419 - protein, 129 aa, Homo sapiens
MSTFGYRRGLSKYESIDEDELLASLSAEELKELERELEDIEPDRNLPVGLRQKSLTEKTPTGTFSREALMAYWEKESLLLLPLLHSQRKSSLPETLQKSSNNRRVPNGHYKMDKKRKKGKRSRNSQTVF

SEQ ID NO: 35420 - protein, 338 aa, Homo sapiens
MGKKQNRKTGNSKTQSASPPPKERSSSPATEQSWMENDFDELREEGFRRSNYSELREDIQTKGKEVENFEKNLEECITRITNTEKCLKELMELKTKARELREECRSLRSRCDQLEERVSAMEDEMNEMKREGKFREKRIKRNEQSLQEIWDYVKRPNLRLIGVPESDVENGTKLENTLQDIIQENFPNLARQANVQIQEIQRTPQRYSSRRATPRHIIVRFTKVEMKEKMLRAAREKGRVTLKGKPIRLTADLSAETLQARREWGPIFNILKEKNFQPRISYPAKLSFISEGEIKYFIDKQMLRDFVTTRPALKELLKEALNMERNNRYQPLQNHAKM

SEQ ID NO: 35421 - protein, 683 aa, Homo sapiens
MAAAVAAPLAAGGEEAAATTSVPGSPGLPGRRSAERALEEAVATGTLNLSNRRLKHFPRGAARSYDLSDITQADLSRNRFPEVPEAACQLVSLEGLSLYHNCLRCLNPALGNLTALTYLNLSRNQLSLLPPYICQLPLRVLIVSNNKLGALPPDIGTLGSLRQLDVSSNELQSLPSELCGLSSLRDLNVRRNQLSTLPEELGDLPLVRLDFSCNRVSRIPVSFCRLRHLQVILLDSNPLQSPPAQVCLKGKLHIFKYLSTEAGQRGSALGDLAPSRPPSFSPCPAEDLFPGHRYDGGLDSGFHSVDSGSKRWSGNESTDEFSELSFRISELAREPRGPRERKEDGSADGDPVQIDFIDSHVPGEDEERGTVEEQRPPELSPGAGDRERAPSSRREEPAGEERRRPDTLQLWQERERRQQQQSGAWGAPRKDSLLKPGLRAVVGGAAAVSTQAMHNGSPKSSASQAGAAAGQGAPAPAPASQEPLPIAGPATAPAPRPLGSIQRPNSFLFRSSSQSGSGPSSPDSVLRPRRYPQVPDEKDLMTQLRQVLESRLQRPLPEDLAEALASGVILCQLANQLRPRSVPFIHVPSPAVPKLSALKARKNVESFLEACRKMGVPEADLCSPSDLLQGTARGLRTALEAVKRVGGKALPPLWPPSGLGGFVVFYVVLMLLLYVTYTRLLGS

SEQ ID NO: 35422 - protein, 765 aa, Homo sapiens
MAASQGGGGNSGGGGCGGGGSSGGCGTAGGGGGGAGGGGGGGGGTLVVPIPVPTLFGQPFPNGPPWNPGSLQPQHTVRSLDRALEEAGSSGILSLSGRKLRDFPGSGYDLTDTTQADLSRNRFTEIPSDVWLFAPLETLNLYHNCIKTIPEAIKNLQMLTYLNISRNLLSTLPKYLFDLPLKVLVVSNNKLVSIPEEIGKLKDLMELDISCNEIQVLPQQMGKLHSLRELNIRRNNLHVLPDELGDLPLVKLDFSCNKVTEIPVCYRKLHHLQVIILDNNPLQVPPAQICLKGKVHIFKYLNIQACCRMDKKPDSLDLPSLSKRMPSQPLTDSMEDFYPNKNHGPDSGIGSDNGEKRLSTTEPSDDDTVSLHSQVSESNREQTSRNDSHIIGSKTDSQKDQEVYDFVDPNTEDVAVPEQGNAHIGSFVSFFKGKEKCSEKSRKNEELGDEKRLEKEQLLAEEEDDDLKEVTDLRKIAAQLLQQEQKNRILNHSTSVMRNKPKQTVECEKSVSADEVNSPLSPLTWQPLENQKDQIDEQPWPESHPIIWQSEERRRSKQIRKEYFKYKSMRKSSSGNENDEQDSDNANMSTQSPVSSEEYDRTDGFSHSPFGLKPRSAFSRSSRQEYGAADPGFTMRRKMEHLREEREQIRQLRNNLESRLKVILPDDIGAALMDGVVLCHLANHIRPRSVASIHVPSPAVPKLSMAKCRRNVENFLDACKKLGVSQERLCLPHHILEERGLVKVGVTVQALLELPTTKASQLSVA

SEQ ID NO: 35423 - protein, 748 aa, Homo sapiens
MAASQGGGGNSGGGGCGGGGSSGGCGTAGGGGGGAGGGGGGGGGTLVVPIPVPTLFGQPFPNGPPWNPGSLQPQHTVRSLDRALEEAGSSGILSLSGRKLRDFPGSGYDLTDTTQADLSRNRFTEIPSDVWLFAPLETLNLYHNCIKTIPEAIKNLQMLTYLNISRNLLSTLPKYLFDLPLKVLVVSNNKLVSIPEEIGKLKDLMELDISCNEIQVLPQQMGKLHSLRELNIRRNNLHVLPDELGDLPLVKLDFSCNKVTEIPVCYRKLHHLQVIILDNNPLQVPPAQICLKGKVHIFKYLNIQACCRMDKKPDSLDLPSLSKRMPSQPLTDSMEDFYPNKNHGPDSGIGSDNGEKRLSTTEPSDDDTVSLHSQVSESNREQTSRNDSHIIGSKTDSQKDQEVYDFVDPNTEDVAVPEQGNAHIGSFVSFFKGKEKCSEKSRKNEELGDEKRLEKEQLLAEEEDDDLKEVTDLRKIAAQLLQQEQKNRILNHSTSVMRNKPKQTVECEKSVSADEVNSPLSPLTWQPLENQKDQIDEQPWPESHPIIWQSEERRRSKQIRKEYFKYKSMRKSSSGNENDEEYDRTDGFSHSPFGLKPRSAFSRSSRQEYGAADPGFTMRRKMEHLREEREQIRQLRNNLESRLKVILPDDIGAALMDGVVLCHLANHIRPRSVASIHVPSPAVPKLSMAKCRRNVENFLDACKKLGVSQERLCLPHHILEERGLVKVGVTVQALLELPTTKASQLSVA

SEQ ID NO: 35424 - protein, 560 aa, Homo sapiens
MSEHSRNSDQEELLDEEINEDEILANLSAEELKELQSEMEVMAPDPSLPVGMIQKDQTDKPPTGNFNHKSLVDYMYWEKASRRMLEEERVPVTFVKSEEKTQEEHEEIEKRNKNMAQYLKEKLNNEIVANKRESKGSSNIQETDEEDEEEEDDDDDDEGEDDGEESEETNREEEGKAKEQIRNCENNCQQVTDKAFKEQRDRPEAQEQSEKKISKLDPKKLALDTSFLKVSTRPSGNQTDLDGSLRRVRKNDPDMKELNLNNIENIPKEMLLDFVNAMKKNKHIKTFSLANVGADENVAFALANMLRENRSITTLNIESNFITGKGIVAIMRCLQFNETLTELRFHNQRHMLGHHAEMEIARLLKANNTLLKMGYHFELPGPRMVVTNLLTRNQDKQRQKRQEEQKQQQLKEQKKLIAMLENGLGLPPGMWELLGGPKPDSRMQEFFQPPPPRPPNPQNVPFSQRSEMMKKPSQAPKYRTDPDSFRVVKLKRIQRKSRMPEAREPPEKTNLKDVIKTLKPVPRNRPPPLVEITPRDQLLNDIRHSSVAYLKPVQLPKELA

SEQ ID NO: 35425 - protein, 348 aa, Homo sapiens
MYWEKASRRMLEEERVPVTFVKSEEKLNNEIVANKRESKGSSNIQETDEEDEEEEDDDDDDEGEDDGEESEETNREEEGKAKEQIRNCENNCQQVTDKAFKEQRDRPEAQEQSEKKISKLDPKKLALDTSFLKVSTRPSGNQTDLDGSLRRVRKNDPDMKELNLNNIENIPKEMLLDFVNAMKKNKHIKTFSLANVGADENVAFALANMLRENRSITTLNIESNFITGKGIVAIMRCLQFNETLTELRFHNQRHMLGHHAEMEIARLLKANNTLLKMGYHFELPGPRMVVTNLLTRNQDKQRQKRQEEQKQQQLKEQKKLIAMLENGLGLPPGMWELLGGPKPDSRIA

SEQ ID NO: 35426 - protein, 402 aa, Homo sapiens
MDIATGPESLERCFPRGQTDCAKMLDGIKMEEHALRPGPATLGVLLGSDCPHPAVCEGCQRPISDRFLMRVNESSWHEECLQCAACQQALTTSCYFRDRKLYCKQDYQQLFAAKCSGCMEKIAPTEFVMRALECVYHLGCFCCCVCERQLRKGDEFVLKEGQLLCKGDYEKEKDLLSSVSPDESDSVKSEDEDGDMKPAKGQGSQSKGSGDDGKDPRRPKRPRTILTTQQRRAFKASFEVSSKPCRKVRETLAAETGLSVRVVQVWFQNQRAKMKKLARRHQQQQEQQNSQRLGQEVLSSRMEGMMASYTPLAPPQQQIVAMEQSPYGSSDPFQQGLTPPQMPGDHMNPYGNDSIFHDIDSDTSLTSLSDCFLGSSDVGSLQARVGNPIDRLYSMQSSYFAS

SEQ ID NO: 35427 - protein, 395 aa, Homo sapiens
MDIATGPESLERCFPRGQTDCAKMLDGIKMEEHALRPGPATLGVLLGSDCPHPAVCEGCQRPISDRFLMRVNESSWHEECLQCAACQQALTTSCYFRDRKLYCKQDYQQLFAAKCSGCMEKIAPTEFVMRALECVYHLGCFCCCVCERQLRKGDEFVLKEGQLLCKGDYEKEKDLLSSVSPDESDSVKSEDEDGDMKPAKGQGSQSKGSGDDGKDPRRPKRPRTILTTQQRRAFKASFEVSSKPCRKVRETLAAETGLSVRVVQVWFQNQRAKMKKLARRHQQQQEQQNSQRLGQEVLSSRMEGMMASYTPLAPPQQQIVAMEQSPYGSSDPFQQGLTPPQMPGNDSIFHDIDSDTSLTSLSDCFLGSSDVGSLQARVGNPIDRLYSMQSSYFAS

SEQ ID NO: 35428 - protein, 406 aa, Homo sapiens
MDIATGPESLERCFPRGQTDCAKMLDGIKMEEHALRPGPATLGVLLGSDCPHPAVCEGCQRPISDRFLMRVNESSWHEECLQCAACQQALTTSCYFRDRKLYCKQDYQQLFAAKCSGCMEKIAPTEFVMRALECVYHLGCFCCCVCERQLRKGDEFVLKEGQLLCKGDYEKEKDLLSSVSPDESDSVKSEDEDGDMKPAKGQGSQSKGSGDDGKDPRRPKRPRTILTTQQRRAFKASFEVSSKPCRKVRETLAAETGLSVRVVQVWFQNQRAKMKKLARRHQQQQEQQNSQRLGQGEPGPGQGLGQEVLSSRMEGMMASYTPLAPPQQQIVAMEQSPYGSSDPFQQGLTPPQMPGNDSIFHDIDSDTSLTSLSDCFLGSSDVGSLQARVGNPIDRLYSMQSSYFAS

SEQ ID NO: 35429 - protein, 638 aa, Homo sapiens
MSALAGEDVWRCPGCGDHIAPSQIWYRTVNETWHGSCFRCSECQDSLTNWYYEKDGKLYCPKDYWGKFGEFCHGCSLLMTGPFMVAGEFKYHPECFACMSCKVIIEDGDAYALVQHATLYCGKCHNEVVLAPMFERLSTESVQEQLPYSVTLISMPATTEGRRGFSVSVESACSNYATTVQVKEVNRMHISPNNRNAIHPGDRILEINGTPVRTLRVEEVEDAISQTSQTLQLLIEHDPVSQRLDQLRLEARLAPHMQNAGHPHALSTLDTKENLEGTLRRRSLRRSNSISKSPGPSSPKEPLLFSRDISRSESLRCSSSYSQQIFRPCDLIHGEVLGKGFFGQAIKVTHKATGKVMVMKELIRCDEETQKTFLTEVKVMRSLDHPNVLKFIGVLYKDKKLNLLTEYIEGGTLKDFLRSMDPFPWQQKVRFAKGIASGMAYLHSMCIIHRDLNSHNCLIKLDKTVVVADFGLSRLIVEERKRAPMEKATTKKRTLRKNDRKKRYTVVGNPYWMAPEMLNGKSYDETVDIFSFGIVLCEIIGQVYADPDCLPRTLDFGLNVKLFWEKFVPTDCPPAFFPLAAICCRLEPESRPAFSKLEDSFEALSLYLGELGIPLPAELEELDHTVSMQYGLTRDSPP

SEQ ID NO: 35430 - protein, 617 aa, Homo sapiens
MGSYLSVPAYFTSRDLFRCSECQDSLTNWYYEKDGKLYCPKDYWGKFGEFCHGCSLLMTGPFMVAGEFKYHPECFACMSCKVIIEDGDAYALVQHATLYCGKCHNEVVLAPMFERLSTESVQEQLPYSVTLISMPATTEGRRGFSVSVESACSNYATTVQVKEVNRMHISPNNRNAIHPGDRILEINGTPVRTLRVEEVEDAISQTSQTLQLLIEHDPVSQRLDQLRLEARLAPHMQNAGHPHALSTLDTKENLEGTLRRRSLRRSNSISKSPGPSSPKEPLLFSRDISRSESLRCSSSYSQQIFRPCDLIHGEVLGKGFFGQAIKVTHKATGKVMVMKELIRCDEETQKTFLTEVKVMRSLDHPNVLKFIGVLYKDKKLNLLTEYIEGGTLKDFLRSMDPFPWQQKVRFAKGIASGMAYLHSMCIIHRDLNSHNCLIKLDKTVVVADFGLSRLIVEERKRAPMEKATTKKRTLRKNDRKKRYTVVGNPYWMAPEMLNGKSYDETVDIFSFGIVLCEIIGQVYADPDCLPRTLDFGLNVKLFWEKFVPTDCPPAFFPLAAICCRLEPESRPAFSKLEDSFEALSLYLGELGIPLPAELEELDHTVSMQYGLTRDSPP

SEQ ID NO: 35431 - protein, 686 aa, Homo sapiens
MGSYLSVPAYFTSRDLFRCSECQDSLTNWYYEKDGKLYCPKDYWGKFGEFCHGCSLLMTGPFMVAGEFKYHPECFACMSCKVIIEDGDAYALVQHATLYCGKCHNEVVLAPMFERLSTESVQEQLPYSVTLISMPATTEGRRGFSVSVESACSNYATTVQVKEVNRMHISPNNRNAIHPGDRILEINGTPVRTLRVEEVEDAISQTSQTLQLLIEHDPVSQRLDQLRLEARLAPHMQNAGHPHALSTLDTKENLEGTLRRRSLRRSNSISKSPGPSSPKEPLLFSRDISRSESLRCSSSYSQQIFRPCDLIHGEVLGKGFFGQAIKVTHKATGKVMVMKELIRCDEETQKTFLTEVKVMRSLDHPNVLKFIGVLYKDKKLNLLTEYIEGGTLKDFLRSMDPFPWQQKVRFAKGIASGMAYLHSMCIIHRDLNSHNCLIKLDKTVVVADFGLSRLIVEERKRAPMEKATTKKRTLRKNDRKKRYTVVGNPYWMAPEMLNGKSYDETVDIFSFGIVLCEIIGQVYADPDCLPRTLDFGLNVKLFWEKFVPTDCPPAFFPLAAICCRLEPESRAPPGAAGEGPGCADDEGPVRRQGKVTIKYDPKELRKHLNLEEWILEQLTRLYDCQEEEISELEIDVDELLDMESDDAWASRVKELLVDCYKPTEAFISGLLDKIRAMQKLSTPQKK

SEQ ID NO: 35432 - protein, 858 aa, Homo sapiens
MFTLAEVASLNDIQPTYRILKPWWDVFMDYLAVVMLMVAIFAGTMQLTKDQVVCLPVLPSPVNSKAHTPPGNAEVTTNIPKMEAATNQDQDGRTTNDISFGTSAVTPDIPLRATYPRTDFALPNQEAKKEKKDPTGRKTNLDFQQYVFINQMCYHLALPWYSKYFPYLALIHTIILMVSSNFWFKYPKTCSKVEHFVSILGKCFESPWTTKALSETACEDSEENKQRITGAQTLPKHVSTSSDEGSPSASTPMINKTGFKFSAEKPVIEVPSMTILDKKDGEQAKALFEKVRKFRAHVEDSDLIYKLYVVQTVIKTAKFIFILCYTANFVNAISFEHVCKPKVEHLIGYEVFECTHNMAYMLKKLLISYISIICVYGFICLYTLFWLFRIPLKEYSFEKVREESSFSDIPDVKNDFAFLLHMVDQYDQLYSKRFGVFLSEVSENKLREISLNHEWTFEKLRQHISRNAQDKQELHLFMLSGVPDAVFDLTDLDVLKLELIPEAKIPAKISQMTNLQELHLCHCPAKVEQTAFSFLRDHLRCLHVKFTDVAEIPAWVYLLKNLRELYLIGNLNSENNKMIGLESLRELRHLKILHVKSNLTKVPSNITDVAPHLTKLVIHNDGTKLLVLNSLKKMMNVAELELQNCELERIPHAIFSLSNLQELDLKSNNIRTIEEIISFQHLKRLTCLKLWHNKIVTIPPSITHVKNLESLYFSNNKLESLPVAVFSLQKLRCLDVSYNNISMIPIEIGLLQNLQHLHITGNKVDILPKQLFKCIKLRTLNLGQNCITSLPEKVGQLSQLTQLELKGNCLDRLPAQLGQCRMLKKSGLVVEDHLFDTLPLEVKEALNQDINIPFANGI

SEQ ID NO: 35433 - protein, 363 aa, Homo sapiens
MAQPGSGCKATTRCLEGTAPPAMAQSDAEALAGALDKDEGQASPCTPSTPSVCSPPSAASSVPSAGKNICSSCGLEILDRYLLKVNNLIWHVRCLECSVCRTSLRQQNSCYIKNKEIFCKMDYFSRFGTKCARCGRQIYASDWVRRARGNAYHLACFACFSCKRQLSTGEEFGLVEEKVLCRIHYDTMIENLKRAAENGNGLTLEGAVPSEQDSQPKPAKRARTSFTAEQLQVMQAQFAQDNNPDAQTLQKLADMTGLSRRVIQVWFQNCRARHKKHTPQHPVPPSGAPPSRLPSALSDDIHYTPFSSPERARMVTLHGYIESQVQCGQVHCRLPYTAPPVHLKADMDGPLSNRGEKVILFQY

SEQ ID NO: 35434 - protein, 348 aa, Homo sapiens
MAQPGSGCKATTRCLEGTAPPAMAQSDAEALAGALDKDEGQASPCTPSTPSVCSPPSAASSVPSAGKNICSSCGLEILDRYLLKVNNLIWHVRCLECSVCRTSLRQQNSCYIKNKEIFCKMDYFSRFGTKCARCGRQIYASDWVRRARGNAYHLACFACFSCKRQLSTGEEFGLVEEKVLCRIHYDTMIENLKRAAENGNGLTLEGAVPSEQDSQPKPAKRARTSFTAEQLQVMQAQFAQDNNPDAQTLQKLADMTGLSRRVIQVWFQNCRARHKKHTPQHPVPPSGAPPSRLPSALSDDIHYTPFSSPERARMVTLHGYIESHPFSVLTLPALPHLPVGAPQLPLSR

SEQ ID NO: 35435 - protein, 392 aa, Homo sapiens
MYWKHENAAPALPEGCRLPAEGGPATDQVMAQPGSGCKATTRCLEGTAPPAMAQSDAEALAGALDKDEGQASPCTPSTPSVCSPPSAASSVPSAGKNICSSCGLEILDRYLLKVNNLIWHVRCLECSVCRTSLRQQNSCYIKNKEIFCKMDYFSRFGTKCARCGRQIYASDWVRRARGNAYHLACFACFSCKRQLSTGEEFGLVEEKVLCRIHYDTMIENLKRAAENGNGLTLEGAVPSEQDSQPKPAKRARTSFTAEQLQVMQAQFAQDNNPDAQTLQKLADMTGLSRRVIQVWFQNCRARHKKHTPQHPVPPSGAPPSRLPSALSDDIHYTPFSSPERARMVTLHGYIESQVQCGQVHCRLPYTAPPVHLKADMDGPLSNRGEKVILFQY

SEQ ID NO: 35436 - protein, 377 aa, Homo sapiens
MYWKHENAAPALPEGCRLPAEGGPATDQVMAQPGSGCKATTRCLEGTAPPAMAQSDAEALAGALDKDEGQASPCTPSTPSVCSPPSAASSVPSAGKNICSSCGLEILDRYLLKVNNLIWHVRCLECSVCRTSLRQQNSCYIKNKEIFCKMDYFSRFGTKCARCGRQIYASDWVRRARGNAYHLACFACFSCKRQLSTGEEFGLVEEKVLCRIHYDTMIENLKRAAENGNGLTLEGAVPSEQDSQPKPAKRARTSFTAEQLQVMQAQFAQDNNPDAQTLQKLADMTGLSRRVIQVWFQNCRARHKKHTPQHPVPPSGAPPSRLPSALSDDIHYTPFSSPERARMVTLHGYIESHPFSVLTLPALPHLPVGAPQLPLSR

SEQ ID NO: 35437 - protein, 366 aa, Homo sapiens
MRRGLCRRSAENPDAGPVMAQPGSGCKATTRCLEGTAPPAMAQSDAEALAGALDKDEGQASPCTPSTPSVCSPPSAASSVPSAGKNICSSCGLEILDRYLLKVNNLIWHVRCLECSVCRTSLRQQNSCYIKNKEIFCKMDYFSRFGTKCARCGRQIYASDWVRRARGNAYHLACFACFSCKRQLSTGEEFGLVEEKVLCRIHYDTMIENLKRAAENGNGLTLEGAVPSEQDSQPKPAKRARTSFTAEQLQVMQAQFAQDNNPDAQTLQKLADMTGLSRRVIQVWFQNCRARHKKHTPQHPVPPSGAPPSRLPSALSDDIHYTPFSSPERARMVTLHGYIESHPFSVLTLPALPHLPVGAPQLPLSR

SEQ ID NO: 35438 - protein, 176 aa, Homo sapiens
MIENLKRAAENGNGLTLEGAVPSEQDSQPKPAKRARTSFTAEQLQVMQAQFAQDNNPDAQTLQKLADMTGLSRRVIQVWFQNCRARHKKHTPQHPVPPSGAPPSRLPSALSDDIHYTPFSSPERARMVTLHGYIESQVQCGQVHCRLPYTAPPVHLKADMDGPLSNRGEKVILFQY

SEQ ID NO: 35439 - protein, 624 aa, Homo sapiens
MFHGTVTEELTSHEEWSHYNENIREGQKDFVFVKFNGLHLKSMENLQSCISLRVCIFSNNFITDIHPLQSCIKLIKLDLHGNQIKSLPNTKFWNGLKNLKLLYLHDNGFAKLKNICVLSACPTLIALTMFDCPVSLKKGYRHVLVNSIWPLKALDHHVISDEEIIQNWHLPERFKACNHRLFFNFCPALRKGTTYEEEINNIKHITSKINAILAHNSPVLIVQRWIRGFLVRKNLSPVFFHKKKQQEKIIRGYEAKWIYITKGYEDKLLKDLFFKPETNIKGKLAYWKHNIYYPVDLKNSSEHRKHVSSILCELKPKDLGMKSKTSRHLIQKGQESEDEIVDEKLDTSFRISVFKLPIYTSGSLKNNAVLREKKQHFFPAYPQPIYTTHPKPIIKKDIRLERSMKEFFAPQRAGMKLRTFSDIDKYYTEQKKQEYHKEKVRVVAMAQVARERVRVAVNEHLNQKKYATQKLIEENKETIQNSLRQVWQNRFNYLEKARERKALFLKEKSQKASERLLVQNLNNERTLLTRGLLKIDRLEKNEAVLKEKSLIVKQKLKAEKYRKNLLKEMKKVRSQEIYKRHCEEKFVMDMIAFEKACERLQDAKTKVAIVKTNLDFKVPNGLIK

SEQ ID NO: 35440 - protein, 299 aa, Homo sapiens
MFHGTVTEELTSHEEWSHYNENIREGQKDFVFVKFNGLHLKSMENLQSCISLRVCIFSNNFITDIHPLQSCIKLIKLDLHGNQIKSLPNTKFWNGLKNLKLLYLHDNGFAKLKNICVLSACPTLIALTMFDCPVSLKKGYRHVLVNSIWPLKALDHHVISDEEIIQNWHLPERFKACNHRLFFNFCPALRKGTTYEEEINNIKHITSKINAILAHNSPVLIVQRWIRGFLVRKNLSPVFFHKKKQQEKIIRGYEAKWIYITKGYEDKLLKDLFFKPETNIKGKLAYWKHDKKKLWVNFH

SEQ ID NO: 35441 - protein, 199 aa, Homo sapiens
MFHGTVTEELTSHEEWSHYNENIREGQKDFVFVKFNGLHLKSMENLQSCISLRVCIFSNNFITDIHPLQSCIKLIKLDLHGNQIKSLPNTKFWNGLKNLKLLYLHDNGFAKLKNICVLSACPTLIALTMFDCPVSLKKGYRHVLVNSIWPLKALDHHVISDEEIIQNWHLPERFKACNHRLFFNFCPALRKEKMKHSEV

SEQ ID NO: 35442 - protein, 538 aa, Homo sapiens
MARAAALLPSRSPPTPLLWPLLLLLLLETGAQDVRVQVLPEVRGQLGGTVELPCHLLPPVPGLYISLVTWQRPDAPANHQNVAAFHPKMGPSFPSPKPGSERLSFVSAKQSTGQDTEAELQDATLALHGLTVEDEGNYTCEFATFPKGSVRGMTWLRVIAKPKNQAEAQKVTFSQDPTTVALCISKEGRPPARISWLSSLDWEAKETQVSGTLAGTVTVTSRFTLVPSGRADGVTVTCKVEHESFEEPALIPVTLSVRYPPEVSISGYDDNWYLGRTDATLSCDVRSNPEPTGYDWSTTSGTFPTSAVAQGSQLVIHAVDSLFNTTFVCTVTNAVGMGRAEQVIFVRETPNTAGAGATGGIIGGIIAAIIATAVAATGILICRQQRKEQTLQGAEEDEDLEGPPSYKPPTPKAKLEAQEMPSQLFTLGASEHSPLKTPYFDAGASCTEQEMPRYHELPTLEERSGPLHPGATSLGSPIPVPPGPPAVEDVSLDLEDEEGEEEEEYLDKINPIYDALSYSSPSDSYQGKGFVMSRAMYV

SEQ ID NO: 35443 - protein, 479 aa, Homo sapiens
MARAAALLPSRSPPTPLLWPLLLLLLLETGAQDVRVQVLPEVRGQLGGTVELPCHLLPPVPGLYISLVTWQRPDAPANHQNVAAFHPKMGPSFPSPKPGSERLSFVSAKQSTGQDTEAELQDATLALHGLTVEDEGNYTCEFATFPKGSVRGMTWLRVIAKPKNQAEAQKVTFSQDPTTVALCISKEGRPPARISWLSSLDWEAKETQVSGTLAGTVTVTSRFTLVPSGRADGVTVTCKVEHESFEEPALIPVTLSVRYPPEVSISGYDDNWYLGRTDATLSCDVRSNPEPTGYDWSTTSGTFPTSAVAQGSQLVIHAVDSLFNTTFVCTVTNAVGMGRAEQVIFVRETPRASPRDVGPLVWGAVGGTLLVLLLLAGGSLAFILLRVRRRRKSPGGAGGGASGDGGFYDPKAQVLGNGDPVFWTPVVPGPMEPDGKDEEEEEEEEKAEKGLMLPPPPALEDDMESQLDGSLISRRAVYV

SEQ ID NO: 35444 - protein, 317 aa, Homo sapiens
MSSEQKSQHCKPEEGVEAQEEALGLVGAQAPTTEEQEAAVSSSSPLVPGTLEEVPAAESAGPPQSPQGASALPTTISFTCWRQPNEGSSSQEEEGPSTSPDAESLFREALSNKVDELAHFLLRKYRAKELVTKAEMLERVIKNYKRCFPVIFGKASESLKMIFGIDVKEVDPASNTYTLVTCLGLSYDGLLGNNQIFPKTGLLIIVLGTIAMEGDSASEEEIWEELGVMGVYDGREHTVYGEPRKLLTQDWVQENYLEYRQVPGSNPARYEFLWGPRALAETSYVKVLEHVVRVNARVRIAYPSLREAALLEEEEGV

SEQ ID NO: 35445 - protein, 734 aa, Homo sapiens
MSGFDDPGIFYSDSFGGDAQADEGQARKSQLQRRFKEFLRQYRVGTDRTGFTFKYRDELKRHYNLGEYWIEVEMEDLASFDEDLADYLYKQPAEHLQLLEEAAKEVADEVTRPRPSGEEVLQDIQVMLKSDASPSSIRSLKSDMMSHLVKIPGIIIAASAVRAKATRISIQCRSCRNTLTNIAMRPGLEGYALPRKCNTDQAGRPKCPLDPYFIMPDKCKCVDFQTLKLQELPDAVPHGEMPRHMQLYCDRYLCDKVVPGNRVTIMGIYSIKKFGLTTSRGRDRVGVGIRSSYIRVLGIQVDTDGSGRSFAGAVSPQEEEEFRRLAALPNVYEVISKSIAPSIFGGTDMKKAIACLLFGGSRKRLPDGLTRRGDINLLMLGDPGTAKSQLLKFVEKCSPIGVYTSGKGSSAAGLTASVMRDPSSRNFIMEGGAMVLADGGVVCIDEFDKMREDDRVAIHEAMEQQTISIAKAGITTTLNSRCSVLAAANSVFGRWDETKGEDNIDFMPTILSRFDMIFIVKDEHNEERDVMLAKHVITLHVSALTQTQAVEGEIDLAKLKKFIAYCRVKCGPRLSAEAAEKLKNRYIIMRSGARQHERDSDRRSSIPITVRQLEAIVRIAEALSKMKLQPFATEADVEEALRLFQVSTLDAALSGTLSGVEGFTSQEDQEMLSRIEKQLKRRFAIGSQVSEHSIIKDFTKQKYPEHAIHKVLQLMLRRGEIQHRMQRKVLYRLK

SEQ ID NO: 35446 - protein, 369 aa, Homo sapiens
MPRAPKRQRCMPEEDLQSQSETQGLEGAQAPLAVEEDASSSTSTSSSFPSSFPSSSSSSSSSCYPLIPSTPEEVSADDETPNPPQSAQIACSSPSVVASLPLDQSDEGSSSQKEESPSTLQVLPDSESLPRSEIDEKVTDLVQFLLFKYQMKEPITKAEILESVIRNYEDHFPLLFSEASECMLLVFGIDVKEVDPTGHSFVLVTSLGLTYDGMLSDVQSMPKTGILILILSIVFIEGYCTPEEVIWEALNMMGLYDGMEHLIYGEPRKLLTQDWVQENYLEYRQVPGSDPARYEFLWGPRAHAEIRKMSLLKFLAKVNGSDPRSFPLWYEEALKDEEERAQDRIATTDDTTAMASASSSATGSFSYPE

SEQ ID NO: 35447 - protein, 323 aa, Homo sapiens
MNASCCLPSVQPTLPNGSEHLQAPFFSNQSSSAFCEQVFIKPEVFLSLGIVSLLENILVILAVVRNGNLHSPMYFFLCSLAVADMLVSVSNALETIMIAIVHSDYLTFEDQFIQHMDNIFDSMICISLVASICNLLAIAVDRYVTIFYALRYHSIMTVRKALTLIVAIWVCCGVCGVVFIVYSESKMVIVCLITMFFAMMLLMGTLYVHMFLFARLHVKRIAALPPADGVAPQQHSCMKGAVTITILLGVFIFCWAPFFLHLVLIITCPTNPYCICYTAHFNTYLVLIMCNSVIDPLIYAFRSLELRNTFREILCGCNGMNLG

SEQ ID NO: 35448 - protein, 314 aa, Homo sapiens
MPLEQRSQHCKPEEGLEARGEALGLVGAQAPATEEQQTASSSSTLVEVTLGEVPAADSPSPPHSPQGASSFSTTINYTLWRQSDEGSSNQEEEGPRMFPDLESEFQAAISRKMVELVHFLLLKYRAREPVTKAEMLESVLRNCQDFFPVIFSKASEYLQLVFGIEVVEVVPISHLYILVTCLGLSYDGLLGDNQVMPKTGLLIIVLAIIAIEGDCAPEEKIWEELSMLEVFEGREDSVFAHPRKLLMQDLVQENYLEYRQVPGSDPACYEFLWGPRALIETSYVKVLHHTLKIGGEPHISYPPLHERALREGEE

SEQ ID NO: 35449 - protein, 846 aa, Homo sapiens
MEAPLRPAADILRRNPQQDYELVQRVGSGTYGDVYKARNVHTGELAAVKIIKLEPGDDFSLIQQEIFMVKECKHCNIVAYFGSYLSREKLWICMEYCGGGSLQDIYHVTGPLSELQIAYVCRETLQGLAYLHTKGKMHRDIKGANILLTDHGDVKLADFGVAAKITATIAKRKSFIGTPYWMAPEVAAVEKNGGYNQLCDIWAVGITAIELGELQPPMFDLHPMRALFLMSKSNFQPPKLKDKTKWSSTFHNFVKIALTKNPKKRPTAERLLTHTFVAQPGLSRALAVELLDKVNNPDNHAHYTEADDDDFEPHAIIRHTIRSTNRNARAERTASEINFDKLQFEPPLRKETEARDEMGLSSDPNFMLQWNPFVDGANTGKSTSKRAIPPPLPPKPRISSYPEDNFPDEEKASTIKHCPDSESRAPQILRRQSSPSCGPVAETSSIGNGDGISKLMSENTEGSAQAPQLPRKKDKRDFPKPAINGLPPTPKVLMGACFSKVFDGCPLKINCATSWIHPDTKDQYIIFGTEDGIYTLNLNELHEATMEQLFPRKCTWLYVINNTLMSLSVGKTFQLYSHNLIALFEHAKKPGLAAHIQTHRFPDRILPRKFALTTKIPDTKGCHKCCIVRNPYTGHKYLCGALQSGIVLLQWYEPMQKFMLIKHFDFPLPSPLNVFEMLVIPEQEYPMVCVAISKGTESNQVVQFETINLNSASSWFTEIGAGSQQLDSIHVTQLERDTVLVCLDKFVKIVNLQGKLKSSKKLASELSFDFRIESVVCLQDSVLAFWKHGMQGKSFKSDEVTQEISDETRVFRLLGSDRVVVLESRPTENPTAHSNLYILAGHENSY

SEQ ID NO: 35450 - protein, 336 aa, Homo sapiens
MLQRGLWPWRTRLLPTPGTWRPARPWPLPPPPQVLRVKLCGNVKYYQSHHYSTVVPPDEITVIYRHGLPLVTLTLPSRKERCQFVVKPMLSTVGSFLQDLQNEDKGIKTAAIFTADGNMISASTLMDILLMNDFKLVINKIAYDVQCPKREKPSNEHTAEMEHMKSLVHRLFTILHLEESQKKREHHLLEKIDHLKEQLQPLEQVKAGIEAHSEAKTSGLLWAGLALLSIQGGALAWLTWWVYSWDIMEPVTYFITFANSMVFFAYFIVTRQDYTYSAVKSRQFLQFFHKKSKQQHFDVQQYNKLKEDLAKAKESLKQARHSLCLQMQVEELNEKN

SEQ ID NO: 35451 - protein, 813 aa, Homo sapiens
MAWPCITRACCIARFWNQLDKADIAVPLVFTKYSEATEHPGAPPQPPPPQQQAQPALAPPSARAVAIETQPAQGELDAVARATGPAPGPTGEREPAAGPGRSGPGPGLGSGSTSGPADSVMRQDYRAWKVQRPEPSCRPRSEYQPSDAPFERETQYQKDFRAWPLPRRGDHPWIPKPVQISAASQASAPILGAPKRRPQSQERWPVQAAAEAREQEAAPGGAGGLAAGKASGADERDTRRKAGPAWIVRRAEGLGHEQTPLPAAQAQVQATGPEAGRGRAAADALNRQIREEVASAVSSSYRNEFRAWTDIKPVKPIKAKPQYKPPDDKMVHETSYSAQFKGEASKPTTADNKVIDRRRIRSLYSEPFKEPPKVEKPSVQSSKPKKTSASHKPTRKAKDKQAVSGQAAKKKSAEGPSTTKPDDKEQSKEMNNKLAEAKESLAQPVSDSSKTQGPVATEPDKDQGSVVPGLLKGQGPMVQEPLKKQGSVVPGPPKDLGPMIPLPVKDQDHTVPEPLKNESPVISAPVKDQGPSVPVPPKNQSPMVPAKVKDQGSVVPESLKDQGPRIPEPVKNQAPMVPAPVKDEGPMVSASVKDQGPMVSAPVKDQGPIVPAPVKGEGPIVPAPVKDEGPMVSAPIKDQDPMVPEHPKDESAMATAPIKNQGSMVSEPVKNQGLVVSGPVKDQDVVVPEHAKVHDSAVVAPVKNQGPVVPESVKNQDPILPVLVKDQGPTVLQPPKNQGRIVPEPLKNQVPIVPVPLKDQDPLVPVPAKDQGPAVPEPLKTQGPRDPQLPTVSPLPRVMIPTAPHTEYIESSP

SEQ ID NO: 35452 - protein, 439 aa, Homo sapiens
MAWPCITRACCIARFWNQLDKADIAVPLVFTKYSEATEHPGAPPQPPPPQQQAQPALAPPSARAVAIETQPAQGELDAVARATGPAPGPTGEREPAAGPGRSGPGPGLGSGSTSGPADSVMRQDYRAWKVQRPEPSCRPRSEYQPSDAPFERETQYQKDFRAWPLPRRGDHPWIPKPVQISAASQASAPILGAPKRRPQSQERWPVQAAAEAREQEAAPGGAGGLAAGKASGADERDTRRKAGPAWIVRRAEGLGHEQTPLPAAQAQVQATGPEAGRGRAAADALNRQIREEVASAVSSSYRNEFRAWTDIKPVKPIKAKPQYKPPDDKMVHETSYSAQFKGEASKPTTADNKVIDRRRIRSLYSEPFKEPPKVEKPSVQSSKPKKTSASHKPTRKAKDKQAVSGQAAKKKSAEGPSTTKPDDKEQSKEMNNKLAEAKE

SEQ ID NO: 35453 - protein, 484 aa, Homo sapiens
MVHETSYSAQFKGEASKPTTADNKVIDRRRIRSLYSEPFKEPPKVEKPSVQSSKPKKTSASHKPTRKAKDKQAVSGQAAKKKSAEGPSTTKPDDKEQSKEMNNKLAEAKESLAQPVSDSSKTQGPVATEPDKDQGSVVPGLLKGQGPMVQEPLKKQGSVVPGPPKDLGPMIPLPVKDQDHTVPEPLKNESPVISAPVKDQGPSVPVPPKNQSPMVPAKVKDQGSVVPESLKDQGPRIPEPVKNQAPMVPAPVKDEGPMVSASVKDQGPMVSAPVKDQGPIVPAPVKGEGPIVPAPVKDEGPMVSAPIKDQDPMVPEHPKDESAMATAPIKNQGSMVSEPVKNQGLVVSGPVKDQDVVVPEHAKVHDSAVVAPVKNQGPVVPESVKNQDPILPVLVKDQGPTVLQPPKNQGRIVPEPLKNQVPIVPVPLKDQDPLVPVPAKDQGPAVPEPLKTQGPRDPQLPTVSPLPRVMIPTAPHTEYIESSP

SEQ ID NO: 35454 - protein, 2145 aa, Homo sapiens
MAAFGLLSYEQRPLKRPRLGPPDVYPQDPKQKEDELTAVNVKQGFNNQPAFTGDEHGSARNIVINPSKIGAYFSSILAEKLKLNTFQDTGKKKPQVNAKDNYWLVTARSQSAIHSWFSDLAGNKPLSILAKKVPILSKKEDVFAYLAKYSVPMVRATWLIKMTCAYYSAISEAKIKKRQAPDPNLEWTQISTRYLREQLAKISDFYHMASSTGDGPVPVPPEVEQAMKQWEYNEKLAFHMFQEGMLEKHEYLTWILDVLEKIRPMDDDLLKLLLPLMLQYSDEFVQSAYLSRRLAYFCARRLSLLLSDSPNLLAAHSPHMMIGPNNSSIGAPSPGPPGPGMSPVQLAFSDFLSCAQHGPLVYGLSCMLQTVTLCCPSALVWNYSTNENKSANPGSPLDLLQVAPSSLPMPGGNTAFNQQVRARIYEVEQQIKQRGRAVEVRWSFDKCQESTAGVTISRVLHTLEVLDRHCFDRTDSSNSMETLYHKIFWANQNKDNQEVAPNDEAVVTLLCEWAVSCKRSGKHRAMAVAKLLEKRQAEIEAERCGESEVLDEKESISSSSLAGSSLPVFQNVLLRFLDTQAPSLSDPNSECEKVEFVNLVLLFCEFIRHDVFSHDAYMCTLISRGDLSVTASTRPRSPVGENADEHYSKDHDVKMEIFSPMPGESCENANTSLGRRMSVNCEKLVKREKPRELIFPSNYDLLRHLQYATHFPIPLDESSSHECNQRTILLYGVGKERDEARHQLKKITKDILKILNKKSTTETGVGDEGQKARKNKQETFPTLETVFTKLQLLSYFDQHQVTSQISNNVLEQITSFASGTSYHLPLAHHIQLIFDLMEPALNINGLIDFAIQLLNELSVVEAELLLKSSSLAGSYTTGLCVCIVAVLRRYHSCLILNPDQTAQVFEGLCGVVKHVVNPSECSSPERCILAYLYDLYVSCSHLRSKFGDLFSSACSKVKQTIYNNVMPANSNLRWDPDFMMDFIENPSARSINYSMLGKILSDNAANRYSFVCNTLMNVCMGHQDAGRINDIANFSSELTACCTVLSSEWLGVLKALCCSSNHVWGFNDVLCTVDVSDLSFHDSLATFIAILIARQCFSLEDVVQHVALPSLLAAACGDADAEPGARMTCRLLLHLFRAPQACFLPQATGKPFPGIRSSCDRHLLAAAHNSIEVGAVFAVLKAIMMLGDAKIGNNSVSSLKNDDFTMRGLRCDGNADDIWTASQNPKSCGKSISIETANLREYARYVLRTICQQEWVGEHCLKEPERLCTDKELILDPVLSNMQAQKLLQLICYPHGIKECTEGDNLQRQHIKRILQNLEQWTLRQSWLELQLMIKQCLKDPGSGSVAEMNNLLDNIAKATIEVFQQSADLNNSSNSGMSLFNPNSIGSADTSSTRQNGIKTFLSSSERRGVWLVAPLIARLPTSVQGRVLKAAGEELEKGQHLGSSSKKERDRQKQKSMSLLSQQPFLSLVLTCLKGQDEQREGLLTSLQNQVNQILSNWREERYQDDIKARQMMHEALQLRLNLVGGMFDTVQRSTQWTTDWALLLLQIITSGTVDMHTNNELFTTVLDMLGVLINGTLASDLSNASPGGSEENKRAYMNLVKKLKKELGDKRSESIDKVRQLLPLPKQTCDVITCEPMGSLIDTKGNKIAGFDSIDKKQGLQVSTKQKVSPWDLFEGQKNPAPLSWAWFGTVRVDRRVIKYEEQHHLLLYHTHPMPKPRSYYLQPLPLPPEEEEEEPTSPVSQEPERKSAELSDQGKTTTDEEKKTKGRKRKTKSSSRVDEYPQSNIYRVPPNYSPISSQMMHHPQSTLWGYNLVGQPQQPGFFLQNQSLTPGGSRLDPAGSFVPTNTKQALSNMLQRRSGAMMQPPSLHAITSQQQLIQMKLLQQQQQQRLLRQAQTRPFQQGQPGDQAALFAAQARPSPQLPQYPGLQQAQTMPQGYTMYGTQMPLQQTSQQQAGSVVLSPSYNSRAYPAAHSNPVLMERLRQIQQQPSGYVQQQASPYLQPLTGSQRLNHQALQQSPLVGGGIDAVLTSAHPNLPSVPLPQDPMRPRQPQVRQQQRLLQMQQPQQPQPQQPPQPQQSSQSQSQTLGLQAMQPQQPLFPRQGLQQTQQQQQTAALVRQLQKQLSSNQPQQGVTPYGHPSHF

SEQ ID NO: 35455 - protein, 721 aa, Homo sapiens
MAAFGLLSYEQRPLKRPRLGPPDVYPQDPKQKEDELTAVNVKQGFNNQPAFTGDEHGSARNIVINPSKIGAYFSSILAEKLKLNTFQDTGKKKPQVNAKDNYWLVTARSQSAIHSWFSDLAGNKPLSILAKKVPILSKKEDVFAYLAKYSVPMVRATWLIKMTCAYYSAISEAKIKKRQAPDPNLEWTQISTRYLREQLAKISDFYHMASSTGDGPVPVPPEVEQAMKQWEYNEKLAFHMFQEGMLEKHEYLTWILDVLEKIRPMDDDLLKLLLPLMLQYSDEFVQSAYLSRRLAYFCARRLSLLLSDSPNLLAAHSPHMMIGPNNSSIGAPSPGPPGPGMSPVQLAFSDFLSCAQHGPLVYGLSCMLQTVTLCCPSALVWNYSTNENKSANPGSPLDLLQVAPSSLPMPGGNTAFNQQVRARIYEVEQQIKQRGRAVEVRWSFDKCQESTAGVTISRVLHTLEVLDRHCFDRTDSSNSMETLYHKIFWANQNKDNQEVAPNDEAVVTLLCEWAVSCKRSGKHRAMAVAKLLEKRQAEIEAERCGESEVLDEKESISSSSLAGSSLPVFQNVLLRFLDTQAPSLSDPNSECEKVEFVNLVLLFCEFIRHDVFSHDAYMCTLISRGDLSVTASTRPRSPVGENADEHYSKDHDVKMEIFSPMPGESCENANTSLGRRMSVNCEKLVKREKPRELIFPSNYDLLRHLQYATHFPIPLVSHCFS

SEQ ID NO: 35456 - protein, 756 aa, Homo sapiens
MAAFGLLSYEQRPLKRPRLGPPDVYPQDPKQKEDELTAVNVKQGFNNQPAFTGDEHGSARNIVINPSKIGAYFSSILAEKLKLNTFQDTGKKKPQVNAKDNYWLVTARSQSAIHSWFSDLAGNKPLSILAKKVPILSKKEDVFAYLAKYSVPMVRATWLIKMTCAYYSAISEAKIKKRQAPDPNLEWTQISTRYLREQLAKISDFYHMASSTGDGPVPVPPEVEQAMKQWEYNEKLAFHMFQEGMLEKHEYLTWILDVLEKIRPMDDDLLKLLLPLMLQYSDEFVQSAYLSRRLAYFCARRLSLLLSDSPNLLAAHSPHMMIGPNNSSIGAPSPGPPGPGMSPVQLAFSDFLSCAQHGPLVYGLSCMLQTVTLCCPSALVWNYSTNENKSANPGSPLDLLQVAPSSLPMPGGNTAFNQQVRARIYEVEQQIKQRGRAVEVRWSFDKCQESTAGVTISRVLHTLEVLDRHCFDRTDSSNSMETLYHKIFWANQNKDNQEVAPNDEAVVTLLCEWAVSCKRSGKHRAMAVAKLLEKRQAEIEAERCGESEVLDEKESISSSSLAGSSLPVFQNVLLRFLDTQAPSLSDPNSECEKVEFVNLVLLFCEFIRHDVFSHDAYMCTLISRGDLSVTASTRPRSPVGENADEHYSKDHDVKMEEQSIMAHMGIDSGTTNIFDEVDKSDFKTDFGSEFPIFSPMPGESCENANTSLGRRMSVNCEKLVKREKPRELIFPSNYDLLRHLQYATHFPIPLVSHCFS

SEQ ID NO: 35457 - protein, 2144 aa, Homo sapiens
MAAFGLLSYEQRPLKRPRLGPPDVYPQDPKQKEDELTAVNVKQGFNNQPAFTGDEHGSARNIVINPSKIGAYFSSILAEKLKLNTFQDTGKKKPQVNAKDNYWLVTARSQSAIHSWFSDLAGNKPLSILAKKVPILSKKEDVFAYLAKYSVPMVRATWLIKMTCAYYSAISEAKIKKRQAPDPNLEWTQISTRYLREQLAKISDFYHMASSTGDGPVPVPPEVEQAMKQWEYNEKLAFHMFQEGMLEKHEYLTWILDVLEKIRPMDDDLLKLLLPLMLQYSDEFVQSAYLSRRLAYFCARRLSLLLSDSPNLLAAHSPHMMIGPNNSSIGAPSPGPPGPGMSPVQLAFSDFLSCAQHGPLVYGLSCMLQTVTLCCPSALVWNYSTNENKSANPGSPLDLLQVAPSSLPMPGGNTAFNQQVRARIYEVEQQIKQRGRAVEVRWSFDKCQESTAGVTISRVLHTLEVLDRHCFDRTDSSNSMETLYHKIFWANQNKDNQEVAPNDEAVVTLLCEWAVSCKRSGKHRAMAVAKLLEKRQAEIEAERCGESEVLDEKESISSSSLAGSSLPVFQNVLLRFLDTQAPSLSDPNSECEKVEFVNLVLLFCEFIRHDVFSHDAYMCTLISRGDLSVTASTRPRSPVGENADEHYSKDHDVKMEIFSPMPGESCENANTSLGRRMSVNCEKLVKREKPRELIFPSNYDLLRHLQYATHFPIPLDESSSHECNQRTILLYGVGKERDEARHQLKKITKDILKILNKKSTTETGVGDEGQKARKNKQETFPTLETVFTKLQLLSYFDQHQVTSQISNNVLEQITSFASGTSYHLPLAHHIQLIFDLMEPALNINGLIDFAIQLLNELSVVEAELLLKSSSLAGSYTTGLCVCIVAVLRRYHSCLILNPDQTAQVFEGLCGVVKHVVNPSECSSPERCILAYLYDLYVSCSHLRSKFGDLFSACSKVKQTIYNNVMPANSNLRWDPDFMMDFIENPSARSINYSMLGKILSDNAANRYSFVCNTLMNVCMGHQDAGRINDIANFSSELTACCTVLSSEWLGVLKALCCSSNHVWGFNDVLCTVDVSDLSFHDSLATFIAILIARQCFSLEDVVQHVALPSLLAAACGDADAEPGARMTCRLLLHLFRAPQACFLPQATGKPFPGIRSSCDRHLLAAAHNSIEVGAVFAVLKAIMMLGDAKIGNNSVSSLKNDDFTMRGLRCDGNADDIWTASQNPKSCGKSISIETANLREYARYVLRTICQQEWVGEHCLKEPERLCTDKELILDPVLSNMQAQKLLQLICYPHGIKECTEGDNLQRQHIKRILQNLEQWTLRQSWLELQLMIKQCLKDPGSGSVAEMNNLLDNIAKATIEVFQQSADLNNSSNSGMSLFNPNSIGSADTSSTRQNGIKTFLSSSERRGVWLVAPLIARLPTSVQGRVLKAAGEELEKGQHLGSSSKKERDRQKQKSMSLLSQQPFLSLVLTCLKGQDEQREGLLTSLQNQVNQILSNWREERYQDDIKARQMMHEALQLRLNLVGGMFDTVQRSTQWTTDWALLLLQIITSGTVDMHTNNELFTTVLDMLGVLINGTLASDLSNASPGGSEENKRAYMNLVKKLKKELGDKRSESIDKVRQLLPLPKQTCDVITCEPMGSLIDTKGNKIAGFDSIDKKQGLQVSTKQKVSPWDLFEGQKNPAPLSWAWFGTVRVDRRVIKYEEQHHLLLYHTHPMPKPRSYYLQPLPLPPEEEEEEPTSPVSQEPERKSAELSDQGKTTTDEEKKTKGRKRKTKSSSRVDEYPQSNIYRVPPNYSPISSQMMHHPQSTLWGYNLVGQPQQPGFFLQNQSLTPGGSRLDPAGSFVPTNTKQALSNMLQRRSGAMMQPPSLHAITSQQQLIQMKLLQQQQQQRLLRQAQTRPFQQGQPGDQAALFAAQARPSPQLPQYPGLQQAQTMPQGYTMYGTQMPLQQTSQQQAGSVVLSPSYNSRAYPAAHSNPVLMERLRQIQQQPSGYVQQQASPYLQPLTGSQRLNHQALQQSPLVGGGIDAVLTSAHPNLPSVPLPQDPMRPRQPQVRQQQRLLQMQQPQQPQPQQPPQPQQSSQSQSQTLGLQAMQPQQPLFPRQGLQQTQQQQQTAALVRQLQKQLSSNQPQQGVTPYGHPSHF

SEQ ID NO: 35458 - protein, 400 aa, Homo sapiens
MLSNSQGQSPPVPFPAPAPPPQPPTPALPHPPAQPPPPPPQQFPQFHVKSGLQIKKNAIIDDYKVTSQVLGLGINGKVLQIFNKRTQEKFALKMLQDCPKARREVELHWRASQCPHIVRIVDVYENLYAGRKCLLIVMECLDGGELFSRIQDRGDQAFTEREASEIMKSIGEAIQYLHSINIAHRDVKPENLLYTSKRPNAILKLTDFGFAKETTSHNSLTTPCYTPYYVAPEVLGPEKYDKSCDMWSLGVIMYILLCGYPPFYSNHGLAISPGMKTRIRMGQYEFPNPEWSEVSEEVKMLIRNLLKTEPTQRMTITEFMNHPWIMQSTKVPQTPLHTSRVLKEDKERWEDVKEEMTSALATMRVDYEQIKIKKIEDASNPLLLKRRKKARALEAAALAH

SEQ ID NO: 35459 - protein, 370 aa, Homo sapiens
MLSNSQGQSPPVPFPAPAPPPQPPTPALPHPPAQPPPPPPQQFPQFHVKSGLQIKKNAIIDDYKVTSQVLGLGINGKVLQIFNKRTQEKFALKMLQDCPKARREVELHWRASQCPHIVRIVDVYENLYAGRKCLLIVMECLDGGELFSRIQDRGDQAFTEREASEIMKSIGEAIQYLHSINIAHRDVKPENLLYTSKRPNAILKLTDFGFAKETTSHNSLTTPCYTPYYVAPEVLGPEKYDKSCDMWSLGVIMYILLCGYPPFYSNHGLAISPGMKTRIRMGQYEFPNPEWSEVSEEVKMLIRNLLKTEPTQRMTITEFMNHPWIMQSTKVPQTPLHTSRVLKEDKERWEDVKGCLHDKNSDQATWLTRL

SEQ ID NO: 35460 - protein, 954 aa, Homo sapiens
MEEEEGAVAKEWGTTPAGPVWTAVFDYEAAGDEELTLRRGDRVQVLSQDCAVSGDEGWWTGQLPSGRVGVFPSNYVAPGAPAAPAGLQLPQEIPFHELQLEEIIGVGGFGKVYRALWRGEEVAVKAARLDPEKDPAVTAEQVCQEARLFGALQHPNIIALRGACLNPPHLCLVMEYARGGALSRVLAGRRVPPHVLVNWAVQVARGMNYLHNDAPVPIIHRDLKSINILILEAIENHNLADTVLKITDFGLAREWHKTTKMSAAGTYAWMAPEVIRLSLFSKSSDVWSFGVLLWELLTGEVPYREIDALAVAYGVAMNKLTLPIPSTCPEPFARLLEECWDPDPHGRPDFGSILKRLEVIEQSALFQMPLESFHSLQEDWKLEIQHMFDDLRTKEKELRSREEELLRAAQEQRFQEEQLRRREQELAEREMDIVERELHLLMCQLSQEKPRVRKRKGNFKRSRLLKLREGGSHISLPSGFEHKITVQASPTLDKRKGSDGASPPASPSIIPRLRAIRLTPVDCGGSSSGSSSGGSGTWSRGGPPKKEELVGGKKKGRTWGPSSTLQKERVGGEERLKGLGEGSKQWSSSAPNLGKSPKHTPIAPGFASLNEMEEFAEAEDGGSSVPPSPYSTPSYLSVPLPAEPSPGARAPWEPTPSAPPARWGHGARRRCDLALLGCATLLGAVGLGADVAEARAADGEEQRRWLDGLFFPRAGRFPRGLSPPARPHGRREDVGPGLGLAPSATLVSLSSVSDCNSTRSLLRSDSDEAAPAAPSPPPSPPAPTPTPSPSTNPLVDLELESFKKDPRQSLTPTHVTAACAVSRGHRRTPSDGALGQRGPPEPAGHGPGPRDLLDFPRLPDPQALFPARRRPPEFPGRPTTLTFAPRPRPAASRPRLDPWKLVSFGRTLTISPPSRPDTPESPGPPSVQPTLLDMDMEGQNQDSTVPLCGAHGSH

SEQ ID NO: 35461 - protein, 116 aa, Homo sapiens
MAGVLKKTTGLVGLAVCNTPHERLRILYTKILDVLEEIPKNAAYRKYTEQITNEKLAMVKAEPDVKKLEDQLQGGQLEEVILQAEHELNLARKMREWKLWEPLVEEPPADQWKWPI

SEQ ID NO: 35462 - protein, 116 aa, Homo sapiens
MPYRVGQTTGLVGLAVCNTPHERLRILYTKILDVLEEIPKNAAYRKYTEQITNEKLAMVKAEPDVKKLEDQLQGGQLEEVILQAEHELNLARKMREWKLWEPLVEEPPADQWKWPI

SEQ ID NO: 35463 - protein, 299 aa, Homo sapiens
MAELGLNEHHQNEVINYMRFARSKRGLRLKTVDSCFQDLKESRLVEDTFTIDEVSEVLNGLQAVVHSEVESELINTAYTNVLLLRQLFAQAEKWYLKLQTDISELENRELLEQVAEFEKAEITSSNKKPILDVTKPKLAPLNEGGTAELLNKEILRLQEENEKLKSRLKTIEIQATNALDEKSKLEKALQDLQLDQGNQKDFIKAQDLSNLENTVAALKSEFQKTLNDKTENQKSLEENLATAKHDLLRVQEQLHMAEKELEKKFQQTAAYRNMKEILTKKNDQIKDLRKRLAQYEPED

SEQ ID NO: 35464 - protein, 282 aa, Homo sapiens
MRFARSKRGLRLKTVDSCFQDLKESRLVEDTFTIDEVSEVLNGLQAVVHSEVESELINTAYTNVLLLRQLFAQAEKWYLKLQTDISELENRELLEQVAEFEKAEITSSNKKPILDVTKPKLAPLNEGGTAELLNKEILRLQEENEKLKSRLKTIEIQATNALDEKSKLEKALQDLQLDQGNQKDFIKAQDLSNLENTVAALKSEFQKTLNDKTENQKSLEENLATAKHDLLRVQEQLHMAEKELEKKFQQTAAYRNMKEILTKKNDQIKDLRKRLAQYEPED

SEQ ID NO: 35465 - protein, 256 aa, Homo sapiens
MRNQDPGKMGRQRKSIKLYPTHPLVTFPRSWAKFQEKALLVEDTFTIDEVSEVLNGLQAVVHSEVESELINTAYTNVLLLRQLFAQAEKWYLKLQTDISELENRELLEQVAEFEKAEITSSNKKPILDVTKPKLAPLNEGGTAELLNKEILRLQEENEKLKSRLKTIEIQATNALDEKSKLEKALQDLQLDQGNQKDFIKAQDLSNLENTVAALKSEFQKTLNDKTENQKSLEENLATAKHDLLRVQEQLHMAEKI

SEQ ID NO: 35466 - protein, 673 aa, Homo sapiens
MAKLETLPVRADPGRDPLLAFAPRPSELGPPDPRLAMGSVGSGVAHAQEFAMKSVGTRTGGGGSQGSFPGPRGSGSGASRERPGRYPSEDKGLANSLYLNGELRGSDHTDVCGNVVGSSGGSSSSGGSDKAPPQYREPSHPPKLLATSGKLDQCSEPLVRPSAFKPVVPKNFHSMQNLCPPQTNGTPEGRQGPGGLKGGLDKSRTMTPAGGSGSGLSDSGRNSLTSLPTYSSSYSQHLAPLSASTSHINRIGTASYGSGSGGSSGGGSGYQDLGTSDSGRASSKSGSSSSMGRPGHLGSGEGGGGGLPFAACSPPSPSALIQELEERLWEKEQEVAALRRSLEQSEAAVAQVLEERQKAWERELAELRQGCSGKLQQVARRAQRAQQGLQLQVLRLQQDKKQLQEEAARLMRQREELEDKVAACQKEQADFLPRIEETKWEVCQKAGEISLLKQQLKDSQADVSQKLSEIVGLRSQLREGRASLREKEEQLLSLRDSFSSKQASLELGEGELPAACLKPALTPVDPAEPQDALATCESDEAKMRRQAGVAAAASLVSVDGEAEAGGESGTRALRREVGRLQAELAAERRARERQGASFAEERRVWLEEKEKVIEYQKQLQLSYVEMYQRNQQLERRLRERGAAGGASTPTPQHGEEKKAWTPSRLERIESTEI

SEQ ID NO: 35467 - protein, 627 aa, Homo sapiens
MAKLETLPVRADPGRDPLLAFAPRPSELGPPDPRLAMGSVGSGVAHAQEFAMKSVGTRTGGGGSQGSFPGPRGSGSGASRERPGRYPSEDKGLANSLYLNGELRGSDHTDVCGNVVGSSGGSSSSGGSDKAPPQYREPSHPPKLLATSGKLDQCSEPLVRPSAFKPVVPKNFHSMQNLCPPQTNGTPEGRQGPGGLKGGLDKSRTMTPAGGSGSGLSDSGRNSLTSLPTYSSSYSQHLAPLSASTSHINRIGTASYGSGSGGSSGGGSGYQDLGTSDSGRASSKSGSSSSMGRPGHLGSGEGGGGGLPFAACSPPSPSALIQELEERLWEKEQEVAALRRSLEQSEAAVAQQDKKQLQEEAARLMRQREELEDKVAACQKEQADFLPRIEETKWEVCQKAGEISLLKQQLKDSQADVSQKLSEIVGLRSQLREGRASLREKEEQLLSLRDSFSSKQASLELGEGELPAACLKPALTPVDPAEPQDALATCESDEAKMRRQAGVAAAASLVSVDGEAEAGGESGTRALRREVGRLQAELAAERRARERQGASFAEERRVWLEEKEKVIEYQKQLQLSYVEMYQRNQQLERRLRERGAAGGASTPTPQHGEEKKAWTPSRLERIESTEI

SEQ ID NO: 35468 - protein, 710 aa, Homo sapiens
METRESEDLEKTRRKSASDQWNTDNEPAKVKPELLPEKEETSQADQDIQDKEPHCHIPIKRNSIFNRSIRRKSKAKARDNPERNASCLADSQDNGKSVNEPLTLNIPWSRMPPCRTAMQTDPGAQEMSESSSTPGNGATPEEWPALADSPTTLTEALRMIHPIPADSWRNLIEQIGLLYQEYRDKSTLQEIETRRQQDAEIEDNTNGSPASEDTPEEEEEEEEEEEPASPPERKTLPQICLLSNPHSRFNLWQDLPEIRSSGVLEILQPEEIKLQEAMFELVTSEASYYKSLNLLVSHFMENERIRKILHPSEAHILFSNVLDVLAVSERFLLELEHRMEENIVISDVCDIVYRYAADHFSVYITYVSNQTYQERTYKQLLQEKAAFRELIAQLELDPKCRGLPFSSFLILPFQRITRLKLLVQNILKRVEERSERECTALDAHKELEMVVKACNEGVRKMSRTEQMISIQKKMEFKIKSVPIISHSRWLLKQGELQQMSGPKTSRTLRTKKLFHEIYLFLFNDLLVICRQIPGDKYQVFDSAPRGLLRVEELEDQGQTLANVFILRLLENADDREATYMLKASSQSEMKRWMTSLAPNRRTKFVSFTSRLLDCPQVQCVHPYVAQQPDELTLELADILNILDKTDDGWIFGERLHDQERGWFPSSMTEEILNPKIRSQNLKECFRVHKMDDPQRSQNKDRRKLGSRNRQ

SEQ ID NO: 35469 - protein, 238 aa, Homo sapiens
MELLAAAFSAACAVDHDSSTSESDARDSAAGHLPGSESSSTPGNGATPEEWPALADSPTTLTEALRMIHPIPADSWRNLIEQIGLLYQEYRDKSTLQEIETRRQQDAEIEDNTNGSPASEDTPEEEEEEEEEEEPASPPERKTLPQICLLSNPHSRFNLWQDLPEIRSSGVLEILQPEEIKLQEAMFELVTSEASYYKSLNLLVSHFMENERIRKILHPSEAHILFSNVLDVLAVSER

SEQ ID NO: 35470 - protein, 618 aa, Homo sapiens
MELLAAAFSAACAVDHDSSTSESDARDSAAGHLPGSESSSTPGNGATPEEWPALADSPTTLTEALRMIHPIPADSWRNLIEQIGLLYQEYRDKSTLQEIETRRQQDAEIEDNTNGSPASEDTPEEEEEEEEEEEPASPPERKTLPQICLLSNPHSRFNLWQDLPEIRSSGVLEILQPEEIKLQEAMFELVTSEASYYKSLNLLVSHFMENERIRKILHPSEAHILFSNVLDVLAVSERFLLELEHRMEENIVISDVCDIVYRYAADHFSVYITYVSNQTYQERTYKQLLQEKAAFRELIAQLELDPKCRGLPFSSFLILPFQRITRLKLLVQNILKRVEERSERECTALDAHKELEMVVKACNEGVRKMSRTEQMISIQKKMEFKIKSVPIISHSRWLLKQGELQQMSGPKTSRTLRTKKLFHEIYLFLFNDLLVICRQIPGDKYQVFDSAPRGLLRVEELEDQGQTLANVFILRLLENADDREATYMLKASSQSEMKRWMTSLAPNRRTKFVSFTSRLLDCPQVQCVHPYVAQQPDELTLELADILNILDKTDDGWIFGERLHDQERGWFPSSMTEEILNPKIRSQNLKECFRVHKMDDPQRSQNKDRRKLGSRNRQ

SEQ ID NO: 35471 - protein, 947 aa, Homo sapiens
MAVMEMACPGAPGSAVGQQKELPKAKEKTPPLGKKQSSVYKLEAVEKSPVFCGKWEILNDVITKGTAKEGSEAGPAAISIIAQAECENSQEFSPTFSERIFIAGSKQYSQSESLDQIPNNVAHATEGKMARVCWKGKRRSKARKKRKKKSSKSLAHAGVALAKPLPRTPEQESCTIPVQEDESPLGAPYVRNTPQFTKPLKEPGLGQLCFKQLGEGLRPALPRSELHKLISPLQCLNHVWKLHHPQDGGPLPLPTHPFPYSRLPHPFPFHPLQPWKPHPLESFLGKLACVDSQKPLPDPHLSKLACVDSPKPLPGPHLEPSCLSRGAHEKFSVEEYLVHALQGSVSSGQAHSLTSLAKTWAARGSRSREPSPKTEDNEGVLLTEKLKPVDYEYREEVHWATHQLRLGRGSFGEVHRMEDKQTGFQCAVKKVRLEVFRAEELMACAGLTSPRIVPLYGAVREGPWVNIFMELLEGGSLGQLVKEQGCLPEDRALYYLGQALEGLEYLHSRRILHGDVKADNVLLSSDGSHAALCDFGHAVCLQPDGLGKSLLTGDYIPGTETHMAPEVVLGRSCDAKVDVWSSCCMMLHMLNGCHPWTQFFRGPLCLKIASEPPPVREIPPSCAPLTAQAIQEGLRKEPIHRVSAAELGGKVNRALQQVGGLKSPWRGEYKEPRHPPPNQANYHQTLHAQPRELSPRAPGPRPAEETTGRAPKLQPPLPPEPPEPNKSPPLTLSKEESGMWEPLPLSSLEPAPARNPSSPERKATVPEQELQQLEIELFLNSLSQPFSLEEQEQILSCLSIDSLSLSDDSEKNPSKASQSSRDTLSSGVHSWSSQAEARSSSWNMVLARGRPTDTPSYFNGVKVQIQSLNGEHLHIREFHRVKVGDIATGISSQIPAAAFSLVTKDGQPVRYDMEVPDSGIDLQCTLAPDGSFAWSWRVKHGQLENRP

SEQ ID NO: 35472 - protein, 619 aa, Homo sapiens
MDDQQALNSIMQDLAVLHKASRPALSLQETRKAKSSSPKKQNDVRVKFEHRGEKRILQFPRPVKLEDLRSKAKIAFGQSMDLHYTNNELVIPLTTQDDLDKAVELLDRSIHMKSLKILLVINGSTQATNLEPLPSLEDLDNTVFGAERKKRLSIIGPTSRDRSSPPPGYIPDELHQVARNGSFTSINSEGEFIPESMDQMLDPLSLSSPENSGSGSCPSLDSPLDGESYPKSRMPRAQSYPDNHQEFSDYDNPIFEKFGKGGTYPRRYHVSYHHQEYNDGRKTFPRARRTQGTSLRSPVSFSPTDHSLSTSSGSSIFTPEYDDSRIRRRGSDIDNPTLTVMDISPPSRSPRAPTNWRLGKLLGQGAFGRVYLCYDVDTGRELAVKQVQFDPDSPETSKEVNALECEIQLLKNLLHERIVQYYGCLRDPQEKTLSIFMEYMPGGSIKDQLKAYGALTENVTRKYTRQILEGVHYLHSNMIVHRDIKGANILRDSTGNVKLGDFGASKRLQTICLSGTGMKSVTGTPYWMSPEVISGEGYGRKADIWSVACTVVEMLTEKPPWAEFEAMAAIFKIATQPTNPKLPPHVSDYTRDFLKRIFVEAKLRPSADELLRHMFVHYH

SEQ ID NO: 35473 - protein, 144 aa, Homo sapiens
MAASKVKQDMPPPGGYGPIDYKRNLPRRGLSGYSMLAIGIGTLIYGHWSIMKWNRERRRLQIEDFEARIALLPLLQAETDRRTLQMLRENLEEEAIIMKDVPDWKVGESVFHTTRWVPPLIGELYGLRTTEEALHASHGFMWYT

SEQ ID NO: 35474 - protein, 222 aa, Homo sapiens
MAASKVKQDMPPPGGYGPIDYKRNLPRRGLSGYSMLAIGIGTLIYGHWSIMKWNRERRRLQIEDFEARIALLPLLQAETDRRTLQMLRENLEEEAIIMKDVPDWKVGESVFHTTRWVPPLIGELYGLRTTEEALHASHGFMWALELQPPLADMGRAELSSNATTSLVQRRKQAWGRQSWLEQIWNAGPVCQRLHRGGSRPGAGAAGGLSLWAAAARGAVRSC

SEQ ID NO: 35475 - protein, 281 aa, Homo sapiens
MAVNVYSTSVTSENLSRHDMLAWVNDSLHLNYTKIEQLCSGAAYCQFMDMLFPGCVHLRKVKFQAKLEHEYIHNFKVLQAAFKKMGVDKIIPVEKLVKGKFQDNFEFIQWFKKFFDANYDGKDYNPLLARQGQDVAPPPNPGDQIFNKSKKLIGTAVPQRTSPTGPKNMQTSGRLSNVAPPCILRKNPPSARNGGHETDAQILELNQQLVDLKLTVDGLEKERDFYFSKLRDIELICQEHESENSPVISGIIGILYATEEGFAPPEDDEIEEHQQEDQDEY

SEQ ID NO: 35476 - protein, 266 aa, Homo sapiens
MAVNVYSTSVTSENLSRHDMLAWVNDSLHLNYTKIEQLCSGAAYCQFMDMLFPGCVHLRKVKFQAKLEHEYIHNFKVLQAAFKKMGVDKIIPVEKLVKGKFQDNFEFIQWFKKFFDANYDGKDYNPLLARQGQDVAPPPNPVPQRTSPTGPKNMQTSGRLSNVAPPCILRKNPPSARNGGHETDAQILELNQQLVDLKLTVDGLEKERDFYFSKLRDIELICQEHESENSPVISGIIGILYATEEGFAPPEDDEIEEHQQEDQDEY

SEQ ID NO: 35477 - protein, 1036 aa, Homo sapiens
MALRGAAGATDTPVSSAGGAPGGSASSSSTSSGGSASAGAGLWAALYDYEARGEDELSLRRGQLVEVLSQDAAVSGDEGWWAGQVQRRLGIFPANYVAPCRPAASPAPPPSRPSSPVHVAFERLELKELIGAGGFGQVYRATWQGQEVAVKAARQDPEQDAAAAAESVRREARLFAMLRHPNIIELRGVCLQQPHLCLVLEFARGGALNRALAAANAAPDPRAPGPRRARRIPPHVLVNWAVQIARGMLYLHEEAFVPILHRDLKSSNILLLEKIEHDDICNKTLKITDFGLAREWHRTTKMSTAGTYAWMAPEVIKSSLFSKGSDIWSYGVLLWELLTGEVPYRGIDGLAVAYGVAVNKLTLPIPSTCPEPFAKLMKECWQQDPHIRPSFALILEQLTAIEGAVMTEMPQESFHSMQDDWKLEIQQMFDELRTKEKELRSREEELTRAALQQKSQEELLKRREQQLAEREIDVLERELNILIFQLNQEKPKVKKRKGKFKRSRLKLKDGHRISLPSDFQHKITVQASPNLDKRRSLNSSSSSPPSSPTMMPRLRAIQLTSDESNKTWGRNTVFRQEEFEDVKRNFKKKGCTWGPNSIQMKDRTDCKERIRPLSDGNSPWSTILIKNQKTMPLASLFVDQPGSCEEPKLSPDGLEHRKPKQIKLPSQAYIDLPLGKDAQRENPAEAESWEEAASANAATVSIEMTPTNSLSRSPQRKKTESALYGCTVLLASVALGLDLRELHKAQAAEEPLPKEEKKKREGIFQRASKSRRSASPPTSLPSTCGEASSPPSLPLSSALGILSTPSFSTKCLLQMDSEDPLVDSAPVTCDSEMLTPDFCPTAPGSGREPALMPRLDTDCSVSRNLPSSFLQQTCGNVPYCASSKHRPSHHRRTMSDGNPTPTGATIISATGASALPLCPSPAPHSHLPREVSPKKHSTVHIVPQRRPASLRSRSDLPQAYPQTAVSQLAQTACVVGRPGPHPTQFLAAKERTKSHVPSLLDADVEGQSRDYTVPLCRMRSKTSRPSIYELEKEFLS

SEQ ID NO: 35478 - protein, 570 aa, Homo sapiens
MALRGAAGATDTPVSSAGGAPGGSASSSSTSSGGSASAGAGLWAALYDYEARGEDELSLRRGQLVEVLSQDAAVSGDEGWWAGQVQRRLGIFPANYVAPCRPAASPAPPPSRPSSPVHVAFERLELKELIGAGGFGQVYRATWQGQEVAVKAARQDPEQDAAAAAESVRREARLFAMLRHPNIIELRGVCLQQPHLCLVLEFARGGALNRALAAANAAPDPRAPGPRRARRIPPHVLVNWAVQIARGMLYLHEEAFVPILHRDLKSSNILLLEKIEHDDICNKTLKITDFGLAREWHRTTKMSTAGTYAWMAPEVIKSSLFSKGSDIWSYGVLLWELLTGEVPYRGIDGLAVAYGVAVNKLTLPIPSTCPEPFAKLMKECWQQDPHIRPSFALILEQLTAIEGAVMTEMPQESFHSMQDDWKLEIQQMFDELRTKEKELRSREEELTRAALQQKSQEELLKRREQQLAEREIDVLERELNILIFQLNQEKPKVKKRKGKFKRSRLKLKDGHRISLPSDFQHKITVQASPNLDKRRSLNSSSSSPPSSPTMMPRLRAIQCELSALPRGLLC

SEQ ID NO: 35479 - protein, 482 aa, Homo sapiens
MFFLVTSDESNKTWGRNTVFRQEEFEDVKRNFKKKGCTWGPNSIQMKDRTDCKERIRPLSDGNSPWSTILIKNQKTMPLASLFVDQPGSCEEPKLSPDGLEHRKPKQIKLPSQAYIDLPLGKDAQRENPAEAESWEEAASANAATVSIEMTPTNSLSRSPQRKKTESALYGCTVLLASVALGLDLRELHKAQAAEEPLPKEEKKKREGIFQRASKSRRSASPPTSLPSTCGEASSPPSLPLSSALGILSTPSFSTKCLLQMDSEDPLVDSAPVTCDSEMLTPDFCPTAPGSGREPALMPRLDTDCSVSRNLPSSFLQQTCGNVPYCASSKHRPSHHRRTMSDGNPTPTGATIISATGASALPLCPSPAPHSHLPREVSPKKHSTVHIVPQRRPASLRSRSDLPQAYPQTAVSQLAQTACVVGRPGPHPTQFLAAKERTKSHVPSLLDADVEGQSRDYTVPLCRMRSKTSRPSIYELEKEFLS

SEQ ID NO: 35480 - protein, 113 aa, Homo sapiens
MAWALLLLTLLTQDTGSWAQSALTQPASVSGSPGQSITISCTGTSSDVGSYNLVSWYQQHPGKAPKLMIYEGSKRPSGVSNRFSGSKSGNTASLTISGLQAEDEADYYCCSYA

SEQ ID NO: 35481 - protein, 118 aa, Homo sapiens
MAWALLLLTLLTQGTGSWAQSALTQPPFVSGAPGQSVTISCTGTSSDVGDYDHVFWYQKRLSTTSRLLIYNVNTRPSGISDLFSGSKSGNMASLTISGLKSEVEANYHCSLYSSSYTF

SEQ ID NO: 35482 - protein, 235 aa, Homo sapiens
MGSTESSEGRRVSFGVDEEERVRVLQGVRLSENVVNRMKEPSSPPPAPTSSTFGLQDGNLRAPHKESTLPRSGSSGGQQPSGMKEGVKRYEQEHAAIQDKLFQVAKREREAATKHSKASLPTGEGSISHEEQKSVRLARELESREAELRRRDTFYKEQLERIERKNAEMYKLSSEQFHEAASKMESTIKPRRVEPVCSGLQAQILHCYRDRPHEVLLCSDLVKAYQRCVSAAHKG

SEQ ID NO: 35483 - protein, 227 aa, Homo sapiens
MGGTTSTRRVTFEADENENITVVKGIRLSENVIDRMKESSPSGSKSQRYSGAYGASVSDEELKRRVAEELALEQAKKESEDQKRLKQAKELDRERAAANEQLTRAILRERICSEEERAKAKHLARQLEEKDRVLKKQDAFYKEQLARLEERSSEFYRVTTEQYQKAAEEVEAKFKRYESHPVCADLQAKILQCYRENTHQTLKCSALATQYMHCVNHAKQSMLEKGG

SEQ ID NO: 35484 - protein, 318 aa, Homo sapiens
MPMANLLLLIVPILIAMAFLMLTERKILGYMQLRKGPNVVGPYGLLQPFADAMKLFTKEPLKPATSTITLYITAPTLALTIALLLWTPLPMPNPLVNLNLGLLFILATSSLAVYSILWSGWASNSNYALIGALRAVAQTISYEVTLAIILLSTLLMSGSFNLSTLITTQEHLWLLLPSWPLAMMWFISTLAETNRTPFDLAEGESELVSGFNIEYAAGPFALFFMAEYTNIIMMNTLTTTIFLGTTYDALSPELYTTYFVTKTLLLTSLFLWIRTAYPRFRYDQLMHLLWKNFLPLTLALLMWYVSMPITISSIPPQT

SEQ ID NO: 35485 - protein, 320 aa, Homo sapiens
MEEVPHDCPGADSAQAGRGASCQGCPNQRLCASGAGATPDTAIEEIKEKMKTVKHKILVLSGKGGVGKSTFSAHLAHGLAEDENTQIALLDIDICGPSIPKIMGLEGEQVHQSGSGWSPVYVEDNLGVMSVGFLLSSPDDAVIWRGPKKNGMIKQFLRDVDWGEVDYLIVDTPPGTSDEHLSVVRYLATAHIDGAVIITTPQEVSLQDVRKEINFCRKVKLPIIGVVENMSGFICPKCKKESQIFPPTTGGAELMCQDLEVPLLGRVPLDPLIGKNCDKGQSFFIDAPDSPATLAYRSIIQRIQEFCNLHQSKEENLISS

SEQ ID NO: 35486 - protein, 309 aa, Homo sapiens
MEEVPHDCPGADSAQAGRGASCQGCPNQRLCASGAGATPDTAIEEIKEKMKTVKHKILVLSGKGGVGKSTFSAHLAHGLAEDENTQIALLDIDICGPSIPKIMGLEGEQYVEDNLGVMSVGFLLSSPDDAVIWRGPKKNGMIKQFLRDVDWGEVDYLIVDTPPGTSDEHLSVVRYLATAHIDGAVIITTPQEVSLQDVRKEINFCRKVKLPIIGVVENMSGFICPKCKKESQIFPPTTGGAELMCQDLEVPLLGRVPLDPLIGKNCDKGQSFFIDAPDSPATLAYRSIIQRIQEFCNLHQSKEENLISS

SEQ ID NO: 35487 - protein, 1151 aa, Homo sapiens
MLRRVTVAAVCATRRKLCEAGRELAALWGIETRGRCEDSAAARPFPILAMPGRNKAKSTCSCPDLQPNGQDLGENSRVARLGADESEEEGRRGSLSNAGDPEIVKSPSDPKQYRYIKLQNGLQALLISDLSNMEGKTGNTTDDEEEEEVEEEEEDDDEDSGAEIEDDDEEGFDDEDEFDDEHDDDLDTEDNELEELEERAEARKKTTEKQSAAALCVGVGSFADPDDLPGLAHFLEHMVFMGSLKYPDENGFDAFLKKHGGSDNASTDCERTVFQFDVQRKYFKEALDRWAQFFIHPLMIRDAIDREVEAVDSEYQLARPSDANRKEMLFGSLARPGHPMGKFFWGNAETLKHEPRKNNIDTHARLREFWMRYYSSHYMTLVVQSKETLDTLEKWVTEIFSQIPNNGLPRPNFGHLTDPFDTPAFNKLYRVVPIRKIHALTITWALPPQQQHYRVKPLHYISWLVGHEGKGSILSFLRKKCWALALFGGNGETGFEQNSTYSVFSISITLTDEGYEHFYEVAYTVFQYLKMLQKLGPEKRIFEEIRKIEDNEFHYQEQTDPVEYVENMCENMQLYPLQDILTGDQLLFEYKPEVIGEALNQLVPQKANLVLLSGANEGKCDLKEKWFGTQYSIEDIENSWAELWNSNFELNPDLHLPAENKYIATDFTLKAFDCPETEYPVKIVNTPQGCLWYKKDNKFKIPKAYIRFHLISPLIQKSAANVVLFDIFVNILTHNLAEPAYEADVAQLEYKLVAGEHGLIIRVKGFNHKLPLLFQLIIDYLAEFNSTPAVFTMITEQLKKTYFNILIKPETLAKDVRLLILEYARWSMIDKYQALMDGLSLESLLSFVKEFKSQLFVEGLVQGNVTSTESMDFLKYVVDKLNFKPLEQEMPVQFQVVELPSGHHLCKVKALNKGDANSEVTVYYQSGTRSLREYTLMELLVMHMEEPCFDFLRTKQTLGYHVYPTCRNTSGILGFSVTVGTQATKYNSEVVDKKIEEFLSSFEEKIENLTEEAFNTQVTALIKLKECEDTHLGEEVDRNWNEVVTQQYLFDRLAHEIEALKSFSKSDLVNWFKAHRGPGSKMLSVHVVGYGKYELEEDGTPSSEDSNSSCEVMQLTYLPTSPLLADCIIPITDIRAFTTTLNLLPYHKIVK

SEQ ID NO: 35488 - protein, 1219 aa, Homo sapiens
MLRRVTVAAVCATRRKLCEAGRELAALWGIETRGRCEDSAAARPFPILAMPGRNKAKSTCSCPDLQPNGQDLGENSRVARLGADESEEEGRRGSLSNAGDPEIVKSPSDPKQYRYIKLQNGLQALLISDLSNMEGKTGNTTDDEEEEEVEEEEEDDDEDSGAEIEDDDEEGFDDEDEFDDEHDDDLDTEDNELEELEERAEARKKTTEKQQLQSLFLLWSKLTDRLWFKSTYSKMSSTLLVETRNLYGVVGAESRSAPVQHLAGWQAEEQQGETDTVLSAAALCVGVGSFADPDDLPGLAHFLEHMVFMGSLKYPDENGFDAFLKKHGGSDNASTDCERTVFQFDVQRKYFKEALDRWAQFFIHPLMIRDAIDREVEAVDSEYQLARPSDANRKEMLFGSLARPGHPMGKFFWGNAETLKHEPRKNNIDTHARLREFWMRYYSSHYMTLVVQSKETLDTLEKWVTEIFSQIPNNGLPRPNFGHLTDPFDTPAFNKLYRVVPIRKIHALTITWALPPQQQHYRVKPLHYISWLVGHEGKGSILSFLRKKCWALALFGGNGETGFEQNSTYSVFSISITLTDEGYEHFYEVAYTVFQYLKMLQKLGPEKRIFEEIRKIEDNEFHYQEQTDPVEYVENMCENMQLYPLQDILTGDQLLFEYKPEVIGEALNQLVPQKANLVLLSGANEGKCDLKEKWFGTQYSIEDIENSWAELWNSNFELNPDLHLPAENKYIATDFTLKAFDCPETEYPVKIVNTPQGCLWYKKDNKFKIPKAYIRFHLISPLIQKSAANVVLFDIFVNILTHNLAEPAYEADVAQLEYKLVAGEHGLIIRVKGFNHKLPLLFQLIIDYLAEFNSTPAVFTMITEQLKKTYFNILIKPETLAKDVRLLILEYARWSMIDKYQALMDGLSLESLLSFVKEFKSQLFVEGLVQGNVTSTESMDFLKYVVDKLNFKPLEQEMPVQFQVVELPSGHHLCKVKALNKGDANSEVTVYYQSGTRSLREYTLMELLVMHMEEPCFDFLRTKQTLGYHVYPTCRNTSGILGFSVTVGTQATKYNSEVVDKKIEEFLSSFEEKIENLTEEAFNTQVTALIKLKECEDTHLGEEVDRNWNEVVTQQYLFDRLAHEIEALKSFSKSDLVNWFKAHRGPGSKMLSVHVVGYGKYELEEDGTPSSEDSNSSCEVMQLTYLPTSPLLADCIIPITDIRAFTTTLNLLPYHKIVK

SEQ ID NO: 35489 - protein, 1164 aa, Homo sapiens
MALFPAFAGLSEAPDGGSSRKELDWLSNPSFCVGSITSLSQQTEAAPAHVSEGLPLTRSHLKSESSDESDTNKKLKQTSRKKKKEKKKKRKHQHHKKTKRKHGPSSSSRSETDTDSEKDKPSRGVGGSKKESEEPNQGNNAAADTGHRFVWLEDIQAVTGETFRTDKKPDPANWEYKSLYRGDIARYKRKGDSCLGINPKKQCISWEGTSTEKKHSRKQVERYFTKKSVGLMNIDGVAISSKTEPPSSEPISFIPVKDLEDAAPVTTWLNPLGIYDQSTTHWLQGQGPPEQESKQPDAQPDSESAALKAKVEEFNRRVRENPRDTQLWMAFVAFQDEVMKSPGLYAIEEGEQEKRKRSLKLILEKKLAILERAIESNQSSVDLKLAKLKLCTEFWEPSTLVKEWQKLIFLHPNNTALWQKYLLFCQSQFSTFSISKIHSLYGKCLSTLSAVKDGSILSHPALPGTEEAMFALFLQQCHFLRQAGHSEKAISLFQAMVDFTFFKPDSVKDLPTKGQVEFFEPFWDSGEPRAGEKGARGWKAWMHQQERGGWVVINPDEDDDEPEEDDQEIKDKTLPRWQIWLAAERSRDQRHWRPWRPDKTKKQTEEDCEDPERQVLFDDIGQSLIRLSSHDLQFQLVEAFLQFLGVPSGFTPPASCLYLAMDENSIFDNGLYDEKPLTFFNPLFSGASCVGRMDRLGYPRWTRGQNREGEEFIRNVFHLVMPLFSGKEKSQLCFSWLQYEIAKVIWCLHTKNKKRLKSQGKNCKKLAKNLLKEPENCNNFCLWKQYAHLEWLLGNTEDARKVFDTALGMAGSRELKDSDLCELSLLYAELEVELSPEVRRAATARAVHILTKLTESSPYGPYTGQVLAVHILKARKAYEHALQDCLGDSCVSNPAPTDSCSRLISLAKCFMLFQYLTIGIDAAVQIYEQVFAKLNSSVFPEGSGEGDSASSQSWTSVLEAITLMHTSLLRFHMKVSVYPLAPLREALSQALKLYPGNQVLWRSYVQIQNKSHSASKTRRFFDTITRSAKPLEPWLFAIEAEKLRKRLVETVQRLDGREIHATIPETGLMHRIQALFENAMRSDSGSQCPLLWRMYLNFLVSLGNKERSKGVFYKALQNCPWAKVLYLDAVEYFPDEMQEILDLMTEKELRVRLPLEELELLLED

SEQ ID NO: 35490 - protein, 271 aa, Homo sapiens
MEAAAEPGNLAGVRHIILVLSGKGGVGKSTISTELALALRHAGKKVGILDVDLCGPSIPRMLGAQGRAVHQCDRGWAPVFLDREQSISLMSVGFLLEKPDEAVVWRGPKKNALIKQFVSDVAWGELDYLVVDTPPGTSDEHMATIEALRPYQPLGALVVTTPQAVSVGDVRRELTFCRKTGLRVMGIVENMSGFTCPHCTECTSVFSRGGGEELAQLAGVPFLGSVPLDPALMRTLEEGHDFIQEFPGSPAFAALTSIAQKILDATPACLP

SEQ ID NO: 35491 - protein, 319 aa, Homo sapiens
MGIWQRLLLFGGVSLRAGGGATAPLGGSRAMVCGRQLSGAGSETLKQRRTQIMSRGLPKQKPIEGVKQVIVVASGKGGVGKSTTAVNLALALAANDSSKAIGLLDVDVYGPSVPKMMNLKGNPELSQSNLMRPLLNYGIACMSMGFLVEESEPVVWRGLMVMSAIEKLLRQVDWGQLDYLVVDMPPGTGDVQLSVSQNIPITGAVIVSTPQDIALMDAHKGAEMFRRVHVPVLGLVQNMSVFQCPKCKHKTHIFGADGARKLAQTLGLEVLGDIPLHLNIREASDTGQPIVFSQPESDEAKAYLRIAVEVVRRLPSPSE

SEQ ID NO: 35492 - protein, 173 aa, Homo sapiens
MGIWQRLLLFGGVSLRAGGGATAPLGGSRAMVCGRQLSGAGSETLKQRRTQIMSRGLPKQKPIEGVKQVIVVASGKGGVGKSTTAVNLALALAANDSSKAIGLLDVDVYGPSVPKMMNLKGNPELSQSNLMRPLLNYGIACMSMGFLVEESEPVVWRGLMVMSAIEKLLRQVL

SEQ ID NO: 35493 - protein, 518 aa, Homo sapiens
MAGLRNESEQEPLLGDTPGSREWDILETEEHYKSRWRSIRILYLTMFLSSVGFSVVMMSIWPYLQKIDPTADTSFLGWVIASYSLGQMVASPIFGLWSNYRPRKEPLIVSILISVAANCLYAYLHIPASHNKYYMLVARGLLGIGAGNVAVVRSYTAGATSLQERTSSMANISMCQALGFILGPVFQTCFTFLGEKGVTWDVIKLQINMYTTPVLLSAFLGILNIILILAILREHRVDDSGRQCKSINFEEASTDEAQVPQGNIDQVAVVAINVLFFVTLFIFALFETIITPLTMDMYAWTQEQAVLYNGIILAALGVEAVVIFLGVKLLSKKIGERAILLGGLIVVWVGFFILLPWGNQFPKIQWEDLHNNSIPNTTFGEIIIGLWKSPMEDDNERPTGCSIEQAWCLYTPVIHLAQFLTSAVLIGLGYPVCNLMSYTLYSKILGPKPQGVYMGWLTASGSGARILGPMFISQVYAHWGPRWAFSLVCGIIVLTITLLGVVYKRLIALSVRYGRIQE

SEQ ID NO: 35494 - protein, 153 aa, Homo sapiens
MFLSSVGFSVVMMSIWPYLQKIDPTADTSFLGWVIASYSLGQMVASPIFGLWSNYRPRKEPLIVSILISVAANCLYAYLHIPASHNKYYMLVARGLLGIGAVFQTCFTFLGEKGVTWDVIKLQINMYTTPVLLSAFLGILNIILILAILSKYR

SEQ ID NO: 35495 - protein, 1124 aa, Homo sapiens
MGENEDEKQAQAGQVFENFVQASTCKGTLQAFNILTRHLDLDPLDHRNFYSKLKSKVTTWKAKALWYKLDKRGSHKEYKRGKSCTNTKCLIVGGGPCGLRTAIELAYLGAKVVVVEKRDSFSRNNVLHLWPFTIHDLRGLGAKKFYGKFCAGSIDHISIRQLQLILFKVALMLGVEIHVNVEFVKVLEPPEDQENQKIGWRAEFLPTDHSLSEFEFDVIIGADGRRNTLEGFRRKEFRGKLAIAITANFINRNSTAEAKVEEISGVAFIFNQKFFQDLKEETGIDLENIVYYKDCTHYFVMTAKKQSLLDKGVIINDYIDTEMLLCAENVNQDNLLSYAREAADFATNYQLPSLDFAMNHYGQPDVAMFDFTCMYASENAALVRERQAHQLLVALVGDSLLEPFWPMGTGCARGFLAAFDTAWMVKSWNQGTPPLELLAERESLYRLLPQTTPENINKNFEQYTLDPGTRYPNLNSHCVRPHQVKHLYITKELEHYPLERLGSVRRSVNLSRKESDIRPSKLLTWCQQQTEGYQHVNVTDLTTSWRSGLALCAIIHRFRPELINFDSLNEDDAVENNQLAFDVAEREFGIPPVTTGKEMASAQEPDKLSMVMYLSKFYELFRGTPLRPVDSWRKNYGENADLSLAKSSISNNYLNLTFPRKRTPRVDGQTGENDMNKRRRKGFTNLDEPSNFSSRSLGSNQECGSSKEGGNQNKVKSMANQLLAKFEESTRNPSLMKQERRVSGIGKPVLCSSSGPPVHSCCPKPEEATPSPSPPLKRQFPSVVVTGHVLRELKQVSAGSECLSRPWRARAKSDLQLGGTENFATLPSTRPRAQALSGVLWRLQQVEEKILQKRAQNLANREFHTKNIKEKAAHLASMFGHGDFPQNKLLSKGLSHTHPPSPPSRLPSPDPAASSSPSTVDSASPARKEKKSPSGFHFHPSHLRTVHPQLTVGKVSSGIGAAAEVLVNLYMNDHRPKAQATSPDLESMRKSFPLNLGGSDTCYFCKKRVYVMERLSAEGHFFHRECFRCSICATTLRLAAYTFDCDEGKFYCKPHFIHCKTNSKQRKRRAELKQQREEEATWQEQEAPRRDTPTESSCAVAAIGTLEGSPPVHFSLPVLHPLLG

SEQ ID NO: 35496 - protein, 784 aa, Homo sapiens
MLGVEIHVNVEFVKVLEPPEDQENQKIGWRAEFLPTDHSLSEFEFDVIIGADGRRNTLEGFRRKEFRGKLAIAITANFINRNSTAEAKVEEISGVAFIFNQKFFQDLKEETGIDLENIVYYKDCTHYFVMTAKKQSLLDKGVIINDYIDTEMLLCAENVNQDNLLSYAREAADFATNYQLPSLDFAMNHYGQPDVAMFDFTCMYASENAALVRERQAHQLLVALVGDSLLEPFWPMGTGCARGFLAAFDTAWMVKSWNQGTPPLELLAERESLYRLLPQTTPENINKNFEQYTLDPGTRYPNLNSHCVRPHQVKHLYITKELEHYPLERLGSVRRSVNLSRKESDIRPSKLLTWCQQQTEGYQHVNVTDLTTSWRSGLALCAIIHRFRPELINFDSLNEDDAVENNQLAFDVAEREFGIPPVTTGKEMASAQEPDKLSMVMYLSKFYELFRGTPLRPVDSWRKNYGENADLSLAKSSISNNYLNLTFPRKRTPRVDGQTGENDMNKRRRKGFTNLDEPSNFSSRSLGSNQECGSSKEGGNQNKVKSMANQLLAKFEESTRNPSLMKQESMRKSFPLNLGGSDTCYFCKKRVYVMERLSAEGHFFHRECFRCSICATTLRLAAYTFDCDEGKFYCKPHFIHCKTNSKQRKRRAELKQQREEEATWQEQEAPRRDTPTESSCAVAAIGTLEGSPPGISTSFFRKVLGWPLRLPRDLCNWMQGLLQAAGLHIRDNAYNYCYMYELLSLGLPLLWAFSEVLAAMYRESEGSLESICNWVLRCFPVKLR

SEQ ID NO: 35497 - protein, 1103 aa, Homo sapiens
MGENEDEKQAQAGQVFENFVQASTCKGTLQAFNILTRHLDLDPLDHRNFYSKLKSKVTTWKAKALWYKLDKRGSHKEYKRGKSCTNTKCLIVGGGPCGLRTAIELAYLGAKVVVVEKRDSFSRNNVLHLWPFTIHDLRGLGAKKFYGKFCAGSIDHISIRQLQLILFKVALMLGVEIHVNVEFVKVLEPPEDQENQKIGWRAEFLPTDHSLSEFEFDVIIGADGRRNTLEGFRRKEFRGKLAIAITANFINRNSTAEAKVEEISGVAFIFNQKFFQDLKEETGIDLENIVYYKDCTHYFVMTAKKQSLLDKGVIINDYIDTEMLLCAENVNQDNLLSYAREAADFATNYQLPSLDFAMNHYGQPDVAMFDFTCMYASENAALVRERQAHQLLVALVGDSLLEPFWPMGTGCARGFLAAFDTAWMVKSWNQGTPPLELLAERESLYRLLPQTTPENINKNFEQYTLDPGTRYPNLNSHCVRPHQVKHLYITKELEHYPLERLGSVRRSVNLSRKESDIRPSKLLTWCQQQTEGYQHVNVTDLTTSWRSGLALCAIIHRFRPELINFDSLNEDDAVENNQLAFDVAEREFGIPPVTTGKEMASAQEPDKLSMVMYLSKFYELFRGTPLRPVDSWRKNYGENADLSLAKSSISNNYLNLTFPRKRTPRVDGQTGENDMNKRRRKGFTNLDEPSNFSSRSLGSNQECGSSKEGGNQNKVKSMANQLLAKFEESTRNPSLMKQERRVSGIGKPVLCSSSGPPVHSCCPKPEEATPSPSPPLKRQFPSVVVTGHVLRELKQVSAGSECLSRPWRARAKSDLQLGGTENFATLPSTRPRAQALSGVLWRLQQVEEKILQKRAQNLANREFHTKNIKEKAAHLASMFGHGDFPQNKLLSKGLSHTHPPSPPSRLPSPDPAASSSPSTVDSASPARKLTVGKVSSGIGAAAEVLVNLYMNDHRPKAQATSPDLESMRKSFPLNLGGSDTCYFCKKRVYVMERLSAEGHFFHRECFRCSICATTLRLAAYTFDCDEGKFYCKPHFIHCKTNSKQRKRRAELKQQREEEATWQEQEAPRRDTPTESSCAVAAIGTLEGSPPVHFSLPVLHPLLG

SEQ ID NO: 35498 - protein, 976 aa, Homo sapiens
MGENEDEKQAQAGQVFENFVQASTCKGTLQAFNILTRHLDLDPLDHRNFYSKLKSKVTTWKAKALWYKLDKRGSHKEYKRGKSCTNTKCLIVGGGPCGLRTAIELAYLGAKVVVVEKRDSFSRNNVLHLWPFTIHDLRGLGAKKFYGKFCAGSIDHISIRQLQLILFKVALMLGVEIHVNVEFVKVLEPPEDQENQKIGWRAEFLPTDHSLSEFEFDVIIGADGRRNTLEGFRRKEFRGKLAIAITANFINRNSTAEAKVEEISGVAFIFNQKFFQDLKEETGIDLENIVYYKDCTHYFVMTAKKQSLLDKGVIINDYIDTEMLLCAENVNQDNLLSYAREAADFATNYQLPSLDFAMNHYGQPDVAMFDFTCMYASENAALVRERQAHQLLVALVGDSLLEPFWPMGTGCARGFLAAFDTAWMVKSWNQGTPPLELLAERESLYRLLPQTTPENINKNFEQYTLDPGTRYPNLNSHCVRPHQVKHLYITKELEHYPLERLGSVRRSVNLSRKESDIRPSKLLTWCQQQTEGYQHVNVTDLTTSWRSGLALCAIIHRFRPELINFDSLNEDDAVENNQLAFDVAEREFGIPPVTTGKEMASAQEPDKLSMVMYLSKFYELFRGTPLRPVDSWRKNYGENADLSLAKSSISNNYLNLTFPRKRTPRVDGQTGENDMNKRRRKGFTNLDEPSNFSSRSLGSNQECGSSKEGGNQNKVKSMANQLLAKFEESTRNPSLMKQEKKSPSGFHFHPSHLRTVHPQESMRKSFPLNLGGSDTCYFCKKRVYVMERLSAEGHFFHRECFRCSICATTLRLAAYTFDCDEGKFYCKPHFIHCKTNSKQRKRRAELKQQREEEATWQEQEAPRRDTPTESSCAVAAIGTLEGSPPGISTSFFRKVLGWPLRLPRDLCNWMQGLLQAAGLHIRDNAYNYCYMYELLSLGLPLLWAFSEVLAAMYRESEGSLESICNWVLRCFPVKLR

SEQ ID NO: 35499 - protein, 934 aa, Homo sapiens
MGENEDEKQAQAGQVFENFVQASTCKGTLQAFNILTRHLDLDPLDHRNFYSKLKSKVTTWKAKALWYKLDKRGSHKEYKRGKSCTNTKCLIVGGGPCGLRTAIELAYLGAKVVVVEKRDSFSRNNVLHLWPFTIHDLRGLGAKKFYGKFCAGSIDHISIRQLQLILFKVALMLGVEIHVNVEFVKVLEPPEDQENQKIGWRAEFLPTDHSLSEFEFDVIIGADGRRNTLEGFRRKEFRGKLAIAITANFINRNSTAEAKVEEISGVAFIFNQKFFQDLKEETGIDLENIVYYKDCTHYFVMTAKKQSLLDKGVIINDYIDTEMLLCAENVNQDNLLSYAREAADFATNYQLPSLDFAMNHYGQPDVAMFDFTCMYASENAALVRERQAHQLLVALVGDSLLEPFWPMGTGCARGFLAAFDTAWMVKSWNQGTPPLELLAERESLYRLLPQTTPENINKNFEQYTLDPGTRYPNLNSHCVRPHQVKHLYITKELEHYPLERLGSVRRSVNLSRKESDIRPSKLLTWCQQQTEGYQHVNVTDLTTSWRSGLALCAIIHRFRPELINFDSLNEDDAVENNQLAFDVAEREFGIPPVTTGKEMASAQEPDKLSMVMYLSKFYELFRGTPLRPVDSWRKNYGENADLSLAKSSISNNYLNLTFPRKRTPRVDGQTGENDMNKRRRKGFTNLDEPSNFSSRSLGSNQECGSSKEGGNQNKVKSMANQLLAKFEESTRNPSLMKQEKKSPSGFHFHPSHLRTVHPQLTVGKVSSGIGAAAEVLVNLYMNDHRPKAQATSPDLESMRKSFPLNLGGSDTCYFCKKRVYVMERLSAEGHFFHRECFRCSICATTLRLAAYTFDCDEGKFYCKPHFIHCKTNSKQRKRRAELKQQREEEATWQEQEAPRRDTPTESSCAVAAIGTLEGSPPVHFSLPVLHPLLG

SEQ ID NO: 35500 - protein, 955 aa, Homo sapiens
MGENEDEKQAQAGQVFENFVQASTCKGTLQAFNILTRHLDLDPLDHRNFYSKLKSKVTTWKAKALWYKLDKRGSHKEYKRGKSCTNTKCLIVGGGPCGLRTAIELAYLGAKVVVVEKRDSFSRNNVLHLWPFTIHDLRGLGAKKFYGKFCAGSIDHISIRQLQLILFKVALMLGVEIHVNVEFVKVLEPPEDQENQKIGWRAEFLPTDHSLSEFEFDVIIGADGRRNTLEGFRRKEFRGKLAIAITANFINRNSTAEAKVEEISGVAFIFNQKFFQDLKEETGIDLENIVYYKDCTHYFVMTAKKQSLLDKGVIINDYIDTEMLLCAENVNQDNLLSYAREAADFATNYQLPSLDFAMNHYGQPDVAMFDFTCMYASENAALVRERQAHQLLVALVGDSLLEPFWPMGTGCARGFLAAFDTAWMVKSWNQGTPPLELLAERESLYRLLPQTTPENINKNFEQYTLDPGTRYPNLNSHCVRPHQVKHLYITKELEHYPLERLGSVRRSVNLSRKESDIRPSKLLTWCQQQTEGYQHVNVTDLTTSWRSGLALCAIIHRFRPELINFDSLNEDDAVENNQLAFDVAEREFGIPPVTTGKEMASAQEPDKLSMVMYLSKFYELFRGTPLRPVDSWRKNYGENADLSLAKSSISNNYLNLTFPRKRTPRVDGQTGENDMNKRRRKGFTNLDEPSNFSSRSLGSNQECGSSKEGGNQNKVKSMANQLLAKFEESTRNPSLMKQESMRKSFPLNLGGSDTCYFCKKRVYVMERLSAEGHFFHRECFRCSICATTLRLAAYTFDCDEGKFYCKPHFIHCKTNSKQRKRRAELKQQREEEATWQEQEAPRRDTPTESSCAVAAIGTLEGSPPGISTSFFRKVLGWPLRLPRDLCNWMQGLLQAAGLHIRDNAYNYCYMYELLSLGLPLLWAFSEVLAAMYRESEGSLESICNWVLRCFPVKLR

SEQ ID NO: 35501 - protein, 315 aa, Homo sapiens
MTGQGQSASGSSAWSTVFRHVRYENLIAGVSGGVLSNLALHPLDLVKIRFAVSDGLELRPKYNGILHCLTTIWKLDGLRGLYQGVTPNIWGAGLSWGLYFFFYNAIKSYKTEGRAERLEATEYLVSAAEAGAMTLCITNPLWVTKTRLMLQYDAVVNSPHRQYKGMFDTLVKIYKYEGVRGLYKGFVPGLFGTSHGALQFMAYELLKLKYNQHINRLPEAQLSTVEYISVAALSKIFAVAATYPYQVVRARLQDQHMFYSGVIDVITKTWRKEGVGGFYKGIAPNLIRVTPACCITFVVYENVSHFLLDLREKRK

SEQ ID NO: 35502 - protein, 695 aa, Homo sapiens
MSPPKDPSPSLPLPSSSSHSSSPPSSSSTSVSGNAPDGSSPPQMTASEPLSQVSRGHPSPPTPNFRRRAVAQGAPREIPLYLPHHPKPEWAEYCLVSPGEDGLSDPAEMTSDECQPAEAPLGDIGSNHRDPHPIWGKDRSWTGQELSPLAGEDREKGSTGARKEEEGGPVLVKEKLGLKKLVLTQEQKTMLLDWNDSIPESVHLKAGERISQKSAENGRGGRVLKPVRPLLLPRAAGEPLPTQRGAQEKMGTPAEQAQGERNVPPPKSPLRLIANAIRRSLEPLLSNSEGGKKAWAKQESKTLPAQACTRSFSLRKTNSNKDGDQHSPGRNQSSAFSPPDPALRTHSLPNRPSKVFPALRSPPCSKIEDVPTLLEKVSLQENFPDASKPPKKRISLFSSLRLKDKSFESFLQESRQRKDIRDLFGSPKRKVLPEDSAQALEKLLQPFKSTSLRQAAPPPPPPPPPPPPPPTAGGADSKNFPLRAQVTEASSSASSTSSSSADEEFDPQLSLQLKEKKTLRRRKKLEKAMKQLVKQEELKRLYKAQAIQRQLEEVEERQRASEIQGVRLEKALRGEADSGTQDEAQLLQEWFKLVLEKNKLMRYESELLIMAQELELEDHQSRLEQKLREKMLKEESQKDEKDLNEEQEVFTELMQVIEQRDKLVDSLEEQRIREKAEDQHFESFVFSRGCQLSRT

SEQ ID NO: 35503 - protein, 530 aa, Homo sapiens
MAALRRLLWPPPRVSPPLCAHQPLLGPWGRPAVTTLGLPGRPFSSREDEERAVAEAAWRRRRRWGELSVAAAAGGGLVGLVCYQLYGDPRAGSPATGRPSKSAATEPEDPPRGRGMLPIPVAAAKETVAIGRTDIEDLDLYATSRERRFRLFASIECEGQLFMTPYDFILAVTTDEPKVAKTWKSLSKQELNQMLAETPPVWKGSSKLFRNLKEKGVISYTEYLFLLCILTKPHAGFRIAFNMFDTDGNEMVDKKEFLVLQEIFRKKNEKREIKGDEEKRAMLRLQLYGYHSPTNSVLKTDAEELVSRSYWDTLRRNTSQALFSDLAERADDITSLVTDTTLLVHFFGKKGKAELNFEDFYRFMDNLQTEVLEIEFLSYSNGMNTISEEDFAHILLRYTNVENTSVFLENVRYSIPEEKGITFDEFRSFFQFLNNLEDFAIALNMYNFASRSIGQDEFKRAVYVATGLKFSPHLVNTVFKIFDVDKDDQLSYKEFIGIMKDRLHRGFRGYKTVQKYPTFKSCLKKELHSR

SEQ ID NO: 35504 - protein, 293 aa, Homo sapiens
MGFPAAALLCALCCGLLAPAARAGYSEERCSWRGSGLTQEPGSVGQLALACAEGAVEWLYPAGALRLTLGGPDPRARPGIACLRPVRPFAGAQVFAERAGGALELLLAEGPGPAGGRCVRWGPRERRALFLQATPHQDISRRVAAFRFELREDGRPELPPQAHGLGVDGACRPCSDAELLLAACTSDFVIHGIIHGVTHDVELQESVITVVAARVLRQTPPLFQAGRSGDQGLTSIRTPLRCGVHPGPGTFLFMGWSRFGEARLGCAPRFQEFRRAYEAARAAHLHPCEVALH

SEQ ID NO: 35505 - protein, 2515 aa, Homo sapiens
MARKLSVLEVLLIIFCLIVVTIDILLLLLVLEETSDTSFTPECPEIPQSERIDCTPDQEVTEDICRWQYKCCWSPVADANVPRCFFPWNWGYEASNGHTNTSTGFTAQLKRLPSPSLFGNDVATTLFTAEYQTSNRFHFKITDFNNIRYEVSHENINLVDGIADASNLSYYVEVTDKPFSIKIMRTSNRRVLLDTSIGPLQFAQQYLQLSFRLPSANVYGLGEHVHQQYRHNMTWKTWPIFTRDATPTEGMINLYGAHTFFLCLEDARGSSFGVFLMNSNAMEVTLQPAPAITYRTIGGILDFYVFLGNTPEQVVQEYLELVGRPFFPPYWSLGFQLSRRDYGGINKLKEVVSRNRLAEIPYDVQYSDIDYMDGKKDFTVDEVAYSGLPDFVKELHDNGQKYLIIMNPGISKNSNYEPYNNGSLKRVWILGSNGFAVGEGYPGPTVFPDYTNPVCTEWWTDQVAKFHDHLEFDGVWIEMNEVSSLLQASNNQCESNNLNFPPFLPRVLDHLLFARTLCMDTEFHGGLHYDIHSLYGHSMARTTNLALETIFMNNRSFILSRSTFAGSGKFAAHWLGDNAATWDDLRWSIPTILEFNLFGIPMVGANICGYNNNVTEELCRRWMQLGAFYPLPRNHNGPGFRDQDPAAFGVDSLLLKSSRHYLNIRYTLLPYLYTLFYHAHTRGETVARPLVHEFYQDSATWDVHEQFLWGPGLLITPVLYEGVDEVKAYIPDATWYDYETGVAISWRKQLVNMLLPGDKIGLHLRGGYIFPTQKPNTTTEASRRNSLGLIIALDYKREAKGELYWDDGVSKDAVTEKKYILYDFSVTSNHLQAKIINNNYMDTDNLMFTDITILGMDKQPANFIVLLNNVATSSPSVVYNASTKVVTITDLQGLVLGQEFSIRWNLPVSDLEKFNCYPDDPTASEESCRQRGCLWEDTSTPGVPTCYYDTIPNYVASDIQYLNTSITADLSLPMAPESAAAAASDSLSAKISFLHLKVIYHTATMLQVKIYDPTNKRYEVPVPLNTPPQPVGDPENRLYDVRIQNNPFGIQIQRKNSSTVIWDSQLPGFIFNDMFLSISTRLPSQYIYGFGETEHTTFRRNMNWNTWGMFAHDEPPAYKKNSYGVHPYYMALEEDGSAHGVLLLNSNAMDVTLQPTPALTYRTTGGILDFYIVLGPTPELVTQQYTELIGRPAMIPYWALGFHLSRYGYQNDAEISSLYDAMVAAQIPYDVQHVDIDYMNRKLDFTLSANFQNLSLLIEQMKKNGMRFILILDPAISGNETQYLPFIRGQENNVFIKWPDTNDIVWGKVWPDLPNVIVDGSLDHETQVKLYRAYVAFPDFFRNSTAAWWKKEIEELYANPREPEKSLKFDGLWIDMNEPSNFVDGSVRGCSNEMLNNPPYMPYLESRDKGLSSKTLCMESQQILPDSSPVEHYNVHNLYGWSQTRPTYEAVQEVTGQRGVIITRSTFPSSGRWGGHRLGNNTAAWDQLGKSIIGMMEFSLFGIPYTGADICGFFGDAEYEMCVRWMQLGAFYPFSRNHNNIGTRRQDPVAWNSTFEMLSRKVLETRYTLLPYLYTLMHKAHVEGSTVVRPLLHEFTDDRTTWDIDRQFMLGPAILISPVLETSTFEISAYFPRARWYDYSTGTSSTSTGQRKILKAPLDHINLHVRGGYILPWQEPAMNTHSSRQNFMGLIVALDDNGTAEGQVFWDDGQSIDTYENGNYFLANFIAAQNILQIQTIHNKYLSDSNPLKVGYIRIWGVNTYVTQVSFTYDNRQFMETNFKSEPYNQILTIQLTDKTINLEKLTEVTWIDGGPVLPTPTKTSTIPMSSHPSPSTTNATSSETITSSASANTTTGTTDTVPITTTSFPSTTSVTTNTTVPDTTSPFPTSTTNASTNATVPITTTPFPTSTIGVTTNATVPNTTAPFPTNASTASTNATVPITTTCFATSTIGVTTNATVPDTTAPFPTNTTTASTNATIPITTTPFATSTISVTTSTTVPDTTAPFPTSTTSASTNATPVPITTTLFATSTIGVTTGTTVPDTTAPFPTSTTSTSTSATVPITTTPSPTNTADANTSNTVPNTTMPSPTSSTTVSTIATVPISVTPSLTSTADATISTTVLIATTSSLTGTTDVSTSTTINNISTPVQTNTTNASTSTNVANITATSHTSTDDTVPNNTVPVTAIPSLANTGVDTTSNSFSIMTTSFSESTNAMNTTVIMATTSPTSTDVASTNNDASMTNFLLATMSAGNITSNSISITTTSFGNSVPFVTTPSPSTDATTTSNNTNPGMTTYYQTSPTIPTHTLTSIPSSITSILSMFPTSNTFTTDKITNFTTPTNANTIIFNTLDTKSTMVIDATVTTTSTKDNTMSPDTTVTSIDKFTTHITQFATPHSATTTTLALSHTSLAPTNLSNLGTMDITDADNSSSVTGNTTHISVSNLTTASVTITATGLDSQTPHMVINSVATYLPITATSATTDTTNITKYALNTTTPDSTVHTSATAPTYIANAINATQVP

SEQ ID NO: 35506 - protein, 482 aa, Homo sapiens
MARKLSVLEVLLIIFCLIVVTIDILLLLLVLEETSDTSFTPECPEIPQSERIDCTPDQEVTEDICRWQYKCCWSPVADANVPRCFFPWNWGYEASNGHTNTSTGFTAQLKRLPSPSLFGNDVATTLFTAEYQTSNRFHFKITDFNNIRYEVSHENINLVDGIADASNLSYYVEVTDKPFSIKIMRTSNRRVLLDTSIGPLQFAQQYLQLSFRLPSANVYGLGEHVHQQYRHNMTWKTWPIFTRDATPTEGMINLYGAHTFFLCLEDARGSSFGVFLMNSNAMEVTLQPAPAITYRTIGGILDFYVFLGNTPEQVVQEYLELVGRPFFPPYWSLGFQLSRRDYGGINKLKEVVSRNRLAEIPYDVQYSDIDYMDGKKDFTVDEVAYSGLPDFVKELHDNGQKYLIIMNPGISKNSNYEPYNNGSLKRVWILGSNGFAVGEGYPGPTVFPDYTNPVCTEWWTDQVAKFHDHLEFDGVWIVSYYS

SEQ ID NO: 35507 - protein, 434 aa, Homo sapiens
MAAAAGSCARVAAWGGKLRRGLAVSRQAVRSPGPLAAAVAGAALAGAGAAWHHSRVSVAARDGSFTVSAQKNVEHGIIYIGKPSLRKQRFMQFSSLEHEGEYYMTPRDFLFSVMFEQMERKTSVKKLTKKDIEDTLSGIQTAGCGSTFFRDLGDKGLISYTEYLFLLTILTKPHSGFHVAFKMLDTDGNEMIEKREFFKLQKIISKQDDLMTVKTNETGYQEAIVKEPEINTTLQMRFFGKRGQRKLHYKEFRRFMENLQTEIQEMEFLQFSKGLSFMRKEDFAEWLLFFTNTENKDIYWKNVREKLSAGESISLDEFKSFCHFTTHLEDFAIAMQMFSLAHRPVRLAEFKRAVKVATGQELSNNILDTVFKIFDLDGDECLSHEEFLGVLKNRMHRGLWVPQHQSIQEYWKCVKKESIKGVKEVWKQAGKGLF

SEQ ID NO: 35508 - protein, 459 aa, Homo sapiens
MLKLIVPTIMLLPLTWLSKKHMIWINTTTHSLIISIIPLLFFNQINNNLFSCSPTFSSDPLTTPLLMLTTWLLPLTIMASQRHLSSEPLSRKKLYLSMLISLQISLIMTFTATELIMFYIFFETTLIPTLAIITRWGNQPERLNAGTYFLFYTLVGSLPLLIALIYTHNTLGSLNILLLTLTAQELSNSWANNLMWLAYTMAFMVKMPLYGLHLWLPKAHVEAPIAGSMVLAAVLLKLGGYGMMRLTLILNPLTKHMAYPFLVLSLWGMIMTSSICLRQTDLKSLIAYSSISHMALVVTAILIQTPWSFTGAVILMIAHGLTSSLLFCLANSNYERTHSRIMILSQGLQTLLPLMAFWWLLASLANLALPPTINLLGELSVLVTTFSWSNITLLLTGLNMLVTALYSLYMFTTTQWGSLTHHINNMKPSFTRENTLMFMHLSPILLLSLNPDIITGFSS

SEQ ID NO: 35509 - protein, 463 aa, Homo sapiens
MAGAGERKGKKDDNGIGTAIDFVLSNARLVLGVGGAAMLGIATLAVKRMYDRAISAPTSPTRLSHSGKRSWEEPNWMGSPRLLNRDMKTGLSRSLQTLPTDSSTFDTDTFCPPRPKPVARKGQVDLKKSRLRMSLQEKLLTYYRNRAAIPAGEQARAKQAAVDICAELRSFLRAKLPDMPLRDMYLSGSLYDDLQVVTADHIQLIVPLVLEQNLWSCIPGEDTIMNVPGFFLVRRENPEYFPRGSSYWDRCVVGGYLSPKTVADTFEKVVAGSINWPAIGSLLDYVIRPAPPPEALTLEVQYERDKHLFIDFLPSVTLGDTVLVAKPHRLAQYDNLWRLSLRPAETARLRALDQADSGCRSLCLKILKAICKSTPALGHLTASQLTNVILHLAQEEADWSPDMLADRFLQALRGLISYLEAGVLPSALNPKVNLFAELTPEEIDELGYTLYCSLSEPEVLLQT

SEQ ID NO: 35510 - protein, 148 aa, Homo sapiens
MAGAGERKGKKDDNGIGTAIDFVLSNARLVLGVGGAAMLGIATLAVKRMYDRAISAPTSPTRLSHSGKRSWEEPNWMGSPRLLNRDMKTGLSRSLQTLPTDSSTFDTGETSYLLPEPGSHPCWRAGSGQASCCGHMCRAPELPAGQVA

SEQ ID NO: 35511 - protein, 464 aa, Homo sapiens
MSLHFLYYCSEPTLDVKIAFCQGFDKQVDVSYIAKHYNMSKSKVDNQFYSVEVGDSTFTVLKRYQNLKPIGSGAQGIVCAAYDAVLDRNVAIKKLSRPFQNQTHAKRAYRELVLMKCVNHKNIISLLNVFTPQKTLEEFQDVYLVMELMDANLCQVIQMELDHERMSYLLYQMLCGIKHLHSAGIIHRDLKPSNIVVKSDCTLKILDFGLARTAGTSFMMTPYVVTRYYRAPEVILGMGYKENVDIWSVGCIMGEMVRHKILFPGRDYIDQWNKVIEQLGTPCPEFMKKLQPTVRNYVENRPKYAGLTFPKLFPDSLFPADSEHNKLKASQARDLLSKMLVIDPAKRISVDDALQHPYINVWYDPAEVEAPPPQIYDKQLDEREHTIEEWKELIYKEVMNSEEKTKNGVVKGQPSPSGAAVNSSESLPPSSSVNDISSMSTDQTLASDTDSSLEASAGPLGCCR

SEQ ID NO: 35512 - protein, 422 aa, Homo sapiens
MSLHFLYYCSEPTLDVKIAFCQGFDKQVDVSYIAKHYNMSKSKVDNQFYSVEVGDSTFTVLKRYQNLKPIGSGAQGIVCAAYDAVLDRNVAIKKLSRPFQNQTHAKRAYRELVLMKCVNHKNIISLLNVFTPQKTLEEFQDVYLVMELMDANLCQVIQMELDHERMSYLLYQMLCGIKHLHSAGIIHRDLKPSNIVVKSDCTLKILDFGLARTAGTSFMMTPYVVTRYYRAPEVILGMGYKENVDIWSVGCIMGEMVRHKILFPGRDYIDQWNKVIEQLGTPCPEFMKKLQPTVRNYVENRPKYAGLTFPKLFPDSLFPADSEHNKLKASQARDLLSKMLVIDPAKRISVDDALQHPYINVWYDPAEVEAPPPQIYDKQLDEREHTIEEWKELIYKEVMNSEEKTKNGVVKGQPSPSAQVQQ

SEQ ID NO: 35513 - protein, 426 aa, Homo sapiens
MSKSKVDNQFYSVEVGDSTFTVLKRYQNLKPIGSGAQGIVCAAYDAVLDRNVAIKKLSRPFQNQTHAKRAYRELVLMKCVNHKNIISLLNVFTPQKTLEEFQDVYLVMELMDANLCQVIQMELDHERMSYLLYQMLCGIKHLHSAGIIHRDLKPSNIVVKSDCTLKILDFGLARTAGTSFMMTPYVVTRYYRAPEVILGMGYKENVDIWSVGCIMGEMVRHKILFPGRDYIDQWNKVIEQLGTPCPEFMKKLQPTVRNYVENRPKYAGLTFPKLFPDSLFPADSEHNKLKASQARDLLSKMLVIDPAKRISVDDALQHPYINVWYDPAEVEAPPPQIYDKQLDEREHTIEEWKELIYKEVMNSEEKTKNGVVKGQPSPSGAAVNSSESLPPSSSVNDISSMSTDQTLASDTDSSLEASAGPLGCCR

SEQ ID NO: 35514 - protein, 223 aa, Homo sapiens
MHCAEAGKALIKFNHCEKYIYSFSVPQCCPLCQQDLGSRKLEDAPVSIANPFTNGHQEKCSFLLRPTQGTFLREYDGRSDLHVGITNTNGVVYNYSAHGVQRDGEGWEESISIPLLQPNMYGMMEQWDKYLEDFSTSGAWLPHRYEDNHHNCYSYALTFINCVLMAEGRQQLDKGEFTEKYVVPRTRLASKFITLYRAIREHGFYVTDCPQQQAQPPEGGGLC

SEQ ID NO: 35515 - protein, 387 aa, Homo sapiens
MPRPRLLAALCGALLCAPSLLVALDICSKNPCHNGGLCEEISQEVRGDVFPSYTCTCLKGYAGNHCETKCVEPLGLENGNIANSQIAASSVRVTFLGLQHWVPELARLNRAGMVNAWTPSSNDDNPWIQVNLLRRMWVTGVVTQGASRLASHEYLKAFKVAYSLNGHEFDFIHDVNKKHKEFVGNWNKNAVHVNLFETPVEAQYVRLYPTSCHTACTLRFELLGCELNGCANPLGLKNNSIPDKQITASSSYKTWGLHLFSWNPSYARLDKQGNFNAWVAGSYGNDQWLQVDLGSSKEVTGIITQGARNFGSVQFVASYKVAYSNDSANWTEYQDPRTGSSKIFPGNWDNHSHKKNLFETPILARYVRILPVAWHNRIALRLELLGC

SEQ ID NO: 35516 - protein, 275 aa, Homo sapiens
MVNAWTPSSNDDNPWIQVNLLRRMWVTGVVTQGASRLASHEYLKAFKVAYSLNGHEFDFIHDVNKKHKEFVGNWNKNAVHVNLFETPVEAQYVRLYPTSCHTACTLRFELLGCELNGCANPLGLKNNSIPDKQITASSSYKTWGLHLFSWNPSYARLDKQGNFNAWVAGSYGNDQWLQVDLGSSKEVTGIITQGARNFGSVQFVASYKVAYSNDSANWTEYQDPRTGSSKIFPGNWDNHSHKKNLFETPILARYVRILPVAWHNRIALRLELLGC

SEQ ID NO: 35517 - protein, 335 aa, Homo sapiens
MPRPRLLAALCGALLCAPSLLVALDICSKNPCHNGGLCEEISQEVRGDVFPSYTCTCLKGYAGNHCETKCVEPLGLENGNIANSQIAASSVRVTFLGLQHWVPELARLNRAGMVNAWTPSSNDDNPWIQVNLLRRMWVTGVVTQGASRLASHEYLKAFKVAYSLNGHEFDFIHDVNKKHKEFVGNWNKNAVHVNLFETPVEAQYVRLYPTSCHTACTLRFELLGCELNGCANPLGLKNNSIPDKQITASSSYKTWGLHLFSWNPSYARLDKQGNFNAWVAGSYGNDQWLQIFPGNWDNHSHKKNLFETPILARYVRILPVAWHNRIALRLELLGC

SEQ ID NO: 35518 - protein, 343 aa, Homo sapiens
MPRPRLLAALCGALLCAPSLLVALECVEPLGLENGNIANSQIAASSVRVTFLGLQHWVPELARLNRAGMVNAWTPSSNDDNPWIQVNLLRRMWVTGVVTQGASRLASHEYLKAFKVAYSLNGHEFDFIHDVNKKHKEFVGNWNKNAVHVNLFETPVEAQYVRLYPTSCHTACTLRFELLGCELNGCANPLGLKNNSIPDKQITASSSYKTWGLHLFSWNPSYARLDKQGNFNAWVAGSYGNDQWLQVDLGSSKEVTGIITQGARNFGSVQFVASYKVAYSNDSANWTEYQDPRTGSSKIFPGNWDNHSHKKNLFETPILARYVRILPVAWHNRIALRLELLGC

SEQ ID NO: 35519 - protein, 621 aa, Homo sapiens
MESSPESLQPLEHGVAAGPASGTGSSQEGLQETRLAAGDGPGVWAAETSGGNGLGAAAARRSLPDSASPAGSPEVPGPCSSSAGLDLKDSGLESPAAAEAPLRGQYKVTASPETAVAGVGHELGTAGDAGARPDLAGTCQAELTAAGSEEPSSAGGLSSSCSDPSPPGESPSLDSLESFSNLHSFPSSCEFNSEEGAENRVPEEEEGAAVLPGAVPLCKEEEGEETAQVLAASKERFPGQSVYHIKWIQWKEENTPIITQNENGPCPLLAILNVLLLAWKVKLPPMMEIITAEQLMEYLGDYMLDAKPKEISEIQRLNYEQNMSDAMAILHKLQTGLDVNVRFTGVRVFEYTPECIVFDLLDIPLYHGWLVDPQIDDIVKAVGNCSYNQLVEKIISCKQSDNSELVSEGFVAEQFLNNTATQLTYHGLCELTSTVQEGELCVFFRNNHFSTMTKYKGQLYLLVTDQGFLTEEKVVWESLHNVDGDGNFCDSEFHLRPPSDPETVYKGQQDQIDQDYLMALSLQQEQQSQEINWEQIPEGISDLELAKKLQEEEDRRASQYYQEQEQAAAAAAAASTQAQQGQPAQASPSSGRQSGNSERKRKEPREKDKEKEKEKNSCVIL

SEQ ID NO: 35520 - protein, 620 aa, Homo sapiens
MESSPESLQPLEHGVAAGPASGTGSSQEGLQETRLAAGDGPGVWAAETSGGNGLGAAAARRSLPDSASPAGSPEVPGPCSSSAGLDLKDSGLESPAAAEAPLRGQYKVTASPETAVAGVGHELGTAGDAGARPDLAGTCQAELTAAGSEEPSSAGGLSSSCSDPSPPGESPSLDSLESFSNLHSFPSSCEFNSEEGAENRVPEEEEGAAVLPGAVPLCKEEEGEETAQVLAASKERFPGQSVYHIKWIQWKEENTPIITQNENGPCPLLAILNVLLLAWKVKLPPMMEIITAEQLMEYLGDYMLDAKPKEISEIQRLNYEQNMSDAMAILHKLQTGLDVNVRFTGVRVFEYTPECIVFDLLDIPLYHGWLVDPQIDDIVKAVGNCSYNQLVEKIISCKQSDNSELVSEGFVAEQFLNNTATQLTYHGLCELTSTVQEGELCVFFRNNHFSTMTKYKGQLYLLVTDQGFLTEEKVVWESLHNVDGDGNFCDSEFHLRPPSDPETVYKGQQDQIDQDYLMALSLQQEQQSQEINWEQIPEGISDLELAKKLQEEEDRRASQYYQEQEQAAAAAAAASTQAQGQPAQASPSSGRQSGNSERKRKEPREKDKEKEKEKNSCVIL

SEQ ID NO: 35521 - protein, 445 aa, Homo sapiens
MSELTKELMELVWGTKSSPGLSDTIFCRWTQGFVFSESEGSALEQFEGGPCAVIAPVQAFLLKKLLFSSEKSSWRDCSEEEQKELLCHTLCDILESACCDHSGSYCLVSWLRGKTTEETASISGSPAESSCQVEHSSALAVEELGFERFHALIQKRSFRSLPELKDAVLDQYSMWGNKFGVLLFLYSVLLTKGIENIKNEIEDASEPLIDPVYGHGSQSLINLLLTGHAVSNVWDGDRECSGMKLLGIHEQAAVGFLTLMEALRYCKVGSYLKSPKFPIWIVGSETHLTVFFAKDMALVAPEAPSEQARRVFQTYDPEDNGFIPDSLLEDVMKALDLVSDPEYINLMKNKLDPEGLGIILLGPFLQEFFPDQGSSGPESFTVYHYNGLKQSNYNEKVMYVEGTAVVMGFEDPMLQTDDTPIKRCLQTKWPYIELLWTTDRSPSLN

SEQ ID NO: 35522 - protein, 136 aa, Homo sapiens
MSELTKELMELVWGTKSSPGLSDTIFCRWTQGFVFSESEGSALEQFEGGPCAVIAPVQAFLLKKLLFSSEKSSWRDCSEEEQKELLCHTLCDILESACCDHSGSYCLVSWLRGKTTEETASISGSPAESSCQVEHS

SEQ ID NO: 35523 - protein, 600 aa, Homo sapiens
MTAAPASPQQIRDRLLQAIDPQSNIRNMVAVLEVISSLEKYPITKEALEETRLGKLINDVRKKTKNEELAKRAKKLLRSWQKLIEPAHQHEAALRGLAGATGSANGGAHNCRPEVGAAGPPRSIHDLKSRNDLQRLPGQRLDRLGSRKRRGDQRDLGHPGPPPKVSKASHDPLVPNSSPLPTNGISGSPESFASSLDGSGHAGPEGSRLERDENDKHSGKIPVNAVRPHTSSPGLGKPPGPCLQPKASVLQQLDRVDETPGPPHPKGPPRCSFSPRNSRHEGSFARQQSLYAPKGSVPSPSPRPQALDATQVPSPLPLAQPSTPPVRRLELLPSAESPVCWLEQPESHQRLAGPGCKAGLSPAEPLLSRAGFSPDSSKADSDAASSGGSDSKKKKRYRPRDYTVNLDGQVAEAGVKPVRLKERKLTFDPMTRQIKPLTQKEPVRADSPVHMEQQSRTELDKQEAKASLQSPFEQTNWKELSRNEIIQSYLSRQSSLLSSSGAQTPGAHHFMSEYLKQEESTRQGARQLHVLVPQSPPTDLPGLTREVTQDDLDRIQASQWPGVNGCQDTQGNWYDWTQCISLDPHGDDGRLNILPYVCLD

SEQ ID NO: 35524 - protein, 92 aa, Homo sapiens
MTAAPASPQQIRDRLLQAIDPQSNIRNMVAVLEVISSLEKYPITKEALEETRLGKLINDVRKKTKNEELAKRAKKLPGWQWACRPRGQPPGA

SEQ ID NO: 35525 - protein, 618 aa, Homo sapiens
MRRDVRILLLGEAQVGKTSLILSLVGEEFPEEVPPRAEEITIPADVTPEKVPTHIVDYSEAEQTDEELREEIHKANVVCVVYDVSEEATIEKIRTKWIPLVNGGTTQGPRVPIILVGNKSDLRSGSSMEAVLPIMSQFPEIETCVECSAKNLRNISELFYYAQKAVLHPTAPLYDPEAKQLRPACAQALTRIFRLSDQDLDQALSDEELNAFQKSCFGHPLAPQALEDVKTVVCRNVAGGVREDRLTLDGFLFLNTLFIQRGRHETTWTILRRFGYSDALELTADYLSPLIHVPPGCSTELNHLGYQFVQRVFEKHDQDRDGALSPVELQSLFSVFPAAPWGPELPRTVRTEAGRLPLHGYLCQWTLVTYLDVRSCLGHLGYLGYPTLCEQDQAHAITVTREKRLDQEKGQTQRSVLLCKVVGARGVGKSAFLQAFLGRGLGHQDTREQPPGYAIDTVQVNGQEKYLILCEVGTDGLLATSLDATCDVACLMFDGSDPKSFAHCASVYKHHYMDGQTPCLFVSSKADLPEGVAVSGPSPAEFCRKHRLPAPVPFSCAGPAEPSTTIFTQLATMAAFPHLVHAELHPSSFWLRGLLGVVGAAVAAVLSFSLYRVLVKSQ

SEQ ID NO: 35526 - protein, 213 aa, Homo sapiens
MEAVLPIMSQFPEIETCVECSAKNLRNISELFYYAQKAVLHPTAPLYDPEAKQLRPACAQALTRIFRLSDQDLDQALSDEELNAFQKSCFGHPLAPQALEDVKTVVCRNVAGGVREDRLTLDGEAGCPPVPGECGEGAVPGAPPALSRCRFPLPEHALHPARPARDHLDHPAALRLQRCPGADCGLSLPSDPRAPRLQHGAQPPWLPVCAESV

SEQ ID NO: 35527 - protein, 679 aa, Homo sapiens
MDRVTRYPILGIPQAHRGTGLVLDGDTSYTYHLVCMGPEASGWGQDEPQTWPTDHRAQQGVQRQGVSYSVHAYTGQPSPRGLHSENREDEGWQVYRLGARDAHQGRPTWALRPEDGEDKEMKTYRLDAGDADPRRLCDLERERWAVIQGQAVRKSSTVATLQGTPDHGDPRTPGPPRSTPLEENVVDREQIDFLAARQQFLSLEQANKGAPHSSPARGTPAGTTPGASQAPKAFNKPHLANGHVVPIKPQVKGVVREENKVRAVPTWASVQVVDDPGSLASVESPGTPKETPIEREIRLAQEREADLREQRGLRQATDHQELVEIPTRPLLTKLSLITAPRRERGRPSLYVQRDIVQETQREEDHRREGLHVGRASTPDWVSEGPQPGLRRALSSDSILSPAPDARAADPAPEVRKVNRIPPDAYQPYLSPGTPQLEFSAFGAFGKPSSLSTAEAKAATSPKATMSPRHLSESSGKPLSTKQEASKPPRGCPQANRGVVRWEYFRLRPLRFRAPDEPQQAQVPHVWGWEVAGAPALRLQKSQSSDLLERERESVLRREQEVAEERRNALFPEVFSPTPDENSDQNSRSSSQASGITGSYSVSESPFFSPIHLHSNVAWTVEDPVDSAPPGQRKKEQWYAGINPSDGINSEVLEAIRVTRHKNAMAERWESRIYASEEDD

SEQ ID NO: 35528 - protein, 342 aa, Homo sapiens
MRKETPPPLVPPAAREWNLPPNAPACMERQLEAARYRSDGALLLGASSLSGRCWAGSLWLFKDPCAAPNEGFCSAGVQTEAGVADLTWVGERGILVASDSGAVELWELDENETLIVSKFCKYEHDDIVSTVSVLSSGTQAVSGSKDICIKVWDLAQQVVLSSYRAHAAQVTCVAASPHKDSVFLSCSEDNRILLWDTRCPKPASQIGCSAPGYLPTSLAWHPQQSEVFVFGDENGTVSLVDTKSTSCVLSSAVHSQCVTGLVFSPHSVPFLASLSEDCSLAVLDSSLSELFRSQAHRDFVRDATWSPLNHSLLTTVGWDHQVVHHVVPTEPLPAPGPASVTE

SEQ ID NO: 35529 - protein, 278 aa, Homo sapiens
MRKETPPPLVPPAAREWNLPPNAPACMERQLEAARYRSDGALLLGASSLSGRCWAGSLWLFKDPCAAPNEGFCSAGVQTEAGVADLTWVGERGILVASDSAHAAQVTCVAASPHKDSVFLSCSEDNRILLWDTRCPKPASQIGCSAPGYLPTSLAWHPQQSEVFVFGDENGTVSLVDTKSTSCVLSSAVHSQCVTGLVFSPHSVPFLASLSEDCSLAVLDSSLSELFRSQAHRDFVRDATWSPLNHSLLTTVGWDHQVVHHVVPTEPLPAPGPASVTE

SEQ ID NO: 35530 - protein, 245 aa, Homo sapiens
MSDEFSLADALPEHSPAKTSAVSNTKPGQPPQGWPGSNPWNNPSAPSSVPSGLPPSATPSTVPFGPAPTGMYPSVPPTGPPPGPPAPFPPSGPSCPPPGGPYPAPTVPGPGPTGPYPTPNMPFPELPRPYGAPTDPAAAGPLGPWGSMSSGPWAPGMGGQYPTPNMPYPSPGPYPAPPPPQAPGAAPPVPWGTVPPGAWGPPAPYPAPTGSYPTPGLYPTPSNPFQVPSGPSGAPPMPGGPHSYH

SEQ ID NO: 35531 - protein, 1541 aa, Homo sapiens
MSFLEEARAAGRAVVLALVLLLLPAVPVGASVPPRPLLPLQPGMPHVCAEQELTLVGRRQPCVQALSHTVPVWKAGCGWQAWCVGHERRTVYYMGYRQVYTTEARTVLRCCRGWMQQPDEEGCLSAECSASLCFHGGRCVPGSAQPCHCPPGFQGPRCQYDVDECRTHNGGCQHRCVNTPGSYLCECKPGFRLHTDSRTCLAINSCALGNGGCQHHCVQLTITRHRCQCRPGFQLQEDGRHCVRRSPCANRNGSCMHRCQVVRGLARCECHVGYQLAADGKACEDVDECAAGLAQCAHGCLNTQGSFKCVCHAGYELGADGRQCYRIEMEIVNSCEANNGGCSHGCSHTSAGPLCTCPRGYELDTDQRTCIDVDDCADSPCCQQVCTNNPGGYECGCYAGYRLSADGCGCEDVDECASSRGGCEHHCTNLAGSFQCSCEAGYRLHEDRRGCSPLEEPMVDLDGELPFVRPLPHIAVLQDELPQLFQDDDVGADEEEAELRGEHTLTEKFVCLDDSFGHDCSLTCDDCRNGGTCLLGLDGCDCPEGWTGLICNETCPPDTFGKNCSFSCSCQNGGTCDSVTGACRCPPGVSGTNCEDGCPKGYYGKHCRKKCNCANRGRCHRLYGACLCDPGLYGRFCHLTCPPWAFGPGCSEECQCVQPHTQSCDKRDGSCSCKAGFRGERCQAECELGYFGPGCWQACTCPVGVACDSVSGECGKRCPAGFQGEDCGQECPVGTFGVNCSSSCSCGGAPCHGVTGQCRCPPGRTGEDCEADCPEGRWGLGCQEICPACQHAARCDPETGACLCLPGFVGSRCQDVCPAGWYGPSCQTRCSCANDGHCHPATGHCSCAPGWTGFSCQRACDTGHWGPDCSHPCNCSAGHGSCDAISGLCLCEAGYVGPRCEQQCPQGHFGPGCEQRCQCQHGAACDHVSGACTCPAGWRGTFCEHACPAGFFGLDCRSACNCTAGAACDAVNGSCLCPAGRRGPRCAETCPAHTYGHNCSQACACFNGASCDPVHGQCHCAPGWMGPSCLQACPAGLYGDNCRHSCLCQNGGTCDPVSGHCACPEGWAGLACEKECLPRDVRAGCRHSGGCLNGGLCDPHTGRCLCPAGWTGDKCQSPCLRGWFGEACAQRCSCPPGAACHHVTGACRCPPGFTGSGCEQACPPGSFGEDCAQMCQCPGENPACHPATGTCSCAAGYHGPSCQQRCPPGRYGPGCEQLCGCLNGGSCDAATGACRCPTGFLGTDCNLTCPQGRFGPNCTHVCGCGQGAACDPVTGTCLCPPGRAGVRCERGCPQNRFGVGCEHTCSCRNGGLCHASNGSCSCGLGWTGRHCELACPPGRYGAACHLECSCHNNSTCEPATGTCRCGPGFYGQACEHPCPPGFHGAGCQGLCWCQHGAPCDPISGRCLCPAGFHGHFCERGCEPGSFGEGCHQRCDCDGGAPCDPVTGLCLCPPGRSGATCNLDCRRGQFGPSCTLHCDCGGGADCDPVSGQCHCVDGYMGPTCREGGPLRLPENPSLAQGSAGTLPASSRPTSRSGGPARH

SEQ ID NO: 35532 - protein, 1229 aa, Homo sapiens
MGASRDRGLAALWCLGLLGGLARVAGTHYRYLWRGCYPCHLGQAGYPVSAGDQRPDVDECRTHNGGCQHRCVNTPGSYLCECKPGFRLHTDSRTCLAINSCALGNGGCQHHCVQLTITRHRCQCRPGFQLQEDGRHCVRRSPCANRNGSCMHRCQVVRGLARCECHVGYQLAADGKACEDVDECAAGLAQCAHGCLNTQGSFKCVCHAGYELGADGRQCYRIEMEIVNSCEANNGGCSHGCSHTSAGPLCTCPRGYELDTDQRTCIDVDDCADSPCCQQVCTNNPGGYECGCYAGYRLSADGCGCEDVDECASSRGGCEHHCTNLAGSFQCSCEAGYRLHEDRRGCSPLEEPMVDLDGELPFVRPLPHIAVLQDELPQLFQDDDVGADEEEAELRGEHTLTEKFVCLDDSFGHDCSLTCDDCRNGGTCLLGLDGCDCPEGWTGLICNETCPPDTFGKNCSFSCSCQNGGTCDSVTGACRCPPGVSGTNCEDGCPKGYYGKHCRKKCNCANRGRCHRLYGACLCDPGLYGRFCHLTCPPWAFGPGCSEECQCVQPHTQSCDKRDGSCSCKAGFRGERCQAECELGYFGPGCWQACTCPVGVACDSVSGECGKRCPAGFQGEDCGQECPVGTFGVNCSSSCSCGGAPCHGVTGQCRCPPGRTGEDCEADCPEGRWGLGCQEICPACQHAARCDPETGACLCLPGFVGSRCQDVCPAGWYGPSCQTRCSCANDGHCHPATGHCSCAPGWTGFSCQRACDTGHWGPDCSHPCNCSAGHGSCDAISGLCLCEAGYVGPRCEQQCPQGHFGPGCEQRCQCQHGAACDHVSGACTCPAGWRGTFCEHACPAGFFGLDCRSACNCTAGAACDAVNGSCLCPAGRRGPRCAEKCLPRDVRAGCRHSGGCLNGGLCDPHTGRCLCPAGWTGDKCQSPCLRGWFGEACAQRCSCPPGAACHHVTGACRCPPGFTGSGCEQGCPPGRYGPGCEQLCGCLNGGSCDAATGACRCPTGFLGTDCNLTCPQGRFGPNCTHVCGCGQGAACDPVTGTCLCPPGRAGVRCERGCPQNRFGVGCEHTCSCRNGGLCHASNGSCSCGLGWTGRHCELACPPGRYGAACHLECSCHNNSTCEPATGTCRCGPGFYGQACEHRRSGATCNLDCRRGQFGPSCTLHCDCGGGADCDPVSGQCHCVDGYMGPTCREGGPLRLPENPSLAQGSAGTLPASSRPTSRSGGPARH

SEQ ID NO: 35533 - protein, 1711 aa, Homo sapiens
MSAKVRLKKLEQLLLDGPWRNESALSVETLLDVLVCLYTECSHSALRRDKYVAEFLEWAKPFTQLVKEMQLHREDFEIIKVIGRGAFGEVAVVKMKNTERIYAMKILNKWEMLKRAETACFREERDVLVNGDCQWITALHYAFQDENHLYLVMDYYVGGDLLTLLSKFEDKLPEDMARFYIGEMVLAIDSIHQLHYVHRDIKPDNVLLDVNGHIRLADFGSCLKMNDDGTVQSSVAVGTPDYISPEILQAMEDGMGKYGPECDWWSLGVCMYEMLYGETPFYAESLVETYGKIMNHEERFQFPSHVTDVSEEAKDLIQRLICSRERRLGQNGIEDFKKHAFFEGLNWENIRNLEAPYIPDVSSPSDTSNFDVDDDVLRNTEILPPGSHTGFSGLHLPFIGFTFTTESCFSDRGSLKSIMQSNTLTKDEDVQRDLEHSLQMEAYERRIRRLEQEKLELSRKLQESTQTVQSLHGSSRALSNSNRDKEIKKLNEEIERLKNKIADSNRLERQLEDTVALRQEREDSTQRLRGLEKQHRVVRQEKEELHKQLVEASERLKSQAKELKDAHQQRKLALQEFSELNERMAELRAQKQKVSRQLRDKEEEMEVATQKVDAMRQEMRRAEKLRKELEAQLDDAVAEASKERKLREHSENFCKQMESELEALKVKQGGRGAGATLEHQQEISKIKSELEKKVLFYEEELVRREASHVLEVKNVKKEVHDSESHQLALQKEILMLKDKLEKSKRERHNEMEEAVGTIKDKYERERAMLFDENKKLTAENEKLCSFVDKLTAQNRQLEDELQDLAAKKESVAHWEAQIAEIIQWVSDEKDARGYLQALASKMTEELEALRSSSLGSRTLDPLWKVRRSQKLDMSARLELQSALEAEIRAKQLVQEELRKVKDANLTLESKLKDSEAKNRELLEEMEILKKKMEEKFRADTGLKLPDFQDSIFEYFNTAPLAHDLTFRTSSASEQETQAPKPEASPSMSVAASEQQEDMARPPQRPSAVPLPTTQALALAGPKPKAHQFSIKSFSSPTQCSHCTSLMVGLIRQGYACEVCSFACHVSCKDGAPQVCPIPPEQSKRPLGVDVQRGIGTAYKGHVKVPKPTGVKKGWQRAYAVVCDCKLFLYDLPEGKSTQPGVIASQVLDLRDDEFSVSSVLASDVIHATRRDIPCIFRVTASLLGAPSKTSSLLILTENENEKRKWVGILEGLQSILHKNRLRNQVVHVPLEAYDSSLPLIKAILTAAIVDADRIAVGLEEGLYVIEVTRDVIVRAADCKKVHQIELAPREKIVILLCGRNHHVHLYPWSSLDGAEGSFDIKLPETKGCQLMATATLKRNSGTCLFVAVKRLILCYEIQRTKPFHRKFNEIVAPGSVQCLAVLRDRLCVGYPSGFCLLSIQGDGQPLNLVNPNDPSLAFLSQQSFDALCAVELESEEYLLCFSHMGLYVDPQGRRARAQELMWPAAPVACSCSPTHVTVYSEYGVDVFDVRTMEWVQTIGLRRIRPLNSEGTLNLLNCEPPRLIYFKSKFSGAVLNVPDTSDNSKKQMLRTRSKRRFVFKVPEEERLQQRREMLRDPELRSKMISNPTNFNHVAHMGPGDGMQVLMDLPLSAVPPSQEERPGPAPTNLARQPPSRNKPYISWPSSGGSEPSVTVPLRSMSDPDQDFDKEPDSDSTKHSTPSNSSNPSGPPSPNSPHRSQLPLEGLEQPACDT

SEQ ID NO: 35534 - protein, 1003 aa, Homo sapiens
MPSKFSCRQLREAGQCFESFLVVRGLDMETDRERLRTIYNRDFKISFGTPAPGFSSMLYGMKIANLAYVTKTRVRFFRLDRWADVRFPEKRRMKLGSDISKHHKSLLAKIFYDRAEYLHGKHGVDVEVQGPHEARDGQLLIRLDLNRKEVLTLRLRNGGTQSVTLTHLFPLCRTPQFAFYNEDQELPCPLGPGECYELHVHCKTSFVGYFPATVLWELLGPGESGSEGAGTFYIARFLAAVAHSPLAAQLKPMTPFKRTRITGNPVVTNRIEEGERPDRAKGYDLELSMALGTYYPPPRLRQLLPMLLQGTSIFTAPKEIAEIKAQLETALKWRNYEVKLRLLLHLEELQMEHDIRHYDLESVPMTWDPVDQNPRLLTLEVPGVTESRPSVLRGDHLFALLSSETHQEDPITYKGFVHKVELDRVKLSFSMSLLSRFVDGLTFKVNFTFNRQPLRVQHRALELTGRWLLWPMLFPVAPRDVPLLPSDVKLKLYDRSLESNPEQLQAMRHIVTGTTRPAPYIIFGPPGTGKTVTLVEAIKQVVKHLPKAHILACAPSNSGADLLCQRLRVHLPSSIYRLLAPSRDIRMVPEDIKPCCNWDAKKGEYVFPAKKKLQEYRVLITTLITAGRLVSAQFPIDHFTHIFIDEAGHCMEPESLVAIAGLMEVKETGDPGGQLVLAGDPRQLGPVLRSPLTQKHGLGYSLLERLLTYNSLYKKGPDGYDPQFITKLLRNYRSHPTILDIPNQLYYEGELQACADVVDRERFCRWAGLPRQGFPIIFHGVMGKDEREGNSPSFFNPEEAATVTSYLKLLLAPSSKKGKARLSPRSVGVISPYRKQVEKIRYCITKLDRELRGLDDIKDLKVGSVEEFQGQERSVILISTVRSSQSFVQLDLDFNLGFLKNPKRFNVAVTRAKALLIIVGNPLLLGHDPDWKVFLEFCKENGGYTGCPFPAKLDLQQGQNLLQGLSKLSPSTSGPHSHDYLPQEREGEGGLSLQVEPEWRNEL

SEQ ID NO: 35535 - protein, 900 aa, Homo sapiens
MPSKFSCRQLREAGQCFESFLVVRGLDMETDRERLRTIYNRDFKISFGTPAPGFSSMLYGMKIANLAYVTKTRVRFFRLDRWADVRFPEKRRMKLGSDISKHHKSLLAKIFYDRAEYLHGKHGVDVEVQGPHEARDGQLLIRLDLNRKEVLTLRLRNGGTQSVTLTHLFPLCRTPQFAFYNEDQELPCPLGPGECYELHVHCKTSFVGYFPATVLWELLGPGESGSEGAGTFYIARFLAAVAHSPLAAQLKPMTPFKRTRITGNPVVTNRIEEGERPDRAKGYDLELSMALGTYYPPPRLRQLLPMLLQGTSIFTAPKEIAEIKAQLETALKWRNYEVKLRLLLHLEELQMEHDIRHYDLESVPMTWDPVDQNPRLLTLEVPGVTESRPSVLRGDHLFALLSSETHQEDPITYKGFVHKVELDRVKLSFSMSLLSRFVDGLTFKVNFTFNRQPLRVQHRALELTGRWLLWPMLFPVAPRDVPLLPSDVKLKLYDRSLESNPEQLQAMRHIVTGTTRPAPYIIFGPPGTGKTVTLVEAIKQVVKHLPKAHILACAPSNSGADLLCQRLRVHLPSSIYRLLAPSRDIRMVPEDIKPCCNWDAKKGEYVFPAKKKLQEYRVLITTLITAGRLVSAQFPIDHFTHIFIDEAGHCMEPESLVAIAGLMEVKETGDPGGQLVLAGDPRQLGPVLRSPLTQKHGLGYSLLERLLTYNSLYKKGPDGYDPQFITKLLRNYRSHPTILDIPNQLYYEGELQACADVVDRERFCRWAGLPRQGFPIIFHGVMGKDEREGNSPSFFNPEEAATVTSYLKLLLAPSSKKGKARLSPRSVGVISPYRKQVRSSVTSKGGAPPPDGTSLISRPLGRGSRSLGLCWLRISEEHQGQLPPPFVPQLPGLLPGSLLH

SEQ ID NO: 35536 - protein, 56 aa, Homo sapiens
MPSKFSCRQLREAGQCFESFLVVRGLDMETDRERLRTIYNRDFKISLASSKSILQS

SEQ ID NO: 35537 - protein, 505 aa, Homo sapiens
MPQALERADGSWAWVVLLATMVTQGLTLGFPTCIGIFFTELQWEFQASNSETSWFPSILTAVLHMAGPLCSILVGRFGCRVTVMLGGVLASLGMVASSFSHNLSQLYFTAGFITGLGMCFSFQSSITVLGFYFVRRRVLANALASMGVSLGITLWPLLSRYLLENLGWRGTFLVFGGIFLHCCICGAIIRPVATSVAPETKECPPPPPETPALGCLAACGRTIQRHLAFDILRHNTGYCVYILGVMWSVLGFPLPQVFLVPYAMWHSVDEQQAALLISIIGFSNIFLRPLAGLMAGRPAFASHRKYLFSLALLLNGLTNLVCAASGDFWVLVGYCLAYSVSMSGIGALIFQVLMDIVPMDQFPRALGLFTVLDGLAFLISPPLAGLLLDATNNFSYVFYMSSFFLISAALFMGGSFYALQKKEQGKQAVAADALERDLFLEAKDGPGKQRSPEIMCQSSRQPRPAGVNKHLWGCPASSRTSHEWLLWPKAVLQAKQTALGWNSPT

SEQ ID NO: 35538 - protein, 500 aa, Homo sapiens
MPRPTRGPLATSQGWCPSVTPGTWAAATLAVRPWQRRQQRMPQALERADGSWAWVVLLATMVTQGLTLGFPTCIGIFFTELQWEFQASNSETSWFPSILTAVLHMAGPLCSILVGRFGCRVTVMLGGVLASLGMVASSFSHNLSQLYFTAGFITGLGMCFSFQSSITVLGFYFVRRRVLANALASMGVSLGITLWPLLSRYLLENLGWRGTFLVFGGIFLHCCICGAIIRPVATSVAPETKECPPPPPETPALGCLAACGRTIQRHLAFDILRHNTGYCVYILGVMWSVLGFPLPQVFLVPYAMWHSVDEQQAALLISIIGFSNIFLRPLAGLMAGRPAFASHRKYLFSLALLLNGLTNLVCAASGDFWVLVGYCLAYSVSMSGIGALIFQVLMDIVPMDQFPRALGLFTVLDGLAFLISPPLAGLLLDATNNFSYVFYMSSFFLISAALFMGGSFYALQKKEQGKQAVAADALERDLFLEAKDGPGKQRSPEIMYVTSV

SEQ ID NO: 35539 - protein, 322 aa, Homo sapiens
MDPTVPVFGTKLTPINGREETPCYNQTLSFTVLTCIISLVGLTGNAVVLWLLGYRMRRNAVSIYILNLAAADFLFLSFQIIRLPLRLINISHLIRKILVSVMTFPYFTGLSMLSAISTERCLSVLWPIWYRCRRPTHLSAVVCVLLWGLSLLFSMLEWRFCDFLFSGADSSWCETSDFIPVAWLIFLCVVLCVSSLVLLVRILCGSRKMPLTRLYVTILLTVLVFLLCGLPFGILGALIYRMHLNLEVLYCHVYLVCMSLSSLNSSANPIIYFFVGSFRQRQNRQNLKLVLQRALQDKPEVDKGEGQLPEESLELSGSRLGP

SEQ ID NO: 35540 - protein, 613 aa, Homo sapiens
MCCWPLLLLWGLLPGTAAGGSGRTYPHRTLLDSEGKYWLGWSQRGSQIAFRLQVRTAGYVGFGFSPTGAMASADIVVGGVAHGRPYLQDYFTNANRELKKDAQQDYHLEYAMENSTHTIIEFTRELHTCDINDKSITDSTVRVIWAYHHEDAGEAGPKYHDSNRGTKSLRLLNPEKTSVLSTALPYFDLVNQDVPIPNKDTTYWCQMFKIPVFQEKHHVIKVEPVIQRGHESLVHHILLYQCSNNFNDSVLESGHECYHPNMPDAFLTCETVIFAWAIGGEGFSYPPHVGLSLGTPLDPHYVLLEVHYDNPTYEEGLIDNSGLRLFYTMDIRKYDAGVIEAGLWVSLFHTIPPGMPEFQSEGHCTLECLEEALEAEKPSGIHVFAVLLHAHLAGRGIRLRHFRKGKEMKLLAYDDDFDFNFQEFQYLKEEQTILPGDNLITECRYNTKDRAEMTWGGLSTRSEMCLSYLLYYPRINLTRCASIPDIMEQLQFIGVKEIYRPVTTWPFIIKSPKQYKNLSFMDAMNKFKWTKKEGLSFNKLVLSLPVNVRCSKTDNAEWSIQGMTALPPDIERPYKAEPLVCGTSSSSSLHRDFSINLLVCLLLLSCTLSTKSL

SEQ ID NO: 35541 - protein, 545 aa, Homo sapiens
MNSFLSVFRYPDFSFPYFPQDYFTNANRELKKDAQQDYHLEYAMENSTHTIIEFTRELHTCDINDKSITDSTVRVIWAYHHEDAGEAGPKYHDSNRGTKSLRLLNPEKTSVLSTALPYFDLVNQDVPIPNKDTTYWCQMFKIPVFQEKHHVIKVEPVIQRGHESLVHHILLYQCSNNFNDSVLESGHECYHPNMPDAFLTCETVIFAWAIGGEGFSYPPHVGLSLGTPLDPHYVLLEVHYDNPTYEEGLIDNSGLRLFYTMDIRKYDAGVIEAGLWVSLFHTIPPGMPEFQSEGHCTLECLEEALEAEKPSGIHVFAVLLHAHLAGRGIRLRHFRKGKEMKLLAYDDDFDFNFQEFQYLKEEQTILPGDNLITECRYNTKDRAEMTWGGLSTRSEMCLSYLLYYPRINLTRCASIPDIMEQLQFIGVKEIYRPVTTWPFIIKSPKQYKNLSFMDAMNKFKWTKKEGLSFNKLVLSLPVNVRCSKTDNAEWSIQGMTALPPDIERPYKAEPLVCGTSSSSSLHRDFSINLLVCLLLLSCTLSTKSL

SEQ ID NO: 35542 - protein, 216 aa, Homo sapiens
MALCLKQVFAKDKTFRPRKRFEPGTQRFELYKKAQASLKSGLDLRSVVRLPPGENIDDWIAVHVVDFFNRINLIYGTMAERCSETSCPVMAGGPRYEYRWQDERQYRRPAKLSAPRYMALLMDWIEGLINDEEVFPTRVGVPFPKNFQQVCTKILTRLFRVFVHVYIHHFDSILSMGAEAHVNTCYKHFYYFIREFSLVDQRELEPLREMTERICH

SEQ ID NO: 35543 - protein, 495 aa, Homo sapiens
MGSKRRNLSCSERHQKLVDENYCKKLHVQALKNVNSQIRNQMVQNENDNRVQRKQFLRLLQNEQFELDMEEAIQKAEENKRLKELQLKQEEKLAMELAKLKHESLKDEKMRQQVRENSIELRELEKKLKAAYMNKERAAQIAEKDAIKYEQMKRDAEIAKTMMEEHKRIIKEENAAEDKRNKAKAQYYLDLEKQLEEQEKKKQEAYEQLLKEKLMIDEIVRKIYEEDQLEKQQKLEKMNAMRRYIEEFQKEQALWRKKKREEMEEENRKIIEFANMQQQREEDRMAKVQENEEKRLQLQNALTQKLEEMLRQREDLEQVRQELYQEEQAEIYKSKLKEEAEKKLRKQKEMKQDFEEQMALKELVLQAAKEEEENFRKTMLAKFAEDDRIELMNAQKQRMKQLEHRRAVEKLIEERRQQFLADKQRELEEWQLQQRRQGFINAIIEEERLKLLKEHATNLLGYLPKGVFKKEDDIDLLGEEFRKVYQQRSEICEEK

SEQ ID NO: 35544 - protein, 385 aa, Homo sapiens
MSLILNILREMLEYFGVPVEQVLLIWENKDYGSTRSIVRIIGKMLPLEPCRRPNFELIPLLNSVDSDNCGSMVPSFADILYVANDEEASYLRFRNSIWKNEEEKVEIFHPLRLVRDPLSPAVRQKETVKNDLPVNEAAIRKIAALENELTFLRSQIAAIVEMQELKNSTNSSSFGLSDERISLGQLSSSRAAHLSVDPDQLPGSVLSPPPPPPLPPQFSSLQPPCFPPVQPGSNNICDSDNPATEMSKQNPAANKTNYSHHSKSQRNKDIPNMLDVLKDMNKVKLRAIERSPGGRPIHKRKRQNSHWDPVSLISHALKQKFAFQEDDSFEKENRSWESSPFSSPETSRFGHHISQSEGQRTKEEMVNTKAVDQGISNTSLLNSRI

SEQ ID NO: 35545 - protein, 44 aa, Homo sapiens
MSLILNILREMLEYFGVPVEQLEVTSAYLSSLWKKQTGRNLRST

SEQ ID NO: 35546 - protein, 709 aa, Homo sapiens
MGCLWGLALPLFFFCWEVGVSGSSAGPSTRRADTAMTTDDTEVPAMTLAPGHAALETQTLSAETSSRASTPAGPIPEAETRGAKRISPARETRSFTKTSPNFMVLIATSVETSAASGSPEGAGMTTVQTITGSDPREAIFDTLCTDDSSEEAKTLTMDILTLAHTSTEAKGLSSESSASSDSPHPVITPSRASESSASSDGPHPVITPSRASESSASSDGPHPVITPSRASESSASSDGPHPVITPSRASESSASSDGPHPVITPSRASESSASSDGPHPVITPSRASESSASSDGPHPVITPSRASESSASSDGPHPVITPSRASESSASSDGPHPVITPSRASESSASSDGLHPVITPSRASESSASSDGPHPVITPSRASESSASSDGPHPVITPSWSPGSDVTLLAEALVTVTNIEVINCSITEIETTTSSIPGASDTDLIPTEGVKASSTSDPPALPDSTEAKPHITEVTASAETLSTAGTTESAAPDATVGTPLPTNSATEREVTAPGATTLSGALVTVSRNPLEETSALSVETPSYVKVSGAAPVSIEAGSAVGKTTSFAGSSASSYSPSEAALKNFTPSETPTMDIATKGPFPTSRDPLPSVPPTTTNSSRGTNSTLAKITTSAKTTMKPPTATPTTARTRPTTDVSAGENGGFLLLRLSVASPEDLTDPRVAERLMQQLHRELHAHAPHFQVSLLRVRRG

SEQ ID NO: 35547 - protein, 674 aa, Homo sapiens
MTTDDTEVPAMTLAPGHAALETQTLSAETSSRASTPAGPIPEAETRGAKRISPARETRSFTKTSPNFMVLIATSVETSAASGSPEGAGMTTVQTITGSDPREAIFDTLCTDDSSEEAKTLTMDILTLAHTSTEAKGLSSESSASSDSPHPVITPSRASESSASSDGPHPVITPSRASESSASSDGPHPVITPSRASESSASSDGPHPVITPSRASESSASSDGPHPVITPSRASESSASSDGPHPVITPSRASESSASSDGPHPVITPSRASESSASSDGPHPVITPSRASESSASSDGPHPVITPSRASESSASSDGLHPVITPSRASESSASSDGPHPVITPSRASESSASSDGPHPVITPSWSPGSDVTLLAEALVTVTNIEVINCSITEIETTTSSIPGASDTDLIPTEGVKASSTSDPPALPDSTEAKPHITEVTASAETLSTAGTTESAAPDATVGTPLPTNSATEREVTAPGATTLSGALVTVSRNPLEETSALSVETPSYVKVSGAAPVSIEAGSAVGKTTSFAGSSASSYSPSEAALKNFTPSETPTMDIATKGPFPTSRDPLPSVPPTTTNSSRGTNSTLAKITTSAKTTMKPPTATPTTARTRPTTDVSAGENGGFLLLRLSVASPEDLTDPRVAERLMQQLHRELHAHAPHFQVSLLRVRRG

SEQ ID NO: 35548 - protein, 344 aa, Homo sapiens
MHRTTRIKITELNPHLMCALCGGYFIDATTIVECLHSFCKTCIVRYLETNKYCPMCDVQVHKTRPLLSIRSDKTLQDIVYKLVPGLFKDEMKRRRDFYAAYPLTEVPNGSNEDRGEVLEQEKGALSDDEIVSLSIEFYEGARDRDEKKGPLENGDGDKEKTGVRFLRCPAAMTVMHLAKFLRNKMDVPSKYKVEVLYEDEPLKEYYTLMDIAYIYPWRRNGPLPLKYRVQPACKRLTLATVPTPSEGTNTSGASECESVSDKAPSPATLPATSSSLPSPATPSHGSPSSHGPPATHPTSPTPPSTASGATTAANGGSLNCLQTPSSTSRGRKMTVNGAPVPPLT

SEQ ID NO: 35549 - protein, 147 aa, Homo sapiens
MLLRRVVEGGRAVAAAVRGSGARRFSSPDCCQRLPGGGSFLQRHHPGAQAPDGRRKFGTDHVEVGSQAGADGTRPPKASLPPELQPPTNCCMSGCPNCVWVEYADRLLQHFQDGGERALAALEEHVADENLKAFLRMEIRLHTRCGG

SEQ ID NO: 35550 - protein, 1017 aa, Homo sapiens
MSKKPPNRPGITFEIGARLEALDYLQKWYPSRIEKIDYEEGKMLVHFERWSHRYDEWIYWDSNRLRPLERPALRKEGLKDEEDFFDFKAGEEVLARWTDCRYYPAKIEAINKEGTFTVQFYDGVIRCLKRMHIKAMPEDAKGQVKSQHPLSWCCPIDPAGSCNQSMGSEDWIALVKAAAAAAAKNKTGSKPRTSANSNKDKDKDERKWFKVPSKKEETSTCIATPDVEKKEDLPTSSETFGLHVENVPKMVFPQPESTLSNKRKNNQGNSFQAKRARLNKITGLLASKAVGVDGAEKKEDYNETAPMLEQAISPKPQSQKKNEADISSSANTQKPALLSSTLSSGKARSKKCKHESGDSSGCIKPPKSPLSPELIQVEDLTLVSQLSSSVINKTSPPQPVNPPRPFKHSERRRRSQRLATLPMPDDSVEKVSSPSPATDGKVFSISSQNQQESSVPEVPDVAHLPLEKLGPCLPLDLSRGSEVTAPVASDSSYRNECPRAEKEDTQMLPNPSSKAIADGRGAPAAAGISKTEKKVKLEDKSSTAFGKRKEKDKERREKRDKDHYRPKQKKKKKKKKKSKQHDYSDYEDSSLEFLERCSSPLTRSSGSSLASRSMFTEKTTTYQYPRAILSVDLSGENLSDVDFLDDSSTESLLLSGDEYNQDFDSTNFEESQDEDDALNEIVRCICEMDEENGFMIQCEECLCWQHSVCMGLLEESIPEQYICYICRDPPGQRWSAKYRYDKEWLNNGRMCGLSFFKENYSHLNAKKIVSTHHLLADVYGVTEVLHGLQLKIGILKNKHHPDLHLWACSGKRKDQDQIIAGVEKKIAQDTVNREEKKYVQNHKEPPRLPLKMEGTYITSEHSYQKPQSFGQDCKSLADPGSSDDDDVSSLEEEQEFHMRSKNSLQYSAKEHGMPEKNPAEGNTVFVYNDKKGTEDPGDSHLQWQLNLLTHIENVQNEVTSRMDLIEKEVDVLESWLDFTGELEPPDPLARLPQLKRHIKQLLIDMGKVQQIATLCSV

SEQ ID NO: 35551 - protein, 285 aa, Homo sapiens
MSKKPPNRPGITFEIGARLEALDYLQKWYPSRIEKIDYEEGKMLVHFERWSHRYDEWIYWDSNRLRPLERPALRKEGLKDEEDFFDFKAGEEVLARWTDCRYYPAKIEAINKEGTFTVQFYDGVIRCLKRMHIKAMPEDAKGQDWIALVKAAAAAAAKNKTGSKPRTSANSNKDKDKDERKWFKVPSKKEETSTCIATPDVEKKEDLPTSSETFGLHVENVPKMVFPQPESTLSNKRKNNQGNSFQAKRARLNKITGLLASKAVGVDGAEKKEDYNETAPMLEQV

SEQ ID NO: 35552 - protein, 573 aa, Homo sapiens
MSKKPPNRPGITFEIGARLEALDYLQKWYPSRIEKIDYEEGKMLVHFERWSHRYDEWIYWDSNRLRPLERPALRKEGLKDEEDFFDFKAGEEVLARWTDCRYYPAKIEAINKEGTFTVQFYDGVIRCLKRMHIKAMPEDAKGQVKSQHPLSWCCPIDPAGSCNQSMGSEDWIALVKAAAAAAAKNKTGSKPRTSANSNKDKDKDERKWFKVPSKKEETSTCIATPDVEKKEDLPTSSETFGLHVENVPKMVFPQPESTLSNKRKNNQGNSFQAKRARLNKITGLLASKAVGVDGAEKKEDYNETAPMLEQAISPKPQSQKKNEADISSSANTQKPALLSSTLSSGKARSKKCKHESGDSSGCIKPPKSPLSPELIQVEDLTLVSQLSSSVINKTSPPQPVNPPRPFKHSERRRRSQRLATLPMPDDSVEKVSSPSPATDGKVFSISSQNQQESSVPEVPDVAHLPLEKLGPCLPLDLSRGSEVTAPVASDSSYRNECPRAEKEDTQMLPNPSSKAIADGRGAPAAAGISKTEKKVKLEDKSSTAFGIRSWDFSALLMKIPSYSPISLSGLPES

SEQ ID NO: 35553 - protein, 256 aa, Homo sapiens
MATQRKHLVKDFNPYITCYICKGYLIKPTTVTECLHTFCKTCIVQHFEDSNDCPRCGNQVHETNPLEMLRLDNTLEEIIFKLVPGLREQELERESEFWKKNKPQENGQDDTSKADKPKVDEEGDENEDDKDYHRSDPQIAICLDCLRNNGQSGDNVVKGLMKKFIRCSTRVTVGTIKKFLSLKLKLPSSYELDVLCNGEIMGKDHTMEFIYMTRWRLRGENFRCLNCSASQVCSQDGPLYQSYPMVLQYRPRIDFG

SEQ ID NO: 35554 - protein, 49 aa, Homo sapiens
MATQRKHLVKDFNPYITCYICKGYLIKPTTVTECLHTSAESYWMSTWMS

SEQ ID NO: 35555 - protein, 614 aa, Homo sapiens
MNASGSGYPLASLYVGDLHPDVTEAMLYEKFSPAGPILSIRVCRDVATRRSLGYAYINFQQPADAERALDTMNFEMLKGQPIRIMWSQRDPGLRKSGVGNIFIKNLEDSIDNKALYDTFSTFGNILSCKVACDEHGSRGFGFVHFETHEAAQQAINTMNGMLLNDRKVFVGHFKSRREREAELGARALEFTNIYVKNLPVDVDEQGLQDLFSQFGKMLSVKVMRDNSGHSRCFGFVNFEKHEEAQKAVVHMNGKEVSGRLLYAGRAQKRVERQNELKRRFEQMKQDRLRRYQGVNLYVKNLDDSIDDDKLRKEFSPYGVITSAKVMTEGGHSKGFGFVCFSSPEEATKAVTEMNGRIVGTKPLYVALAQRKEERKAILTNQYMQRLSTMRTLSNPLLGSFQQPSSYFLPAMPQPPAQAAYYGCGPVTPTQPAPRWTSQPPRPSCASMVRPPVVPRRPPAHISSVRQASTQVPRTVPHTQRVANIGTQTTGPSGVGCCTPGRPLLPCKCSSAAHSTYRVQEPAVHIPGQEPLTASMLAAAPLHEQKQMIGERLYPLIHDVHTQLAGKITGMLLEIDNSELLLMLESPESLHAKIDEAVAVLQAHQAMEQPKAYMH

SEQ ID NO: 35556 - protein, 330 aa, Homo sapiens
MNASGSGYPLASLYVGDLHPDVTEAMLYEKFSPAGPILSIRVCRDVATRRSLGYAYINFQQPADAERALDTMNFEMLKGQPIRIMWSQRDPGLRKSGVGNIFIKNLEDSIDNKALYDTFSTFGNILSCKVACDEHGSRGFGFVHFETHEAAQQAINTMNGMLLNDRKVFVGHFKSRREREAELGARALEFTNIYVKNLPVDVDEQGLQDLFSQFGKMLSVKVMRDNSGHSRCFGFVNFEKHEEAQKAVVHMNGKEVSGRLLYAGRAQKRVERQNELKRRFEQMKQDRLRRYQGVNLYVKNLDDSIDDDKLRKEFSPYGVITSAKKRRQRP

SEQ ID NO: 35557 - protein, 350 aa, Homo sapiens
MEGVAVVTAGSVGAAKTEGAAALPPPPPVSPPALTPAPAAGEEGPAPLSETGAPGCSGSRPPELEPERSLGRFRGRFEDEDEELEEEEELEEEEEEEEEDMSHFSLRLEGGRQDSEDEEERLINLSELTPYILCSICKGYLIDATTITECLHTFCKSCIVRHFYYSNRCPKCNIVVHQTQPLYNIRLDRQLQDIVYKLVINLEEREKKQMHDFYKERGLEVPKPAVPQPVPSSKGRSKKVLESVFRIPPELDMSLLLEFIGANEGTGHFKPLEKKFVRVSGEATIGHVEKFLRRKMGLDPACQVDIICGDHLLEQYQTLREIRRAIGDAAMQDGLLVLHYGLVVSPLKIT

SEQ ID NO: 35558 - protein, 275 aa, Homo sapiens
MEGVAVVTAGSVGAAKTEGAAALPPPPPVSPPALTPAPAAGEEGPAPLSETGAPGCSGSRPPELEPERSLGRFRGRFEDEDEELEEEEELEEEEEEEEEDMSHFSLRLEGGRQDSEDEEERLINLSELTPYILCSICKGYLIDATTITECLHTFCKSCIVRHFYYSNRCPKCNIVVHQTQPLYNISANEGTGHFKPLEKKFVRVSGEATIGHVEKFLRRKMGLDPACQVDIICGDHLLEQYQTLREIRRAIGDAAMQDGLLVLHYGLVVSPLKIT

SEQ ID NO: 35559 - protein, 432 aa, Homo sapiens
MDEAVGDLKQALPCVAESPTVHVEVHQRGSSTAKKEDINLSVRKLLNRHNIVFGDYTWTEFDEPFLTRNVQSVSIIDTELKVKDSQPIDLSACTVALHIFQLNEDGPSSENLEEETENIIAANHWVLPAAEFHGLWDSLVYDVEVKSHLLDYVMTTLLFSDKNVNSNLITWNRVVLLHGPPGTGKTSLCKALAQKLTIRLSSRYRYGQLIEINSHSLFSKWFSESGKLVTKMFQKIQDLIDDKDALVFVLIDEVESLTAARNACRAGTEPSDAIRVVNAVLTQIDQIKRHSNVVILTTSNITEKIDVAFVDRADIKQYIGPPSAAAIFKIYLSCLEELMKCQIIYPRQQLLTLRELEMIGFIENNVSKLSLLLNDISRKSEGLSGRVLRKLPFLAHALYVQAPTVTIEGFLQALSLAVDKQFEERKKLAAYI

SEQ ID NO: 35560 - protein, 196 aa, Homo sapiens
MDEAVGDLKQALPCVAESPTVHVEVHQRGSSTAKKEDINLSVRKLLNRHNIVFGDYTWTEFDEPFLTRNVQSVSIIDTELKVKDSQPIDLSACTVALHIFQLNEDGPSSENLEEETENIIAANHWVLPAAEFHGLWDSLVYDVEVKSHLLDYVMTTLLFSDKNVNSNLITIEGFLQALSLAVDKQFEERKKLAAYI

SEQ ID NO: 35561 - protein, 475 aa, Homo sapiens
MPGISARGLSHEGRKQLAVNLTRVLALYRSILDAYIIEFFTDNLWDTLPCSWQEALDGLKPPQLATMLLGMPGEGEVVRYRSVWPLTLLALKSTACALAFTRMPGFQTPSEFLENPSQSSRLTAPFRKHVRPKKQHEIRRLGELVKKLSDFTGCTQVVDVGSGQGHLSRFMALGLGLMVKSIEGDQRLVERAQRLDQELLQALEKEEKRNPQVVQTSPRHSPHHVVRWVDPTALCEELLLPLENPCQGRARLLLTGLHACGDLSVALLRHFSCCPEVVALASVGCCYMKLSDPGGYPLSQWVAGLPGYELPYRLREGACHALEEYAERLQKAGPGLRTHCYRAALETVIRRARPELRRPGVQGIPRVHELKIEEYVQRGLQRVGLDPQLPLNLAALQAHVAQENRVVAFFSLALLLAPLVETLILLDRLLYLQEQGFHAELLPIFSPELSPRNLVLVATKMPLGQALSVLETEDS

SEQ ID NO: 35562 - protein, 277 aa, Homo sapiens
MPGISARGLSHEGRKQLAVNLTRVLALYRSILDAYIIEFFTDNLWDTLPCSWQEALDGLKPPQLATMLLGMPGEGEVVRYRSVWPLTLLALKSTACALAFTRMPGFQTPSEFLENPSQSSRLTAPFRKHVRPKKQHEIRRLGELVKKLSDFTGCTQVVDVGSGQGHLSRFMALGLGLMVKSIEGDQRLVERAQRLDQELLQALEKEEKRNPQICAAGATASGARSPAATESGCPSGPRGPGEPCGGLLQPGSTACPTGGDAYSTGPAAVPSGTGFPC

SEQ ID NO: 35563 - protein, 755 aa, Homo sapiens
MEAVIEKECSALGGLFQTIISDMKGSYPVWEDFINKAGKLQSQLRTTVVAAAAFLDAFQKVADMATNTRGGTREIGSALTRMCMRHRSIEAKLRQFSSALIDCLINPLQEQMEEWKKVANQLDKDHAKEYKKARQEIKKKSSDTLKLQKKAKKGRGDIQPQLDSALQDVNDKYLLLEETEKQAVRKALIEERGRFCTFISMLRPVIEEEISMLGEITHLQTISEDLKSLTMDPHKLPSSSEQVILDLKGSDYSWSYQTPPSSPSTTMSRKSSVCSSLNSVNSSDSRSSGSHSHSPSSHYRYRSSNLAQQAPVRLSSVSSHDSGFISQDAFQSKSPSPMPPEAPNQLSNGFSHYSLSSESHVGPTGAGLFPHCLPASRLLPRVTSVHLPDYAHYYTIGPGMFPSSQIPSWKDWAKPGPYDQPLVNTLQRRKEKREPDPNGGGPTTASGPPAAAEEAQRPRSMTVSAATRPGEEMEACEELALALSRGLQLDTQRSSRDSLQCSSGYSTQTTTPCCSEDTIPSQVSDYDYFSVSGDQEADQQEFDKSSTIPRNSDISQSYRRMFQAKRPASTAGLPTTLGPAMVTPGVATIRRTPSTKPSVRRGTIGAGPIPIKTPVIPVKTPTVPDLPGVLPAPPDGPEERGEHSPESPSVGEGPQGVTSMPSSMWSGQASVNPPLPGPKPSIPEEHRQAIPESEAEDQEREPPSATVSPGQIPESDPADLSPRDTPQGEDMLNAIRRGVKLKKTTTNDRSAPRFS

SEQ ID NO: 35564 - protein, 473 aa, Homo sapiens
MLRPVIEEEISMLGEITHLQTISEDLKSLTMDPHKLPSSSEQVILDLKGSDYSWSYQTPPSSPSTTMSRKSSVCSSLNSVNSSDSRSSGSHSHSPSSHYRYRSSNLAQQAPVRLSSVSSHDSGFISQDAFQSKSPSPMPPEAPNQRRKEKREPDPNGGGPTTASGPPAAAEEAQRPRSMTVSAATRPGEEMEACEELALALSRGLQLDTQRSSRDSLQCSSGYSTQTTTPCCSEDTIPSQVSDYDYFSVSGDQEADQQEFDKSSTIPRNSDISQSYRRMFQAKRPASTAGLPTTLGPAMVTPGVATIRRTPSTKPSVRRGTIGAGPIPIKTPVIPVKTPTVPDLPGVLPAPPDGPEERGEHSPESPSVGEGPQGVTSMPSSMWSGQASVNPPLPGPKPSIPEEHRQAIPESEAEDQEREPPSATVSPGQIPESDPADLSPRDTPQGEDMLNAIRRGVKLKKTTTNDRSAPRFS

SEQ ID NO: 35565 - protein, 730 aa, Homo sapiens
MEAVIEKECSALGGLFQTIISDMKGSYPVWEDFINKAGKLQSQLRTTVVAAAAFLDAFQKVADMATNTRGGTREIGSALTRMCMRHRSIEAKLRQFSSALIDCLINPLQEQMEEWKKVANQLDKDHAKEYKKARQEIKKKSSDTLKLQKKAKKGRGDIQPQLDSALQDVNDKYLLLEETEKQAVRKALIEERGRFCTFISMLRPVIEEEISMLGEITHLQTISEDLKSLTMDPHKLPSSSEQVILDLKGSDYSWSYQTPPSSPSTTMSRKSSVCSSLNSVNSSDSRSSGSHSHSPSSHYRYRSSNLAQQAPVRLSSVSSHDSGFISQDAFQSKSPSPMPPEAPNQNSSSSASSEASETCQSVSECSSPTSVSSGSTMGAWVSTEKDWAKPGPYDQPLVNTLQRRKEKREPDPNGGGPTTASGPPAAAEEAQRPRSMTVSAATRPGEEMEACEELALALSRGLQLDTQRSSRDSLQCSSGYSTQTTTPCCSEDTIPSQVSDYDYFSVSGDQEADQQEFDKSSTIPRNSDISQSYRRMFQAKRPASTAGLPTTLGPAMVTPGVATIRRTPSTKPSVRRGTIGAGPIPIKTPVIPVKTPTVPDLPGVLPAPPDGPEERGEHSPESPSVGEGPQGVTSMPSSMWSGQASVNPPLPGPKPSIPEEHRQAIPESEAEDQEREPPSATVSPGQIPESDPADLSPRDTPQGEDMLNAIRRGVKLKKTTTNDRSAPRFS

SEQ ID NO: 35566 - protein, 759 aa, Homo sapiens
MEAVIEKECSALGGLFQTIISDMKGSYPVWEDFINKAGKLQSQLRTTVVAAAAFLDAFQKVADMATNTRGGTREIGSALTRMCMRHRSIEAKLRQFSSALIDCLINPLQEQMEEWKKVANQLDKDHAKEYKKARQEIKKKSSDTLKLQKKAKKVDTLGRGDIQPQLDSALQDVNDKYLLLEETEKQAVRKALIEERGRFCTFISMLRPVIEEEISMLGEITHLQTISEDLKSLTMDPHKLPSSSEQVILDLKGSDYSWSYQTPPSSPSTTMSRKSSVCSSLNSVNSSDSRSSGSHSHSPSSHYRYRSSNLAQQAPVRLSSVSSHDSGFISQDAFQSKSPSPMPPEAPNQLSNGFSHYSLSSESHVGPTGAGLFPHCLPASRLLPRVTSVHLPDYAHYYTIGPGMFPSSQIPSWKDWAKPGPYDQPLVNTLQRRKEKREPDPNGGGPTTASGPPAAAEEAQRPRSMTVSAATRPGEEMEACEELALALSRGLQLDTQRSSRDSLQCSSGYSTQTTTPCCSEDTIPSQVSDYDYFSVSGDQEADQQEFDKSSTIPRNSDISQSYRRMFQAKRPASTAGLPTTLGPAMVTPGVATIRRTPSTKPSVRRGTIGAGPIPIKTPVIPVKTPTVPDLPGVLPAPPDGPEERGEHSPESPSVGEGPQGVTSMPSSMWSGQASVNPPLPGPKPSIPEEHRQAIPESEAEDQEREPPSATVSPGQIPESDPADLSPRDTPQGEDMLNAIRRGVKLKKTTTNDRSAPRFS

SEQ ID NO: 35567 - protein, 747 aa, Homo sapiens
METAEKECGALGGLFQAIVNDMKSSYPIWEDFNSKATKLHSQLRTTVLAAVAFLDAFQKVADMATNTRGATRDIGSALTRMCMRHRSIETKLRQFTNALLESLINPLQERIEDWKKAANQLDKDHAKEYKRARHEIKKKSSDTLKLQKKARKELLGKGDLQPQLDSALQDVNDMYLLLEETEKQAVRRALIEERGRFCTFITFLQPVVNGELTMLGEITHLQGIIDDLVVLTAEPHKLPPASEQVIKDLKGSDYSWSYQTPPSSPSSSSSRKSSMCSAPSSSSSAKGGGAPWPGGAQTYSPSSTCRYRSLAQPATTTARLSSVSSHDSGFVSQDATYSKPPSPMPSDITSQKSSSSASSEASETCQSVSECSSPTSDWSKVGSHEQPSGATLQRRKDRVELLRDTEPGPASGGTLGPSGEEAPRPRMSPATIAAKHGEEVSPAASDLAMVLTRGLSLEHQKSSRDSLQYSSGYSTQTTTPSCSEDTIPSQGSDYDCYSVNGDADSEGPPEFDKSSTIPRNSNIAQNYRRLIQTKRPASTAGLPTAGLPTATGLPSGAPPGVATIRRTPSTKPTVRRALSSAGPIPIRPPIVPVKTPTVPDSPGYMGPTRAGSEECVFYTDETASPLAPDLAKASPKRLSLPNTAWGSPSPEAAGYPGAGAEDEQQQLAANRHSLVEKLGELVAGAHALGEGQFPFPTALSATPTEETPTPPPAATSDPPAEDMLVAIRRGVRLRRTVTNDRSAPRIL

SEQ ID NO: 35568 - protein, 291 aa, Homo sapiens
METAEKECGALGGLFQAIVNDMKSSYPIWEDFNSKATKLHSQLRTTVLAAVAFLDAFQKVADMATNTRGATRDIGSALTRMCMRHRSIETKLRQFTNALLESLINPLQERIEDWKKAANQLDKDHAKEYKRARHEIKKKSSDTLKLQKKARKGKGDLQPQLDSALQDVNDMYLLLEETEKQAVRRALIEERGRFCTFITFLQPVVNGELTMLGEITHLQGIIDDLVVLTAEPHKLPPASEQVIKDLKGSDYSWSYQTPPSVPSEPFVSFLSVRFWKNSPLLPAPSTPSSPI

SEQ ID NO: 35569 - protein, 745 aa, Homo sapiens
MPFPVTTQGSQQTQPPQKHYGITSPISLAAPKETDCVLTQKLIETLKPFGVFEEEEELQRRILILGKLNNLVKEWIREISESKNLPQSVIENVGGKIFTFGSYRLGVHTKGADIDALCVAPRHVDRSDFFTSFYDKLKLQEEVKDLRAVEEAFVPVIKLCFDGIEIDILFARLALQTIPEDLDLRDDSLLKNLDIRCIRSLNGCRVTDEILHLVPNIDNFRLTLRAIKLWAKRHNIYSNILGFLGGVSWAMLVARTCQLYPNAIASTLVHKFFLVFSKWEWPNPVLLKQPEECNLNLPVWDPRVNPSDRYHLMPIITPAYPQQNSTYNVSVSTRMVMVEEFKQGLAITDEILLSKAEWSKLFEAPNFFQKYKHYIVLLASAPTEKQRLEWVGLVESKIRILVGSLEKNEFITLAHVNPQSFPAPKENPDKEEFRTMWVIGLVFKKTENSENLSVDLTYDIQSFTDTVYRQAINSKMFEVDMKIAAMHVKRKQLHQLLPNHVLQKKKKHSTEGVKLTALNDSSLDLSMDSDNSMSVPSPTSATKTSPLNSSGSSQGRNSPAPAVTAASVTNIQATEVSVPQVNSSESSGGTSSESIPQTATQPAISPPPKPTVSRVVSSTRLVNPPPRSSGNAATSGNAATKIPTPIVGVKRTSSPHKEESPKKTKTEEDETSEDANCLALSGHDKTEAKEQLDTETSTTQSETIQTAASLLASQKTSSTDLSDIPALPANPIPVIKNSIKLRLNR

SEQ ID NO: 35570 - protein, 285 aa, Homo sapiens
MPFPVTTQGSQQTQPPQKHYGITSPISLAAPKETDCVLTQKLIETLKPFGVFEEEEELQRRILILGKLNNLVKEWIREISESKNLPQSVIENVGGKIFTFGSYRLGVHTKGADIDALCVAPRHVDRSDFFTSFYDKLKLQEEVKDLRAVEEAFVPVIKLCFDGIEIDILFARLALQTIPEDLDLRDDSLLKNLDIRCIRSLNGCRVTDEILHLVPNIDNFRLTLRAIKLWAKRHNIYSNILGFLGGVSWAMLVARTCQLYPNAIASTLVHKFFLVFSKWYVFRLY

SEQ ID NO: 35571 - protein, 636 aa, Homo sapiens
MPFPVTTQGPPQPAPPPNRYGVSSPISLAVPKETDCLLTQRLIETLRPFGVFEEEEELQRRILVLEKLNNLVKEWIREISESKSLPQSVIENVGGKIFTFGSYRLGVHTKGADIDALCVAPSHVDRSDFFTSFYAKLKLQEEVKDLRAVEEAFVPVIKLCFDGIEIDILFARLALQTIPEDLDLRDDSLLKNLDIRCIRSLNGCRVTDEILHLVPNIDNFRLTLRAIKLWAKCHNIYSNILGFLGGVSWAMLVARTCQLYPNAVASTLVRKFFLVFSEWEWPNPVLLKEPEERNLNLPVWDPRVNPSDRYHLMPIITPAYPQQNSTYNVSISTRMVMIEEFKQGLAITHEILLSKAEWSKLFEAPSFFQKYKHYIVLLASASTEKQHLEWVGLVESKIRILVGSLEKNEFITLAHVNPQSFPAPKENPDMEEFRTMWVIGLGLKKPDNSEILSIDLTYDIQSFTDTVYRQAVNSKMFEMGMKITAMHLRRKELHQLLPHHVLQDKKAHSTEGRRLTDLNDSSFDLSAGCENSMSVPSSTSTMKTGPLISSSQGRNSPALAVMTASVANIQATEFSLQQVNTNESSGVALNESIPHAVSQPAISPSPKAMVARVVSSTCLISHPDLQETQQQTYLIL

SEQ ID NO: 35572 - protein, 417 aa, Homo sapiens
MALSAQQIPRWFNSVKLRSLINAAQLTKRFTRPARTLLHGFSAQPQISSDNCFLQWGFKTYRTSSLWNSSQSTSSSSQENNSAQSSLLPSMNEQSQKTQNISSFDSELFLEELDELPPLSPMQPISEEEAIQIIADPPLPPASFTLRDYVDHSETLQKLVLLGVDLSKIEKHPEAANLLLRLDFEKDIKQMLLFLKDVGIEDNQLGAFLTKNHAIFSEDLENLKTRVAYLHSKNFSKADVAQMVRKAPFLLNFSVERLDNRLGFFQKELELSVKKTRDLVVRLPRLLTGSLEPVKENMKVYRLELGFKHNEIQHMITRIPKMLTANKMKLTETFDFVHNVMSIPHHIIVKFPQVFNTRLFKVKERHLFLTYLGRAQYDPAKPNYISLDKLVSIPDEIFCEEIAKASVQDFEKFLKTL

SEQ ID NO: 35573 - protein, 327 aa, Homo sapiens
MNEQSQKTQNISSFDSELFLEELDELPPLSPMQPISEEEAIQIIADPPLPPASFTLRDYVDHSETLQKLVLLGVDLSKIEKHPEAANLLLRLDFEKDIKQMLLFLKDVGIEDNQLGAFLTKNHAIFSEDLENLKTRVAYLHSKNFSKADVAQMVRKAPFLLNFSVERLDNRLGFFQKELELSVKKTRDLVVRLPRLLTGSLEPVKENMKVYRLELGFKHNEIQHMITRIPKMLTANKMKLTETFDFVHNVMSIPHHIIVKFPQVFNTRLFKVKERHLFLTYLGRAQYDPAKPNYISLDKLVSIPDEIFCEEIAKASVQDFEKFLKTL

SEQ ID NO: 35574 - protein, 296 aa, Homo sapiens
MQPISEEEAIQIIADPPLPPASFTLRDYVDHSETLQKLVLLGVDLSKIEKHPEAANLLLRLDFEKDIKQMLLFLKDVGIEDNQLGAFLTKNHAIFSEDLENLKTRVAYLHSKNFSKADVAQMVRKAPFLLNFSVERLDNRLGFFQKELELSVKKTRDLVVRLPRLLTGSLEPVKENMKVYRLELGFKHNEIQHMITRIPKMLTANKMKLTETFDFVHNVMSIPHHIIVKFPQVFNTRLFKVKERHLFLTYLGRAQYDPAKPNYISLDKLVSIPDEIFCEEIAKASVQDFEKFLKTL

SEQ ID NO: 35575 - protein, 1791 aa, Homo sapiens
MMCLKILRISLAILAGWALCSANSELGWTRKKSLVEREHLNQVLLEGERCWLGAKVRRPRASPQHHLFGVYPSRAGNYLRPYPVGEQEIHHTGRSKPDTEGNAVSLVPPDLTENPAGLRGAVEEPAAPWVGDSPIGQSELLGDDDAYLGNQRSKESLGEAGIQKGSAMAATTTTAIFTTLNEPKPETQRRGWAKSRQRRQVWKRRAEDGQGDSGISSHFQPWPKHSLKHRVKKSPPEESNQNGGEGSYREAETFNSQVGLPILYFSGRRERLLLRPEVLAEIPREAFTVEAWVKPEGGQNNPAIIAGVFDNCSHTVSDKGWALGIRSGKDKGKRDARFFFSLCTDRVKKATILISHSRYQPGTWTHVAATYDGRHMALYVDGTQVASSLDQSGPLNSPFMASCRSLLLGGDSSEDGHYFRGHLGTLVFWSTALPQSHFQHSSQHSSGEEEATDLVLTASFEPVNTEWVPFRDEKYPRLEVLQGFEPEPEILSPLQPPLCGQTVCDNVELISQYNGYWPLRGEKVIRYQVVNICDDEGLNPIVSEEQIRLQHEALNEAFSRYNISWQLSVHQVHNSTLRHRVVLVNCEPSKIGNDHCDPECEHPLTGYDGGDCRLQGRCYSWNRRDGLCHVECNNMLNDFDDGDCCDPQVADVRKTCFDPDSPKRAYMSVKELKEALQLNSTHFLNIYFASSVREDLAGAATWPWDKDAVTHLGGIVLSPAYYGMPGHTDTMIHEVGHVLGLYHVFKGVSERESCNDPCKETVPSMETGDLCADTAPTPKSELCREPEPTSDTCGFTRFPGAPFTNYMSYTDDNCTDNFTPNQVARMHCYLDLVYQQWTESRKPTPIPIPPMVIGQTNKSLTIHWLPPISGVVYDRASGSLCGACTEDGTFRQYVHTASSRRVCDSSGYWTPEEAVGPPDVDQPCEPSLQAWSPEVHLYHMNMTVPCPTEGCSLELLFQHPVQADTLTLWVTSFFMESSQVLFDTEILLENKESVHLGPLDTFCDIPLTIKLHVDGKVSGVKVYTFDERIEIDAALLTSQPHSPLCSGCRPVRYQVLRDPPFASGLPVVVTHSHRKFTDVEVTPGQMYQYQVLAEAGGELGEASPPLNHIHGAPYCGDGKVSERLGEECDDGDLVSGDGCSKVCELEEGFNCVGEPSLCYMYEGDGICEPFERKTSIVDCGIYTPKGYLDQWATRAYSSHEDKKKCPVSLVTGEPHSLICTSYHPDLPNHRPLTGWFPCVASENETQDDRSEQPEGSLKKEDEVWLKVCFNRPGEARAIFIFLTTDGLVPGEHQQPTVTLYLTDVRGSNHSLGTYGLSCQHNPLIINVTHHQNVLFHHTTSVLLNFSSPRVGISAVALRTSSRIGLSAPSNCISEDEGQNHQGQSCIHRPCGKQDSCPSLLLDHADVVNCTSIGPGLMKCAITCQRGFALQASSGQYIRPMQKEILLTCSSGHWDQNVSCLPVDCGVPDPSLVNYANFSCSEGTKFLKRCSISCVPPAKLQGLSPWLTCLEDGLWSLPEVYCKLECDAPPIILNANLLLPHCLQDNHDVGTICKYECKPGYYVAESAEGKVRNKLLKIQCLEGGIWEQGSCIPVVCEPPPPVFEGMYECTNGFSLDSQCVLNCNQEREKLPILCTKEGLWTQEFKLCENLQGECPPPPSELNSVEYKCEQGYGIGAVCSPLCVIPPSDPVMLPENITADTLEHWMEPVKVQSIVCTGRRQWHPDPVLVHCIQSCEPFQADGWCDTINNRAYCHYDGGDCCSSTLSSKKVIPFAADCDLDECTCRDPKAEENQ

SEQ ID NO: 35576 - protein, 827 aa, Homo sapiens
MMCLKILRISLAILAGWALCSANSELGWTRKKSLVEREHLNQVLLEGERCWLGAKVRRPRASPQHHLFGVYPSRAGNYLRPYPVGEQEIHHTGRSKPDTEGNAVSLVPPDLTENPAGLRGAVEEPAAPWVGDSPIGQSELLGDDDAYLGNQRSKESLGEAGIQKGSAMAATTTTAIFTTLNEPKPETQRRGWAKSRQRRQVWKRRAEDGQGDSGISSHFQPWPKHSLKHRVKKSPPEESNQNGGEGSYREAETFNSQVGLPILYFSGRRERLLLRPEVLAEIPREAFTVEAWVKPEGGQNNPAIIAGVFDNCSHTVSDKGWALGIRSGKDKGKRDARFFFSLCTDRVKKATILISHSRYQPGTWTHVAATYDGRHMALYVDGTQVASSLDQSGPLNSPFMASCRSLLLGGDSSEDGHYFRGHLGTLVFWSTALPQSHFQHSSQHSSGEEEATDLVLTASFEPVNTEWVPFRDEKYPRLEVLQGFEPEPEILSPLQPPLCGQTVCDNVELISQYNGYWPLRGEKVIRYQVVNICDDEGLNPIVSEEQIRLQHEALNEAFSRYNISWQLSVHQVHNSTLRHRVVLVNCEPSKIGNDHCDPECEHPLTGYDGGDCRLQGRCYSWNRRDGLCHVECNNMLNDFDDGDCCDPQVADVRKTCFDPDSPKRAYMSVKELKEALQLNSTHFLNIYFASSVREDLAGAATWPWDKDAVTHLGGIVLSPAYYGMPGHTDTMIHEVGHVLGLYHVFKGVSERESCNDPCKETVPSMETGDLCADTAPTPKSELCREPEPTSDTCGFTRFPGAPFTNYMSYTGITTVLFCFLLRIHGGL

SEQ ID NO: 35577 - protein, 624 aa, Homo sapiens
MEIPGSLCKKVKLSNNAQNWGMQRATNVTYQAHHVSRNKRGQVVGTRGGFRGCTVWLTGLSGAGKTTVSMALEEYLVCHGIPCYTLDGDNIRQGLNKNLGFSPEDREENVRRIAEVAKLFADAGLVCITSFISPYTQDRNNARQIHEGASLPFFEVFVDAPLHVCEQRDVKGLYKKARAGEIKGFTGIDSEYEKPEAPELVLKTDSCDVNDCVQQVVELLQERDIVPVDASYEVKELYVPENKLHLAKTDAETLPALKINKVDMQWVQVLAEGWATPLNGFMREREYLQCLHFDCLLDGGVINLSVPIVLTATHEDKERLDGCTAFALMYEGRRVAILRNPEFFEHRKEERCARQWGTTCKNHPYIKMVMEQGDWLIGGDLQVLDRVYWNDGLDQYRLTPTELKQKFKDMNADAVFAFQLRNPVHNGHALLMQDTHKQLLERGYRRPVLLLHPLGGWTKDDDVPLMWRMKQHAAVLEEGVLNPETTVVAIFPSPMMYAGPTEVQWHCRARMVAGANFYIVGRDPAGMPHPETGKDLYEPSHGAKVLTMAPGLITLEIVPFRVAAYNKKKKRMDYYDSEHHEDFEFISGTRMRKLAREGQKPPEGFMAPKAWTVLTEYYKSLEKA

SEQ ID NO: 35578 - protein, 354 aa, Homo sapiens
MLFNLRILLNNAAFRNGHNFMVRNFRCGQPLQNKVQLKGRDLLTLKNFTGEEIKYMLWLSADLKFRIKQKGEYLPLLQGKSLGMIFEKRSTRTRLSTETGFALLGGHPCFLTTQDIHLGVNESLTDTARVLSSMADAVLARVYKQSDLDTLAKEASIPIINGLSDLYHPIQILADYLTLQEHYSSLKGLTLSWIGDGNNILHSIMMSAAKFGMHLQAATPKGYEPDASVTKLAEQYAKENGTKLLLTNDPLEAAHGGNVLITDTWISMGQEEEKKKRLQAFQGYQVTMKTAKVAASDWTFLHCLPRKPEEVDDEVFYSPRSLVFPEAENRKWTIMAVMVSLLTDYSPQLQKPKF

SEQ ID NO: 35579 - protein, 614 aa, Homo sapiens
MSGIKKQKTENQQKSTNVVYQAHHVSRNKRGQVVGTRGGFRGCTVWLTGLSGAGKTTISFALEEYLVSHAIPCYSLDGDNVRHGLNRNLGFSPGDREENIRRIAEVAKLFADAGLVCITSFISPFAKDRENARKIHESAGLPFFEIFVDAPLNICESRDVKGLYKRARAGEIKGFTGIDSDYEKPETPERVLKTNLSTVSDCVHQVVELLQEQNIVPYTIIKDIHELFVPENKLDHVRAEAETLPSLSITKLDLQWVQVLSEGWATPLKGFMREKEYLQVMHFDTLLDDGVINMSIPIVLPVSAEDKTRLEGCSKFVLAHGGRRVAILRDAEFYEHRKEERCSRVWGTTCTKHPHIKMVMESGDWLVGGDLQVLEKIRWNDGLDQYRLTPLELKQKCKEMNADAVFAFQLRNPVHNGHALLMQDTRRRLLERGYKHPVLLLHPLGGWTKDDDVPLDWRMKQHAAVLEEGVLDPKSTIVAIFPSPMLYAGPTEVQWHCRSRMIAGANFYIVGRDPAGMPHPETKKDLYEPTHGGKVLSMAPGLTSVEIIPFRVAAYNKAKKAMDFYDPARHNEFDFISGTRMRKLAREGENPPDGFMAPKAWKVLTDYYRSLEKN

SEQ ID NO: 35580 - protein, 619 aa, Homo sapiens
MSGIKKQKTENQQKSTNVVYQAHHVSRNKRGQVVGTRGGFRGCTVWLTGLSGAGKTTISFALEEYLVSHAIPCYSLDGDNVRHGLNRNLGFSPGDREENIRRIAEVAKLFADAGLVCITSFISPFAKDRENARKIHESAGLPFFEIFVDAPLNICESRDVKGLYKRARAGEIKGFTGIDSDYEKPETPERVLKTNLSTVSDCVHQVVELLQEQNIVPYTIIKDIHELFVPENKLDHVRAEAETLPSLSITKLDLQWVQVLSEGWATPLKGFMREKEYLQVMHFDTLLDGMALPDGVINMSIPIVLPVSAEDKTRLEGCSKFVLAHGGRRVAILRDAEFYEHRKEERCSRVWGTTCTKHPHIKMVMESGDWLVGGDLQVLEKIRWNDGLDQYRLTPLELKQKCKEMNADAVFAFQLRNPVHNGHALLMQDTRRRLLERGYKHPVLLLHPLGGWTKDDDVPLDWRMKQHAAVLEEGVLDPKSTIVAIFPSPMLYAGPTEVQWHCRSRMIAGANFYIVGRDPAGMPHPETKKDLYEPTHGGKVLSMAPGLTSVEIIPFRVAAYNKAKKAMDFYDPARHNEFDFISGTRMRKLAREGENPPDGFMAPKAWKVLTDYYRSLEKN

SEQ ID NO: 35581 - protein, 212 aa, Homo sapiens
MRMTMEEMKNEAETTSMVSMPLYAVMYPVFNELERVNLSAAQTLRAAFIKAEKENPGLTQDIIMKILEKKSVEVNFTESLLRMAADDVEEYMIERPEPEFQDLNEKARALKQILSKIPDEINDRVRFLQTIKDIASAIKELLDTVNNVFKKYQYQNRRALEHQKKEFVKYSKSFSDTLKTYFKDGKAINVFVSANRLIHQTNLILQTFKTVA

SEQ ID NO: 35582 - protein, 149 aa, Homo sapiens
METLYRVPFLVLECPNLKLKKPPWLHMPSAMTVYALVVVSYFLITGGIIYDVIVEPPSVGSMTDEHGHQRPVAFLAYRVNGQYIMEGLASSFLFTMGGLGFIILDRSNAPNIPKLNRFLLLFIGFVCVLLSFFMARVFMRMKLPGYLMG

SEQ ID NO: 35583 - protein, 171 aa, Homo sapiens
METLYRVPFLVLECPNLKLKKPPWLHMPSAMTVYALVVVSYFLITGGIIYDVIVEPPSVGSMTDEHGHQRPVAFLAYRVNGQYIMEGLASSFLFTMGGLGFIILDRSNAPNIPKLNRFLLLFIGFVCVLLSFFMARVFMRMKLPRSLALLPRLECSGVISAHYKLCLPGAI

SEQ ID NO: 35584 - protein, 214 aa, Homo sapiens
MSKPPPKPVKPGQVKVFRALYTFEPRTPDELYFEEGDIIYITDMSDTNWWKGTSKGRTGLIPSNYVAEQAESIDNPLHEAAKRGNLSWLRECLDNRVGVNGLDKAGSTALYWACHGGHKDIVEMLFTQPNIELNQQNKLGDTALHAAAWKGYADIVQLLLAKGARTDLRNIEKKLAFDMATNAACASLLKKKQGTDAVRTLSNAEDYLDDEDSD

SEQ ID NO: 35585 - protein, 1270 aa, Homo sapiens
MTDDNSDDKIEDELQTFFTSDKDGNTHAYNPKSPPTQNSSASSVNWNSANPDDMVVDYETDPAVVTGENISLSLQGVEVFGHEKSSSDFISKQVLDMHKDSICQCPALVGTEKPKYLQHSCHSLEAVEGQSVEPSLPFVWKPNDNLNCAGYCDALELNQTFDMTVDKVNCTFISHHAIGKSQSFHTAGSLPPTGRRSGSTSSLSYSTWTSSHSDKTHARETTYDRESFENPQVTPSEAQDMTYTAFSDVVMQSEVFVSDIGNQCACSSGKVTSEYTDGSQQRLVGEKETQALTPVSDGMEVPNDSALQEFFCLSHDESNSEPHSQSSYRHKEMGQNLRETVSYCLIDDECPLMVPAFDKSEAQVLNPEHKVTETEDTQMVSKGKDLGTQNHTSELILSSPPGQKVGSSFGLTWDANDMVISTDKTMCMSTPVLEPTKVTFSVSPIEATEKCKKVEKGNRGLKNIPDSKEAPVNLCKPSLGKSTIKTNTPIGCKVRKTEIISYPRPNFKNVKAKVMSRAVLQPKDAALSKVTPRPQQTSASSPSSVNSRQQTVLSRTPRSDLNADKKAEILINKTHKQQFNKLITSQAVHVTTHSKNASHRVPRTTSAVKSNQEDVDKASSSNSACETGSVSALFQKIKGILPVKMESAECLEMTYVPNIDRISPEKKGEKENGTSMEKQELKQEIMNETFEYGSLFLGSASKTTTTSGRNISKPDSCGLRQIAAPKAKVGPPVSCLRRNSDNRNPSADRAVSPQRIRRVSSSGKPTSLKTAQSSWVNLPRPLPKSKASLKSPALRRTGSTPSIASTHSELSTYSNNSGNAAVIKYEEKPPKPAFQNGSSGSFYLKPLVSRAHVHLMKTPPKGPSRKNLFTALNAVEKSRQKNPRSLCIQPQTAPDALPPEKTLELTQYKTKCENQSGFILQLKQLLACGNTKFEALTVVIQHLLSEREEALKQHKTLSQELVNLRGELVTASTTCEKLEKARNELQTVYEAFVQQHQAEKTERENRLKEFYTREYEKLRDTYIEEAEKYKMQLQEQFDNLNAAHETSKLEIEASHSEKLELLKKAYEASLSEIKKGHEIEKKSLEDLLSEKQESLEKQINDLKSENDALNEKLKSEEQKRRAREKANLKNPQIMYLEQELESLKAVLEIKNEKLHQQDIKLMKMEKLVDNNTALVDKLKRFQQENEELKARMDKHMAISRQLSTEQAVLQESLEKESKVNKRLSMENEELLWKLHNGDLCSPKRSPTSSAIPLQSPRNSGSFPSPSISPR

SEQ ID NO: 35586 - protein, 1216 aa, Homo sapiens
MTDDNSDDKIEDELQTFFTSDKDGNTHAYNPKSPPTQNSSASSVNWNSANPDDMVVDYETDPAVVTGENISLSLQGVEVFGHEKSSSDFISKQVLDMHKDSICQCPALVGTEKPKYLQHSCHSLEAVEGQSVEPSLPFVWKPNDNLNCAGYCDALELNQTFDMTVDKVNCTFISHHAIGKSQSFHTAGSLPPTGRRSGSTSSLSYSTWTSSHSDKTHARETTYDRESFENPQVTPSEAQDMTYTAFSDVVMQSEVFVSDIGNQCACSSGKVTSEYTDGSQQRLVGEKETQALTPVSDGMEVPNDSALQEFFCLSHDESNSEPHSQSSYRHKEMGQNLRETVSYCLIDDECPLMVPAFDKSEAQVLNPEHKVTETEDTQMVSKGKDLGTQNHTSELILSSPPGQKVGSSFGLTWDANDMVISTDKTMCMSTPVLEPTKVTFSVSPIEATEKCKKVEKGNRGLKNIPDSKEAPVNLCKPSLGKSTIKTNTPIGCKVRKTEIISYPRPNFKNVKAKVMSRAVLQPKDAALSKVTPRPQQTSASSPSSVNSRQQTVLSRTPRSDLNADKKAEILINKTHKQQFNKLITSQAVHVTTHSKNASHRVPRTTSAVKSNQEDVDKASSSNSACETGSVSALFQKIKGILPVKMESAECLEMTYVPNIDRISPEKKGEKENGTSMEKQELKQEIMNETFEYGSLFLGSASKTTTTSGRNISKPDSCGLRQIAAPKAKVGPPVSCLRRNSDNRNPSADRAVSPQRIRRVSSSAGNAAVIKYEEKPPKPAFQNGSSGSFYLKPLVSRAHVHLMKTPPKGPSRKNLFTALNAVEKSRQKNPRSLCIQPQTAPDALPPEKTLELTQYKTKCENQSGFILQLKQLLACGNTKFEALTVVIQHLLSEREEALKQHKTLSQELVNLRGELVTASTTCEKLEKARNELQTVYEAFVQQHQAEKTERENRLKEFYTREYEKLRDTYIEEAEKYKMQLQEQFDNLNAAHETSKLEIEASHSEKLELLKKAYEASLSEIKKGHEIEKKSLEDLLSEKQESLEKQINDLKSENDALNEKLKSEEQKRRAREKANLKNPQIMYLEQELESLKAVLEIKNEKLHQQDIKLMKMEKLVDNNTALVDKLKRFQQENEELKARMDKHMAISRQLSTEQAVLQESLEKESKVNKRLSMENEELLWKLHNGDLCSPKRSPTSSAIPLQSPRNSGSFPSPSISPR

SEQ ID NO: 35587 - protein, 436 aa, Homo sapiens
MLLSPKFSLSTIHIRLTAKGLLRNLRLPSGFRRSTVVFHTVEKSRQKNPRSLCIQPQTAPDALPPEKTLELTQYKTKCENQSGFILQLKQLLACGNTKFEALTVVIQHLLSEREEALKQHKTLSQELVNLRGELVTASTTCEKLEKARNELQTVYEAFVQQHQAEKTERENRLKEFYTREYEKLRDTYIEEAEKYKMQLQEQFDNLNAAHETSKLEIEASHSEKLELLKKAYEASLSEIKKGHEIEKKSLEDLLSEKQESLEKQINDLKSENDALNEKLKSEEQKRRAREKANLKNPQIMYLEQELESLKAVLEIKNEKLHQQDIKLMKMEKLVDNNTALVDKLKRFQQENEELKARMDKHMAISRQLSTEQAVLQESLEKESKVNKRLSMENEELLWKLHNGDLCSPKRSPTSSAIPLQSPRNSGSFPSPSISPR

SEQ ID NO: 35588 - protein, 342 aa, Homo sapiens
MGCPSSKLCLYSPCAATRREEALKQHKTLSQELVNLRGELVTASTTCEKLEKARNELQTVYEAFVQQHQAEKTERENRLKEFYTREYEKLRDTYIEEAEKYKMQLQEQFDNLNAAHETSKLEIEASHSEKLELLKKAYEASLSEIKKGHEIEKKSLEDLLSEKQESLEKQINDLKSENDALNEKLKSEEQKRRAREKANLKNPQIMYLEQELESLKAVLEIKNEKLHQQDIKLMKMEKLVDNNTALVDKLKRFQQENEELKARMDKHMAISRQLSTEQAVLQESLEKESKVNKRLSMENEELLWKLHNGDLCSPKRSPTSSAIPLQSPRNSGSFPSPSISPR

SEQ ID NO: 35589 - protein, 770 aa, Homo sapiens
MTDDNSDDKIEDELQTFFTSDKDGNTHAYNPKSPPTQNSSASSVNWNSANPDDMVVDYETDPAVVTGENISLSLQGVEVFGHEKSSSDFISKQVLDMHKDSICQCPALVGTEKPKYLQHSCHSLEAVEGQSVEPSLPFVWKPNDNLNCAGYCDALELNQTFDMTVDKVNCTFISHHAIGKSQSFHTAGSLPPTGRRSGSTSSLSYSTWTSSHSDKTHARETTYDRESFENPQVTPSEAQDMTYTAFSDVVMQSEVFVSDIGNQCACSSGKVTSEYTDGSQQRLVGEKETQALTPVSDGMEVPNDSALQEFFCLSHDESNSEPHSQSSYRHKEMGQNLRETVSYCLIDDECPLMVPAFDKSEAQVLNPEHKVTETEDTQMVSKGKDLGTQNHTSELILSSPPGQKVGSSFGLTWDANDMVISTDKTMCMSTPVLEPTKVTFSVSPIEATEKCKKVEKGNRGLKNIPDSKEAPVNLCKPSLGKSTIKTNTPIGCKVRKTEIISYPRPNFKNVKAKVMSRAVLQPKDAALSKVTPRPQQTSASSPSSVNSRQQTVLSRTPRSDLNADKKAEILINKTHKQQFNKLITSQAVHVTTHSKNASHRVPRTTSAVKSNQEDVDKASSSNSACETGSVSALFQKIKGILPVKMESAECLEMTYVPNIDRISPEKKGEKENGTSMEKQELKQEIMNETFEYGSLFLGSASKTTTTSGRNISKPDSCGLRQIAAPKAKVGPPVSCLRRNSDNRNPSADRAVSPQRIRRVSSSVLPKAAFS

SEQ ID NO: 35590 - protein, 517 aa, Homo sapiens
MTVPGGFRSCTETDISSKIFINSTLTPPAGSERHYDATLLTLLVVGSYSLCIIPLLATFTGKKTGNAAVIKYEEKPPKPAFQNGSSGSFYLKPLVSRAHVHLMKTPPKGPSRKNLFTALNAVEKSRQKNPRSLCIQPQTAPDALPPEKTLELTQYKTKCENQSGFILQLKQLLACGNTKFEALTVVIQHLLSEREEALKQHKTLSQELVNLRGELVTASTTCEKLEKARNELQTVYEAFVQQHQAEKTERENRLKEFYTREYEKLRDTYIEEAEKYKMQLQEQFDNLNAAHETSKLEIEASHSEKLELLKKAYEASLSEIKKGHEIEKKSLEDLLSEKQESLEKQINDLKSENDALNEKLKSEEQKRRAREKANLKNPQIMYLEQELESLKAVLEIKNEKLHQQDIKLMKMEKLVDNNTALVDKLKRFQQENEELKARMDKHMAISRQLSTEQAVLQESLEKESKVNKRLSMENEELLWKLHNGDLCSPKRSPTSSAIPLQSPRNSGSFPSPSISPR

SEQ ID NO: 35591 - protein, 415 aa, Homo sapiens
MKTPPKGPSRKNLFTALNAVEKSRQKNPRSLCIQPQTAPDALPPEKTLELTQYKTKCENQSGFILQLKQLLACGNTKFEALTVVIQHLLSEREEALKQHKTLSQELVNLRGELVTASTTCEKLEKARNELQTVYEAFVQQHQAEKTERENRLKEFYTREYEKLRDTYIEEAEKYKMQLQEQFDNLNAAHETSKLEIEASHSEKLELLKKAYEASLSEIKKGHEIEKKSLEDLLSEKQESLEKQINDLKSENDALNEKLKSEEQKRRAREKANLKNPQIMYLEQELESLKAVLEIKNEKLHQQDIKLMKMEKLVDNNTALVDKLKRFQQENEELKARMDKHMAISRQLSTEQAVLQESLEKESKVNKRLSMENEELLWKLHNGDLCSPKRSPTSSAIPLQSPRNSGSFPSPSISPR

SEQ ID NO: 35592 - protein, 68 aa, Homo sapiens
MDPETCPCPSGGSCTCADSCKCEGCKCTSCKKSCCSCCPAECEKCAKDCVCKGGEAAEAEAEKCSCCQ

SEQ ID NO: 35593 - protein, 311 aa, Homo sapiens
MHQKLLKSAHYIELGSYQYWPVLVPRGIRLYTYEQIPGSLKDNPYITDGYRAYLPSRLCIKSLFILSNETVNIWSHLLGFFLFFTLGIYDMTSVLPSASASREDFVICSICLFCFQVCMLCSVGYHLFSCHRSEKTCRRWMALDYAGISIGILGCYVSGVFYAFYCNNYWRQVYLITVLAMILAVFFAQIHPNYLTQQWQRLRSIIFCSVSGYGVIPTLHWVWLNGGIGAPIVQDFAPRVIVMYMIALLAFLFYISKVPERYFPGQLNYLGSSHQIWHILAVVMLYWWHQSTVYVMQYRHSKPCPDYVSHL

SEQ ID NO: 35594 - protein, 291 aa, Homo sapiens
MHQKLLKSAHYIELGSYQYWPVLVPRGIRLYTYEQIPGSLKDNPYITDGYRAYLPSRLCIKSLFILSNETVNIWSHLLGFFLFFTLGIYDMTSVLPSASASREDFVICSICLFCFQVCMLCSVGYHLFSCHRSEKTCRRWMALDYAGISIGILGCYVSGVFYAFYCNNYWRQVYLITVLAMILAVFFAQIHPNYLTQQWQRLRSIIFCSVSGYGVIPTLHWVWLNGGIGAPIVQDFAPRVIVMYMIALLAFLFYISKVPERYFPENIFRWEITKRTLGGVNNSLQNLYLLV

SEQ ID NO: 35595 - protein, 269 aa, Homo sapiens
MHQKLLKSAHYIELGSYQYWPVLVPRGIRLYTYEQIPGSLKDNPYITDGYRAYLPSRLCIKSLFILSNETVNIWSHLLGFFLFFTLGIYDMTSVLPSASASREDFVICSICLFCFQVCMLCSVGYHLFSCHRSEKTCRRWMALDYAGISIGILGCYVSGVFYAFYCNNYWRQVYLITVLAMILAVFFAQIHPNYLTQQWQRLRSIIFCSVSGYGVIPTLHWVWLNGGIGAPIVQDFAPRVIVMYMIALLAFLFYISKVPERYFPESLPR

SEQ ID NO: 35596 - protein, 88 aa, Homo sapiens
MHQKLLKSAHYIELGSYQYWPVLVPRGIRLYTYEQIPGSLKDNPYITDGYRAYLPSRLCIKRSVCFALWAIIFFPAIGQKKHVEDGWH

SEQ ID NO: 35597 - protein, 138 aa, Homo sapiens
MKGLLPLAWFLACSVPAVQGGLLDLKSMIEKVTGKNALTNYGFYGCYCGWGGRGTPKDGTDWCCWAHDHCYGRLEEKGCNIRTQSYKYRFAWGVVTCEPGPFCHVNLCACDRKLVYCLKRNLRSYNPQYQYFPNILCS

SEQ ID NO: 35598 - protein, 263 aa, Homo sapiens
MSLVAEAFVSQIAAAEPWPENATLYQQLKGEQILLSDNAASLAVQAFLQMCNLPIKVVCRANAEYMSPSGKVPFIHVGNQVVSELGPIVQFVKAKGHSLSDGLEEVQKAEMKAYMELVNNMLLTAELYLQWCDEATVGEITHARYGSPYPWPLNHILAYQKQWEVKRKMKAIGWGKKTLDQVLEDVDQCCQALSQRLGTQPYFFNKQPTELDALVFGHLYTILTTQLTNDELSEKVKNYSNLLAFCRRIEQHYFEDRGKGRLS

SEQ ID NO: 35599 - protein, 253 aa, Homo sapiens
MYIAAEPWPENATLYQQLKGEQILLSDNAASLAVQAFLQMCNLPIKVVCRANAEYMSPSGKVPFIHVGNQVVSELGPIVQFVKAKGHSLSDGLEEVQKAEMKAYMELVNNMLLTAELYLQWCDEATVGEITHARYGSPYPWPLNHILAYQKQWEVKRKMKAIGWGKKTLDQVLEDVDQCCQALSQRLGTQPYFFNKQPTELDALVFGHLYTILTTQLTNDELSEKVKNYSNLLAFCRRIEQHYFEDRGKGRLS

SEQ ID NO: 35600 - protein, 2549 aa, Homo sapiens
MLGTGPAAATTAATTSSNVSVLQQFASGLKSRNEETRAKAAKELQHYVTMELREMSQEESTRFYDQLNHHIFELVSSSDANERKGGILAIASLIGVEGGNATRIGRFANYLRNLLPSNDPVVMEMASKAIGRLAMAGDTFTAEYVEFEVKRALEWLGADRNEGRRHAAVLVLRELAISVPTFFFQQVQPFFDNIFVAVWDPKQAIREGAVAALRACLILTTQREPKEMQKPQWYRHTFEEAEKGFDETLAKEKGMNRDDRIHGALLILNELVRISSMEGERLREEMEEITQQQLVHDKYCKDLMGFGTKPRHITPFTSFQAVQPQQSNALVGLLGYSSHQGLMGFGTSPSPAKSTLVESRCCRDLMEEKFDQVCQWVLKCRNSKNSLIQMTILNLLPRLAAFRPSAFTDTQYLQDTMNHVLSCVKKEKERTAAFQALGLLSVAVRSEFKVYLPRVLDIIRAALPPKDFAHKRQKAMQVDATVFTCISMLARAMGPGIQQDIKELLEPMLAVGLSPALTAVLYDLSRQIPQLKKDIQDGLLKMLSLVLMHKPLRHPGMPKGLAHQLASPGLTTLPEASDVGSITLALRTLGSFEFEGHSLTQFVRHCADHFLNSEHKEIRMEAARTCSRLLTPSIHLISGHAHVVSQTAVQVVADVLSKLLVVGITDPDPDIRYCVLASLDERFDAHLAQAENLQALFVALNDQVFEIRELAICTVGRLSSMNPAFVMPFLRKMLIQILTELEHSGIGRIKEQSARMLGHLVSNAPRLIRPYMEPILKALILKLKDPDPDPNPGVINNVLATIGELAQVSGLEMRKWVDELFIIIMDMLQDSSLLAKRQVALWTLGQLVASTGYVVEPYRKYPTLLEVLLNFLKTEQNQGTRREAIRVLGLLGALDPYKHKVNIGMIDQSRDASAVSLSESKSSQDSSDYSTSEMLVNMGNLPLDEFYPAVSMVALMRIFRDQSLSHHHTMVVQAITFIFKSLGLKCVQFLPQVMPTFLNVIRVCDGAIREFLFQQLGMLVSFVKSHIRPYMDEIVTLMREFWVMNTSIQSTIILLIEQIVVALGGEFKLYLPQLIPHMLRVFMHDNSPGRIVSIKLLAAIQLFGANLDDYLHLLLPPIVKLFDAPEAPLPSRKAALETVDRLTESLDFTDYASRIIHPIVRTLDQSPELRSTAMDTLSSLVFQLGKKYQIFIPMVNKVLVRHRINHQRYDVLICRIVKGYTLADEEEDPLIYQHRMLRSGQGDALASGPVETGPMKKLHVSTINLQKAWGAARRVSKDDWLEWLRRLSLELLKDSSSPSLRSCWALAQAYNPMARDLFNAAFVSCWSELNEDQQDELIRSIELALTSQDIAEVTQTLLNLAEFMEHSDKGPLPLRDDNGIVLLGERAAKCRAYAKALHYKELEFQKGPTPAILESLISINNKLQQPEAAAGVLEYAMKHFGELEIQATWYEKLHEWEDALVAYDKKMDTNKDDPELMLGRMRCLEALGEWGQLHQQCCEKWTLVNDETQAKMARMAAAAAWGLGQWDSMEEYTCMIPRDTHDGAFYRAVLALHQDLFSLAQQCIDKARDLLDAELTAMAGESYSRAYGAMVSCHMLSELEEVIQYKLVPERREIIRQIWWERLQGCQRIVEDWQKILMVRSLVVSPHEDMRTWLKYASLCGKSGRLALAHKTLVLLLGVDPSRQLDHPLPTVHPQVTYAYMKNMWKSARKIDAFQHMQHFVQTMQQQAQHAIATEDQQHKQELHKLMARCFLKLGEWQLNLQGINESTIPKVLQYYSAATEHDRSWYKAWHAWAVMNFEAVLHYKHQNQARDEKKKLRHASGANITNATTAATTAATATTTASTEGSNSESEAESTENSPTPSPLQKKVTEDLSKTLLMYTVPAVQGFFRSISLSRGNNLQDTLRVLTLWFDYGHWPDVNEALVEGVKAIQIDTWLQVIPQLIARIDTPRPLVGRLIHQLLTDIGRYHPQALIYPLTVASKSTTTARHNAANKILKNMCEHSNTLVQQAMMVSEELIRVAILWHEMWHEGLEEASRLYFGERNVKGMFEVLEPLHAMMERGPQTLKETSFNQAYGRDLMEAQEWCRKYMKSGNVKDLTQAWDLYYHVFRRISKQLPQLTSLELQYVSPKLLMCRDLELAVPGTYDPNQPIIRIQSIAPSLQVITSKQRPRKLTLMGSNGHEFVFLLKGHEDLRQDERVMQLFGLVNTLLANDPTSLRKNLSIQRYAVIPLSTNSGLIGWVPHCDTLHALIRDYREKKKILLNIEHRIMLRMAPDYDHLTLMQKVEVFEHAVNNTAGDDLAKLLWLKSPSSEVWFDRRTNYTRSLAVMSMVGYILGLGDRHPSNLMLDRLSGKILHIDFGDCFEVAMTREKFPEKIPFRLTRMLTNAMEVTGLDGNYRITCHTVMEVLREHKDSVMAVLEAFVYDPLLNWRLMDTNTKGNKRSRTRTDSYSAGQSVEILDGVELGEPAHKKTGTTVPESIHSFIGDGLVKPEALNKKAIQIINRVRDKLTGRDFSHDDTLDVPTQVELLIKQATSHENLCQCYIGWCPFW

SEQ ID NO: 35601 - protein, 362 aa, Homo sapiens
MSENGSFANCCEAGGWAVRPGWSGAGSARPSRTPRPPWVAPALSAVLIVTTAVDVVGNLLVILSVLRNRKLRNAGNLFLVSLALADLVVAFYPYPLILVAIFYDGWALGEEHCKASAFVMGLSVIGSVFNITAIAINRYCYICHSMAYHRIYRRWHTPLHICLIWLLTVVALLPNFFVGSLEYDPRIYSCTFIQTASTQYTAAVVVIHFLLPIAVVSFCYLRIWVLVLQARRKAKPESRLCLKPSDLRSFLTMFVVFVIFAICWAPLNCIGLAVAINPQEMAPQIPEGLFVTSYLLAYFNSCLNAIVYGLLNQNFRREYKRILLALWNPRHCIQDASKGSHAEGLQSPAPPIIGVQHQADAL

SEQ ID NO: 35602 - protein, 1121 aa, Homo sapiens
MSLENEDKRARTRSKALRGPPETTAADLSCPTPGCTGSGHVRGKYSRHRSLQSCPLAKKRKLEGAEAEHLVSKRKSHPLKLALDEGYGVDSDGSEDTEVKDASVSDESEGTLEGAEAETSGQDEIHRPETAEGRSPVKSHFGSNPIGSATASSKGSYSSYQGIIATSLLNLGQIAEETLVEEDLGQAAKPGPGIVHLLQEAAEGAASEEGEKGLFIQPEDAEEVVEVTTERSQDLCPQSLEDAASEESSKQKGILSHEEEDEEEEEEEEEEEEDEEEEEEEEEEEEEEEEEEEEEEEEEEEEEEEEAAPDVIFQEDTSHTSAQKAPELRGPESPSPKPEYSVIVEVRSDDDKDEDTHSRKSTVTDESEMQDMMTRGNLGLLEQAIALKAEQVRTVCEPGCPPAEQSQLGLGEPGKAAKPLDTVRKSYYSKDPSRAEKREIKCPTPGCDGTGHVTGLYPHHRSLSGCPHKDRIPPEILAMHENVLKCPTPGCTGQGHVNSNRNTHRSLSGCPIAAAEKLAKSHEKQQPQTGDPSKSSSNSDRILRPMCFVKQLEVPPYGSYRPNVAPATPRANLAKELEKFSKVTFDYASFDAQVFGKRMLAPKIQTSETSPKAFQCFDYSQDAEAAHMAATAILNLSTRCWEMPENLSTKPQDLPSKSVDIEVDENGTLDLSMHKHRKRENAFPSSSSCSSSPGVKSPDASQRHSSTSAPSSSMTSPQSSQASRQDEWDRPLDYTKPSRLREEEPEESEPAAHSFASSEADDQEVSEENFEERKYPGEVTLTNFKLKFLSKDIKKELLTCPTPGCDGSGHITGNYASHRSLSGCPLADKSLRNLMAAHSADLKCPTPGCDGSGHITGNYASHRSLSGCPRAKKSGVKVAPTKDDKEDPELMKCPVPGCVGLGHISGKYASHRSASGCPLAARRQKEGSLNGSSFSWKSLKNEGPTCPTPGCDGSGHANGSFLTHRSLSGCPRATFAGKKGKLSGDEVLSPKFKTSDVLENDEEIKQLNQEIRDLNESNSEMEAAMVQLQSQISSMEKNLKNIEEENKLIEEQNEALFLELSGLSQALIQSLANIRLPHMEPICEQNFDAYVSTLTDMYSNQDPENKDLLESIKQAVRGIQV

SEQ ID NO: 35603 - protein, 1148 aa, Homo sapiens
MSLENEDKRARTRSKALRGPPETTAADLSCPTPGCTGSGHVRGKYSRHRSLQSCPLAKKRKLEGAEAEHLVSKRKSHPLKLALDEGYGVDSDGSEDTEVKDASVSDESEGTLEGAEAETSGQDEIHRPETAEGRSPVKSHFGSNPIGSATASSKGSYSSYQGIIATSLLNLGQIAEETLVEEDLGQAAKPGPGIVHLLQEAAEGAASEEGEKGLFIQPEDAEEVVEVTTERSQDLCPQSLEDAASEESSKQKGILSHEEEDEEEEEEEEEEEEDEEEEEEEEEEEEEEEEEEEEEEEEEEEEEEEEAAPDVIFQEDTSHTSAQKAPELRGPESPSPKPEYSVIVEVRSDDDKDEDTHSRKSTVTDESEMQDMMTRGNLGLLEQAIALKAEQVRTVCEPGCPPAEQSQLGLGEPGKAAKPLDTVRKSYYSKDPSRAEKREIKCPTPGCDGTGHVTGLYPHHRSLSGCPHKDRIPPEILAMHENVLKCPTPGCTGQGHVNSNRNTHRSLSGCPIAAAEKLAKSHEKQQPQTGDPSKSSSNSDRILRPMCFVKQLEVPPYGSYRPNVAPATPRANLAKELEKFSKVTFDYASFDAQVFGKRMLAPKIQTSETSPKAFQSKPFPKASSPRHSPSSSYVRSTSSSSAGFDYSQDAEAAHMAATAILNLSTRCWEMPENLSTKPQDLPSKSVDIEVDENGTLDLSMHKHRKRENAFPSSSSCSSSPGVKSPDASQRHSSTSAPSSSMTSPQSSQASRQDEWDRPLDYTKPSRLREEEPEESEPAAHSFASSEADDQEVSEENFEERKYPGEVTLTNFKLKFLSKDIKKELLTCPTPGCDGSGHITGNYASHRSLSGCPLADKSLRNLMAAHSADLKCPTPGCDGSGHITGNYASHRSLSGCPRAKKSGVKVAPTKDDKEDPELMKCPVPGCVGLGHISGKYASHRSASGCPLAARRQKEGSLNGSSFSWKSLKNEGPTCPTPGCDGSGHANGSFLTHRSLSGCPRATFAGKKGKLSGDEVLSPKFKTSDVLENDEEIKQLNQEIRDLNESNSEMEAAMVQLQSQISSMEKNLKNIEEENKLIEEQNEALFLELSGLSQALIQSLANIRLPHMEPICEQNFDAYVSTLTDMYSNQDPENKDLLESIKQAVRGIQV

SEQ ID NO: 35604 - protein, 286 aa, Homo sapiens
MELILSTSPAELTLDPACQPKLPLDSTCQPEMTFNPGPTELTLDPEHQPEETPAPSLAELTLEPVHRRPELLDACADLINDQWPRSRTSRLHSLGQSSDAFPLCLMLLSPHPTLEAAPVVVGHARLSRVLNQPQSLLVETVVVARALRGRGFGRRLMEGLEVFARARGFRKLHLTTHDQVHFYTHLGYQLGEPVQGLVFTSRRLPATLLNAFPTAPSPRPPRKAPNLTAQAAPRGPKGPPLPPPPPLPECLTISPPVPSGPPSKSLLETQYQNVRGRPIFWMEKDI

SEQ ID NO: 35605 - protein, 308 aa, Homo sapiens
MQELTLSPGPAKLTPTLDPTHRMELILSTSPAELTLDPACQPKLPLDSTCQPEMTFNPGPTELTLDPEHQPEETPAPSLAELTLEPVHRRPELLDACADLINDQWPRSRTSRLHSLGQSSDAFPLCLMLLSPHPTLEAAPVVVGHARLSRVLNQPQSLLVETVVVARALRGRGFGRRLMEGLEVFARARGFRKLHLTTHDQVHFYTHLGYQLGEPVQGLVFTSRRLPATLLNAFPTAPSPRPPRKAPNLTAQAAPRGPKGPPLPPPPPLPECLTISPPVPSGPPSKSLLETQYQNVRGRPIFWMEKDI

SEQ ID NO: 35606 - protein, 464 aa, Homo sapiens
MPSCSTSTMPGMICKNPDLEFDSLQPCFYPDEDDFYFGGPDSTPPGEDIWKKFELLPTPPLSPSRGFAEHSSEPPSWVTEMLLENELWGSPAEEDAFGLGGLGGLTPNPVILQDCMWSGFSAREKLERAVSEKLQHGRGPPTAGSTAQSPGAGAASPAGRGHGGAAGAGRAGAALPAELAHPAAECVDPAVVFPFPVNKREPAPVPAAPASAPAAGPAVASGAGIAAPAGAPGVAPPRPGGRQTSGGDHKALSTSGEDTLSDSDDEDDEEEDEEEEIDVVTVEKRRSSSNTKAVTTFTITVRPKNAALGPGRAQSSELILKRCLPIHQQHNYAAPSPYVESEDAPPQKKIKSEASPRPLKSVIPPKAKSLSPRNSDSEDSERRRNHNILERQRRNDLRSSFLTLRDHVPELVKNEKAAKVVILKKATEYVHSLQAEEHQLLLEKEKLQARQQQLLKKIEHARTC

SEQ ID NO: 35607 - protein, 4678 aa, Homo sapiens
MMMCAATASPAAASSGLGGDGFYPAATFSSSPAPGALFMPVPDGSVAAAGLGLGLPAADSRGHYQLLLSGRALADRYRRIYTAALNDRDQGGGSAGHPASRNKKILNKKKLKRKQKSKSKVKTRSKSENLENTVIIPDIKLHSNPSAFNIYCNVRHCVLEWQKKEISLAAASKNSVQSGESDSDEEEESKEPPIKLPKIIEVGLCEVFELIKETRFSHPSLCLRSLQALLNVLQGQQPEGLQSEPPEVLESLFQLLLEITVRSTGMNDSTGQSLTALSCACLFSLVASWGETGRTLQAISAILTNNGSHACQTIQVPTILNSLQRSVQAVLVGKIQIQDWFSNGIKKAALMHKWPLKEISVDEDDQCLLQNDGFFLYLLCKDGLYKIGSGYSGTVRGHIYNSTSRIRNRKEKKSWLGYAQGYLLYRDVNNHSMTAIRISPETLEQDGTVMLPDCHTEGQNILFTDGEYINQIAASRDDGFVVRIFATSTEPVLQQELQLKLARKCLHACGISLFDLEKDLHIISTGFDEESAILGAGREFALMKTANGKIYYTGKYQSLGIKQGGPSAGKWVELPITKSPKIVHFSVGHDGSHALLVAEDGSIFFTGSASKGEDGESTKSRRQSKPYKPKKIIKMEGKIVVYTACNNGSSSVISKDGELYMFGKDAIYSDSSSLVTDLKGHFVTQVAMGKAHTCVLMKNGEVWTFGVNNKGQCGRDTGAMNQGGKGFGVENMATAMDEDLEEELDEKDEKSMMCPPGMHKWKLEQCMVCTVCGDCTGYGASCVSSGRPDRVPGGICGCGSGESGCAVCGCCKACARELDGQEARQRGILDAVKEMIPLDLLLAVPVPGVNIEEHLQLRQEEKRQRVIRRHRLEEGRGPLVFAGPIFMNHREQALARLRSHPAQLKHKRDKHKDGSGERGEKDASKITTYPPGSVRFDCELRAVQVSCGFHHSVVLMENGDVYTFGYGQHGQLGHGDVNSRGCPTLVQALPGPSTQVTAGSNHTAVLLMDGQVFTFGSFSKGQLGRPILDVPYWNAKPAPMPNIGSKYGRKATWIGASGDQTFLRIDEALINSHVLATSEIFASKHIIGLVPASISEPPPFKCLLINKVDGSCKTFNDSEQEDLQGFGVCLDPVYDVIWRFRPNTRELWCYNAVVADARLPSAADMQSRCSILSPELALPTGSRALTTRSHAALHILGCLDTLAAMQDLKMGVASTEEETQAVMKVYSKEDYSVVNRFESHGGGWGYSAHSVEAIRFSADTDILLGGLGLFGGRGEYTAKIKLFELGPDGGDHETDGDLLAETDVLAYDCAAREKYAMMFDEPVLLQAGWWYVAWARVSGPSSDCGSHGQASITTDDGVVFQFKSSKKSNNGTDVNAGQIPQLLYRLPTSDGSASKGKQQTSEPVHILKRSFARTVSVECFESLLSILHWSWTTLVLGVEELRGLKGFQFTATLLDLERLRFVGTCCLRLLRVYTCEIYPVSATGKAVVEETSKLAECIGKTRTLLRKILSEGVDHCMVKLDNDPQGYLSQPLSLLEAVLQECHNTFTACFHSFYPTPALQWACLCDLLNCLDQDIQEANFKTSSSRLLAAVMSALCHTSVKLTSIFPIAYDGEVLLRSIVKQVSTENDSTLVHRFPLLVAHMEKLSQSEENISGMTSFREVLEKMLVIVVLPVRNSLRRENELFSSHLVSNTCGLLASIVSELTASALGSEVDGLNSLHSVKASANRFTKTSQGRSWNTGNGSPDAICFSVDKPGIVVVGFSVYGGGGIHEYELEVLVDDSEHAGDSTHSHRWTSLELVKGTYTTDDSPSDIAEIRLDKVVPLKENVKYAVRLRNYGSRTANGDGGMTTVQCPDGVTFTFSTCSLSSNGTNQTRGQIPQILYYRSEFDGDLQSQLLSKANEEDKNCSRALSVVSTVVRASKDLLHRALAVDADDIPELLSSSSLFSMLLPLIIAYIGPVAAAIPKVAVEVFGLVQQLLPSVAILNQKYAPPAFNPNQSTDSTTGNQPEQGLSACTTSSHYAVIESEHPYKPACVMHYKVTFPECVRWMTIEFDPQCGTAQSEDVLRLLIPVRTVQNSGYGPKLTSVHENLNSWIELKKFSGSSGWPTMVLVLPGNEALFSLETASDYVKDDKASFYGFKCFAIGYEFSPGPDEGVIQLEKELANLGGVCAAALMKKDLALPIGNELEEDLEILEEAALQVCKTHSGILGKGLALSHSPTILEALEGNLPLQIQSNEQSFLDDFIACVPGSSGGRLARWLQPDSYADPQKTSLILNKDDIRCGWPTTITVQTKDQYGDVVHVPNMKVEVKAVPVSQKKMSLQQDQAKKPQRIPGSPAVTAASSNTDMTYGGLASPKLDVSYEPMIVKEARYIAITMMKVYENYSFEELRFASPTPKRPSENMLIRVNNDGTYCANWTPGAIGLYTLHVTIDGIEIDAGLEVKVKDPPKGMIPPGTQLVKPKSEPQPNKVRKFVAKDSAGLRIRSHPSLQSEQIGIVKVNGTITFIDEIHNDDGVWLRLNDETIKKYVPNMNGYTEAWCLSFNQHLGKSLLVPVDESKTNTDDFFKDINSCCPQEATMQEQDMPFLRGGPGMYKVVKTGPSGHNIRSCPNLRGIPIGMLVLGNKVKAVGEVTNSEGTWVQLDQNSMVEFCESDEGEAWSLARDRGGNQYLRHEDEQALLDQNSQTPPPSPFSVQAFNKGASCSAQGFDYGLGNSKGDRGNISTSSKPASTSGKSELSSKHSRSLKPDGRMSRTTADQKKPRGTESLSASESLILKSDAAKLRSDSHSRSLSPNHNTLQTLKSDGRMPSSSRAESPGPGSRLSSPKPKTLPANRSSPSGASSPRSSSPHDKNLPQKSTAPVKTKLDPPRERSKSDSYTLDPDTLRKKKMPLTEPLRGRSTSPKPKSVPKDSTDSPGSENRAPSPHVVQENLHSEVVEVCTSSTLKTNSLTDSTCDDSSEFKSVDEGSNKVHFSIGKAPLKDEQEMRASPKISRKCANRHTRPKKEKSSFLFKGDGSKPLEPAKQAMSPSVAECARAVFASFLWHEGIVHDAMACSSFLKFHPELSKEHAPIRSSLNSQQPTEEKETKLKNRHSLEISSALNMFNIAPHGPDISKMGSINKNKVLSMLKEPPLHEKCEDGKTETTFEMSMHNTMKSKSPLPLTLQHLVAFWEDISLATIKAASQNMIFPSPGSCAVLKKKECEKENKKSKKEKKKKEKAEVRPRGNLFGEMAQLAVGGPEKDTICELCGESHPYPVTYHMRQAHPGCGRYAGGQGYNSIGHFCGGWAGNCGDGGIGGSTWYLVCDRCREKYLREKQAAAREKVKQSRRKPMQVKTPRALPTMEAHQVIKANALFLLSLSSAAEPSILCYHPAKPFQSQLPSVKEGISEDLPVKMPCLYLQTLARHHHENFVGYQDDNLFQDEMRYLRSTSVPAPYISVTPDASPNVFEEPESNMKSMPPSLETSPITDTDLAKRTVFQRSYSVVASEYDKQHSILPARVKAIPRRRVNSGDTEVGSSLLRHPSPELSRLISAHSSLSKGERNFQWPVLAFVIQHHDLEGLEIAMKQALRKSACRVFAMEAFNWLLCNVIQTTSLHDILWHFVASLTPAPVEPEEEEDEENKTSKENSEQEKDTRVCEHPLSDIVIAGEAAHPLPHTFHRLLQTISDLMMSLPSGSSLQQMALRCWSLKFKQSDHQFLHQSNVFHHINNILSKSDDGDSEESFSISIQSGFEAMSQELCIVMCLKDLTSIVDIKTSSRPAMIGSLTDGSTETFWESGDEDKNKTKNITINCVKGINARYVSVHVDNSRDLGNKVTSMTFLTGKAVEDLCRIKQVDLDSRHIGWVTSELPGGDNHIIKIELKGPENTLRVRQVKVLGWKDGESTKIAGQISASVAQQRNCEAETLRVFRLITSQVFGKLISGDAEPTPEQEEKALLSSPEGEEKVYNATSDADLKEHMVGIIFSRSKLTNLQKQVCAHIVQAIRMEATRVREEWEHAISSKENANSQPNDEDASSDAYCFELLSMVLALSGSNVGRQYLAQQLTLLQDLFSLLHTASPRVQRQVTSLLRRVLPEVTPSRLASIIGVKSLPPADISDIIHSTEKGDWNKLGILDMFLGCIAKALTVQLKAKGTTITGTAGTTVGKGVTTVTLPMIFNSSYLRRGESHWWMKGSTPTQISEIIIKLIKDMAAGHLSEAWSRVTKNAIAETIIALTKMEEEFRSPVRCIATTRLWLALASLCVLDQDHVDRLSSGRWMGKDGQQKQMPMCDNHDDGETAAIILCNVCGNLCTDCDRFLHLHRRTKTHQRQVFKEEEEAIKVDLHEGCGRTKLFWLMALADSKTMKAMVEFREHTGKPTTSSSEACRFCGSRSGTELSAVGSVCSDADCQEYAKIACSKTHPCGHPCGGVKNEEHCLPCLHGCDKSATSLKQDADDMCMICFTEALSAAPAIQLDCSHIFHLQCCRRVLENRWLGPRITFGFISCPICKNKINHIVLKDLLDPIKELYEDVRRKALMRLEYEGLHKSEAITTPGVRFYNDPAGYAMNRYAYYVCYKCRKAYFGGEARCDAEAGRGDDYDPRELICGACSDVSRAQMCPKHGTDFLEYKCRYCCSVAVFFCFGTTHFCNACHDDFQRMTSIPKEELPHCPAGPKGKQLEGTECPLHVVHPPTGEEFALGCGVCRNAHTF

SEQ ID NO: 35608 - protein, 4675 aa, Homo sapiens
MMMCAATASPAAASSGLGGDGFYPAATFSSSPAPGALFMPVPDGSVAAAGLGLGLPAADSRGHYQLLLSGRALADRYRRIYTAALNDRDQGGGSAGHPASRNKKILNKKKLKRKQKSKSKVKTRSKSENLENTVIIPDIKLHSNPSAFNIYCNVRHCVLEWQKKEISLAAASKNSVQSGESDSDEEEESKEPPIKLPKIIEVGLCEVFELIKETRFSHPSLCLRSLQALLNVLQGQQPEGLQSEPPEVLESLFQLLLEITVRSTGMNDSTGQSLTALSCACLFSLVASWGETGRTLQAISAILTNNGSHACQTIQVPTILNSLQRSVQAVLVGKIQIQDWFSNGIKKAALMHKWPLKEISVDEDDQCLLQNDGFFLYLLCKDGLYKIGSGYSGTVRGHIYNSTSRIRNRKEKKSWLGYAQGYLLYRDVNNHSMTAIRISPETLEQDGTVMLPDCHTEGQNILFTDGEYINQIAASRDDGFVVRIFATSTEPVLQQELQLKLARKCLHACGISLFDLEKDLHIISTGFDEESAILGAGREFALMKTANGKIYYTGKYQSLGIKQGGPSAGKWVELPITKSPKIVHFSVGHDGSHALLVAEDGSIFFTGSASKGEDGESTKSRRQSKPYKPKKIIKMEGKIVVYTACNNGSSSVISKDGELYMFGKDAIYSDSSSLVTDLKGHFVTQVAMGKAHTCVLMKNGEVWTFGVNNKGQCGRDTGAMNQGGKGFGVENMATAMDEDLEEELDEKDEKSMMCPPGMHKWKLEQCMVCTVCGDCTGYGASCVSSGRPDRVPGGICGCGSGESGCAVCGCCKACARELDGQEARQRGILDAVKEMIPLDLLLAVPVPGVNIEEHLQLRQEEKRQRVIRRHRLEEGRGPLVFAGPIFMNHREQALARLRSHPAQLKHKRDKHKDGSGERGEKDASKITTYPPGSVRFDCELRAVQVSCGFHHSVVLMENGDVYTFGYGQHGQLGHGDVNSRGCPTLVQALPGPSTQVTAGSNHTAVLLMDGQVFTFGSFSKGQLGRPILDVPYWNAKPAPMPNIGSKYGRKATWIGASGDQTFLRIDEALINSHVLATSEIFASKHIIGLVPASISEPPPFKCLLINKVDGSCKTFNDSEQEDLQGFGVCLDPVYDVIWRFRPNTRELWCYNAVVADARLPSAADMQSRCSILSPELALPTGSRALTTRSHAALHILGCLDTLAAMQDLKMGVASTEEETQAVMKVYSKEDYSVVNRFESHGGGWGYSAHSVEAIRFSADTDILLGGLGLFGGRGEYTAKIKLFELGPDGGDHETDGDLLAETDVLAYDCAAREKYAMMFDEPVLLQAGWWYVAWARVSGPSSDCGSHGQASITTDDGVVFQFKSSKKSNNGTDVNAGQIPQLLYRLPTSDGSASKGKQQTSEPVHILKRSFARTVSVECFESLLSILHWSWTTLVLGVEELRGLKGFQFTATLLDLERLRFVGTCCLRLLRVYTCEIYPVSATGKAVVEETSKLAECIGKTRTLLRKILSEGVDHCMVKLDNDPQGYLSQPLSLLEAVLQECHNTFTACFHSFYPTPALQWACLCDLLNCLDQDIQEANFKTSSSRLLAAVMSALCHTSVKLTSIFPIAYDGEVLLRSIVKQVSTENDSTLVHRFPLLVAHMEKLSQSEENISGMTSFREVLEKMLVIVVLPVRNSLRRENELFSSHLVSNTCGLLASIVSELTASALGSEVDGLNSLHSVKASANRFTKTSQGRSWNTGNGSPDAICFSVDKPGIVVVGFSVYGGGGIHEYELEVLVDDSEHAGDSTHSHRWTSLELVKGTYTTDDSPSDIAEIRLDKVVPLKENVKYAVRLRNYGSRTANGDGGMTTVQCPDGVTFTFSTCSLSSNGTNQTRGQIPQILYYRSEFDGDLQSQLLSKANEEDKNCSRALSVVSTVVRASKDLLHRALAVDADDIPELLSSSSLFSMLLPLIIAYIGPVAAAIPKVAVEVFGLVQQLLPSVAILNQKYAPPAFNPNQSTDSTTGNQPEQGLSACTTSSHYAVIESEHPYKPACVMHYKVTFPECVRWMTIEFDPQCGTAQSEDVLRLLIPVRTVQNSGYGPKLTSVHENLNSWIELKKFSGSSGWPTMVLVLPGNEALFSLETASDYVKDDKASFYGFKCFAIGYEFSPGPDEGVIQLEKELANLGGVCAAALMKKDLALPIGNELEEDLEILEEAALQVCKTHSGILGKGLALSHSPTILEALEGNLPLQIQSNEQSFLDDFIACVPGSSGGRLARWLQPDSYADPQKTSLILNKDDIRCGWPTTITVQTKDQYGDVVHVPNMKVEVKAVPVSQKKMSLQQDQAKKPQRIPGSPAVTAASSNTDMTYGGLASPKLDVSYEPMIVKEARYIAITMMKVYENYSFEELRFASPTPKRPSENMLIRVNNDGTYCANWTPGAIGLYTLHVTIDGIEIDAGLEVKVKDPPKGMIPPGTQLVKPKSEPQPNKVRKFVAKDSAGLRIRSHPSLQSEQIGIVKVNGTITFIDEIHNDDGVWLRLNDETIKKYVPNMNGYTEAWCLSFNQHLGKSLLVPVDESKTNTDDFFKDINSCCPQEATMQEQDMPFLRGGPGMYKVVKTGPSGHNIRSCPNLRGIPIGMLVLGNKVKAVGEVTNSEGTWVQLDQNSMVEFCESDEGEAWSLARDRGGNQYLRHEDEQALLDQNSQTPPPSPFSVQAFNKGASCSAQGFDYGLGNSKGDRGNISTSSKPASTSGKSELSSKHSRSLKPDGRMSRTTADQKKPRGTESLSASESLILKSDAAKLRSDSHSRSLSPNHNTLQTLKSDGRMPSSSRAESPGPGSRLSSPKPKTLPANRSSPSGASSPRSSSPHDKNLPQKSTAPVKTKLDPPRERSKSDSYTLDPDTLRKKKMPLTEPLRGRSTSPKPKSVPKDSTDSPGSENRAPSPHVVQENLHSEVVEVCTSSTLKTNSLTDSTCDDSSEFKSVDEGSNKVHFSIGKAPLKDEQEMRASPKISRKCANRHTRPKKEKSSFLFKGDGSKPLEPAKQAMSPSVAECARAVFASFLWHEGIVHDAMACSSFLKFHPELSKEHAPIRSSLNSQQPTEEKETKLKNRHSLEISSALNMFNIAPHGPDISKMGSINKNKVLSMLKEPPLHEKCEDGKTETTFEMSMHNTMKSKSPLPLTLQHLVAFWEDISLATIKAASQNMIFPSPGSCAVLKKKECEKENKKSKKEKKKKEKAEVRPRGNLFGEMAQLAVGGPEKDTICELCGESHPYPVTYHMRQAHPGCGRYAGGQGYNSIGHFCGGWAGNCGDGGIGGSTWYLVCDRCREKYLREKQAAAREKVKQSRRKPMQVKTPRALPTMEAHQVIKANALFLLSLSSAAEPSILCYHPAKPFQSQLPSVKEGISEDLPVKMPCLYLQTLARHHHENFVGYQDDNLFQDEMRYLRSTSVPAPYISVTPDASPNVFEEPESNMKSMPPSLETSPITDTDLAKRTVFQRSYSVVASEYDKQHSILPARVKAIPRRRVNSGDTEVGSSLLRHPSPELSRLISAHSSLSKGERNFQWPVLAFVIQHHDLEGLEIAMKQALRKSACRVFAMEAFNWLLCNVIQTTSLHDILWHFVASLTPAPVEPEEEEDEENKTSKENSEQEKDTRVCEHPLSDIVIAGEAAHPLPHTFHRLLQTISDLMMSLPSGSSLQQMALRCWSLKFKQSDHQFLHQSNVFHHINNILSKSDDGDSEESFSISIQSGFEAMSQELCIVMCLKDLTSIVDIKTSSRPAMIGSLTDGSTETFWESGDEDKNKTKNITINCVKGINARYVSVHVDNSRDLGNKVTSMTFLTGKAVEDLCRIKQVDLDSRHIGWVTSELPGGDNHIIKIELKGPENTLRVRQVKVLGWKDGESTKIAGQISASVAQQRNCEAETLRVFRLITSQVFGKLISGDAEPTPEQEEKALLSSPEGEEKATSDADLKEHMVGIIFSRSKLTNLQKQVCAHIVQAIRMEATRVREEWEHAISSKENANSQPNDEDASSDAYCFELLSMVLALSGSNVGRQYLAQQLTLLQDLFSLLHTASPRVQRQVTSLLRRVLPEVTPSRLASIIGVKSLPPADISDIIHSTEKGDWNKLGILDMFLGCIAKALTVQLKAKGTTITGTAGTTVGKGVTTVTLPMIFNSSYLRRGESHWWMKGSTPTQISEIIIKLIKDMAAGHLSEAWSRVTKNAIAETIIALTKMEEEFRSPVRCIATTRLWLALASLCVLDQDHVDRLSSGRWMGKDGQQKQMPMCDNHDDGETAAIILCNVCGNLCTDCDRFLHLHRRTKTHQRQVFKEEEEAIKVDLHEGCGRTKLFWLMALADSKTMKAMVEFREHTGKPTTSSSEACRFCGSRSGTELSAVGSVCSDADCQEYAKIACSKTHPCGHPCGGVKNEEHCLPCLHGCDKSATSLKQDADDMCMICFTEALSAAPAIQLDCSHIFHLQCCRRVLENRWLGPRITFGFISCPICKNKINHIVLKDLLDPIKELYEDVRRKALMRLEYEGLHKSEAITTPGVRFYNDPAGYAMNRYAYYVCYKCRKAYFGGEARCDAEAGRGDDYDPRELICGACSDVSRAQMCPKHGTDFLEYKCRYCCSVAVFFCFGTTHFCNACHDDFQRMTSIPKEELPHCPAGPKGKQLEGTECPLHVVHPPTGEEFALGCGVCRNAHTF

SEQ ID NO: 35609 - protein, 1341 aa, Homo sapiens
MKHLYGLFHYNPMMLGLESLPDPTDTWEIIETIGKGTYGKVYKVTNKRDGSLAAVKILDPVSDMDEEIEAEYNILQFLPNHPNVVKFYGMFYKADHCVGGQLWLVLELCNGGSVTELVKGLLRCGQRLDEAMISYILYGALLGLQHLHNNRIIHRDVKGNNILLTTEGGVKLVDFGVSAQLTSTRLRRNTSVGTPFWMAPEVIACEQQYDSSYDARCDVWSLGITAIELGDGDPPLFDMHPVKTLFKIPRNPPPTLLHPEKWCEEFNHFISQCLIKDFERRPSVTHLLDHPFIKGVHGKVLFLQKQLAKVLQDQKHQNPVAKTRHERMHTRRPYHVEDAEKYCLEDDLVNLEVLDEDTIIHQLQKRYADLLIYTYVGDILIALNPFQNLSIYSPQFSRLYHGVKRASNPPHIFASADAAYQCMVTLSKDQCIVISGESGSGKTESAHLIVQHLTFLGKANNQTLREKILQVNSLVEAFGNSCTAINDNSSRFGKYLEMMFTPTGVVMGARISEYLLEKSRVIKQAAREKNFHIFYYIYAGLHHQKKLSDFRLPEEKPPRYIADETGRVMHDITSKESYRRQFEAIQHCFRIIGFTDKEVHSVYRILAGILNIGNIEFAAISSQHQTDKSEVPNAEALQNAASVLCISPEELQEALTSHCVVTRGETIIRANTVDRAADVRDAMSKALYGRLFSWIVNRINTLLQPDENICSAGGGMNVGILDIFGFENFQRNSFEQLCINIANEQIQYYFNQHVFALEQMEYQNEGIDAVPVEYEDNRPLLDMFLQKPLGLLALLDEESRFPQATDQTLVDKFEDNLRCKYFWRPKGVELCFGIQHYAGKVLYDASGVLEKNRDTLPADVVVVLRTSENKLLQQLFSIPLTKTGNLAQTRARITVASSSLPPHFSAGKAKVDTLEVIRHPEETTNMKRQTVASYFRYSLMDLLSKMVVGQPHFVRCIKPNDDREALQFSRERVLAQLRSTGILETVSIRRQGYSHRILFEEFVKRYYYLAFTAHQTPLASKESCVAILEKSRLDHWVLGKTKVFLKYYHVEQLNLLLREVIGRVVVLQAYTKGWLGARRYKRVREKREKGAIAIQSAWRGYDARRKFKKISNRRNESAAHNQAGDTSNQSSGPHSPVAAGTRGSAEVQDCSEPGDHKVLRGSVHRRSHSQAESNNGRTQTSSNSPAVTEKNGHSQAQSSPKGCDIFAGHANKHSVSGTDLLSSRICHPAPDQQGLSLWGAPQKPGSENGLAQKHRTPRRRCQQPKMLSSPEDTMYYNQLNGTLEYQGSKRKPRKLGQIKVLDGEDEYYKSLSPVDCIPEENNSAHPSFFSSSSKGDSFAQH

SEQ ID NO: 35610 - protein, 1278 aa, Homo sapiens
MKHLYGLFHYNPMMLGLESLPDPTDTWEIIETIGKGTYGKVYKVTNKRDGSLAAVKILDPVSDMDEEIEAEYNILQFLPNHPNVVKFYGMFYKADHCVGGQLWLVLELCNGGSVTELVKGLLRCGQRLDEAMISYILYGALLGLQHLHNNRIIHRDVKGNNILLTTEGGVKLVDFGVSAQLTSTRLRRNTSVGTPFWMAPEVIACEQQYDSSYDARCDVWSLGITAIELGDGDPPLFDMHPVKTLFKIPRNPPPTLLHPEKWCEEFNHFISQCLIKDFERRPSVTHLLDHPFIKGVHGKVLFLQKQLAKVLQDQKHQNPVAKTRHERMHTRRPYHVEDAEKYCLEDDLVNLEVLDEDTIIHQLQKRYADLLIYTYVGDILIALNPFQNLSIYSPQFSRLYHGVKRASNPPHIFASADAAYQCMVTLSKDQCIVISGESGSGKTESAHLIVQHLTFLGKANNQTLREKILQVNSLVEAFGNSCTAINDNSSRFGKYLEMMFTPTGVVMGARISEYLLEKSRVIKQAAREKNFHIFYYIYAGLHHQKKLSDFRLPEEKPPRYIADETGRVMHDITSKESYRRQFEAIQHCFRIIGFTDKEVHSVYRILAGILNIGNIEFAAISSQHQTDKSEVPNAEALQNAASVLCISPEELQEALTSHCVVTRGETIIRANTVDRAADVRDAMSKALYGRLFSWIVNRINTLLQPDENICSAGGGMNVGILDIFGFENFQRNSFEQLCINIANEQIQYYFNQHVFALEQMEYQNEGIDAVPVEYEDNRPLLDMFLQKPLGLLALLDEESRFPQATDQTLVDKFEDNLRCKYFWRPKGVELCFGIQHYAGKVLYDASGVLEKNRDTLPADVVVVLRTSENKLLQQLFSIPLTKTGNLAQTRARITVASSSLPPHFSAGKAKVDTLEVIRHPEETTNMKRQTVASYFRYSLMDLLSKMVVGQPHFVRCIKPNDDREALQFSRERVLAQLRSTGILETVSIRRQGYSHRILFEEFVKRYYYLAFTAHQTPLASKESCVAILEKSRLDHWVLGKTKVFLKYYHVEQLNLLLREVIGRVVVLQAYTKGWLGARRYKRVREKREKGAIAIQSAWRGYDARRKFKKISNRRNESAAHNQAGDTSNQSSGPHSPVAAGTRGSAEVQDCSEPGDHKVLRGSVHRRSHSQAESNNGRTQTSSNSPAVTEKNGHSQAQSSPKGCDIFAGHANKHSVSGTDLLSSRICHPAPDQQGLSLWGAPQKPAFPHYGCNFYGFRKWSCTEASNTSPTMSAAQNAE

SEQ ID NO: 35611 - protein, 1251 aa, Homo sapiens
MKHLYGLFHYNPMMLGLESLPDPTDTWEIIETIGKGTYGKVYKVTNKRDGSLAAVKILDPVSDMDEEIEAEYNILQFLPNHPNVVKFYGMFYKADHCVGGQLWLVLELCNGGSVTELVKGLLRCGQRLDEAMISYILYGALLGLQHLHNNRIIHRDVKGNNILLTTEGGVKLVDFGVSAQLTSTRLRRNTSVGTPFWMAPEVIACEQQYDSSYDARCDVWSLGITAIELGDGDPPLFDMHPVKTLFKIPRNPPPTLLHPEKWCEEFNHFISQCLIKDFERRPSVTHLLDHPFIKGVHGKVLFLQKQLAKVLQDQKHQNPVAKTRHERMHTRRPYHVEDAEKYCLEDDLVNLEVLDEDTIIHQLQKRYADLLIYTYVGDILIALNPFQNLSIYSPQFSRLYHGVKRASNPPHIFASADAAYQCMVTLSKDQCIVISGESGSGKTESAHLIVQHLTFLGKANNQTLREKILQVNSLVEAFGNSCTAINDNSSRFGKYLEMMFTPTGVVMGARISEYLLEKSRVIKQAAREKNFHIFYYIYAGLHHQKKLSDFRLPEEKPPRYIADETGRVMHDITSKESYRRQFEAIQHCFRIIGFTDKEVHSVYRILAGILNIGNIEFAAISSQHQTDKSEVPNAEALQNAASVLCISPEELQEALTSHCVVTRGETIIRANTVDRAADVRDAMSKALYGRLFSWIVNRINTLLQPDENICSAGGGMNVGILDIFGFENFQRNSFEQLCINIANEQIQYYFNQHVFALEQMEYQNEGIDAVPVEYEDNRPLLDMFLQKPLGLLALLDEESRFPQATDQTLVDKFEDNLRCKYFWRPKGVELCFGIQHYAGKVLYDASGVLEKNRDTLPADVVVVLRTSENKLLQQLFSIPLTKTGNLAQTRARITVASSSLPPHFSAGKAKVDTLEVIRHPEETTNMKRQTVASYFRYSLMDLLSKMVVGQPHFVRCIKPNDDREALQFSRERVLAQLRSTGILETVSIRRQGYSHRILFEEFVKRYYYLAFTAHQTPLASKESCVAILEKSRLDHWVLGKTKVFLKYYHVEQLNLLLREVIGRVVVLQAYTKGWLGARRYKRVREKREKGAIAIQSGDTSNQSSGPHSPVAAGTRGSAEVQDCSEPGDHKVLRGSVHRRSHSQAESNNGRTQTSSNSPAVTEKNGHSQAQSSPKGCDIFAGHANKHSVSGTDLLSSRICHPAPDQQGLSLWGAPQKPAFPHYGCNFYGFRKWSCTEASNTSPTMSAAQNAE

SEQ ID NO: 35612 - protein, 1314 aa, Homo sapiens
MKHLYGLFHYNPMMLGLESLPDPTDTWEIIETIGKGTYGKVYKVTNKRDGSLAAVKILDPVSDMDEEIEAEYNILQFLPNHPNVVKFYGMFYKADHCVGGQLWLVLELCNGGSVTELVKGLLRCGQRLDEAMISYILYGALLGLQHLHNNRIIHRDVKGNNILLTTEGGVKLVDFGVSAQLTSTRLRRNTSVGTPFWMAPEVIACEQQYDSSYDARCDVWSLGITAIELGDGDPPLFDMHPVKTLFKIPRNPPPTLLHPEKWCEEFNHFISQCLIKDFERRPSVTHLLDHPFIKGVHGKVLFLQKQLAKVLQDQKHQNPVAKTRHERMHTRRPYHVEDAEKYCLEDDLVNLEVLDEDTIIHQLQKRYADLLIYTYVGDILIALNPFQNLSIYSPQFSRLYHGVKRASNPPHIFASADAAYQCMVTLSKDQCIVISGESGSGKTESAHLIVQHLTFLGKANNQTLREKILQVNSLVEAFGNSCTAINDNSSRFGKYLEMMFTPTGVVMGARISEYLLEKSRVIKQAAREKNFHIFYYIYAGLHHQKKLSDFRLPEEKPPRYIADETGRVMHDITSKESYRRQFEAIQHCFRIIGFTDKEVHSVYRILAGILNIGNIEFAAISSQHQTDKSEVPNAEALQNAASVLCISPEELQEALTSHCVVTRGETIIRANTVDRAADVRDAMSKALYGRLFSWIVNRINTLLQPDENICSAGGGMNVGILDIFGFENFQRNSFEQLCINIANEQIQYYFNQHVFALEQMEYQNEGIDAVPVEYEDNRPLLDMFLQKPLGLLALLDEESRFPQATDQTLVDKFEDNLRCKYFWRPKGVELCFGIQHYAGKVLYDASGVLEKNRDTLPADVVVVLRTSENKLLQQLFSIPLTKTGNLAQTRARITVASSSLPPHFSAGKAKVDTLEVIRHPEETTNMKRQTVASYFRYSLMDLLSKMVVGQPHFVRCIKPNDDREALQFSRERVLAQLRSTGILETVSIRRQGYSHRILFEEFVKRYYYLAFTAHQTPLASKESCVAILEKSRLDHWVLGKTKVFLKYYHVEQLNLLLREVIGRVVVLQAYTKGWLGARRYKRVREKREKGAIAIQSGDTSNQSSGPHSPVAAGTRGSAEVQDCSEPGDHKVLRGSVHRRSHSQAESNNGRTQTSSNSPAVTEKNGHSQAQSSPKGCDIFAGHANKHSVSGTDLLSSRICHPAPDQQGLSLWGAPQKPGSENGLAQKHRTPRRRCQQPKMLSSPEDTMYYNQLNGTLEYQGSKRKPRKLGQIKVLDGEDEYYKSLSPVDCIPEENNSAHPSFFSSSSKGDSFAQH

SEQ ID NO: 35613 - protein, 1275 aa, Homo sapiens
MKHLYGLFHYNPMMLGLESLPDPTDTWEIIETIGKGTYGKVYKVTNKRDGSLAAVKILDPVSDMDEEIEAEYNILQFLPNHPNVVKFYGMFYKADHCVGGQLWLVLELCNGGSVTELVKGLLRCGQRLDEAMISYILYGALLGLQHLHNNRIIHRDVKGNNILLTTEGGVKLVDFGVSAQLTSTRLRRNTSVGTPFWMAPEVIACEQQYDSSYDARCDVWSLGITAIELGDGDPPLFDMHPVKTLFKIPRNPPPTLLHPEKWCEEFNHFISQCLIKDFERRPSVTHLLDHPFIKGVHGKVLFLQKQLAKVLQDQKHQNPVAKTRHERMHTRRPYHVEDAEKYCLEDDLVNLEVLDEDTIIHQLQKRYADLLIYTYVGDILIALNPFQNLSIYSPQFSRLYHGVKRASNPPHIFASADAAYQCMVTLSKDQCIVISGESGSGKTESAHLIVQHLTFLGKANNQTLREKILQVNSLVEAFGNSCTAINDNSSRFGKYLEMMFTPTGVVMGARISEYLLEKSRVIKQAAREKNFHIFYYIYAGLHHQKKLSDFRLPEEKPPRYIADETGRVMHDITSKESYRRQFEAIQHCFRIIGFTDKEVHSVYRILAGILNIGNIEFAAISSQHQTDKSEVPNAEALQNAASVLCISPEELQEALTSHCVVTRGETIIRANTVDRAADVRDAMSKALYGRLFSWIVNRINTLLQPDENICSAGGGMNVGILDIFGFENFQRNSFEQLCINIANEQIQYYFNQHVFALEQMEYQNEGIDAVPVEYEDNRPLLDMFLQKPLGLLALLDEESRFPQATDQTLVDKFEDNLRCKYFWRPKGVELCFGIQHYAGKVLYDASGVLEKNRDTLPADVVVVLRTSENKLLQQLFSIPLTKTGNLAQTRARITVASSSLPPHFSAGKAKVDTLEVIRHPEETTNMKRQTVASYFRYSLMDLLSKMVVGQPHFVRCIKPNDDREALQFSRERVLAQLRSTGILETVSIRRQGYSHRILFEEFVKRYYYLAFTAHQTPLASKESCVAILEKSRLDHWVLGKTKVFLKYYHVEQLNLLLREVIGRVVVLQAYTKGWLGARRYKRVREKREKGAIAIQSAWRGYDARRKFKKISNRRNESAAHNQAGDTSNQSSGPHSPVAAGTRGSAEVQDCSEPGDHKVLRGSVHRRSHSQAESNNGRTQTSSNSPAVTEKNGWSFTLLLRLECNSMISADCNLRPLGSSDSPASASRVAGITGIHKPRVLQKGAISSQDMQTSTRFLGLICCLLGYAILLQISKD

SEQ ID NO: 35614 - protein, 1192 aa, Homo sapiens
MKHLYGLFHYNPMMLGLESLPDPTDTWEIIETIGKGTYGKVYKVTNKRDGSLAAVKILDPVSDMDEEIEAEYNILQFLPNHPNVVKFYGMFYKADHCVGGQLWLVLELCNGGSVTELVKGLLRCGQRLDEAMISYILYGALLGLQHLHNNRIIHRDVKGNNILLTTEGGVKLVDFGVSAQLTSTRLRRNTSVGTPFWMAPEVIACEQQYDSSYDARCDVWSLGITAIELGDGDPPLFDMHPVKTLFKIPRNPPPTLLHPEKWCEEFNHFISQCLIKDFERRPSVTHLLDHPFIKGVHGKVLFLQKQLAKVLQDQKHQNPVAKTRHERMHTRRPYHVEDAEKYCLEDDLVNLEVLDEDTIIHQLQKRYADLLIYTYVGDILIALNPFQNLSIYSPQFSRLYHGVKRASNPPHIFASADAAYQCMVTLSKDQCIVISGESGSGKTESAHLIVQHLTFLGKANNQTLREKILQVNSLVEAFGNSCTAINDNSSRFGKYLEMMFTPTGVVMGARISEYLLEKSRVIKQAAREKNFHIFYYIYAGLHHQKKLSDFRLPEEKPPRYIADETGRVMHDITSKESYRRQFEAIQHCFRIIGFTDKEVHSVYRILAGILNIGNIEFAAISSQHQTDKSEVPNAEALQNAASVLCISPEELQEALTSHCVVTRGETIIRANTVDRAADVRDAMSKALYGRLFSWIVNRINTLLQPDENICSAGGGMNVGILDIFGFENFQRNSFEQLCINIANEQIQYYFNQHVFALEQMEYQNEGIDAVPVEYEDNRPLLDMFLQKPLGLLALLDEESRFPQATDQTLVDKFEDNLRCKYFWRPKGVELCFGIQHYAGKVLYDASGVLEKNRDTLPADVVVVLRTSENKLLQQLFSIPLTKTGNLAQTRARITVASSSLPPHFSAGKAKVDTLEVIRHPEETTNMKRQTVASYFRYSLMDLLSKMVVGQPHFVRCIKPNDDREALQFSRERVLAQLRSTGILETVSIRRQGYSHRILFEEFVKRYYYLAFTAHQTPLASKESCVAILEKSRLDHWVLGKTKVFLKYYHVEQLNLLLREVIGRVVVLQAYTKGWLGARRYKRVREKREKGAIAIQSAWRGYDARRKFKKISNRRNESAAHNQAGDTSNQSSGPHSPVAAGTRGSAEVQDCSEPGDHKVLRGSVHRRSHSQAESNNGRTQTSSNSPAVTEKNG

SEQ ID NO: 35615 - protein, 1350 aa, Homo sapiens
MLQSALLSTRKHLYGLFHYNPMMLGLESLPDPTDTWEIIETIGKGTYGKVYKVTNKRDGSLAAVKILDPVSDMDEEIEAEYNILQFLPNHPNVVKFYGMFYKADHCVGGQLWLVLELCNGGSVTELVKGLLRCGQRLDEAMISYILYGALLGLQHLHNNRIIHRDVKGNNILLTTEGGVKLVDFGVSAQLTSTRLRRNTSVGTPFWMAPEVIACEQQYDSSYDARCDVWSLGITAIELGDGDPPLFDMHPVKTLFKIPRNPPPTLLHPEKWCEEFNHFISQCLIKDFERRPSVTHLLDHPFIKGVHGKVLFLQKQLAKVLQDQKHQNPVAKTRHERMHTRRPYHVEDAEKYCLEDDLVNLEVLDEDTIIHQLQKRYADLLIYTYVGDILIALNPFQNLSIYSPQFSRLYHGVKRASNPPHIFASADAAYQCMVTLSKDQCIVISGESGSGKTESAHLIVQHLTFLGKANNQTLREKILQVNSLVEAFGNSCTAINDNSSRFGKYLEMMFTPTGVVMGARISEYLLEKSRVIKQAAREKNFHIFYYIYAGLHHQKKLSDFRLPEEKPPRYIADETGRVMHDITSKESYRRQFEAIQHCFRIIGFTDKEVHSVYRILAGILNIGNIEFAAISSQHQTDKSEVPNAEALQNAASVLCISPEELQEALTSHCVVTRGETIIRANTVDRAADVRDAMSKALYGRLFSWIVNRINTLLQPDENICSAGGGMNVGILDIFGFENFQRNSFEQLCINIANEQIQYYFNQHVFALEQMEYQNEGIDAVPVEYEDNRPLLDMFLQKPLGLLALLDEESRFPQATDQTLVDKFEDNLRCKYFWRPKGVELCFGIQHYAGKVLYDASGVLEKNRDTLPADVVVVLRTSENKLLQQLFSIPLTKTGNLAQTRARITVASSSLPPHFSAGKAKVDTLEVIRHPEETTNMKRQTVASYFRYSLMDLLSKMVVGQPHFVRCIKPNDDREALQFSRERVLAQLRSTGILETVSIRRQGYSHRILFEEFVKRYYYLAFTAHQTPLASKESCVAILEKSRLDHWVLGKTKVFLKYYHVEQLNLLLREVIGRVVVLQAYTKGWLGARRYKRVREKREKGAIAIQSAWRGYDARRKFKKISNRRNESAAHNQAGDTSNQSSGPHSPVAAGTRGSAEVQDCSEPGDHKVLRGSVHRRSHSQAESNNGRTQTSSNSPAVTEKNGHSQAQSSPKGCDIFAGHANKHSVSGTDLLSSRICHPAPDQQGLSLWGAPQKPGSENGLAQKHRTPRRRCQQPKMLSSPEDTMYYNQLNGTLEYQGSKRKPRKLGQIKVLDGEDEYYKSLSPVDCIPEENNSAHPSFFSSSSKGDSFAQH

SEQ ID NO: 35616 - protein, 467 aa, Homo sapiens
MQMDNRLPPKKVPGFCSFRYGLSFLVHCCNVIITAQRACLNLTMVVMVNSTDPHGLPNTSTKKLLDNIKNPMYNWSPDIQGIILSSTSYGVIIIQVPVGYFSGIYSTKKMIGFALCLSSVLSLLIPPAAGIGVAWVVVCRAVQGAAQGIVATAQFEIYVKWAPPLERGRLTSMSTSGFLLGPFIVLLVTGVICESLGWPMVFYIFGACGCAVCLLWFVLFYDDPKDHPCISISEKEYITSSLVQQVSSSRQSLPIKAILKSLPVWAISTGSFTFFWSHNIMTLYTPMFINSMLHVNIKENGFLSSLPYLFAWICGNLAGQLSDFFLTRNILSVIAVRKLFTAAGFLLPAIFGVCLPYLSSTFYSIVIFLILAGATGSFCLGGVFINGLDIAPRYFGFIKACSTLTGMIGGLIASTLTGLILKQDPESAWFKTFILMAAINVTGLIFYLIVATAEIQDWAKEKQHTRL

SEQ ID NO: 35617 - protein, 413 aa, Homo sapiens
MQMDNRLPPKKVPGFCSFRYGLSFLVHCCNVIITAQRACLNLTMVVMVNSTDPHGLPNTSTKKLLDNIKNPMYNWSPDIQGIILSSTSYGVIIIQVPVGYFSGIYSTKKMIGFALCLSSVLSLLIPPAAGIGVAWVVVCRAVQGAAQGIVATAQFEIYVKWAPPLERGRLTSMSTSGFLLGPFIVLLVTGVICESLGWPMVFYIFGACGCAVCLLWFVLFYDDPKDHPCISISEKEYITSSLVQQNGFLSSLPYLFAWICGNLAGQLSDFFLTRNILSVIAVRKLFTAAGFLLPAIFGVCLPYLSSTFYSIVIFLILAGATGSFCLGGVFINGLDIAPRYFGFIKACSTLTGMIGGLIASTLTGLILKQDPESAWFKTFILMAAINVTGLIFYLIVATAEIQDWAKEKQHTRL

SEQ ID NO: 35618 - protein, 309 aa, Homo sapiens
MEPENDTGISEFVLLGLSEEPELQPFLFGLFLSMYLVTVLGNLLIILATISDSHLHTPMYFFLSNLSFADICFISTTIPKMLINIQTQSRVITYAGCITQMCFFVLFGGLDSLLLAVMAYDRFVAICHPLHYTVIMNPRLCGLLVLASWMIAALNSLSQSLMVLWLSFCTDLEIPHFFCELNQVIHLACSDTFLNDMGMYFAAGLLAGGPLVGILCSYSKIVSSIRAISSAQGKYKAFSTCASHLSVVSLFCCTGLGVYLTSAATHNSHTSATASVMYTVATPMLNPFIYSLRNKDIKRALKMSFRGKQ

SEQ ID NO: 35619 - protein, 542 aa, Homo sapiens
MNGKRPAEPGPARVGKKGKKEVMAEFSDAVTEETLKKQVAEAWSRRTPFSHEVIVMDMDPFLHCVIPNFIQSQDFLEGLQKELMNLDFHEKYNDLYKFQQSDDLKKRREPHISTLRKILFEDFRSWLSDISKIDLESTIDMSCAKYEFTDALLCHDDELEGRRIAFILYLVPPWDRSMGGTLDLYSIDEHFQPKQIVKSLIPSWNKLVFFEVSPVSFHQVSEVLSEEKSRLSISGWFHGPSLTRPPNYFEPPIPRSPHIPQDHEILYDWINPTYLDMDYQVQIQEEFEESSEILLKEFLKPEKFTKVCEALEHGHVEWSSRGPPNKRFYEKAEESKLPEILKECMKLFRSEALFLLLSNFTGLKLHFLAPSEEDEMNDKKEAETTDITEEGTSHSPPEPENNQMAISNNSQQSNEQTDPEPEENETKKESSVPMCQGELRHWKTGHYTLIHDHSKAEFALDLILYCGCEGWEPEYGGFTSYIAKGEDEELLTVNPESNSLALVYRDRETLKFVKHINHRSLEQKKTFPNRTGFWDFSFIYYE

SEQ ID NO: 35620 - protein, 402 aa, Homo sapiens
MSCAKYEFTDALLCHDDELEGRRIAFILYLVPPWDRSMGGTLDLYSIDEHFQPKQIVKSLIPSWNKLVFFEVSPVSFHQVSEVLSEEKSRLSISGWFHGPSLTRPPNYFEPPIPRSPHIPQDHEILYDWINPTYLDMDYQVQIQEEFEESSEILLKEFLKPEKFTKVCEALEHGHVEWSSRGPPNKRFYEKAEESKLPEILKECMKLFRSEALFLLLSNFTGLKLHFLAPSEEDEMNDKKEAETTDITEEGTSHSPPEPENNQMAISNNSQQSNEQTDPEPEENETKKESSVPMCQGELRHWKTGHYTLIHDHSKAEFALDLILYCGCEGWEPEYGGFTSYIAKGEDEELLTVNPESNSLALVYRDRETLKFVKHINHRSLEQKKTFPNRTGFWDFSFIYYE

SEQ ID NO: 35621 - protein, 97 aa, Homo sapiens
MLGNKRLGLSGLTLALSLLVCLGALAEAYPSKPDNPGEDAPAEDMARYYSALRHYINLITRQRYGKRSSPETLISDLLMRESTENVPRTRLEDPAMW

SEQ ID NO: 35622 - protein, 312 aa, Homo sapiens
MSGENVTKVSTFILVGLPTAPGLQYLLFLLFLLTYLFVLVENLAIILIVWSSTSLHRPMYYFLSSMSFLEIWYVSDITPKMLEGFLLQQKRISFVGCMTQLYFFSSLVCTECVLLASMAYDRYVAICHPLRYHVLVTPGLCLQLVGFSFVSGFTISMIKVCFISSVTFCGSNVLNHFFCDISPILKLACTDFSTAELVDFILAFIILVFPLLATILSYWHITLAVLRIPSATGCWRAFSTCASHLTVVTVFYTALLFMYVRPQAIDSQSSNKLISAVYTVVTPIINPLIYCLRNKEFKDALKKALGLGQTSH

SEQ ID NO: 35623 - protein, 247 aa, Homo sapiens
MLVLRSALTRALASRTLAPQMCSSFATGPRQYDGIFYEFRSYYLKPSKMNEFLENFEKNAHLRTAHSELVGYWSVEFGGRMNTVFHIWKYDNFAHRTEVRKALAKDKEWQEQFLIPNLALIDKQESEITYLVPWCKLEKPPKEGVYELATFQMKPGGPALWGDAFKRAVHAHVNLGYTKLVGVFHTEYGALNRVHVLWWNESADSRAAGRHKSHEDPRVVAAVRESVNYLVSQQNMLLIPTSFSPLK

SEQ ID NO: 35624 - protein, 531 aa, Homo sapiens
MSLPSGHTTGHTDQVVQRRARCWDIYQRRFSSRSEPVNPGMHSSSHQQQDGDAAMHGAHMDSPVRYTPYTISPYNRKGSFRKQDQTHVNMEREQKPPERRMEGNMPDGTLGSWFKITVPFGIKYNEKWLLNLIQNECSVPFVPVEFHYENMHASFFVENASIAYALKNVSGKIWDEDNEKISIFVNPAGIPHFVHRELKSEKVEQIKLAMNQQCDVSQEALDIQRLPFYPDMVNRDTKMASNPRKCMAASLDVHEENIPTVMSAGEMDKWKGIEPGEKCADRSPVCTTFSDTSSNINSILELFPKLLCLDGQQSPRATLCGTEAHKRLPTCKGSFFGSEMLKNLVLQFLQQYYLIYDSGDRQGLLSAYHDEACFSLSIPFNPEDSAPSSFCKFFKDSRNIKILKDPYLRGELLKHTKLDIVDSLSALPKTQHDLSSFLVDMWYQTEWMLCFSVNGVFKEVEGQSQGSVLAFTRTFIATPGSSSSLCIVNDKLFVRDTSHQGTQSALFTLVPTAFSSSVPAFSQEQQKMLPS

SEQ ID NO: 35625 - protein, 233 aa, Homo sapiens
MEREQKPPERRMEGNMPDGTLGSWFKITVPFGIKYNEKWLLNLIQNECSVPFVPVEFHYENMHASFFVENASIAYALKNVSGKIWDEDNEKISIFVNPAGIPHFVHRELKSEKVEQIKLAMNQQCDVSQEALDIQRLPFYPDMVNRDTKMASNPRKCMAASLDVHEENIPTVMSAGEMDKWKGIEPGEKCADRSPVCTTFSDTSSNIKSVVPSVTTWDPDLCLIAPFCRRRQH

SEQ ID NO: 35626 - protein, 317 aa, Homo sapiens
MLRNGSIVTEFILVGFQQSSTSTRALLFALFLALYSLTMAMNGLIIFITSWTDPKLNSPMYFFLGHLSLLDVCFITTTIPQMLIHLVVRDHIVSFVCCMTQMYFVFCVGVAECILLAFMAYDRYVAICYPLNYVPIISQKVCVRLVGTAWFFGLINGIFLEYISFREPFRRDNHIESFFCEAPIVIGLSCGDPQFSLWAIFADAIVVILSPMVLTVTSYVHILATILSKASSSGRGKTFSTCASHLTVVIFLYTSAMFSYMNPHSTHGPDKDKPFSLLYTIITPMCNPIIYSFRNKEIKEAMVRALGRTRLAQPQSV

SEQ ID NO: 35627 - protein, 312 aa, Homo sapiens
MRNSTAVTDFILLGLTSDPQWQVVLFIFLLVTYMLSVTGNLIIITLTLSDPHLQTPMYFFLRNFSFLEISFTSVCIPRFLVTVVTGNRTISYNGCVAQLFFFIFLGVTEFYLLAAMSYDRCMAICKPLHYTIIMSTRVCTLLVFSSWLAGFLIIFPPVMLLLQLDFCASNVIDHFICDSSPMLQLSCTNTHFLELMAFFLAVVTLMVTLTLVILSYTNIIRTILKIPSMSQRKKAFSTCSSHMIVVSISYSSCIFMYIKTSARERVTLSKGVAVLNTSVAPLLNPFIYTLRNKQVKQAFKSMVQKMIFSLNK

SEQ ID NO: 35628 - protein, 544 aa, Homo sapiens
MKISMINYKSLLALLFILASWIIFTVFQNSTKVWSALNLSISLHYWNNSTKSLFPKTPLISLKPLTETELRIKEIIEKLDQQIPPRPFTHVNTTTSATHSTATILNPRDTYCRGDQLHILLEVRDHLGRRKQYGGDFLRARMSSPALMAGASGKVTDFNNGTYLVSFTLFWEGQVSLSLLLIHPSEGVSALWSARNQGYDRVIFTGQFVNGTSQVHSECGLILNTNAELCQYLDNRDQEGFYCVRPQHMPCAALTHMYSKNKKVSYLSKQEKSLFERSNVGVEIMEKFNTISVSKCNKETVAMKEKCKFGMTSTIPSGHVWRNTWNPVSCSLATVKMKECLRGKLIYLMGDSTIRQWMEYFKASINTLKSVDLHESGKLQHQLAVDLDRNINIQWQKYCYPLIGSMTYSVKEMEYLTRAIDRTGGEKNTVIVISLGQHFRPFPIDVFIRRALNVHKAIQHLLLRSPDTMVIIKTENIREMYNDAERFSDFHGYIQYLIIKDIFQDLSVSIIDAWDITIAYGTNNVHPPQHVVGNQINILLNYIC

SEQ ID NO: 35629 - protein, 260 aa, Homo sapiens
MEKFNTISVSKCNKETVAMKEKCKFGMTSTIPSGHVWRNTWNPVSCSLATVKMKECLRGKLIYLMGDSTIRQWMEYFKASINTLKSVDLHESGKLQHQLAVDLDRNINIQWQKYCYPLIGSMTYSVKEMEYLTRAIDRTGGEKNTVIVISLGQHFRPFPIDVFIRRALNVHKAIQHLLLRSPDTMVIIKTENIREMYNDAERFSDFHGYIQYLIIKDIFQDLSVSIIDAWDITIAYGTNNVHPPQHVVGNQINILLNYIC

SEQ ID NO: 35630 - protein, 311 aa, Homo sapiens
MTKNQTWVTEFILLGFPLSLRIQMLLSGLFSLLYVFTLLGNGAILGLIWLDSRLHTPMYFFLSHLAIIDISYASNNVPKMLTNLGLNKRKTISFVPCTMQTFLYMAFAHTECLILVMMSYDRYMAICHPLQYSVIMRWGVCTVLAVTSWACGSLLALVHVVLILRLPFCGPHEINHFFCEILSVLKLACADTWLNQVVIFAASVFILVGPLCLVLVSYSRILAAILRIQSGEGRRKAFSTCSSHLCMVGLFFGSAIVMYMAPKSRHPEEQQKVLSLFYSLFNPMLNPLIYSLRNAEVKGALKRVLWKQRSK

SEQ ID NO: 35631 - protein, 317 aa, Homo sapiens
MAIGNWTEISEFILMSFSSLPTEIQSLLFLTFLTIYLVTLKGNSLIILVTLADPMLHSPMYFFLRNLSFLEIGFNLVIVPKMLGTLLAQDTTISFLGCATQMYFFFFFGVAECFLLATMAYDRYVAICSPLHYPVIMNQRTRAKLAAASWFPGFPVATVQTTWLFSFPFCGTNKVNHFFCDSPPVLKLVCADTALFEIYAIVGTILVVMIPCLLILCSYTRIAAAILKIPSAKGKHKAFSTCSSHLLVVSLFYISSSLTYFWPKSNNSPESKKLLSLSYTVVTPMLNPIIYSLRNSEVKNALSRTFHKVLALRNCIP

SEQ ID NO: 35632 - protein, 312 aa, Homo sapiens
MEKWNHTSNDFILLGLLPPNQTGIFLLCLIILIFFLASVGNSAMIHLIHVDPRLHTPMYFLLSQLSLMDLMYISTTVPKMAYNFLSGQKGISFLGCGVQSFFFLTMACSEGLLLTSMAYDRYLAICHSLYYPIRMSKMMCVKMIGGSWTLGSINSLAHTVFALHIPYCRSRAIDHFFCDVPAMLLLACTDTWVYEYMVFVSTSLFLLFPFIGITSSCGRVLFAVYHMHSKEGRKKAFTTISTHLTVVIFYYAPFVYTYLRPRNLRSPAEDKILAVFYTILTPMLNPIIYSLRNKEVLGAMRRVFGIFSFLKE

SEQ ID NO: 35633 - protein, 309 aa, Homo sapiens
MKNKTVLTEFILLGLTDVPELQVAVFTFLFLAYLLSILGNLTILILTLLDSHLQTPMYFFLRNFSFLEISFTNIFIPRVLISITTGNKSISFAGCFTQYFFAMFLGATEFYLLAAMSYDRYVAICKPLHYTTIMSSRICIQLIFCSWLGGLMAIIPTITLMSQQDFCASNRLNHYFCDYEPLLELSCSDTSLIEKVVFLVASVTLVVTLVLVILSYAFIIKTILKLPSAQQRTKAFSTCSSHMIVISLSYGSCMFMYINPSAKEGDTFNKGVALLITSVAPLLNPFIYTLRNQQVKQPFKDMVKKLLNL

SEQ ID NO: 35634 - protein, 309 aa, Homo sapiens
MDISEGNKTLVTEFVLTGLTDRPWLHVLFFVVFLVVYLITMVGNLGLIVLIWNDPHLHMPMYLFLGGLAFSDACTSTSITPRMLVNFLDKTAMISLAECITQFYFFASSATTECFLLVMMAYDRYVAICNPLLYPVMMSNKLSAQLLSISYVIGFLHPLVHVSLLLRLTFCRFNIIHYFYCEILQLFKISCNGPSINALMIFIFGAFIQIPTLMTIIISYTRVLFDILKKKSEKGRSKAFSTCGAHLLSVSLYYGTLIFMYVRPASGLAEDQDKVYSLFYTIIIPLLNPFIYSLRNKKVMHALRRVIRK

SEQ ID NO: 35635 - protein, 325 aa, Homo sapiens
MFLPNDTQFHPSSFLLLGIPGLETLHIWIGFPFCAVYMIALIGNFTILLVIKTDSSLHQPMFYFLAMLATTDVGLSTATIPKMLGIFWINLRGIIFEACLTQMFFIHNFTLMESAVLVAMAYDSYVAICNPLQYSAILTNKVVSVIGLGVFVRALIFVIPSILLILRLPFCGNHVIPHTYCEHMGLAHLSCASIKINIIYGLCAICNLVFDITVIALSYVHILCAVFRLPTHEARLKSLSTCGSHVCVILAFYTPALFSFMTHRFGRNVPRYIHILLANLYVVVPPMLNPVIYGVRTKQIYKCVKKILLQEQGMEKEEYLIHTRF

SEQ ID NO: 35636 - protein, 311 aa, Homo sapiens
MEKINNVTEFIFWGLSQSPEIEKVCFVVFSFFYIIILLGNLLIMLTVCLSNLFKSPMYFFLSFLSFVDICYSSVTAPKMIVDLLAKDKTISYVGCMLQLFGVHFFGCTEIFILTVMAYDRYVAICKPLHYMTIMNRETCNKMLLGTWVGGFLHSIIQVALVVQLPFCGPNEIDHYFCDVHPVLKLACTETYIVGVVVTANSGTIALGSFVILLISYSIILVSLRKQSAEGRRKALSTCGSHIAMVVIFFGPCTFMYMRPDTTFSEDKMVAVFYTIITPMLNPLIYTLRNAEVKNAMKKLWGRNVFLEAKGK

SEQ ID NO: 35637 - protein, 321 aa, Homo sapiens
MSLQKLMEPEAGTNRTAVAEFILLGLVQTEEMQPVVFVLLLFAYLVTTGGNLSILAAVLVEPKLHAPMYFFLGNLSVLDVGCITVTVPAMLGRLLSHKSTISYDACLSQLFFFHLLAGMDCFLLTAMAYDRLLAICQPLTYSTRMSQTVQRMLVAASLACAFTNALTHTVAMSTLNFCGPNEVNHFYCDLPQLFQLSCSSTQLNELLLFAVGFIMAGTPLVLIITAYSHVAAAVLRIRSVEGRKKAFSTCGSHLTVVCLFFGRGIFNYMRLGSEEASDKDKGVGVFNTVINPMLNPLIYSLRNPDVQGALWQIFLGRRSLT

SEQ ID NO: 35638 - protein, 316 aa, Homo sapiens
MELWNFTLGSGFILVGILNDSGSPELLCATITILYLLALISNGLLLLAITMEARLHMPMYLLLGQLSLMDLLFTSVVTPKALADFLRRENTISFGGCALQMFLALTMGGAEDLLLAFMAYDRYVAICHPLTYMTLMSSRACWLMVATSWILASLSALIYTVYTMHYPFCRAQEIRHLLCEIPHLLKVACADTSRYELMVYVMGVTFLIPSLAAILASYTQILLTVLHMPSNEGRKKALVTCSSHLTVVGMFYGAATFMYVLPSSFHSTRQDNIISVFYTIVTPALNPLIYSLRNKEVMRALRRVLGKYMLPAHSTL

SEQ ID NO: 35639 - protein, 311 aa, Homo sapiens
MVWENQTFNSIFILLGIFNHSPTHTFLFSLVLGIFSLALMENISMVLLIYIEKQLHTPMYFLLSQLSLMDLMLICTTLPKMIFSYLSGKKSISLAGCGTQIFFYVSLLGAECFLLAVMAYDRYVAICHPLQYTILMNPKLCVFMTVASWTLGSLDGIIVLAAVLSFSYCSSLEIHHFFCDVAALLPLSCTETSAFERLLVICCVVMLIFPVSVIILSYSHVLRAVIHMGSGESRRKAFTTCSSHLSVVGLYYGAAMFMYMRPASKHTPDQDKMVSAFYTILTPMLNPLIYSLRNKEVFRALQKVLKKRKLI

SEQ ID NO: 35640 - protein, 310 aa, Homo sapiens
MQQNNSVPEFILLGLTQDPLRQKIVFVIFLIFYMGTVVGNMLIIVTIKSSRTLGSPMYFFLFYLSFADSCFSTSTAPRLIVDALSEKKIITYNECMTQVFALHLFGCMEIFVLILMAVDRYVAICKPLRYPTIMSQQVCIILIVLAWIGSLIHSTAQIILALRLPFCGPYLIDHYCCDLQPLLKLACMDTYMINLLLVSNSGAICSSSFMILIISYIVILHSLRNHSAKGKKKALSACTSHIIVVILFFGPCIFIYTRPPTTFPMDKMVAVFYTIGTPFLNPLIYTLRNAEVKNAMRKLWHGKIISENKG

SEQ ID NO: 35641 - protein, 321 aa, Homo sapiens
MNKENHSLIAEFILTGFTYHPKLKTVLFVVFFAIYLITMVGNIGLVALIYIEQRLHTPMYIFLGNLVLMDSCCSSAITPKMLENFFSEDKRITLYECMAQFYFLCLAETTDCFLLAAMAYDCYVAICNPLQYHTMMSKTLCIQMTAGAYLAGNLHPMIEVEFLLRLTFCGSHQINHFFCDVLPLYRLSCINPYINELVLFILAGSIQIFTIVLVSYFYILFTIFTMKSKEGRGKALSTCASHFLSVSIFCDSLLFMYARPGAVNEGDKDIPVAIFYTLVIPLLNPFIYSLRNKEVINIMKKIMKKRKFCHILKQMSSPLAT

SEQ ID NO: 35642 - protein, 325 aa, Homo sapiens
MLSHADLLDARLGMKDAAELLGHREAVKCRLGVGGSDPGGHPGDLAPNSDPVEGATLLPGEDITTVGSTPASLAVSAKDPDKQPGPQGGPNPSQAGQQQGQQKQKRHRTRFTPAQLNELERSFAKTHYPDIFMREELALRIGLTESRVQVWFQNRRAKWKKRKKTTNVFRAPGTLLPTPGLPQFPSAAAAAAAAMGDSLCSFHANDTRWAAAAMPGVSQLPLPPALGRQQAMAQSLSQCSLAAGPPPNSMGLSNSLAGSNGAGLQSHLYQPAFPGMVPASLPGPSNVSGSPQLCSSPDSSDVWRGTSIASLRRKALEHTVSMSFT

SEQ ID NO: 35643 - protein, 315 aa, Homo sapiens
MRQNNNITEFVLLGFSQYPDVQNALFVMFLLIYIVTMVGNLLIVVSIIASPFLGSPVYFFLACLSFIDAVYSTTISPVLIVDLLCDKKTISFPACMGQLFIEHLFGDTDVFLLVVMAYDRYVATCKPLRYLTIMNRQVCILLLVVAVTGGFLHSVFQILVVYSLPFCGPNVIYHFFCNIYPLLDLECTDTYFVGLAVVFNGGAICMVIFTLLLISYGVILNSLKTYSPEGRHKAPFICSSHFIMVILFFVPCIFLYVRPVSNFPIDKFLTVFYSVITPKLNPFIYMLRNSEMRNAIENLLGYQSGKTGFRCSKLN

SEQ ID NO: 35644 - protein, 534 aa, Homo sapiens
MKFTLGLGSRAWRVSWEGAAAAAAGPGAGGSALRCRAQRVSSPRLGRRGSRLSGALPLCLSRGGGGAQALPDCAGPSPGHPGHPGARQLAGPLAMEQTYGEVNQLGGVFVNGRPLPNAIRLRIVELAQLGIRPCDISRQLRVSHGCVSKILARYNETGSILPGAIGGSKPRVTTPNVVKHIRDYKQGDPGIFAWEIRDRLLADGVCDKYNVPSVSSISRILRNKIGSLAQPGPYEASKQPPSQPTLPYNHIYQYPYPSPVSPTGAKMGSHPGVPGTAGHVSIPRSWPSAHSVSNILGIRTFMEQTGALAGSEGTAYSPKMEDWAGVNRTAFPATPAVNGLEKPALEADIKYTQSASTLSAVGGFLPACAYPASNQHGVYSAPGGGYLAPGPPWPPAQGPPLAPPGAGVAVHGGELAAAMTFKHPSREGSLPAPAARPRTPSVAYTDCPSRPRPPRGSSPRTRARRERQADPGAQVCAAAPAIGTGRIGGLAEEEASAGPRGARPASPQAQPCLWPDPPHFLYWSGFLGFSELGF

SEQ ID NO: 35645 - protein, 433 aa, Homo sapiens
MRRAPLRGSSAPLPTPSQTQAVCPWTPSCLGTHRSPLEVRLGAVPRSAWGPLANPPGVFSPSGSLLSGASAEQTYGEVNQLGGVFVNGRPLPNAIRLRIVELAQLGIRPCDISRQLRVSHGCVSKILARYNETGSILPGAIGGSKPRVTTPNVVKHIRDYKQGDPGIFAWEIRDRLLADGVCDKYNVPSVSSISRILRNKIGSLAQPGPYEASKQPPSQPTLPYNHIYQYPYPSPVSPTGAKMGSHPGVPGTAGHVSIPRSWPSAHSVSNILGIRTFMEQTGALAGSEGTAYSPKMEDWAGVNRTAFPATPAVNGLEKPALEADIKYTQSASTLSAVGGFLPACAYPASNQHGVYSAPGGGYLAPGPPWPPAQGPPLAPPGAGVAVHGGELAAAMTFKHPSREVADRKPPSSGSKAPDALSSLHGLPIPASTS

SEQ ID NO: 35646 - protein, 510 aa, Homo sapiens
MRRAPLRGSSAPLPTPSQTQAVCPWTPSCLGTHRSPLEVRLGAVPRSAWGPLANPPGVFSPSGSLLSGASAEQTYGEVNQLGGVFVNGRPLPNAIRLRIVELAQLGIRPCDISRQLRVSHGCVSKILARYNETGSILPGAIGGSKPRVTTPNVVKHIRDYKQGDPGIFAWEIRDRLLADGVCDKYNVPSVSSISRILRNKIGSLAQPGPYEASKQPPSQPTLPYNHIYQYPYPSPVSPTGAKMGSHPGVPGTAGHVSIPRSWPSAHSVSNILGIRTFMEQTGALAGSEGTAYSPKMEDWAGVNRTAFPATPAVNGLEKPALEADIKYTQSASTLSAVGGFLPACAYPASNQHGVYSAPGGGYLAPGPPWPPAQGPPLAPPGAGVAVHGGELAAAMTFKHPSREGSLPAPAARPRTPSVAYTDCPSRPRPPRGSSPRTRARRERQADPGAQVCAAAPAIGTGRIGGLAEEEASAGPRGARPASPQAQPCLWPDPPHFLYWSGFLGFSELGF

SEQ ID NO: 35647 - protein, 544 aa, Homo sapiens
MSRCAQAAEVAATVPGAGVGNVGLRPPMVPRQASFFPPPVPNPFVQQTQIGSARRVQIVLLGIILLPIRVLLVALILLLAWPFAAISTVCCPEKLTHPITGWRRKITQTALKFLGRAMFFSMGFIVAVKGKIASPLEAPVFVAAPHSTFFDGIACVVAGLPSMVSRNENAQVPLIGRLLRAVQPVLVSRVDPDSRKNTINEIIKRTTSGGEWPQILVFPEGTCTNRSCLITFKPGAFIPGVPVQPVLLRYPNKLDTVTWTWQGYTFIQLCMLTFCQLFTKVEVEFMPVQVPNDEEKNDPVLFANKVRNLMAEALGIPVTDHTYEDCRLMISAGQLTLPMEAGLVEFTKISRKLKLDWDGVRKHLDEYASIASSSKGGRIGIEEFAKYLKLPVSDVLRQLFALFDRNHDGSIDFREYVIGLAVLCNPSNTEEIIQVAFKLFDVDEDGYITEEEFSTILQASLGVPDLDVSGLFKEIAQGDSISYEEFKSFALKHPEYAKIFTTYLDLQTCHVFSLPKEVQTTPSTASNKVSPEKHEESTSDKKDD

SEQ ID NO: 35648 - protein, 274 aa, Homo sapiens
MLTFCQLFTKVEVEFMPVQVPNDEEKNDPVLFANKVRNLMAEALGIPVTDHTYEDCRLMISAGQLTLPMEAGLVEFTKISRKLKLDWDGVRKHLDEYASIASSSKGGRIGIEEFAKYLKLPVSDVLRQLFALFDRNHDGSIDFREYVIGLAVLCNPSNTEEIIQVAFKLFDVDEDGYITEEEFSTILQASLGVPDLDVSGLFKEIAQGDSISYEEFKSFALKHPEYAKIFTTYLDLQTCHVFSLPKEVQTTPSTASNKVSPEKHEESTSDKKDD

SEQ ID NO: 35649 - protein, 324 aa, Homo sapiens
MPLFNSLCWFPTIHVTPPSFILNGIPGLERVHVWISLPLCTMYIIFLVGNLGLVYLIYYEESLHHPMYFFFGHALSLIDLLTCTTTLPNALCIFWFSLKEINFNACLAQMFFVHGFTGVESGVLMLMALDRYVAICYPLRYATTLTNPIIAKAELATFLRGVLLMIPFPFLVKRLPFCQSNIISHTYCDHMSVVKLSCASIKVNVIYGLMVALLIGVFDICCISLSYTLILKAAISLSSSDARQKAFSTCTAHISAIIITYVPAFFTFFAHRFGGHTIPPSLHIIVANLYLLLPPTLNPIVYGVKTKQIRKSVIKFFQGDKGAG

SEQ ID NO: 35650 - protein, 311 aa, Homo sapiens
MRRNCTLVTEFILLGLTSRRELQILLFTLFLAIYMVTVAGNLGMIVLIQANAWLHMPMYFFLSHLSFVDLCFSSNVTPKMLEIFLSEKKSISYPACLVQCYLFIALVHVEIYILAVMAFDRYMAICNPLLYGSRMSKSVCSFLITVPYVYGALTGLMETMWTYNLAFCGPNEINHFYCADPPLIKLACSDTYNKELSMFIVAGWNLSFSLFIICISYLYIFPAILKIRSTEGRQKAFSTCGSHLTAVTIFYATLFFMYLRPPSKESVEQGKMVAVFYTTVIPMLNLIIYSLRNKNVKEALIKELSMKIYFS

SEQ ID NO: 35651 - protein, 321 aa, Homo sapiens
MERKNQTAITEFIILGFSNLNELQFLLFTIFFLTYFCTLGGNILIILTTVTDPHLHTPMYYFLGNLAFIDICYTTSNVPQMMVHLLSKKKSISYVGCVVQLFAFVFFVGSECLLLAAMAYDRYIAICNPLRYSVILSKVLCNQLAASCWAAGFLNSVVHTVLTFCLPFCGNNQINYFFCDIPPLLILSCGNTSVNELALLSTGVFIGWTPFLCIVLSYICIISTILRIQSSEGRRKAFSTCASHLAIVFLFYGSAIFTYVRPISTYSLKKDRLVSVLYSVVTPMLNPIIYTLRNKDIKEAVKTIGSKWQPPISSLDSKLTY

SEQ ID NO: 35652 - protein, 309 aa, Homo sapiens
MANRNNVTEFILLGLTENPKMQKIIFVVFSVIYINAMIGNVLIVVTITASPSLRSPMYFFLAYLSFIDACYSSVNTPKLITDSLYENKTILFNGCMTQVFGEHFFRGVEVILLTVMAYDHYVAICKPLHYTTVMKQHVCSLLVGVSWVGGFLHATIQILFICQLPFCGPNVIDHFMCDLYTLINLACTNTHTLGLFIAANSGFICLLNCLLLLVSCVVILYSLKTHSLEARHEALSTCVSHITVVILSFIPCIFVYMRPPATLPIDKAVAVFYTMITSMLNPLIYTLRNAQMKNAIRKLCSRKAISSVK

SEQ ID NO: 35653 - protein, 1205 aa, Homo sapiens
MKVTVCFGRTGIVVPCKEGQLRVGELTQQALQRYLKTREKGPGYWVKIHHLEYTDGGILDPDDVLADVVEDKDKLIAVFEEQEPLHKIESPSGNPADRQSPDAFETEVAAQLAAFKPIGGEIEVTPSALKLGTPLLVRRSSDPVPGPPADTQPSASHPGGQSLKLVVPDSTQNLEDREVLNGVQTELLTSPRTKDTLSDMTRTVEISGEGGPLGIHVVPFFSSLSGRILGLFIRGIEDNSRSKREGLFHENECIVKINNVDLVDKTFAQAQDVFRQAMKSPSVLLHVLPPQNREQYEKSVIGSLNIFGNNDGVLKTKVPPPVHGKSGLKTANLTGTDSPETDASASLQQNKSPRVPRLGGKPSSPSLSPLMGFGSNKNAKKIKIDLKKGPEGLGFTVVTRDSSIHGPGPIFVKNILPKGAAIKDGRLQSGDRILEVNGRDVTGRTQEELVAMLRSTKQGETASLVIARQEGHFLPRELKGEPDCCALSLETSEQLTFEIPLNDSGSAGLGVSLKGNKSRETGTDLGIFIKSIIHGGAAFKDGRLRMNDQLIAVNGESLLGKSNHEAMETLRRSMSMEGNIRGMIQLVILRRPERPMEDPAECGAFSKPCFENCQNAVTTSRRNDNSILHPLGTCSPQDKQKGLLLPNDGWAESEVPPSPTPHSALGLGLEDYSHSSGVDSAVYFPDQHINFRSVTPARQPESINLKASKSMDLVPDESKVHSLAGQKSESPSKDFGPTLGLKKSSSLESLQTAVAEVRKNDLPFHRPRPHMVRGRGCNESFRAAIDKSYDGPEEIEADGLSDKSSHSGQGALNCESAPQGNSELEDMENKARKVKKTKEKEKKKEKGKLKVKEKKRKEENEDPERKIKKKGFGAMLRFGKKKEDKGGKAEQKGTLKHGGLREEELEKMKEERERIGAKHQELREKQARGLLDYATGAIGSVYDMDDDEMDPNYARVNHFREPCTSANVFRSPSPPRAGPFGYPRDGHPLSPERDHLEGLYAKVNKPYHPLVPADSGRPTGGSTDRIQKLRKEYYQARREGFPLYEDDEGRARPSEYDLLWVPGRGPDGNAHNLRFEGMERQYASLPRGGPADPVDYLPAAPRGLYKERELPYYPGAHPMHPPKGSYPRPTELRVADLRYPQHYPPPPAPQHKGPFRQDVPPSPPQHQRMPAYQETGRPGPRGGSPDQYPYRTQDSRQKNPMTAAV

SEQ ID NO: 35654 - protein, 1143 aa, Homo sapiens
MKVTVCFGRTGIVVPCKEGQLRVGELTQQALQRYLKTREKGPGYWVKIHHLEYTDGGILDPDDVLADVVEDKDKLIAVFEEQEPLHKIESPSGNPADRQSPDAFETEVAAQLAAFKPIGGEIEVTPSALKLGTPLLVRRSSDPVPGPPADTQPSASHPGGQSLKLVVPDSTQNLEDREVLNGVQTELLTSPRTKDTLSDMTRTVEISGEGGPLGIHVVPFFSSLSGRILGLFIRGIEDNSRSKREGLFHENECIVKINNVDLVDKTFAQAQDVFRQAMKSPSVLLHVLPPQNREQYEKSVIGSLNIFGNNDGVLKTKVPPPVHGKSGLKTANLTGTDSPETDASASLQQNKSPRVPRLGGKPSSPSLSPLMGFGSNKNAKKIKIDLKKGPEGLGFTVVTRDSSIHGPGPIFVKNILPKGAAIKDGRLQSGDRILEVNGRDVTGRTQEELVAMLRSTKQGETASLVIARQEGHFLPRELDGRLRMNDQLIAVNGESLLGKSNHEAMETLRRSMSMEGNIRGMIQLVILRRPERPMEDPAECGAFSKPCFENCQNAVTTSRRNDNSILHPLGTCSPQDKQKGLLLPNDGWAESEVPPSPTPHSALGLGLEDYSHSSGVDSAVYFPDQHINFRSVTPARQPESINLKASKSMDLVPDESKVHSLAGQKSESPSKDFGPTLGLKKSSSLESLQTAVAEVRKNDLPFHRPRPHMVRGRGCNESFRAAIDKSYDGPEEIEADGLSDKSSHSGQGALNCESAPQGNSELEDMENKARKVKKTKEKEKKKEKGKLKVKEKKRKEENEDPERKIKKKGFGAMLRFGKKKEDKGGKAEQKGTLKHGGLREEELEKMKEERERIGAKHQELREKQARGLLDYATGAIGSVYDMDDDEMDPNYARVNHFREPCTSANVFRSPSPPRAGPFGYPRDGHPLSPERDHLEGLYAKVNKPYHPLVPADSGRPTGGSTDRIQKLRKEYYQARREGFPLYEDDEGRARPSEYDLLWVPGRGPDGNAHNLRFEGMERQYASLPRGGPADPVDYLPAAPRGLYKERELPYYPGAHPMHPPKGSYPRPTELRVADLRYPQHYPPPPAPQHKGPFRQDVPPSPPQHQRMPAYQETGRPGPRGGSPDQYPYRTQDSRQKNPMTAAV

SEQ ID NO: 35655 - protein, 1136 aa, Homo sapiens
MKVTVCFGRTGIVVPCKEGQLRVGELTQQALQRYLKTREKGPGYWVKIHHLEYTDGGILDPDDVLADVVEDKDKLIAVFEEQEPLHKIESPSGNPADRQSPDAFETEVAAQLAAFKPIGGEIEVTPSALKLGTPLLVRRSSDPVPGPPADTQPSASHPGGQSLKLVVPDSTQNLEDREVLNGVQTELLTSPRTKDTLSDMTRTVEISGEGGPLGIHVVPFFSSLSGRILGLFIRGIEDNSRSKREGLFHENECIVKINNVDLVDKTFAQAQDVFRQAMKSPSVLLHVLPPQNREQYEKSVIGSLNIFGNNDGVLKTKVPPPVHGKSGLKTANLTGTDSPETDASASLQQNKSPRVPRLGGKPSSPSLSPLMGFGSNKNAKKIKIDLKKGPEGLGFTVVTRDSSIHGPGPIFVKNILPKGAAIKDGRLQSGDRILEVNGRDVTGRTQEELVAMLRSTKQGETASLVIARQEGHFLPRELKGEPDCCALSLETSEQLTFEIPLNDSGSAGLGVSLKGNKSRETGTDLGIFIKSIIHGGAAFKDGRLRMNDQLIAVNGESLLGKSNHEAMETLRRSMSMEGNIRGMIQLVILRRPERPMEDPAECGAFSKPCFENCQNAVTTSRRNDNSILHPLGTCSPQDKQKGLLLPNDGWAESEVPPSPTPHSALGLGLEDYSHSSGVDSAVYFPDQHINFRSVTPARQPESINLKASKSMDLVPDESKVHSLAGQKSEGLSDKSSHSGQGALNCESAPQGNSELEDMENKARKVKKTKEKEKKKEKGKLKVKEKKRKEENEDPERKIKKKGFGAMLRFGKKKEDKGGKAEQKGTLKHGGLREEELEKMKEERERIGAKHQELREKQARGLLDYATGAIGSVYDMDDDEMDPNYARVNHFREPCTSANVFRSPSPPRAGPFGYPRDGHPLSPERDHLEGLYAKVNKPYHPLVPADSGRPTGGSTDRIQKLRKEYYQARREGFPLYEDDEGRARPSEYDLLWVPGRGPDGNAHNLRFEGMERQYASLPRGGPADPVDYLPAAPRGLYKERELPYYPGAHPMHPPKGSYPRPTELRVADLRYPQHYPPPPAPQHKGPFRQDVPPSPPQHQRMPAYQETGRPGPRGGSPDQYPYRTQDSRQKNPMTAAV

SEQ ID NO: 35656 - protein, 79 aa, Homo sapiens
MKVTVCFGRTGIVVPCKEGQLRVGELTQQALQRYLKTREKVSAARRSGARLQPRHLPGSWLLGEDSSLRIYRWRNPGSR

SEQ ID NO: 35657 - protein, 1104 aa, Homo sapiens
MKVTVCFGRTGIVVPCKEGQLRVGELTQQALQRYLKTREKGPGYWVKIHHLEYTDGGILDPDDVLADVVEDKDKLIAVFEEQEPLHKIESPSGNPADRQSPDAFETEVAAQLAAFKPIGGEIEVTPSALKLGTPLLVRRSSDPVPGPPADTQPSASHPGGQSLKLVVPDSTQNLEDREVLNGVQTELLTSPRTKDTLSDMTRTVEISGEGGPLGIHVVPFFSSLSGRILGLFIRGIEDNSRSKREGLFHENECIVKINNVDLVDKTFAQAQDVFRQAMKSPSVLLHVLPPQNREQYEKSVIGSLNIFGNNDGVLKTKVPPPVHGKSGLKTANLTGTDSPETDASASLQQNKSPRVPRLGGKPSSPSLSPLMGFGSNKNAKKIKIDLKKGPEGLGFTVVTRDSSIHGPGPIFVKNILPKGAAIKDGRLQSGDRILEVNGRDVTGRTQEELVAMLRSTKQGETASLVIARQEGHFLPRELKGEPDCCALSLETSEQLTFEIPLNDSGSAGLGVSLKGNKSRETGTDLGIFIKSIIHGGAAFKDGRLRMNDQLIAVNGESLLGKSNHEAMETLRRSMSMEGNIRGMIQLVILRRPERPMEDPAECGAFSKPCFENCQNAVTTSRRNDNSILHPLGTCSPQDKQKGLLLPNDGWAESEVPPSPTPHSALGLGLEDYSHSSGVDSAVYFPDQHINFRSVTPARQPESINLKASKSMDLVPDESKVHSLAGQKSESPSKDFGPTLGLKKSSSLESLQTAVAEVRKNDLPFHRPRPHMVRGRGCNESFRAAIDKSYDGPEEIEADGLSDKSSHSGQGALNCESAPQGNSELEDMENKARKVKKTKEKEKKKEKGKLKVKEKKRKEENEDPERKIKKKGFGAMLRFGKKKEDKGGKAEQKGTLKHGGLREEELEKMKEERESGRPTGGSTDRIQKLRKEYYQARREGFPLYEDDEGRARPSEYDLLWVPGRGPDGNAHNLRFEGMERQYASLPRGGPADPVDYLPAAPRGLYKERELPYYPGAHPMHPPKGSYPRPTELRVADLRYPQHYPPPPAPQHKGPFRQDVPPSPPQHQRMPAYQETGRPGPRGGSPDQYPYRTQDSRQKNPMTAAV

SEQ ID NO: 35658 - protein, 1136 aa, Homo sapiens
MKVTVCFGRTGIVVPCKEGQLRVGELTQQALQRYLKTREKGPGYWVKIHHLEYTDGGILDPDDVLADVVEDKDKLIAVFEEQEPLHKIESPSGNPADRQSPDAFETEVAAQLAAFKPIGGEIEVTPSALKLGTPLLVRRSSDPVPGPPADTQPSASHPGGQSLKLVVPDSTQNLEDREVLNGVQTELLTSPRTKDTLSDMTRTVEISGEGGPLGIHVVPFFSSLSGRILGLFIRGIEDNSRSKREGLFHENECIVKINNVDLVDKTFAQAQDVFRQAMKSPSVLLHVLPPQNREQYEKSVIGSLNIFGNNDGVLKTKVPPPVHGKSGLKTANLTGTDSPETDASASLQQNKSPRVPRLGGKPSSPSLSPLMGFGSNKNAKKIKIDLKKGPEGLGFTVVTRDSSIHGPGPIFVKNILPKGAAIKDGRLQSGDRILEVNGRDVTGRTQEELVAMLRSTKQGETASLVIARQEGHFLPRELKGEPDCCALSLETSEQLTFEIPLNDSGSAGLGVSLKGNKSRETGTDLGIFIKSIIHGGAAFKDGRLRMNDQLIAVNGESLLGKSNHEAMETLRRSMSMEGNIRGMIQLVILRRPERPMEDPAECGAFSKPCFENCQNAVTTSRRNDNSILHPLGTCSPQDKQKGLLLPNDGWAESEVPPSPTPHSALGLGLEDYSHSSGVDSAVYFPDQHINFRSVTPARQPESINLKASKSMDLVPDESKVHSLAGQKSDGLSDKSSHSGQGALNCESAPQGNSELEDMENKARKVKKTKEKEKKKEKGKLKVKEKKRKEENEDPERKIKKKGFGAMLRFGKKKEDKGGKAEQKGTLKHGGLREEELEKMKEERERIGAKHQELREKQARGLLDYATGAIGSVYDMDDDEMDPNYARVNHFREPCTSANVFRSPSPPRAGPFGYPRDGHPLSPERDHLEGLYAKVNKPYHPLVPADSGRPTGGSTDRIQKLRKEYYQARREGFPLYEDDEGRARPSEYDLLWVPGRGPDGNAHNLRFEGMERQYASLPRGGPADPVDYLPAAPRGLYKERELPYYPGAHPMHPPKGSYPRPTELRVADLRYPQHYPPPPAPQHKGPFRQDVPPSPPQHQRMPAYQETGRPGPRGGSPDQYPYRTQDSRQKNPMTAAV

SEQ ID NO: 35659 - protein, 136 aa, Homo sapiens
MMDQEEKTEEGSGPCAEAGSPDQEGFFNLLSHVQGDRMEGQRCSLQAGPGQTTKSQSDPTPEMDSLMDMLASTQGRRMDDQRVTVSSLPGFQPVGSKDGAQKRAGTLSPQPLLTPQDPTALGFRRNSSPQPPTQAP

SEQ ID NO: 35660 - protein, 120 aa, Homo sapiens
MAGSPDQEGFFNLLSHVQGDRMEGQRCSLQAGPGQTTKSQSDPTPEMDSLMDMLASTQGRRMDDQRVTVSSLPGFQPVGSKDGAQKRAGTLSPQPLLTPQDPTALGFRRNSSPQPPTQAP

SEQ ID NO: 35661 - protein, 350 aa, Homo sapiens
MIRQERSTSYQELSEELVQVVENSELADEQDKETVRVQGPGILPGLDSESASSSIRFSKACLKNVFSVLLIFIYLLLMAVAVFLVYRTITDFREKLKHPVMSVSYKEVDRYDAPGIALYPGQAQLLSCKHHYEVIPPLTSPGQPGDMNCTTQRINYTDPFSNQTVKSALIVQGPREVKKRELVFLQFRLNKSSEDFSAIDYLLFSSFQEFLQSPNRVGFMQACESAYSSWKFSGGFRTWVKMSLVKTKEEDGREAVEFRQETSVVNYIDQRPAAKKSAQLFFVVFEWKDPFIQKVQDIVTANPWNTIALLCGAFLALFKAAEFAKLSIKWMIKIRKRYLKRRGQATSHIS

SEQ ID NO: 35662 - protein, 411 aa, Homo sapiens
MIRQERSTSYQEAVRPALPSSKPCLLTSPAVLVKLLSSSASTSRPPNLGHLWQPSSSVPLHRAASLAKVRQFQLSEELVQVVENSELADEQDKETVRVQGPGILPGLDSESASSSIRFSKACLKNVFSVLLIFIYLLLMAVAVFLVYRTITDFREKLKHPVMSVSYKEVDRYDAPGIALYPGQAQLLSCKHHYEVIPPLTSPGQPGDMNCTTQRINYTDPFSNQTVKSALIVQGPREVKKRELVFLQFRLNKSSEDFSAIDYLLFSSFQEFLQSPNRVGFMQACESAYSSWKFSGGFRTWVKMSLVKTKEEDGREAVEFRQETSVVNYIDQRPAAKKSAQLFFVVFEWKDPFIQKVQDIVTANPWNTIALLCGAFLALFKAAEFAKLSIKWMIKIRKRYLKRRGQATSHIS

SEQ ID NO: 35663 - protein, 936 aa, Homo sapiens
MVYSRRGSLGSRLLLLWLLLAYWKAGSGQLHYSIPEEAKHGTFVGRIAQDLGLELAELVPRLFRVASKGRGDLLEVNLQNGILFVNSRIDREELCRRRAECSIHLEVIVDRPLQVFHVEVAVKDINDNPPRFSRQEQRLFILESRMPDSRFPLEGASDLDIGANAQLRYRLNPNEYFDLDVKTNEEETNFLELVLRKSLDREETQEHRLLVIATDGGKPELTGTVQLLINVLDANDNAPEFDKSIYNVRLLENAPSGTLVIKLNASDADEGINKEIVYFFSNLVLDDVKSKFIINSNTGEIKVNGELDYEDYNSYEINIDAMDKSTFPLSGHCKVVVKLLDVNDNTPEMAITTLFLPVKEDAPLSTVIALISVSDRDSGANGQVTCSLMPHVPFKLVSTFKNYYSLVLDSALDRESVSVYELVVTARDGGSPSLWATASVSVEVADVNDNAPAFAQPQYTVFVKENNPPGCHIFTVSARDADAQENALVSYSLVERRVGERPLSSYVSVHAESGKVYALQPLDHEEVELLQFQVSARDAGVPPLGSNVTLQVFVLDENDNAPALLVPRVGGTGGAVSELVPRSVGAGHVVAKVRAVDPDSGYNAWLSYELQPAPGSARIPFRVGLYTGEISTTRSLDETEAPRHRLLVLVKDHGEPPLTATATVLVSLVESGQAPKASSRASAGAVGPEAALVDVNVYLIIAICAVSSLLVLTLLLYTALRCSAQPTEAVCTRGKPTLLCSSAVGSWSYSQQRRQRVCSGEAPPKTDLMAFSPSLPQGPTSTDNPRQPNPDWRYSASLRAGMHSSVHLEEAGILRAGPGGPDQQWPTVSSATPEPEAGEVSPPVGAGVNSNSWTFKYGPGNPKQSGPGELPDKFIIPGSPAIISIRQEPTNSQIDKSDFITFGKKEETKKKKKKKKGNKTQEKKEKGNSTTDNSDQ

SEQ ID NO: 35664 - protein, 816 aa, Homo sapiens
MVYSRRGSLGSRLLLLWLLLAYWKAGSGQLHYSIPEEAKHGTFVGRIAQDLGLELAELVPRLFRVASKGRGDLLEVNLQNGILFVNSRIDREELCRRRAECSIHLEVIVDRPLQVFHVEVAVKDINDNPPRFSRQEQRLFILESRMPDSRFPLEGASDLDIGANAQLRYRLNPNEYFDLDVKTNEEETNFLELVLRKSLDREETQEHRLLVIATDGGKPELTGTVQLLINVLDANDNAPEFDKSIYNVRLLENAPSGTLVIKLNASDADEGINKEIVYFFSNLVLDDVKSKFIINSNTGEIKVNGELDYEDYNSYEINIDAMDKSTFPLSGHCKVVVKLLDVNDNTPEMAITTLFLPVKEDAPLSTVIALISVSDRDSGANGQVTCSLMPHVPFKLVSTFKNYYSLVLDSALDRESVSVYELVVTARDGGSPSLWATASVSVEVADVNDNAPAFAQPQYTVFVKENNPPGCHIFTVSARDADAQENALVSYSLVERRVGERPLSSYVSVHAESGKVYALQPLDHEEVELLQFQVSARDAGVPPLGSNVTLQVFVLDENDNAPALLVPRVGGTGGAVSELVPRSVGAGHVVAKVRAVDPDSGYNAWLSYELQPAPGSARIPFRVGLYTGEISTTRSLDETEAPRHRLLVLVKDHGEPPLTATATVLVSLVESGQAPKASSRASAGAVGPEAALVDVNVYLIIAICAVSSLLVLTLLLYTALRCSAQPTEAVCTRGKPTLLCSSAVGSWSYSQQRRQRVCSGEAPPKTDLMAFSPSLPQGPTSTDNVSFLILTSIFPSQFSNIKCHIHPLFLYLKIMS

SEQ ID NO: 35665 - protein, 890 aa, Homo sapiens
MVYSRRGSLGSRLLLLWLLLAYWKAGSGQLHYSIPEEAKHGTFVGRIAQDLGLELAELVPRLFRVASKGRGDLLEVNLQNGILFVNSRIDREELCRRRAECSIHLEVIVDRPLQVFHVEVAVKDINDNPPRFSRQEQRLFILESRMPDSRFPLEGASDLDIGANAQLRYRLNPNEYFDLDVKTNEEETNFLELVLRKSLDREETQEHRLLVIATDGGKPELTGTVQLLINVLDANDNAPEFDKSIYNVRLLENAPSGTLVIKLNASDADEGINKEIVYFFSNLVLDDVKSKFIINSNTGEIKVNGELDYEDYNSYEINIDAMDKSTFPLSGHCKVVVKLLDVNDNTPEMAITTLFLPVKEDAPLSTVIALISVSDRDSGANGQVTCSLMPHVPFKLVSTFKNYYSLVLDSALDRESVSVYELVVTARDGGSPSLWATASVSVEVADVNDNAPAFAQPQYTVFVKENNPPGCHIFTVSARDADAQENALVSYSLVERRVGERPLSSYVSVHAESGKVYALQPLDHEEVELLQFQVSARDAGVPPLGSNVTLQVFVLDENDNAPALLVPRVGGTGGAVSELVPRSVGAGHVVAKVRAVDPDSGYNAWLSYELQPAPGSARIPFRVGLYTGEISTTRSLDETEAPRHRLLVLVKDHGEPPLTATATVLVSLVESGQAPKASSRASAGAVGPEAALVDVNVYLIIAICAVSSLLVLTLLLYTALRCSAQPTEAVCTRGKPTLLCSSAVGSWSYSQQRRQRVCSGEAPPKTDLMAFSPSLPQGPTSTDNPRQPNPDWRYSASLRAGMHSSVHLEEAGILRAGPGGPDQQWPTVSSATPEPEAGEVSPPVGAGVNSNSWTFKYGPGNPKQSGPEPKKQTQVSFLLRRKGEASQPRQ

SEQ ID NO: 35666 - protein, 1040 aa, Homo sapiens
MIVLLLFALLWMVEGVFSQLHYTVQEEQEHGTFVGNIAEDLGLDITKLSARGFQTVPNSRTPYLDLNLETGVLYVNEKIDREQICKQSPSCVLHLEVFLENPLELFQVEIEVLDINDNPPSFPEPDLTVEISESATPGTRFPLESAFDPDVGTNSLRDYEITPNSYFSLDVQTQGDGNRFAELVLEKPLDREQQAVHRYVLTAVDGGGGGGVGEGGGGGGGAGLPPQQQRTGTALLTIRVLDSNDNVPAFDQPVYTVSLPENSPPGTLVIQLNATDPDEGQNGEVVYSFSSHISPRARELFGLSPRTGRLEVSGELDYEESPVYQVYVQAKDLGPNAVPAHCKVLVRVLDANDNAPEISFSTVKEAVSEGAAPGTVVALFSVTDRDSEENGQVQCELLGDVPFRLKSSFKNYYTIVTEAPLDREAGDSYTLTVVARDRGEPALSTSKSIQVQVSDVNDNAPRFSQPVYDVYVTENNVPGAYIYAVSATDRDEGANAQLAYSILECQIQGMSVFTYVSINSENGYLYALRSFDYEQLKDFSFQVEARDAGSPQALAGNATVNILIVDQNDNAPAIVAPLPGRNGTPAREVLPRSAEPGYLLTRVAAVDADDGENARLTYSIVRGNEMNLFRMDWRTGELRTARRVPAKRDPQRPYELVIEVRDHGQPPLSSTATLVVQLVDGAVEPQGGGGSGGGGSGEHQRPSRSGGGETSLDLTLILIIALGSVSFIFLLAMIVLAVRCQKEKKLNIYTCLASDCCLCCCCCGGGGSTCCGRQARARKKKLSKSDIMLVQSSNVPSNPAQVPIEESGGFGSHHHNQNYCYQVCLTPESAKTDLMFLKPCSPSRSTDTEHNPCGAIVTGYTDQQPDIISNGSILSNETKHQRAELSYLVDRPRRVNSSAFQEADIVSSKDSGHGDSEQGDSDHDATNRAQSAGMDLFSNCTEECKALGHSDRCWMPSFVPSDGRQAADYRSNLHVPGMDSVPDTEVFETPEAQPGAERSFSTFGKEKALHSTLERKELDGLLTNTRAPYKPPYLTRKRIC

SEQ ID NO: 35667 - protein, 896 aa, Homo sapiens
MIVLLLFALLWMVEGVFSQLHYTVQEEQEHGTFVGNIAEDLGLDITKLSARGFQTVPNSRTPYLDLNLETGVLYVNEKIDREQICKQSPSCVLHLEVFLENPLELFQVEIEVLDINDNPPSFPEPDLTVEISESATPGTRFPLESAFDPDVGTNSLRDYEITPNSYFSLDVQTQGDGNRFAELVLEKPLDREQQAVHRYVLTAVDGGGGGGVGEGGGGGGGAGLPPQQQRTGTALLTIRVLDSNDNVPAFDQPVYTVSLPENSPPGTLVIQLNATDPDEGQNGEVVYSFSSHISPRARELFGLSPRTGRLEVSGELDYEESPVYQVYVQAKDLGPNAVPAHCKVLVRVLDANDNAPEISFSTVKEAVSEGAAPGTVVALFSVTDRDSEENGQVQCELLGDVPFRLKSSFKNYYTIVTEAPLDREAGDSYTLTVVARDRGEPALSTSKSIQVQVSDVNDNAPRFSQPVYDVYVTENNVPGAYIYAVSATDRDEGANAQLAYSILECQIQGMSVFTYVSINSENGYLYALRSFDYEQLKDFSFQVEARDAGSPQALAGNATVNILIVDQNDNAPAIVAPLPGRNGTPAREVLPRSAEPGYLLTRVAAVDADDGENARLTYSIVRGNEMNLFRMDWRTGELRTARRVPAKRDPQRPYELVIEVRDHGQPPLSSTATLVVQLVDGAVEPQGGGGSGGGGSGEHQRPSRSGGGETSLDLTLILIIALGSVSFIFLLAMIVLAVRCQKEKKLNIYTCLASDCCLCCCCCGGGGSTCCGRQARARKKKLSKSDIMLVQSSNVPSNPAQVPIEESGGFGSHHHNQNYCYQVCLTPESAKTDLMFLKPCSPSRSTDTEHNPCGAIVTGYTDQQPDIISNGSILSNEVRLKRKDHHLSSPPSESLL

SEQ ID NO: 35668 - protein, 338 aa, Homo sapiens
MEQLRAAARLQIVLGHLGRPSAGAVVAHPTSGTISSASFHPQQFQYTLDNNVLTLEQRKFYEENGFLVIKNLVPDADIQRFRNEFEKICRKEVKPLGLTVMRDVTISKSEYAPSEKMITKVQDFQEDKELFRYCTLPEILKYVECFTGPNIMAMHTMLINKPPDSGKKTSRHPLHQDLHYFPFRPSDLIVCAWTAMEHISRNNGCLVVLPGTHKGSLKPHDYPKWEGGVNKMFHGIQDYEENKARVHLVMEKGDTVFFHPLLIHGSGQNKTQGFRKAISCHFASADCHYIDVKGTSQENIEKEVVGIAHKFFGAENSVNLKDIWMFRARLVKGERTNL

SEQ ID NO: 35669 - protein, 238 aa, Homo sapiens
MRDVTISKSEYAPSEKMITKVQDFQEDKELFRYCTLPEILKYVECFTGPNIMAMHTMLINKPPDSGKKTSRHPLHQDLHYFPFRPSDLIVCAWTAMEHISRNNGCLVVLPGTHKGSLKPHDYPKWEGGVNKMFHGIQDYEENKARVHLVMEKGDTVFFHPLLIHGSGQNKTQGFRKAISCHFASADCHYIDVKGTSQENIEKEVVGIAHKFFGAENSVNLKDIWMFRARLVKGERTNL

SEQ ID NO: 35670 - protein, 1860 aa, Homo sapiens
MGWGSRCCCPGRLDLLCVLALLGGCLLPVCRTRVYTNHWAVKIAGGFPEANRIASKYGFINIGQIGALKDYYHFYHSRTIKRSVISSRGTHSFISMEPKVEWIQQQVVKKRTKRDYDFSRAQSTYFNDPKWPSMWYMHCSDNTHPCQSDMNIEGAWKRGYTGKNIVVTILDDGIERTHPDLMQNYDALASCDVNGNDLDPMPRYDASNENKHGTRCAGEVAAAANNSHCTVGIAFNAKIGGVRMLDGDVTDMVEAKSVSFNPQHVHIYSASWGPDDDGKTVDGPAPLTRQAFENGVRMGRRGLGSVFVWASGNGGRSKDHCSCDGYTNSIYTISISSTAESGKKPWYLEECSSTLATTYSSGESYDKKIITTDLRQRCTDNHTGTSASAPMAAGIIALALEANPFLTWRDVQHVIVRTSRAGHLNANDWKTNAAGFKVSHLYGFGLMDAEAMVMEAEKWTTVPRQHVCVESTDRQIKTIRPNSAVRSIYKASGCSDNPNRHVNYLEHVVVRITITHPRRGDLAIYLTSPSGTRSQLLANRLFDHSMEGFKNWEFMTIHCWGERAAGDWVLEVYDTPSQLRNFKTPGKLKEWSLVLYGTSVQPYSPTNEFPKVERFRYSRVEDPTDDYGTEDYAGPCDPECSEVGCDGPGPDHCNDCLHYYYKLKNNTRICVSSCPPGHYHADKKRCRKCAPNCESCFGSHGDQCMSCKYGYFLNEETNSCVTHCPDGSYQDTKKNLCRKCSENCKTCTEFHNCTECRDGLSLQGSRCSVSCEDGRYFNGQDCQPCHRFCATCAGAGADGCINCTEGYFMEDGRCVQSCSISYYFDHSSENGYKSCKKCDISCLTCNGPGFKNCTSCPSGYLLDLGMCQMGAICKDGEYVDEHGHCQTCEASCAKCQGPTQEDCTTCPMTRIFDDGRCVSNCPSWKFEFENQCHPCHHTCQRCQGSGPTHCTSCGADNYGREHFLYQGECGDSCPEGHYATEGNTCLPCPDNCELCHSVHVCTRCMKGYFIAPTNHTCQKLECGQGEVQDPDYEECVPCEEGCLGCSLDDPGTCTSCAMGYYRFDHHCYKTCPEKTYSEEVECKACDSNCGSCDQNGCYWCEEGFFLLGGSCVRKCGPGFYGDQEMGECESCHRACETCTGPGHDECSSCQEGLQLLRGMCVHATKTQEEGKFWNDILRKLQPCHSSCKTCNGSATLCTSCPKGAYLLAQACVSSCPQGTWPSVRSGSCENCTEACAICSGADLCKKCQMQPGHPLFLHEGRCYSKCPEGSYAEDGICERCSSPCRTCEGNATNCHSCEGGHVLHHGVCQENCPERHVAVKGVCKHCPEMCQDCIHEKTCKECTPEFFLHDDMCHQSCPRGFYADSRHCVPCHKDCLECSGPKADDCELCLESSWVLYDGLCLEECPAGTYYEKETKECRDCHKSCLTCSSSGTCTTCQKGLIMNPRGSCMANEKCSPSEYWDEDAPGCKPCHVKCFHCMGPAEDQCQTCPMNSLLLNTTCVKDCPEGYYADEDSNRCAHCHSSCRTCEGRHSRQCHSCRPGWFQLGKECLLQCREGYYADNSTGRCERCNRSCKGCQGPRPTDCLSCDRFFFLLRSKGECHRSCPDHYYVEQSTQTCERCHPTCDQCKGKGALNCLSCVWSYHLMGGICTSDCLVGEYRVGEGEKFNCEKCHESCMECKGPGAKNCTLCPANLVLHMDDSHCLHCCNTSDPPSAQECCDCQDTTDECILRTSKVRPATEHFKTALFITSSMMLVLLLGAAVVVWKKSRGRVQPAAKAGYEKLADPNKSYSSYKSSYRESTSFEEDQVIEYRDRDYDEDDDDDIVYMGQDGTVYRKFKYGLLDDDDIDELEYDDESYSYYQ

SEQ ID NO: 35671 - protein, 913 aa, Homo sapiens
MGWGSRCCCPGRLDLLCVLALLGGCLLPVCRTRVYTNHWAVKIAGGFPEANRIASKYGFINIGQIGALKDYYHFYHSRTIKRSVISSRGTHSFISMEPKVEWIQQQVVKKRTKRDYDFSRAQSTYFNDPKWPSMWYMHCSDNTHPCQSDMNIEGAWKRGYTGKNIVVTILDDGIERTHPDLMQNYDALASCDVNGNDLDPMPRYDASNENKHGTRCAGEVAAAANNSHCTVGIAFNAKIGGVRMLDGDVTDMVEAKSVSFNPQHVHIYSASWGPDDDGKTVDGPAPLTRQAFENGVRMGRRGLGSVFVWASGNGGRSKDHCSCDGYTNSIYTISISSTAESGKKPWYLEECSSTLATTYSSGESYDKKIITTDLRQRCTDNHTGTSASAPMAAGIIALALEANPFLTWRDVQHVIVRTSRAGHLNANDWKTNAAGFKVSHLYGFGLMDAEAMVMEAEKWTTVPRQHVCVESTDRQIKTIRPNSAVRSIYKASGCSDNPNRHVNYLEHVVVRITITHPRRGDLAIYLTSPSGTRSQLLANRLFDHSMEGFKNWEFMTIHCWGERAAGDWVLEVYDTPSQLRNFKTPGKLKEWSLVLYGTSVQPYSPTNEFPKVERFRYSRVEDPTDDYGTEDYAGPCDPECSEVGCDGPGPDHCNDCLHYYYKLKNNTRICVSSCPPGHYHADKKRCRKCAPNCESCFGSHGDQCMSCKYGYFLNEETNSCVTHCPDGSYQDTKKNLCRKCSENCKTCTEFHNCTECRDGLSLQGSRCSVSCEDGRYFNGQDCQPCHRFCATCAGAGADGCINCTEGYFMEDGRCVQSCSISYYFDHSSENGYKSCKKCDISCLTCNGPGFKNCTSCPSGYLLDLGMCQMGAICKDATEESWAEGGFCMLVKKNNLCQRKVLQQLCCKTCTFQG

SEQ ID NO: 35672 - protein, 755 aa, Homo sapiens
MRPAPIALWLRLVLALALVRPRAVGWAPVRAPIYVSSWAVQVSQGNREVERLARKFGFVNLGPIFPDGQYFHLRHRGVVQQSLTPHWGHRLHLKKNPKVQWFQQQTLQRRVKRSVVVPTDPWFSKQWYMNSEAQPDLSILQAWSQGLSGQGIVVSVLDDGIEKDHPDLWANYDPLASYDFNDYDPDPQPRYTPSKENRHGTRCAGEVAAMANNGFCGVGVAFNARIGGVRMLDGTITDVIEAQSLSLQPQHIHIYSASWGPEDDGRTVDGPGILTREAFRRGVTKGRGGLGTLFIWASGNGGLHYDNCNCDGYTNSIHTLSVGSTTQQGRVPWYSEACASTLTTTYSSGVATDPQIVTTDLHHGCTDQHTGTSASAPLAAGMIALALEANPFLTWRDMQHLVVRASKPAHLQAEDWRTNGVGRQVSHHYGYGLLDAGLLVDTARTWLPTQPQRKCAVRVQSRPTPILPLIYIRENVSACAGLHNSIRSLEHVQAQLTLSYSRRGDLEISLTSPMGTRSTLVAIRPLDVSTEGYNNWVFMSTHFWDENPQGVWTLGLENKGYYFNTGTLYRYTLLLYGTAEDMTARPTGPQVTSSACVQRDTEGLCQACDGPAYILGQLCLAYCPPRFFNHTRLVTAGPGHTAAPALRVCSSCHASCYTCRGGSPRDCTSCPPSSTLDQQQGSCMGPTTPDSRPRLRAAACPHHRCPASAMVLSLLAVTLGGPVLCGMSMDLPLYAWLSRARATPTKPQVWLPAGT

SEQ ID NO: 35673 - protein, 242 aa, Homo sapiens
MGTRSTLVAIRPLDVSTEGYNNWVFMSTHFWDENPQGVWTLGLENKGYYFNTGTLYRYTLLLYGTAEDMTARPTGPQVTSSACVQRDTEGLCQACDGPAYILGQLCLAYCPPRFFNHTRLVTAGPGHTAAPALRVCSSCHASCYTCRGGSPRDCTSCPPSSTLDQQQGSCMGPTTPDSRPRLRAAACPHHRCPASAMVLSLLAVTLGGPVLCGMSMDLPLYAWLSRARATPTKPQVWLPAGT

SEQ ID NO: 35674 - protein, 1172 aa, Homo sapiens
MSPDVPLLNDYKQDFFLKRFPQTVLGGPRFKLGYCAPPYIYVNQIILFLMPWVWGGVGTLLYQLGILKDYYTAALSGGLMLFTAFVIQFTSLYAKNKSTTVERILTTDILAEEDEHEFTSCTGAETVKFLIPGKKYVANTVFHSILAGLACGLGTWYLLPNRITLLYGSTGGTALLFFFGWMTLCIAEYSLIVNTATETATFQTQDTYEIIPLMRPLYIFFFVSVDLAHRFVVNMPALEHMNQILHILFVFLPFLWALGTLPPPDALLLWAMEQVLEFGLGGSSMSTHLRLLVMFIMSAGTAIASYFIPSTVGVVLFMTGFGFLLSLNLSDMGHKIGTKSKDLPSGPEKHFSWKECLFYIIILVLALLETSLLHHFAGFSQISKSNSQAIVGYGLMILLIILWILREIQSVYIIGIFRNPFYPKDVQTVTVFFEKQTRLMKIGIVRRILLTLVSPFAMIAFLSLDSSLQGLHSVSVCIGFTRAFRMVWQNTENALLETVIVSTVHLISSTDIWWNRSLDTGLRLLLVGIIRDRLIQFISKLQFAVTVLLTSWTEKKQRRKTTATLCILNIVFSPFVLVIIVFSTLLSSPLLPLFTLPVFLVGFPRPIQSWPGAAGTTACVCADTVYYYQMVPRLTAVLQTAMAAGSLGLLLPGSHYLGRFQDRLMWIMILECGYTYCSINIKGLELQETSCHTAEARRVDEVFEDAFEQEYTRVCSLNEHFGNVLTPCTVLPVKLYSDARNVLSGIIDSHENLKEFKGDLIKVLVWILVQYCSKRPGMKENVHNTENKGKAPLMLPALNTLPPPKSPEDIDSLNSETFNDWSDDNIFDDEPTIKKVIEEKHQLKDLPGTNLFIPGSVESQRVGDHSTGTVPENDLYKAVLLGYPAVDKGKQEDMPYIPLMEFSCSHSHLVCLPAEWRTSCMPSSKMKEMSSLFPEDWYQFVLRQLECYHSEEKASNVLEEIAKDKVLKDFYVHTVMTCYFSLFGIDNMAPSPGHILRVYGGVLPWSVALDWLTEKPELFQLALKAFRYTLKLMIDKASLGPIEDFRELIKYLEEYERDWYIGLVSDEKWKEAILQEKPYLFSLGYDSNMGIYTGRVLSLQELLIQVGKLNPEAVRGQWANLSWELLYATNDDEERYSIQAHPLLLRNLTVQAAEPPLGYPIYSSKPLHIHLY

SEQ ID NO: 35675 - protein, 2341 aa, Homo sapiens
MGSQTLQILRQGVWAALSGGWYYDPHQATFVNALHLYLWLFLLGLPFTLYMALPSTMIIVAVYCPVIAAVFIVLKMVNYRLHRALDAGEVVDRTANEFTDQRTKAEQGNCSTRRKDSNGPSDPGGGIEMSEFIREATPPVGCSSRNSYAGLDPSNQIGSGSSRLGTAATIKGDTDTAKTSDDISLSLGQSSSLCKEGSEEQDLAADRKLFRLVSNDSFISIQPSLSSCGQDLPRDFSDKVNLPSHNHHHHVDQSLSSACDTEVASLVPLHSHSYRKDHRPRGVPRTSSSAVAFPDTSLNDFPLYQQRRGLDPVSELESSKPLSGSKESLVENSGLSGEFQLAGDLKINTSQPPTKSGKSKPLKAEKSMDSLRSLSTRSSGSTESYCSGTDRDTNSTVSSYKSEQTSSTHIESILSEHEESPKAGTKSGRKKECCAGPEEKNSCASDKRTSSEKIAMEASTNSGVHEAKDPTPSDEMHNQRGLSTSASEEANKNPHANEFTSQGDRPPGNTAENKEEKSDKSAVSVDSKVRKDVGGKQKEGDVRPKSSSVIHRTASAHKSGRRRTGKKRASSFDSSRHRDYVCFRGVSGTKPHSAIFCHDEDSSDQSDLSRASSVQSAHQFSSDSSSSTTSHSCQSPEGRYSALKTKHTHKERGTDSEHTHKAHLVPEGTSKKRATRRTSSTNSAKTRARVLSLDSGTVACLNDSNRLMAPESIKPLTTSKSDLEAKEGEVLDELSLLGRASQLETVTRSRNSLPNQVAFPEGEEQDAVSGAAQASEEAVSFRRERSTFRRQAVRRRHNAGSNPTPPTLLIGSPLSLQDGQQGQQSTAQVKVQSRPPSQAAVLSASASLLVRNGSVHLEASHDNASAVGGSSLHDELGKFSSTLYETGGCDMSLVNFEPAARRASNICDTDSHVSSSTSVRFYPHDVLSLPQIRLNRLLTIDTDLLEQQDIDLSPDLAATYGPTEEAAQKVKHYYRFWILPQLWIGINFDRLTLLALFDRNREILENVLAVILAILVAFLGSILLIQGFFRDIWVFQFCLVIASCQYSLLKSVQPDSSSPRHGHNRIIAYSRPVYFCICCGLIWLLDYGSRNLTATKFKLYGITFTNPLVFISARDLVIVFTLCFPIVFFIGLLPQVNTFVMYLCEQLDIHIFGGNATTSLLAALYSFICSIVAVALLYGLCYGALKDSWDGQHIPVLFSIFCGLLVAVSYHLSRQSSDPSVLFSLVQSKIFPKTEEKNPEDPLSEVKDPLPEKLRNSVSERLQSDLVVCIVIGVLYFAIHVSTVFTVLQPALKYVLYTLVGFVGFVTHYVLPQVRKQLPWHCFSHPLLKTLEYNQYEVRNAATMMWFEKLHVWLLFVEKNIIYPLIVLNELSSSAETIASPKKLNTELGALMITVAGLKLLRSSFSSPTYQYVTVIFTVLFFKFDYEAFSETMLLDLFFMSILFNKLWELLYKLQFVYTYIAPWQITWGSAFHAFAQPFAVPHSAMLFIQAAVSAFFSTPLNPFLGSAIFITSYVRPVKFWERDYNTKRVDHSNTRLASQLDRNPGSDDNNLNSIFYEHLTRSLQHSLCGDLLLGRWGNYSTGDCFILASDYLNALVHLIEIGNGLVTFQLRGLEFRGTYCQQREVEAITEGVEEDEGFCCCEPGHIPHMLSFNAAFSQRWLAWEVIVTKYILEGYSITDNSAASMLQVFDLRKVLTTYYVKGIIYYVTTSSKLEEWLANETMQEGLRLCADRNYVDVDPTFNPNIDEDYDHRLAGISRESFCVIYLNWIEYCSSRRAKPVDVDKDSSLVTLCYGLCVLGRRALGTASHHMSSNLESFLYGLHALFKGDFRISSIRDEWIFADMELLRKVVVPGIRMSIKLHQDHFTSPDEYDDPTVLYEAIVSHEKNLVIAHEGDPAWRSAVLANSPSLLALRHVMDDGTNEYKIIMLNRRYLSFRVIKVNKECVRGLWAGQQQELVFLRNRNPERGSIQNAKQALRNMINSSCDQPIGYPIFVSPLTTSYSDSHEQLKDILGGPISLGNIRNFIVSTWHRLRKGCGAGCNSGGNIEDSDTGGGTSCTGNNATTANNPHSNVTQGSIGNPGQGSGTGLHPPVTSYPPTLGTSHSSHSVQSGLVRQSPARASVASQSSYCYSSRHSSLRMSTTGFVPCRRSSTSQISLRNLPSSIQSRLSMVNQMEPSGQSGLACVQHGLPSSSSSSQSIPACKHHTLVGFLATEGGQSSATDAQPGNTLSPANNSHSRKAEVIYRVQIVDPSQILEGINLSKRKELQWPDEGIRLKAGRNSWKDWSPQEGMEGHVIHRWVPCSRDPGTRSHIDKAVLLVQIDDKYVTVIETGVLELGAEV

SEQ ID NO: 35676 - protein, 866 aa, Homo sapiens
MGSQTLQILRQGVWAALSGGWYYDPHQATFVNALHLYLWLFLLGLPFTLYMALPSTMIIVAVYCPVIAAVFIVLKMVNYRLHRALDAGEVVDRTANEFTDQRTKAEQGNCSTRRKDSNGPSDPGGGIEMSEFIREATPPVGCSSRNSYAGLDPSNQIGSGSSRLGTAATIKGDTDTAKTSDDISLSLGQSSSLCKEGSEEQDLAADRKLFRLVSNDSFISIQPSLSSCGQDLPRDFSDKVNLPSHNHHHHVDQSLSSACDTEVASLVPLHSHSYRKDHRPRGVPRTSSSAVAFPDTSLNDFPLYQQRRGLDPVSELESSKPLSGSKESLVENSGLSGEFQLAGDLKINTSQPPTKSGKSKPLKAEKSMDSLRSLSTRSSGSTESYCSGTDRDTNSTVSSYKSEQTSSTHIESILSEHEESPKAGTKSGRKKECCAGPEEKNSCASDKRTSSEKIAMEASTNSGVHEAKDPTPSDEMHNQRGLSTSASEEANKNPHANEFTSQGDRPPGNTAENKEEKSDKSAVSVDSKVRKDVGGKQKEGDVRPKSSSVIHRTASAHKSGRRRTGKKRASSFDSSRHRDYVCFRGVSGTKPHSAIFCHDEDSSDQSDLSRASSVQSAHQFSSDSSSSTTSHSCQSPEGRYSALKTKHTHKERGTDSEHTHKAHLVPEGTSKKRATRRTSSTNSAKTRARVLSLDSGTVACLNDSNRLMAPESIKPLTTSKSDLEAKEGEVLDELSLLGRASQLETVTRSRNSLPNQVAFPEGEEQDAVSGAAQASEEAVSFRRERSTFRRQAVRRRHNAGSNPTPPTLLIGSPLSLQDGQQGQQSTAQVKVQSRPPSQAAVLSASASLLVSSLLRCMRLVAVICHL

SEQ ID NO: 35677 - protein, 2269 aa, Homo sapiens
MGSQTLQILRQGVWAALSGGWYYDPHQATFVNALHLYLWLFLLGLPFTLYMALPSTMIIVAVYCPVIAAVFIVLKMVNYRLHRALDAGEVVDRTANEFTDQRTKAEQGNCSTRRKDSNGPSDPGGGIEMSEFIREATPPVGCSSRNSYAGLDPSNQIGSGSSRLGTAATIKGDTDTAKTSDDISLSLGQSSSLCKEGSEEQDLAADRKLFRLVSNDSFISIQPSLSSCGQDLPRDFSDKVNLPSHNHHHHVDQSLSSACDTEVASLVPLHSHSYRKDHRPRGVPRTSSSAVAFPDTSLNDFPLYQQRRGLDPVSELESSKPLSGSKESLVENSGLSGEFQLAGDLKINTSQPPTKSGKSKPLKAEKSMDSLRSLSTRSSGSTESYCSGTDRDTNSTVSSYKSEQTSSTHIESILSEHEESPKAGTKSGRKKECCAGPEEKNSCASDKRTSSEKIAMEASTNSGVHEAKDPTPSDEMHNQRGLSTSASEEANKNPHANEFTSQGDRPPGNTAENKEEKSDKSAVSVDSKVRKDVGGKQKEGDVRPKSSSVIHRTASAHKSGRRRTGKKRASSFDSSRHRDYVCFRGVSGTKPHSAIFCHDEDSSDQSDLSRASSVQSAHQFSSDSSSSTTSHSCQSPEGRYSALKTKHTHKERGTDSEHTHKAHLVPEGTSKKRATRRTSSTNSAKTRARVLSLDSGTVACLNDSNRLMAPESIKPLTTSKSDLEAKEGEVLDELSLLGRASQLETVTRSRNSLPNQVAFPEGEEQDAVSGAAQASEEAVSFRRERSTFRRQAVRRRHNAGSNPTPPTLLIGSPLSLQDGQQGQQSTAQVKVQSRPPSQAAVLSASASLLVRNGSVHLEASHDNASAVGGSSLHDELGKFSSTLYETGGCDMSLVNFEPAARRASNICDTDSHVSSSTSVRFYPHDVLSLPQIRLNRLLTIDTDLLEQQDIDLSPDLAATYGPTEEAAQKVKHYYRFWILPQLWIGINFDRLTLLALFDRNREILENVLAVILAILVAFLGSILLIQGFFRDIWVFQFCLVIASCQYSLLKSVQPDSSSPRHGHNRIIAYSRPVYFCICCGLIWLLDYGSRNLTATKFKLYGITFTNPLVFISARDLVIVFTLCFPIVFFIGLLPQVNTFVMYLCEQLDIHIFGGNATTSLLAALYSFICSIVAVALLYGLCYGALKDSWDGQHIPVLFSIFCGLLVAVSYHLSRQSSDPSVLFSLVQSKIFPKTEEKNPEDPLSEVKDPLPEKLRNSVSERLQSDLVVCIVIGVLYFAIHVSTVFTVLQPALKYVLYTLVGFVGFVTHYVLPQVRKQLPWHCFSHPLLKTLEYNQYEVRNAATMMWFEKLHVWLLFVEKNIIYPLIVLNELSSSAETIASPKKLNTELGALMITVAGLKLLRSSFSSPTYQYVTVIFTVLFFKFDYEAFSETMLLDLFFMSILFNKLWELLYKLQFVYTYIAPWQITWGSAFHAFAQPFAVPHSAMLFIQAAVSAFFSTPLNPFLGSAIFITSYVRPVKFWERDYNTKRVDHSNTRLASQLDRNPGTYCQQREVEAITEGVEEDEGFCCCEPGHIPHMLSFNAAFSQRWLAWEVIVTKYILEGYSITDNSAASMLQVFDLRKVLTTYYVKGIIYYVTTSSKLEEWLANETMQEGLRLCADRNYVDVDPTFNPNIDEDYDHRLAGISRESFCVIYLNWIEYCSSRRAKPVDVDKDSSLVTLCYGLCVLGRRALGTASHHMSSNLESFLYGLHALFKGDFRISSIRDEWIFADMELLRKVVVPGIRMSIKLHQDHFTSPDEYDDPTVLYEAIVSHEKNLVIAHEGDPAWRSAVLANSPSLLALRHVMDDGTNEYKIIMLNRRYLSFRVIKVNKECVRGLWAGQQQELVFLRNRNPERGSIQNAKQALRNMINSSCDQPIGYPIFVSPLTTSYSDSHEQLKDILGGPISLGNIRNFIVSTWHRLRKGCGAGCNSGGNIEDSDTGGGTSCTGNNATTANNPHSNVTQGSIGNPGQGSGTGLHPPVTSYPPTLGTSHSSHSVQSGLVRQSPARASVASQSSYCYSSRHSSLRMSTTGFVPCRRSSTSQISLRNLPSSIQSRLSMVNQMEPSGQSGLACVQHGLPSSSSSSQSIPACKHHTLVGFLATEGGQSSATDAQPGNTLSPANNSHSRKAEVIYRVQIVDPSQILEGINLSKRKELQWPDEGIRLKAGRNSWKDWSPQEGMEGHVIHRWVPCSRDPGTRSHIDKAVLLVQIDDKYVTVIETGVLELGAEV

SEQ ID NO: 35678 - protein, 2230 aa, Homo sapiens
MGSQTLQILRQGVWAALSGGWYYDPHQATFVNALHLYLWLFLLGLPFTLYMALPSTMIIVAVYCPVIAAVFIVLKMVNYRLHRALDAGEVVDRTANEFTDQRTKAEQGNCSTRRKDSNGPSDPGGGIEMSEFIREATPPVGCSSRNSYAGLDPSNQIGSGSSRLGTAATIKGDTDTAKTSDDISLSLGQSSSLCKEGSEEQDLAADRKLFRLVSNDSFISIQPSLSSCGQDLPRDFSDKVNLPSHNHHHHVDQSLSSACDTEVASLVPLHSHSYRKDHRPRGVPRTSSSAVAFPDTSLNDFPLYQQRRGLDPVSELESSKPLSGSKESLVENSGLSGEFQLAGDLKINTSQPPTKSGKSKPLKAEKSMDSLRSLSTRSSGSTESYCSGTDRDTNSTVSSYKSEQTSSTHIESILSEHEESPKAGTKSGRKKECCAGPEEKNSCASDKRTSSEKIAMEASTNSGVHEAKDPTPSDEMHNQRGLSTSASEEANKNPHANEFTSQGDRPPGNTAENKEEKSDKSAVSVDSKVRKDVGGKQKEGDVRPKSSSVIHRTASAHKSGRRRTGKKRASSFDSSRHRDYVCFRGVSGTKPHSAIFCHDEDSSDQSDLSRASSVQSAHQFSSDSSSSTTSHSCQSPEGRYSALKTKHTHKERGTDSEHTHKAHLVPEGTSKKRATRRTSSTNSAKTRARVLSLDSGTVACLNDSNRLMAPESIKPLTTSKSDLEAKEGEVLDELSLLGRASQLETVTRSRNSLPNQVAFPEGEEQDAVSGGKFSSTLYETGGCDMSLVNFEPAARRASNICDTDSHVSSSTSVRFYPHDVIRLNRLLTIDTDLLEQQDIDLSPDLAATYGPTEEAAQKVKHYYRFWILPQLWIGINFDRLTLLALFDRNREILENVLAVILAILVAFLGSILLIQGFFRDIWVFQFCLVIASCQYSLLKSVQPDSSSPRHGHNRIIAYSRPVYFCICCGLIWLLDYGSRNLTATKFKLYGITFTNPLVFISARDLVIVFTLCFPIVFFIGLLPQVNTFVMYLCEQLDIHIFGGNATTSLLAALYSFICSIVAVALLYGLCYGALKDSWDGQHIPVLFSIFCGLLVAVSYHLSRQSSDPSVLFSLVQSKIFPKTEEKNPEDPLSEVKDPLPEKLRNSVSERLQSDLVVCIVIGVLYFAIHVSTVFTVLQPALKYVLYTLVGFVGFVTHYVLPQVRKQLPWHCFSHPLLKTLEYNQYEVRNAATMMWFEKLHVWLLFVEKNIIYPLIVLNELSSSAETIASPKKLNTELGALMITVAGLKLLRSSFSSPTYQYVTVIFTVLFFKFDYEAFSETMLLDLFFMSILFNKLWELLYKLQFVYTYIAPWQITWGSAFHAFAQPFAVPHSAMLFIQAAVSAFFSTPLNPFLGSAIFITSYVRPVKFWERDYNTKRVDHSNTRLASQLDRNPGSDDNNLNSIFYEHLTRSLQHSLCGDLLLGRWGNYSTGDCFILASDYLNALVHLIEIGNGLVTFQLRGLEFRGTYCQQREVEAITEGVEEDEGFCCCEPGHIPHMLSFNAAFSQRWLAWEVIVTKYILEGYSITDNSAASMLQVFDLRKVLTTYYVKGIIYYVTTSSKLEEWLANETMQEGLRLCADRNYVDVDPTFNPNIDEDYDHRLAGISRESFCVIYLNWIEYCSSRRAKPVDVDKDSSLVTLCYGLCVLGRRALGTASHHMSSNLESFLYGLHALFKGDFRISSIRDEWIFADMELLRKVVVPGIRMSIKLHQDHFTSPDEYDDPTVLYEAIVSHEKNLVIAHEGDPAWRSAVLANSPSLLALRHVMDDGTNEYKIIMLNRRYLSFRVIKVNKECVRGLWAGQQQELVFLRNRNPERGSIQNAKQALRNMINSSCDQPIGYPIFVSPLTTSYSDSHEQLKDILGGPISLGNIRNFIVSTWHRLRKGCGAGCNSGGNIEDSDTGGGTSCTGNNATTANNPHSNVTQGSIGNPGQGSGTGLHPPVTSYPPTLGTSHSSHSVQSGLVRQSPARASVASQSSYCYSSRHSSLRMSTTGFVPCRRSSTSQISLRNLPSSIQSRLSMVNQMEPSGQSGLACVQHGLPSSSSSSQSIPACKHHTLVGFLATEGGQSSATDAQPGNTLSPANNSHSRKAEVIYRVQIVDPSQILEGINLSKRKELQWPDEGIRLKAGRNSWKDWSPQEGMEGHVIHRWVPCSRDPGTRSHIDKAVLLVQIDDKYVTVIETGVLELGAEV

SEQ ID NO: 35679 - protein, 1323 aa, Homo sapiens
MKRNGSRNCLNRRSRFGSRERDWLREDVKRGCVYLYGADTTTATTTTTTSSSSSSSSSSSDLHLVLCTVETPASEICAGEGRESLYLQLHGDLVRRLEPTERPLQIVYDYLSRLGFDDPVRIQEEATNPDLGCMIRFYGEKPCHMDRLDRILLSGIYNVRKGKTQLHKWAERLVVLCGTCLIVSSVKDCQTGKMHILPLVGGKIEEVKRRQYSLAFSSAGAQAQTYHVSFETLAEYQRWQRQASKVVSQRISTVDLSCYSLEEVPEHLFYSQDITYLNLRHNFMQLERPGGLDTLYKFSQLKGLNLSHNKLGLFPILLCEISTLTELNLSCNGFHDLPSQIGNLLNLQTLCLDGNFLTTLPEELGNLQQLSSLGISFNNFSQIPEVYEKLTMLDRVVMAGNCLEVLNLGVLNRMNHIKHVDLRMNHLKTMVIENLEGNKHITHVDLRDNRLTDLDLSSLCSLEQLHCGRNQLRELTLSGFSLRTLYASSNRLTAVNVYPVPSLLTFLDLSRNLLECVPDWACEAKKIEVLDVSYNLLTEVPVRILSSLSLRKLMLGHNHVQNLPTLVEHIPLEVLDLQHNALTRLPDTLFSKALNLRYLNASANSLESLPSACTGEESLSMLQLLYLTNNLLTDQCIPVLVGHLHLRILHLANNQLQTFPASKLNKLEQLEELNLSGNKLKTIPTTIANCKRLHTLVAHSNNISIFPEILQLPQIQFVDLSCNDLTEILIPEALPATLQDLDLTGNTNLVLEHKTLDIFSHITTLKIDQKPLPTTDSTVTSTFWSHGLAEMAGQRNKLCVSALAMDSFAEGVGAVYGMFDGDRNEELPRLLQCTMADVLLEEVQQSTNDTVFMANTFLVSHRKLGMAGQKLGSSALLCYIRPDTADPASSFSLTVANVGTCQAVLCRGGKPVPLSKVFSLEQDPEEAQRVKDQKAIITEDNKVNGVTCCTRMLGCTYLYPWILPKPHISSTPLTIQDELLILGNKALWEHLSYTEAVNAVRHVQDPLAAAKKLCTLAQSYGCQDNVGAMVVYLNIGEEGCTCEMNGLTLPGPVGFASTTTIKDAPKPATPSSSSGIASEFSSEMSTSEVSSEVGSTASDEHNAGGLDTALLPRPERRCSLHPTPTSGLFQRQPSSATFSSNQSDNGLDSDDDQPVEGVITNGSKVEVEVDIHCCRGRDLENSPPLIESSPTLCSEEHARGSCFGIRRQNSVNSGMLLPMSKDRMELQKSPSTSCLYGKKLSNGSIVPLEDSLNLIEVATEVPKRKTGYFAAPTQMEPEDQFVVPHDLEEEVKEQMKQHQDSRLEPEPHEEDRTEPPEEFDTAL

SEQ ID NO: 35680 - protein, 956 aa, Homo sapiens
MKRNGSRNCLNRRSRFGSRERDWLREDVKRGCVYLYGADTTTATTTTTTSSSSSSSSSSSDLHLVLCTVETPASEICAGEGRESLYLQLHGDLVRRLEPTERPLQIVYDYLSRLGFDDPVRIQEEATNPDLGCMIRFYGEKPCHMDRLDRILLSGIYNVRKGKTQLHKWAERLVVLCGTCLIVSSVKDCQTGKMHILPLVGGKIEEVKRRQYSLAFSSAGAQAQTYHVSFETLAEYQRWQRQASKVVSQRISTVDLSCYSLEEVPEHLFYSQDITYLNLRHNFMQLERPGGLDTLYKFSQLKGLNLSHNKLGLFPILLCEISTLTELNLSCNGFHDLPSQIGNLLNLQTLCLDGNFLTTLPEELGNLQQLSSLGISFNNFSQIPEVYEKLTMLDRVVMAGNCLEVLNLGVLNRMNHIKHVDLRMNHLKTMVIENLEGNKHITHVDLRDNRLTDLDLSSLCSLEQLHCGRNQLRELTLSGFSLRTLYASSNRLTAVNVYPVPSLLTFLDLSRNLLECVPDWACEAKKIEVLDVSYNLLTEVPVRILSSLSLRKLMLGHNHVQNLPTLVEHIPLEVLDLQHNALTRLPDTLFSKALNLRYLNASANSLESLPSACTGEESLSMLQLLYLTNNLLTDQCIPVLVGHLHLRILHLANNQLQTFPASKLNKLEQLEELNLSGNKLKTIPTTIANCKRLHTLVAHSNNISIFPEILQLPQIQFVDLSCNDLTEILIPEALPATLQDLDLTGNTNLVLEHKTLDIFSHITTLKIDQKPLPTTDSTVTSTFWSHGLAEMAGQRNKLCVSALAMDSFAEGVGAVYGMFDGDRNEELPRLLQCTMADVLLEEVQQSTNDTVFMANTFLVSHRKLGMAGQKLGSSALLCYIRPDTADPASSFSLTVANVGTCQAVLCRGGKPVPLSKVFSLEQDPEEAQRVKDQKAIITENWVLNQKHLQDFPGEDK

SEQ ID NO: 35681 - protein, 1256 aa, Homo sapiens
MKRNGSRNCLNRRSRFGSRERDWLREDVKRGCVYLYGADTTTATTTTTTSSSSSSSSSSSDLHLVLCTVETPASEICAGEGRESLYLQLHGDLVRRLEPTERPLQIVYDYLSRLGFDDPVRIQEEATNPDLGCMIRFYGEKPCHMDRLDRILLSGIYNVRKGKTQLHKWAERLVVLCGTCLIVSSVKDCQTGKMHILPLVGGKIEEVKRRQYSLAFSSAGAQAQTYHVSFETLAEYQRWQRQASKVVSQRISTVDLSCYSLEEVPEHLFYSQDITYLNLRHNFMQLERPGGLDTLYKFSQLKGLNLSHNKLGLFPILLCEISTLTELNLSCNGFHDLPSQIGNLLNLQTLCLDGNFLTTLPEELGNLQQLSSLGISFNNFSQIPEVYEKLTMLDRVVMAGNCLEVLNLGVLNRMNHIKHVDLRMNHLKTMVIENLEGNKHITHVDLRDNRLTDLDLSSLCSLEQLHCGRNQLRELTLSGFSLRTLYASSNRLTAVNVYPVPSLLTFLDLSRNLLECVPDWACEAKKIEVLDVSYNLLTEVPVRILSSLSLRKLMLGHNHVQNLPTLVEHIPLEVLDLQHNALTRLPDTLFSKALNKLNKLEQLEELNLSGNKLKTIPTTIANCKRLHTLVAHSNNISIFPEILQLPQIQFVDLSCNDLTEILIPEALPATLQDLDLTGNTNLVLEHKTLDIFSHITTLKIDQKPLPTTDSTVTSTFWSHGLAEMAGQRNKLCVSALAMDSFAEGVGAVYGMFDGDRNEELPRLLQCTMADVLLEEVQQSTNDTVFMANTFLVSHRKLGMAGQKLGSSALLCYIRPDTADPASSFSLTVANVGTCQAVLCRGGKPVPLSKVFSLEQDPEEAQRVKDQKAIITEDNKVNGVTCCTRMLGCTYLYPWILPKPHISSTPLTIQDELLILGNKALWEHLSYTEAVNAVRHVQDPLAAAKKLCTLAQSYGCQDNVGAMVVYLNIGEEGCTCEMNGLTLPGPVGFASTTTIKDAPKPATPSSSSGIASEFSSEMSTSEVSSEVGSTASDEHNAGGLDTALLPRPERRCSLHPTPTSGLFQRQPSSATFSSNQSDNGLDSDDDQPVEGVITNGSKVEVEVDIHCCRGRDLENSPPLIESSPTLCSEEHARGSCFGIRRQNSVNSGMLLPMSKDRMELQKSPSTSCLYGKKLSNGSIVPLEDSLNLIEVATEVPKRKTGYFAAPTQMEPEDQFVVPHDLEEEVKEQMKQHQDSRLEPEPHEEDRTEPPEEFDTAL

SEQ ID NO: 35682 - protein, 199 aa, Homo sapiens
MTRLLGYVDPLDPSFVAAVITITFNPLYWNVVARWEHKTRKLSRAFGSPYLACYSLSVTILLLNFLRSHCFTQAMLSQPRMESLDTPAAYSLGLALLGLGVVLVLSSFFALGFAGTFLGDYFGILKEARVTVFPFNILDNPMYWGSTANYLGWAIMHASPTGLLLTVLVALTYIVALLYEEPFTAEIYRQKASGSHKRS

SEQ ID NO: 35683 - protein, 236 aa, Homo sapiens
MKRSGNPGAEVTNSSVAGPDCCGGLGNIDFRQADFCVMTRLLGYVDPLDPSFVAAVITITFNPLYWNVVARWEHKTRKLSRAFGSPYLACYSLSVTILLLNFLRSHCFTQAMLSQPRMESLDTPAAYSLGLALLGLGVVLVLSSFFALGFAGTFLGDYFGILKEARVTVFPFNILDNPMYWGSTANYLGWAIMHASPTGLLLTVLVALTYIVALLYEEPFTAEIYRQKASGSHKRS

SEQ ID NO: 35684 - protein, 232 aa, Homo sapiens
MKRSGNPGAEVTNSSVAGPDCCGGLGNIDFRQADFCVMTRLLGYVDPLDPSFVAAVITITFNPLYWNVVARWEHKTRKLSRAFGSPYLACYSLSVTILLLNFLRSHCFTQAMLSQPRMESLDTPAAYSLGLALLGLGVVLVLSSFFALGFAGTFLGDYFGILKEARVTVFPFNILDNPMYWGSTANYLGWAIIPAPAGAVGSEARQPHGPAPDGAGGPHLHSGSPIRRALHR

SEQ ID NO: 35685 - protein, 122 aa, Homo sapiens
MAAPVDLELKKAFTELQAKVIDTQQKVKLADIQIEQLNRTKKHAHLTDTEIMTLVDETNMYEGVGRMFILQSKEAIHSQLLEKQKIAEEKIKELEQKKSYLERSVKEAEDNIREMLMARRAQ

SEQ ID NO: 35686 - protein, 359 aa, Homo sapiens
MKATIILLLLAQVSWAGPFQQRGLFDFMLEDEASGIGPEVPDDRDFEPSLGPVCPFRCQCHLRVVQCSDLGLDKVPKDLPPDTTLLDLQNNKITEIKDGDFKNLKNLHALILVNNKISKVSPGAFTPLVKLERLYLSKNQLKELPEKMPKTLQELRAHENEITKVRKVTFNGLNQMIVIELGTNPLKSSGIENGAFQGMKKLSYIRIADTNITSIPQGLPPSLTELHLDGNKISRVDAASLKGLNNLAKLGLSFNSISAVDNGSLANTPHLRELHLDNNKLTRVPGGLAEHKYIQVVYLHNNNISVVGSSDFCPPGHNTKKASYSGVSLFSNPVQYWEIQPSTFRCVYVRSAIQLGNYK

SEQ ID NO: 35687 - protein, 250 aa, Homo sapiens
MKATIILLLLAQVSWAGPFQQRGLFDFMLEDEASGIGPEVPDDRDFEPSLGPVCPFRCQCHLRVVQCSDLELGTNPLKSSGIENGAFQGMKKLSYIRIADTNITSIPQGLPPSLTELHLDGNKISRVDAASLKGLNNLAKLGLSFNSISAVDNGSLANTPHLRELHLDNNKLTRVPGGLAEHKYIQVVYLHNNNISVVGSSDFCPPGHNTKKASYSGVSLFSNPVQYWEIQPSTFRCVYVRSAIQLGNYK

SEQ ID NO: 35688 - protein, 212 aa, Homo sapiens
MKATIILLLLAQVSWAGPFQQRGLFDFMLEDEASGIGPEVPDDRDFEPSLGPVCPFRCQCHLRVVQCSDLGLPPSLTELHLDGNKISRVDAASLKGLNNLAKLGLSFNSISAVDNGSLANTPHLRELHLDNNKLTRVPGGLAEHKYIQVVYLHNNNISVVGSSDFCPPGHNTKKASYSGVSLFSNPVQYWEIQPSTFRCVYVRSAIQLGNYK

SEQ ID NO: 35689 - protein, 172 aa, Homo sapiens
MKATIILLLLAQVSWAGPFQQRGLFDFMLEDEASGIGPEVPDDRDFEPSLGPVCPFRCQCHLRVVQCSDLGLDKVPKDLPPDTTLLDLQNNKITEIKDGDFKNLKNLHVVYLHNNNISVVGSSDFCPPGHNTKKASYSGVSLFSNPVQYWEIQPSTFRCVYVRSAIQLGNYK

SEQ ID NO: 35690 - protein, 75 aa, Homo sapiens
MKATIILLLLAQVSWAGPFQQRGLFDFMLEDEASGIGPEVPDDRDFEPSLGPVCPFRCQCHLRVVQCSDLGCLPS

SEQ ID NO: 35691 - protein, 134 aa, Homo sapiens
MAATMKKAAAEDVNVTFEDQQKINKFARNTSRITELKEEIEVKKKQLQNLEDACDDIMLADDDCLMIPYQIGDVFISHSQEETQEMLEEAKKNLQEEIDALESRVESIQRVLADLKVQLYAKFGSNINLEADES

SEQ ID NO: 35692 - protein, 148 aa, Homo sapiens
METGALRRPQLLPLLLLLCGGCPRAGGCNETGMLERLPLCGKAFADMMGKVDVWKWCNLSEFIVYYESFTNCTEMEANVVGCYWPNPLAQGFITGIHRQFFSNCTVDRVHLEDPPDEVLIPLIVIPVVLTVAMAGLVVWRSKRTDTLL

SEQ ID NO: 35693 - protein, 254 aa, Homo sapiens
MYQVPLPLDRDGTLVRLRFTMVALVTVCCPLVAFLFCILWSLLFHFKETTATHCGVPNYLPSVSSAIGGEVPQRYVWRFCIGLHSAPRFLVAFAYWNHYLSCTSPCSCYRPLCRLNFGLNVVENLALLVLTYVSSSEDFTIHENAFIVFIASSLGHMLLTCILWRLTKKHTVSQEDRKSYSWKQRLFIINFISFFSALAVYFRHNMYCEAGVYTIFAILEYTVVLTNMAFHMTAWWDFGNKELLITSQPEEKRF

SEQ ID NO: 35694 - protein, 315 aa, Homo sapiens
MYQVPLPLDRDGTLVRLRFTMVALVTVCCPLVAFLFCILWSLLFHFKETTATHCGATPCRMFSAASQPLDPDGTLFRLRFTAMVWWAITFPVFGFFFCIIWSLVFHFEYTVATDCGVPNYLPSVSSAIGGEVPQRYVWRFCIGLHSAPRFLVAFAYWNHYLSCTSPCSCYRPLCRLNFGLNVVENLALLVLTYVSSSEDFTIHENAFIVFIASSLGHMLLTCILWRLTKKHTVSQEDRKSYSWKQRLFIINFISFFSALAVYFRHNMYCEAGVYTIFAILEYTVVLTNMAFHMTAWWDFGNKELLITSQPEEKRF

SEQ ID NO: 35695 - protein, 250 aa, Homo sapiens
MYQVPLPLDRDGTLVRLRFTMVALVTVCCPLVAFLFCILWSLLFHFKETTATHCGVPNYLPSVSSAIGGEVPQRYVWRFCIGLHSAPRFLVAFAYWNHYLSCTSPCSCYRPLCRLNFGLNVVENLALLVLTYVSSSEDFTIHENAFIVFIASSLGHMLLTCILWRLTKKHTDRKSYSWKQRLFIINFISFFSALAVYFRHNMYCEAGVYTIFAILEYTVVLTNMAFHMTAWWDFGNKELLITSQPEEKRF

SEQ ID NO: 35696 - protein, 232 aa, Homo sapiens
MYQVPLPLDRDGTLVRLRFTMVALVTVCCPLVAFLFCILWSLLFHFKETTATHCGVPNYLPSVSSAIGGEVPQRYVWRFCIGLHSAPRFLVAFAYWNHYLSCTSPCSCYRPLCRLNFGLNVVENLALLVLTYVSSSEDFTIHENAFIVFIASSLGHMLLTCILWRLTKKHTVSQEVRSIPSGGSKAAQKKIKDICPQDSGSQVLQLETAALHHQLHLLLLGAGCLLSAQHVL

SEQ ID NO: 35697 - protein, 307 aa, Homo sapiens
MARLGSTGGVSGRVVTQHRDSAPFLGAPRLGLRELGPIRGTAPEWHGRWNAAERSDKMYQVPLPLDRDGTLVRLRFTMVALVTVCCPLVAFLFCILWSLLFHFKETTATHCGVPNYLPSVSSAIGGEVPQRYVWRFCIGLHSAPRFLVAFAYWNHYLSCTSPCSCYRPLCRLNFGLNVVENLALLVLTYVSSSEDFTIHENAFIVFIASSLGHMLLTCILWRLTKKHTDRKSYSWKQRLFIINFISFFSALAVYFRHNMYCEAGVYTIFAILEYTVVLTNMAFHMTAWWDFGNKELLITSQPEEKRF

SEQ ID NO: 35698 - protein, 388 aa, Homo sapiens
MKWLLLLGLVALSECIMYKVPLIRKKSLRRTLSERGLLKDFLKKHNLNPARKYFPQWEAPTLVDEQPLENYLDMEYFGTIGIGTPAQDFTVVFDTGSSNLWVPSVYCSSLACTNHNRFNPEDSSTYQSTSETVSITYGTGSMTGILGYDTVQVGGISDTNQIFGLSETEPGSFLYYAPFDGILGLAYPSISSSGATPVFDNIWNQGLVSQDLFSVYLSADDQSGSVVIFGGIDSSYYTGSLNWVPVTVEGYWQITVDSITMNGEAIACAEGCQAIVDTGTSLLTGPTSPIANIQSDIGASENSDGDMVVSCSAISSLPDIVFTINGVQYPVPPSAYILQSEGSCISGFQGMNLPTESGELWILGDVFIRQYFTVFDRANNQVGLAPVA

SEQ ID NO: 35699 - protein, 221 aa, Homo sapiens
MPVMRLFPCFLQLLAGLALPAVPPQQWALSAGNGSSEVEVVPFQEVWGRSYCRALERLVDVVSEYPSEVEHMFSPSCVSLLRCTGCCGDENLHCVPVETANVTMQLLKIRSGDRPSYVELTFSQHVRCECRHSPGRQSPDMPGDFRADAPSFLPPRRSLPMLFRMEWGCALTGSQSAVWPSSPVPEEIPRMHPGRNGKKQQRKPLREKMKPERCGDAVPRR

SEQ ID NO: 35700 - protein, 149 aa, Homo sapiens
MPVMRLFPCFLQLLAGLALPAVPPQQWALSAGNGSSEVEVVPFQEVWGRSYCRALERLVDVVSEYPSEVEHMFSPSCVSLLRCTGCCGDENLHCVPVETANVTMQLLKIRSGDRPSYVELTFSQHVRCECRPLREKMKPERCGDAVPRR

SEQ ID NO: 35701 - protein, 170 aa, Homo sapiens
MPVMRLFPCFLQLLAGLALPAVPPQQWALSAGNGSSEVEVVPFQEVWGRSYCRALERLVDVVSEYPSEVEHMFSPSCVSLLRCTGCCGDENLHCVPVETANVTMQLLKIRSGDRPSYVELTFSQHVRCECRPLREKMKPERRRPKGRGKRRREKQRPTDCHLCGDAVPRR

SEQ ID NO: 35702 - protein, 242 aa, Homo sapiens
MPVMRLFPCFLQLLAGLALPAVPPQQWALSAGNGSSEVEVVPFQEVWGRSYCRALERLVDVVSEYPSEVEHMFSPSCVSLLRCTGCCGDENLHCVPVETANVTMQLLKIRSGDRPSYVELTFSQHVRCECRHSPGRQSPDMPGDFRADAPSFLPPRRSLPMLFRMEWGCALTGSQSAVWPSSPVPEEIPRMHPGRNGKKQQRKPLREKMKPERRRPKGRGKRRREKQRPTDCHLCGDAVPRR

SEQ ID NO: 35703 - protein, 520 aa, Homo sapiens
MFCTRGLLFFAFLAGLDIEFTGLRSNLSGPQQISLFDLPSEWYLKTRQSVQQFTVCQIGLSVFSAIEGEANKYIAHSCNFYLFPTTFGILDSEFSFQASSVQFLNQYGFNYNKFLKNGIPYMNEEQEKKIRHDILTGNWRVRSSPDKDQIKVVIDEVTRWLELAKEGDWMTLPGITGFQAFEVQLVLRQALPNIWTVLKDEGVVVKKVSKQHRWYLQNTSCDRESCWKENILLSARGFSVFFQMLVKAQKPLVGHNMMMDLLHLHEKFFRPLPESYDQFKQNIHSLFPVLIDTKSVTKDIWKEMNFPRVSNLSEVYEVLNSDLNPTKNSGPEIVHASRCEKYVETKCPHEAAYDAFLCGSVLLKVAHLLLQKIYHIDPVPESSFPQYLDVLAPYVNQVNLIRAGVPKINFSGPDYPSIRPPILILSVKRWPGVSEQQVYHKFQNLCKFDVRRLTRSQFLLLTNKFKDARNILKEYRDHPTLCISLYRYWRHSPNVNCLLQVCGIVTAWALLAFILGRSGT

SEQ ID NO: 35704 - protein, 531 aa, Homo sapiens
MDVGADEFEESLPLLQELVQEADFVGLDIEFTGLRSNLSGPQQISLFDLPSEWYLKTRQSVQQFTVCQIGLSVFSAIEGEANKYIAHSCNFYLFPTTFGILDSEFSFQASSVQFLNQYGFNYNKFLKNGIPYMNEEQEKKIRHDILTGNWRVRSSPDKDQIKVVIDEVTRWLELAKEGDWMTLPGITGFQAFEVQLVLRQALPNIWTVLKDEGVVVKKVSKQHRWYLQNTSCDRESCWKENILLSARGFSVFFQMLVKAQKPLVGHNMMMDLLHLHEKFFRPLPESYDQFKQNIHSLFPVLIDTKSVTKDIWKEMNFPRVSNLSEVYEVLNSDLNPTKNSGPEIVHASRCEKYVETKCPHEAAYDAFLCGSVLLKVAHLLLQKIYHIDPVPESSFPQYLDVLAPYVNQVNLIRAGVPKINFSGPDYPSIRPPILILSVKRWPGVSEQQVYHKFQNLCKFDVRRLTRSQFLLLTNKFKDARNILKEYRDHPTLCISLYRYWRHSPNVNCLLQVCGIVTAWALLAFILGRSGT

SEQ ID NO: 35705 - protein, 318 aa, Homo sapiens
MAPWAEAEHSALNPLRAVWLTLTAAFLLTLLLQLLPPGLLPGCAIFQDLIRYGKTKCGEPSRPAACRAFDVPKRYFSHFYIISVLWNGFLLWCLTQSLFLGAPFPSWLHGLLRILGAAQFQGGELALSAFLVLVFLWLHSLRRLFECLYVSVFSNVMIHVVQYCFGLVYYVLVGLTVLSQVPMDGRNAYITGKNLLMQARWFHILGMMMFIWSSAHQYKCHVILGNLRKNKAGVVIHCNHRIPFGDWFEYVSSPNYLAELMIYVSMAVTFGFHNLTWWLVVTNVFFNQALSAFLSHQFYKSKFVSYPKHRKAFLPFLF

SEQ ID NO: 35706 - protein, 737 aa, Homo sapiens
MGGCTVKPQLLLLALVLHPWNPCLGADSEKPSSIPTDKLLVITVATKESDGFHRFMQSAKYFNYTVKVLGQGEEWRGGDGINSIGGGQKVRLMKEVMEHYADQDDLVVMFTECFDVIFAGGPEEVLKKFQKANHKVVFAADGILWPDKRLADKYPVVHIGKRYLNSGGFIGYAPYVNRIVQQWNLQDNDDDQLFYTKVYIDPLKREAINITLDHKCKIFQTLNGAVDEVVLKFENGKARAKNTFYETLPVAINGNGPTKILLNYFGNYVPNSWTQDNGCTLCEFDTVDLSAVDVHPNVSIGVFIEQPTPFLPRFLDILLTLDYPKEALKLFIHNKEVYHEKDIKVFFDKAKHEIKTIKIVGPEENLSQAEARNMGMDFCRQDEKCDYYFSVDADVVLTNPRTLKILIEQNRKIIAPLVTRHGKLWSNFWGALSPDGYYARSEDYVDIVQGNRVGVWNVPYMANVYLIKGKTLRSEMNERNYFVRDKLDPDMALCRNAREMGVFMYISNRHEFGRLLSTANYNTSHYNNDLWQIFENPVDWKEKYINRDYSKIFTENIVEQPCPDVFWFPIFSEKACDELVEEMEHYGKWSGGKHHDSRISGGYENVPTDDIHMKQVDLENVWLHFIREFIAPVTLKVFAGYYTKGFALLNFVVKYSPERQRSLRPHHDASTFTINIALNNVGEDFQGGGCKFLRYNCSIESPRKGWSFMHPGRLTHLHEGLPVKNGTRYIAVSFIDP

SEQ ID NO: 35707 - protein, 758 aa, Homo sapiens
MGGCTVKPQLLLLALVLHPWNPCLGADSEKPSSIPTDKLLVITVATKESDGFHRFMQSAKYFNYTVKVLGQGEEWRGGDGINSIGGGQKVRLMKEVMEHYADQDDLVVMFTECFDVIFAGGPEEVLKKFQKANHKVVFAADGILWPDKRLADKYPVVHIGKRYLNSGGFIGYAPYVNRIVQQWNLQDNDDDQLFYTKVYIDPLKREAINITLDHKCKIFQTLNGAVDEVVLKFENGKARAKNTFYETLPVAINGNGPTKILLNYFGNYVPNSWTQDNGCTLCEFDTVDLSAVDVHPNVSIGVFIEQPTPFLPRFLDILLTLDYPKEALKLFIHNKEVYHEKDIKVFFDKAKHEIKTIKIVGPEENLSQAEARNMGMDFCRQDEKCDYYFSVDADVVLTNPRTLKILIEQNRKIIAPLVTRHGKLWSNFWGALSPDGYYARSEDYVDIVQGNRVGVWNVPYMANVYLIKGKTLRSEMNERNYFVRDKLDPDMALCRNAREMTLQREKDSPTPETFQMLSPPKGVFMYISNRHEFGRLLSTANYNTSHYNNDLWQIFENPVDWKEKYINRDYSKIFTENIVEQPCPDVFWFPIFSEKACDELVEEMEHYGKWSGGKHHDSRISGGYENVPTDDIHMKQVDLENVWLHFIREFIAPVTLKVFAGYYTKGFALLNFVVKYSPERQRSLRPHHDASTFTINIALNNVGEDFQGGGCKFLRYNCSIESPRKGWSFMHPGRLTHLHEGLPVKNGTRYIAVSFIDP

SEQ ID NO: 35708 - protein, 418 aa, Homo sapiens
MLENHILHKRIYILTFFSQQIFILCHAHFIFFFTVRDFCRQDEKCDYYFSVDADVVLTNPRTLKILIEQNRKIIAPLVTRHGKLWSNFWGALSPDGYYARSEDYVDIVQGNRVGVWNVPYMANVYLIKGKTLRSEMNERNYFVRDKLDPDMALCRNAREMTLQREKDSPTPETFQMLSPPKGVFMYISNRHEFGRLLSTANYNTSHYNNDLWQIFENPVDWKEKYINRDYSKIFTENIVEQPCPDVFWFPIFSEKACDELVEEMEHYGKWSGGKHHDSRISGGYENVPTDDIHMKQVDLENVWLHFIREFIAPVTLKVFAGYYTKGFALLNFVVKYSPERQRSLRPHHDASTFTINIALNNVGEDFQGGGCKFLRYNCSIESPRKGWSFMHPGRLTHLHEGLPVKNGTRYIAVSFIDP

SEQ ID NO: 35709 - protein, 92 aa, Homo sapiens
MASLGHILVFCVGLLTMAKAESPKEHDPFTYDYQSLQIGGLVIAGILFILGILIVLSRRCRCKFNQQQRTGEPDEEEGTFRSSIRRLSTRRR

SEQ ID NO: 35710 - protein, 1044 aa, Homo sapiens
MPPGVDCPMEFWTKEENQSVVVDFLLPTGVYLNFPVSRNANLSTIKQLLWHRAQYEPLFHMLSGPEAYVFTCINQTAEQQELEDEQRRLCDVQPFLPVLRLVAREGDRVKKLINSQISLLIGKGLHEFDSLCDPEVNDFRAKMCQFCEEAAARRQQLGWEAWLQYSFPLQLEPSAQTWGPGTLRLPNRALLVNVKFEGSEESFTFQVSTKDVPLALMACALRKKATVFRQPLVEQPEDYTLQVNGRHEYLYGSYPLCQFQYICSCLHSGLTPHLTMVHSSSILAMRDEQSNPAPQVQKPRAKPPPIPAKKPSSVSLWSLEQPFRIELIQGSKVNADERMKLVVQAGLFHGNEMLCKTVSSSEVSVCSEPVWKQRLEFDINICDLPRMARLCFALYAVIEKAKKARSTKKKSKKADCPIAWANLMLFDYKDQLKTGERCLYMWPSVPDEKGELLNPTGTVRSNPNTDSAAALLICLPEVAPHPVYYPALEKILELGRHSECVHVTEEEQLQLREILERRGSGELYEHEKDLVWKLRHEVQEHFPEALARLLLVTKWNKHEDVAQMLYLLCSWPELPVLSALELLDFSFPDCHVGSFAIKSLRKLTDDELFQYLLQLVQVLKYESYLDCELTKFLLDRALANRKIGHFLFWHLRSEMHVPSVALRFGLILEAYCRGSTHHMKVLMKQGEALSKLKALNDFVKLSSQKTPKPQTKELMHLCMRQEAYLEALSHLQSPLDPSTLLAEVCVEQCTFMDSKMKPLWIMYSNEEAGSGGSVGIIFKNGDDLRQDMLTLQMIQLMDVLWKQEGLDLRMTPYGCLPTGDRTGLIEVVLRSDTIANIQLNKSNMAATAAFNKDALLNWLKSKNPGEALDRAIEEFTLSCAGYCVATYVLGIGDRHSDNIMIRESGQLFHIDFGHFLGNFKTKFGINRERVPFILTYDFVHVIQQGKTNNSEKFERFRGYCERAYTILRRHGLLFLHLFALMRAAGLPELSCSKDIQYLKDSLALGKTEEEALKHFRVKFNEALRESWKTKVNWLAHNVSKDNRQ

SEQ ID NO: 35711 - protein, 301 aa, Homo sapiens
MPPGVDCPMEFWTKEENQSVVVDFLLPTGVYLNFPVSRNANLSTIKQLLWHRAQYEPLFHMLSGPEAYVFTCINQTAEQQELEDEQRRLCDVQPFLPVLRLVAREGDRVKKLINSQISLLIGKGLHEFDSLCDPEVNDFRAKMCQFCEEAAARRQQLGWEAWLQYSFPLQLEPSAQTWGPGTLRLPNRALLVNVKFEGSEVSPCVACGIQAALSMGSTSSVKLLSHPQAPLPQWHQMVFARCLCMCGAQLNVPPGELHLPGVHQGRAAGADGLCPAEEGHSVPAAAGGAAGRLHAAGERQA

SEQ ID NO: 35712 - protein, 399 aa, Homo sapiens
MAVTMLQDWCRWMGVNARRGLLILGIPEDCDDAEFQESLEAALRPMGHFTVLGKAFREEDNATAALVELDREVNYALVPREIPGTGGPWNVVFVPRCSGEEFLGLGRVFHFPEQEGQMVESVAGALGVGLRRVCWLRSIGQAVQPWVEAVRCQSLGVFSGRDQPAPGEESFEVWLDHTTEMLHVWQGVSERERRRRLLEGLRGTALQLVHALLAENPARTAQDCLAALAQVFGDNESQATIRVKCLTAQQQSGERLSAFVLRLEVLLQKAMEKEALARASADRVRLRQMLTRAHLTEPLDEALRKLRMAGRSPSFLEMLGLVRESEAWEASLARSVRAQTQEGAGARAGAQAVARASTKVEAVPGGPGREPEGLLQAGGQEAEELLQEGLKPVLEECDN

SEQ ID NO: 35713 - protein, 603 aa, Homo sapiens
MLLAVLLLLPLPSSWFAHGHPLYTRLPPSALQVLSAQGTQALQAAQRSAQWAINRVAMEIQHRSHECRGSGRPRPQALLQDPPEPGPCGERRPSTANVTRAHGRIVGGSAAPPGAWPWLVRLQLGGQPLCGGVLVAASWVLTAAHCFVGAPNELLWTVTLAEGSRGEQAEEVPVNRILPHPKFDPRTFHNDLALVQLWTPVSPGGSARPVCLPQEPQEPPAGTACAIAGWGALFEDGPEAEAVREARVPLLSTDTCRRALGPGLRPSTMLCAGYLAGGVDSCQGDSGGPLTCSEPGPRPREVLFGVTSWGDGCGEPGKPGVYTRVAVFKDWLQEQMSASSSREPSCRELLAWDPPQELQADAARLCAFYARLCPGSQGACARLAHQQCLQRRRRCELRSLAHTLLGLLRNAQELLGPRPGLRRLAPALALPAPALRESPLHPARELRLHSGSRAAGTRFPKRRPEPRGEANGCPGLEPLRQKLAALQGAHAWILQVPSEHLAMNFHEVLADLGSKTLTGLFRAWVRAGLGGRHVAFSGLVGLEPATLARSLPRLLVQALQAFRVAALAEGEPEGPWMDVGQGPGLERKGHHPLNPQVPPARQP

SEQ ID NO: 35714 - protein, 465 aa, Homo sapiens
MIVFVRFNSSHGFPVEVDSDTSIFQLKEVVAKRQGVPADQLRVIFAGKELRNDWTVQNCDLDQQSIVHIVQRPWRKGQEMNATGGDDPRNAAGGCEREPQSLTRVDLSSSVLPGDSVGLAVILHTDSRKDSPPAGSPAGRSIYNSFYVYCKGPCQRVQPGKLRVQCSTCRQATLTLTQGPSCWDDVLIPNRMSGECQSPHCPGTSAEFFFKCGAHPTSDKETSVALHLIATNSRNITCITCTDVRSPVLVFQCNSRHVICLDCFHLYCVTRLNDRQFVHDPQLGYSLPCVAGCPNSLIKELHHFRILGEEQYNRYQQYGAEECVLQMGGVLCPRPGCGAGLLPEPDQRKVTCEGGNGLGCGFAFCRECKEAYHEGECSAVFEASGTTTQAYRVDERAAEQARWEAASKETIKKTTKPCPRCHVPVEKNGGCMHMKCPQPQCRLEWCWNCGCEWNRVCMGDHWFDV

SEQ ID NO: 35715 - protein, 437 aa, Homo sapiens
MIVFVRFNSSHGFPVEVDSDTSIFQLKEVVAKRQGVPADQLRVIFAGKELRNDWTVQNCDLDQQSIVHIVQRPWRKGQEMNATGGDDPRNAAGGCEREPQSLTRVDLSSSVLPGDSVGLAVILHTDSRKDSPPAGSPAGRSIYNSFYVYCKGPCQRVQPGKLRVQCSTCRQATLTLTQEFFFKCGAHPTSDKETSVALHLIATNSRNITCITCTDVRSPVLVFQCNSRHVICLDCFHLYCVTRLNDRQFVHDPQLGYSLPCVAGCPNSLIKELHHFRILGEEQYNRYQQYGAEECVLQMGGVLCPRPGCGAGLLPEPDQRKVTCEGGNGLGCGFAFCRECKEAYHEGECSAVFEASGTTTQAYRVDERAAEQARWEAASKETIKKTTKPCPRCHVPVEKNGGCMHMKCPQPQCRLEWCWNCGCEWNRVCMGDHWFDV

SEQ ID NO: 35716 - protein, 218 aa, Homo sapiens
MNATGGDDPRNAAGGCEREPQSLTRVDLSSSVLPGDSVGLAVILHTDSRKDSPPAGSPAGRSIYNSFYVYCKGPCQRVQPGKLRVQCSTCRQATLTLTQGPSCWDDVLIPNRMSGECQSPHCPGTSAEFFFKCGAHPTSDKETSVALHLIATNSRNITCITCTDVRSPVLVFQCNSRHVICLDCFHLYCVTRLNDRQFVHDPQLGYSLPCVVCLLPGM

SEQ ID NO: 35717 - protein, 274 aa, Homo sapiens
MSGECQSPHCPGTSAEFFFKCGAHPTSDKETSVALHLIATNSRNITCITCTDVRSPVLVFQCNSRHVICLDCFHLYCVTRLNDRQFVHDPQLGYSLPCVAGCPNSLIKELHHFRILGEEQYNRYQQYGAEECVLQMGGVLCPRPGCGAGLLPEPDQRKVTCEGGNGLGCGFAFCRECKEAYHEGECSAVFEASGTTTQAYRVDERAAEQARWEAASKETIKKTTKPCPRCHVPVEKNGGCMHMKCPQPQCRLEWCWNCGCEWNRVCMGDHWFDV

SEQ ID NO: 35718 - protein, 387 aa, Homo sapiens
MIVFVRFNSSHGFPVEVDSDTSIFQLKEVVAKRQGVPADQLRVIFAGKELRNDWTVQNCDLDQQSIVHIVQRPWRKGQEMNATGGDDPRNAAGGCEREPQSLTRVDLSSSVLPGDSVGLAVILHTDSRKDSPPAGSPAGRSIYNSFYVYCKGPCQRVQPGKLRVQCSTCRQATLTLTQGPSCWDDVLIPNRMSGECQSPHCPGTSAEFFFKCGAHPTSDKETSVALHLIATNSRNITCITCTDVRSPVLVFQCNSRHVICLDCFHLYCVTRLNDRQFVHDPQLGYSLPCVGTGDTVVLRGALGGFRRGVAGCPNSLIKELHHFRILGEEQYNRYQQYGAEECVLQMGGVLCPRPGCGAGLLPEPDQRKVTCEGGNGLGCGYGQRRTK

SEQ ID NO: 35719 - protein, 316 aa, Homo sapiens
MIVFVRFNSSHGFPVEVDSDTSIFQLKEVVAKRQGVPADQLRVIFAGKELRNDWTVQEFFFKCGAHPTSDKETSVALHLIATNSRNITCITCTDVRSPVLVFQCNSRHVICLDCFHLYCVTRLNDRQFVHDPQLGYSLPCVAGCPNSLIKELHHFRILGEEQYNRYQQYGAEECVLQMGGVLCPRPGCGAGLLPEPDQRKVTCEGGNGLGCGFAFCRECKEAYHEGECSAVFEASGTTTQAYRVDERAAEQARWEAASKETIKKTTKPCPRCHVPVEKNGGCMHMKCPQPQCRLEWCWNCGCEWNRVCMGDHWFDV

SEQ ID NO: 35720 - protein, 387 aa, Homo sapiens
MIVFVRFNSSHGFPVEVDSDTSIFQLKEVVAKRQGVPADQLRVIFAGKELRNDWTVQNCDLDQQSIVHIVQRPWRKGQEMNATGGDDPRNAAGGCEREPQSLTRVDLSSSVLPGDSVGLAVILHTDSRKDSPPAGSPAGRSIYNSFYVYCKGPCQRVQPGKLRVQCSTCRQATLTLTQEFFFKCGAHPTSDKETSVALHLIATNSRNITCITCTDVRSPVLVFQCNSRHVICLDCFHLYCVTRLNDRQFVHDPQLGYSLPCVAGCPNSLIKELHHFRILGEEQFAFCRECKEAYHEGECSAVFEASGTTTQAYRVDERAAEQARWEAASKETIKKTTKPCPRCHVPVEKNGGCMHMKCPQPQCRLEWCWNCGCEWNRVCMGDHWFDV

SEQ ID NO: 35721 - protein, 415 aa, Homo sapiens
MIVFVRFNSSHGFPVEVDSDTSIFQLKEVVAKRQGVPADQLRVIFAGKELRNDWTVQNCDLDQQSIVHIVQRPWRKGQEMNATGGDDPRNAAGGCEREPQSLTRVDLSSSVLPGDSVGLAVILHTDSRKDSPPAGSPAGRSIYNSFYVYCKGPCQRVQPGKLRVQCSTCRQATLTLTQGPSCWDDVLIPNRMSGECQSPHCPGTSAEFFFKCGAHPTSDKETSVALHLIATNSRNITCITCTDVRSPVLVFQCNSRHVICLDCFHLYCVTRLNDRQFVHDPQLGYSLPCVAGCPNSLIKELHHFRILGEEQFAFCRECKEAYHEGECSAVFEASGTTTQAYRVDERAAEQARWEAASKETIKKTTKPCPRCHVPVEKNGGCMHMKCPQPQCRLEWCWNCGCEWNRVCMGDHWFDV

SEQ ID NO: 35722 - protein, 51 aa, Homo sapiens
MSSHKTFTIKRFLAKKQKQNRPIPQWIQMKPGSKIRYNSKRRHWRRTKLGL

SEQ ID NO: 35723 - protein, 232 aa, Homo sapiens
MGSVLSTDSGKSAPASATARALERRRDPELPVTSFDCAVCLEVLHQPVRTRCGHVFCRSCIATSLKNNKWTCPYCRAYLPSEGVPATDVAKRMKSEYKNCAECDTLVCLSEMRAHIRTCQKYIDKYGPLQELEETAARCVCPFCQRELYEDSLLDHCITHHRSERRPVFCPLCRLIPDENPSSFSGSLIRHLQVSHTLFYDDFIDFNIIEEALIRRVLDRSLLEYVNHSNTT

SEQ ID NO: 35724 - protein, 245 aa, Homo sapiens
MAEDLSAATSYTEDDFYCPVCQEVLKTPVRTTACQHVFCRKCFLTAMRESGAHCPLCRGNVTRRERACPERALDLENIMRKFSGSCRCCAKQIKFYRMRHHYKSCKKYQDEYGVSSIIPNFQISQDSVGNSNRSETSTSDNTETYQENTSSSGHPTFKCPLCQESNFTRQRLLDHCNSNHLFQIVPVTCPICVSLPWGDPSQITRNFVSHLNQRHQFDYGEFVNLQLDEETQYQTAVEESFQVNI

SEQ ID NO: 35725 - protein, 151 aa, Homo sapiens
MAEDLSAATSYTEDDFYCPVCQEVLKTPVRTTACQHVNRSETSTSDNTETYQENTSSSGHPTFKCPLCQESNFTRQRLLDHCNSNHLFQIVPVTCPICVSLPWGDPSQITRNFVSHLNQRHQFDYGEFVNLQLDEETQYQTAVEESFQVNI

SEQ ID NO: 35726 - protein, 432 aa, Homo sapiens
MAGLGLGSAVPVWLAEDDLGCIICQGLLDWPATLPCGHSFCRHCLEALWGARDARRWACPTCRQGAAQQPHLRKNTLLQDLADKYRRAAREIQAGSDPAHCPCPGSSSLSSAAARPRRRPELQRVAVEKSITEVAQELTELVEHLVDIVRSLQNQRPLSESGPDNELSILGKAFSSGVDLSMASPKLVTSDTAAGKIRDILHDLEEIQEKLQESVTWKEAPEAQMQGELLEAPSSSSCPLPDQSHPALRRASRFAQWAIHPTFNLKSLSCSLEVSKDSRTVTVSHRPQPYRWSCERFSTSQVLCSQALSSGKHYWEVDTRNCSHWAVGVASWEMSRDQVLGRTMDSCCVEWKGTSQLSAWHMVKETVLGSDRPGVVGIWLNLEEGKLAFYSVDNQEKLLYECTISASSPLYPAFWLYGLHPGNYLIIKQVKV

SEQ ID NO: 35727 - protein, 210 aa, Homo sapiens
MAGLGLGSAVPVWLAEDDLGCIICQGLLDWPATLPCGHSFCRHCLEALWGARDARRWACPTCRQGAAQQPHLRKNTLLQDLADKYRRAAREIQAGSDPAHCPCPGSSSLSSAAARPRRRPELQRVAVEKSITEVAQELTELVEHLVDIVRSLQNQRPLSESGPDNELSILGKENSWKPRLPPHAHCLTRATLHSGELLGLLSGPSIQPLT

SEQ ID NO: 35728 - protein, 286 aa, Homo sapiens
MAGLGLGSAVPVWLAEDDLGCIICQGLLDWPATLPCGHSFCRHCLEALWGARDARRWACPTCRQGAAQQPHLRKNTLLQDLADKYRRAAREIQAGSDPAHCPCPGSSSLSSAAARPRRRPELQRVAVEKSITEVAQELTELVEHLVDIVRSLQNQRPLSESGPDNELSILGKAFSSGVDLSMASPKLVTSDTAAGKIRDILHDLEEIQEKLQESVTWKEAPEAQMQGSLLPRLECSGTITAASISQAQENSWKPRLPPHAHCLTRATLHSGELLGLLSGPSIQPLT

SEQ ID NO: 35729 - protein, 250 aa, Homo sapiens
MAAAGLALLCRRVSSALKSSRSLITPQVPACTGFFLSLLPKSTPNVTSFHQYRLLHTTLSRKGLEEFFDDPKNWGQEKVKSGAAWTCQQLRNKSNEDLHKLWYVLLKERNMLLTLEQEAKRQRLPMPSPERLDKVVDSMDALDKVVQEREDALRLLQTGQERARPGAWRRDIFGRIIWHKFKQWVIPWHLNKRYNRKRFFALPYVDHFLRLEREKRARIKARKENLERKKAKILLKKFPHLAEAQKSSLV

SEQ ID NO: 35730 - protein, 230 aa, Homo sapiens
MAAAGLALLCRRVSSALKSSRSLITPQVPACTGLLHTTLSRKGLEEFFDDPKNWGQEKVKSGAAWTCQQLRNKSNEDLHKLWYVLLKERNMLLTLEQEAKRQRLPMPSPERLDKVVDSMDALDKVVQEREDALRLLQTGQERARPGAWRRDIFGRIIWHKFKQWVIPWHLNKRYNRKRFFALPYVDHFLRLEREKRARIKARKENLERKKAKILLKKFPHLAEAQKSSLV

SEQ ID NO: 35731 - protein, 140 aa, Homo sapiens
MLLTLEQEAKRQRLPMPSPERLDKVVDSMDALDKVVQEREDALRLLQTGQERARPGAWRRDIFGRIIWHKFKQWVIPWHLNKRYNRKRFFALPYVDHFLRLEREKRARIKARKENLERKKAKILLKKFPHLAEAQKSSLV

SEQ ID NO: 35732 - protein, 679 aa, Homo sapiens
MGALTSRQHAGVEEVDIPSNSVYRYPPKSGSYFASHFIMGGEKFDSTHPEGYLFGENSDLNFLGNRPVVFPYAAPPPQEPVKTLRSLVNIRKDTLRLVKCAEEVKSPGEEASKAKVHYNVEFTFDTDARVAITIYYQATEEFQNGIASYIPKDNSLQSETVQYKRGVCQQFCLPSHTVDPSEWAEEELGFDLDREVYPLVVHAVVDEGDEYFGHCHVLLGTFEKHTDGTFCVKPLKQKQVVDGVSYLLQEIYGIENKYNTQDSKVAEDEVSDNSAECVVCLSDVRDTLILPCRHLCLCNTCADTLRYQANNCPICRLPFRALLQIRAMRKKLGPLSPTSFNPIISSQTSDSEEHPSSENIPPGYEVVSLLEALNGPLTPSPAVPPLHVLGDGHLSGMLPSYGSDGHLPPVRTISPLDRLSDSSSQGLKLKKSLSKSTSQNSSVLHEEEDEHSCSESETQLSQRPSVQHLGEECGVTPESENLTLSSSGAIDQSSCTGTPLSSTISSPEGPASSSLAQSVMSMASSQISTDTVSSMSGSYIAPGTEEEGEALSSPQPASRAPSEEGEGLPAESPDSNFAGLPAGEQDAEGNDVIEEEDGSPTQEGQRTCAFLGMECDNNNDFDIASVKALDNKLCSEVCLPGAWQADDNAVSRNAQRRRLSSSSLEDSETRPCVWGPLAV

SEQ ID NO: 35733 - protein, 657 aa, Homo sapiens
MGALTSRQHAGVEEVDIPSNSVYRYPPKSGSYFASHFIMGGEKFDSTHPEGYLFGENSDLNFLGNRPVVFPYAAPPPQEPVKTLRSLVNIRKDTLRLVKCAEEVKSPGEEASKAKVHYNVEFTFDTDARVAITIYYQATEEFQNGIASYIPKDNSLQSETVQYKRGVCQQFCLPSHTVDPSEWAEEELGFDLDREVYPLVVHAVVDEGDEYFGHCHVLLGTFEKHTDGTFCVKPLKQKQVVDGVSYLLQEIYGIENKYNTQDSKVAEDEVSDNSAECVVCLSDVRDTLILPCRHLCLCNTCADTLRYQANNCPICRLPFRALLQIRAMRKKLGPLSPTSFNPIISSQTSDSEEHPSSENIPPGYEVVSLLEALNGPLTPSPAVPPLHVLGDGHLSGMLPSYGSDGHLPPVRTISPLDRLSDSSSQGLKLKKSLSKSTSQNSSVLHEEEDEHSCSESETQLSQRPSVQHLGEECGVTPESENLTLSSSGAIDQSSCTGTPLSSTISSPEGPASSSLAQSVMSMASSQISTDTVSSMSGSYIAPGTEEEGEALSSPQPASRAPSEEGEGNDVIEEEDGSPTQEGQRTCAFLGMECDNNNDFDIASVKALDNKLCSEVCLPGAWQADDNAVSRNAQRRRLSSSSLEDSETRPCVWGPLAV

SEQ ID NO: 35734 - protein, 1651 aa, Homo sapiens
MKWKHVPFLVMISLLSLSPNHLFLAQLIPDPEDVERGNDHGTPIPTSDNDDNSLGYTGSRLRQEDFPPRIVEHPSDLIVSKGEPATLNCKAEGRPTPTIEWYKGGERVETDKDDPRSHRMLLPSGSLFFLRIVHGRKSRPDEGVYVCVARNYLGEAVSHNASLEVAILRDDFRQNPSDVMVAVGEPAVMECQPPRGHPEPTISWKKDGSPLDDKDERITIRGGKLMITYTRKSDAGKYVCVGTNMVGERESEVAELTVLERPSFVKRPSNLAVTVDDSAEFKCEARGDPVPTVRWRKDDGELPKSRYEIRDDHTLKIRKVTAGDMGSYTCVAENMVGKAEASATLTVQEPPHFVVKPRDQVVALGRTVTFQCEATGNPQPAIFWRREGSQNLLFSYQPPQSSSRFSVSQTGDLTITNVQRSDVGYYICQTLNVAGSIITKAYLEVTDVIADRPPPVIRQGPVNQTVAVDGTFVLSCVATGSPVPTILWRKDGVLVSTQDSRIKQLENGVLQIRYAKLGDTGRYTCIASTPSGEATWSAYIEVQEFGVPVQPPRPTDPNLIPSAPSKPEVTDVSRNTVTLSWQPNLNSGATPTSYIIEAFSHASGSSWQTVAENVKTETSAIKGLKPNAIYLFLVRAANAYGISDPSQISDPVKTQDVLPTSQGVDHKQVQRELGNAVLHLHNPTVLSSSSIEVHWTVDQQSQYIQGYKILYRPSGANHGESDWLVFEVRTPAKNSVVIPDLRKGVNYEIKARPFFNEFQGADSEIKFAKTLEEAPSAPPQGVTVSKNDGNGTAILVSWQPPPEDTQNGMVQEYKVWCLGNETRYHINKTVDGSTFSVVIPFLVPGIRYSVEVAASTGAGSGVKSEPQFIQLDAHGNPVSPEDQVSLAQQISDVVKQPAFIAGIGAACWIILMVFSIWLYRHRKKRNGLTSTYAGIRKVPSFTFTPTVTYQRGGEAVSSGGRPGLLNISEPAAQPWLADTWPNTGNNHNDCSISCCTAGNGNSDSNLTTYSRPADCIANYNNQLDNKQTNLMLPESTVYGDVDLSNKINEMKTFNSPNLKDGRFVNPSGQPTPYATTQLIQSNLSNNMNNGSGDSGEKHWKPLGQQKQEVAPVQYNIVEQNKLNKDYRANDTVPPTIPYNQSYDQNTGGSYNSSDRGSSTSGSQGHKKGARTPKVPKQGGMNWADLLPPPPAHPPPHSNSEEYNISVDESYDQEMPCPVPPARMYLQQDELEEEEDERGPTPPVRGAASSPAAVSYSHQSTATLTPSPQEELQPMLQDCPEETGHMQHQPDRRRQPVSPPPPPRPISPPHTYGYISGPLVSDMDTDAPEEEEDEADMEVAKMQTRRLLLRGLEQTPASSVGDLESSVTGSMINGWGSASEEDNISSGRSSVSSSDGSFFTDADFAQAVAAAAEYAGLKVARRQMQDAAGRRHFHASQCPRPTSPVSTDSNMSAAVMQKTRPAKKLKHQPGHLRRETYTDDLPPPPVPPPAIKSPTAQSKTQLEVRPVVVPKLPSMDARTDRSSDRKGSSYKGREVLDGRQVVDMRTNPGDPREAQEQQNDGKGRGNKAAKRDLPPAKTHLIQEDILPYCRPTFPTSNNPRDPSSSSSMSSRGSGSRQREQANVGRRNIAEMQVLGGYERGEDNNEELEETES

SEQ ID NO: 35735 - protein, 1655 aa, Homo sapiens
MKWKHVPFLVMISLLSLSPNHLFLAQLIPDPEDVERGNDHGTPIPTSDNDDNSLGYTGSRLRQEDFPPRIVEHPSDLIVSKGEPATLNCKAEGRPTPTIEWYKGGERVETDKDDPRSHRMLLPSGSLFFLRIVHGRKSRPDEGVYVCVARNYLGEAVSHNASLEVAILRDDFRQNPSDVMVAVGEPAVMECQPPRGHPEPTISWKKDGSPLDDKDERITIRGGKLMITYTRKSDAGKYVCVGTNMVGERESEVAELTVLERPSFVKRPSNLAVTVDDSAEFKCEARGDPVPTVRWRKDDGELPKSRYEIRDDHTLKIRKVTAGDMGSYTCVAENMVGKAEASATLTVQEPPHFVVKPRDQVVALGRTVTFQCEATGNPQPAIFWRREGSQNLLFSYQPPQSSSRFSVSQTGDLTITNVQRSDVGYYICQTLNVAGSIITKAYLEVTDVIADRPPPVIRQGPVNQTVAVDGTFVLSCVATGSPVPTILWRKDGVLVSTQDSRIKQLENGVLQIRYAKLGDTGRYTCIASTPSGEATWSAYIEVQGKVNEFGVPVQPPRPTDPNLIPSAPSKPEVTDVSRNTVTLSWQPNLNSGATPTSYIIEAFSHASGSSWQTVAENVKTETSAIKGLKPNAIYLFLVRAANAYGISDPSQISDPVKTQDVLPTSQGVDHKQVQRELGNAVLHLHNPTVLSSSSIEVHWTVDQQSQYIQGYKILYRPSGANHGESDWLVFEVRTPAKNSVVIPDLRKGVNYEIKARPFFNEFQGADSEIKFAKTLEEAPSAPPQGVTVSKNDGNGTAILVSWQPPPEDTQNGMVQEYKVWCLGNETRYHINKTVDGSTFSVVIPFLVPGIRYSVEVAASTGAGSGVKSEPQFIQLDAHGNPVSPEDQVSLAQQISDVVKQPAFIAGIGAACWIILMVFSIWLYRHRKKRNGLTSTYAGIRKVPSFTFTPTVTYQRGGEAVSSGGRPGLLNISEPAAQPWLADTWPNTGNNHNDCSISCCTAGNGNSDSNLTTYSRPADCIANYNNQLDNKQTNLMLPESTVYGDVDLSNKINEMKTFNSPNLKDGRFVNPSGQPTPYATTQLIQSNLSNNMNNGSGDSGEKHWKPLGQQKQEVAPVQYNIVEQNKLNKDYRANDTVPPTIPYNQSYDQNTGGSYNSSDRGSSTSGSQGHKKGARTPKVPKQGGMNWADLLPPPPAHPPPHSNSEEYNISVDESYDQEMPCPVPPARMYLQQDELEEEEDERGPTPPVRGAASSPAAVSYSHQSTATLTPSPQEELQPMLQDCPEETGHMQHQPDRRRQPVSPPPPPRPISPPHTYGYISGPLVSDMDTDAPEEEEDEADMEVAKMQTRRLLLRGLEQTPASSVGDLESSVTGSMINGWGSASEEDNISSGRSSVSSSDGSFFTDADFAQAVAAAAEYAGLKVARRQMQDAAGRRHFHASQCPRPTSPVSTDSNMSAAVMQKTRPAKKLKHQPGHLRRETYTDDLPPPPVPPPAIKSPTAQSKTQLEVRPVVVPKLPSMDARTDRSSDRKGSSYKGREVLDGRQVVDMRTNPGDPREAQEQQNDGKGRGNKAAKRDLPPAKTHLIQEDILPYCRPTFPTSNNPRDPSSSSSMSSRGSGSRQREQANVGRRNIAEMQVLGGYERGEDNNEELEETES

SEQ ID NO: 35736 - protein, 1615 aa, Homo sapiens
MIAEPAHFYLFGLICLCSGSRLRQEDFPPRIVEHPSDLIVSKGEPATLNCKAEGRPTPTIEWYKGGERVETDKDDPRSHRMLLPSGSLFFLRIVHGRKSRPDEGVYVCVARNYLGEAVSHNASLEVAILRDDFRQNPSDVMVAVGEPAVMECQPPRGHPEPTISWKKDGSPLDDKDERITIRGGKLMITYTRKSDAGKYVCVGTNMVGERESEVAELTVLERPSFVKRPSNLAVTVDDSAEFKCEARGDPVPTVRWRKDDGELPKSRYEIRDDHTLKIRKVTAGDMGSYTCVAENMVGKAEASATLTVQVGSEPPHFVVKPRDQVVALGRTVTFQCEATGNPQPAIFWRREGSQNLLFSYQPPQSSSRFSVSQTGDLTITNVQRSDVGYYICQTLNVAGSIITKAYLEVTDVIADRPPPVIRQGPVNQTVAVDGTFVLSCVATGSPVPTILWRKDGVLVSTQDSRIKQLENGVLQIRYAKLGDTGRYTCIASTPSGEATWSAYIEVQEFGVPVQPPRPTDPNLIPSAPSKPEVTDVSRNTVTLSWQPNLNSGATPTSYIIEAFSHASGSSWQTVAENVKTETSAIKGLKPNAIYLFLVRAANAYGISDPSQISDPVKTQDVLPTSQGVDHKQVQRELGNAVLHLHNPTVLSSSSIEVHWTVDQQSQYIQGYKILYRPSGANHGESDWLVFEVRTPAKNSVVIPDLRKGVNYEIKARPFFNEFQGADSEIKFAKTLEEAPSAPPQGVTVSKNDGNGTAILVSWQPPPEDTQNGMVQEYKVWCLGNETRYHINKTVDGSTFSVVIPFLVPGIRYSVEVAASTGAGSGVKSEPQFIQLDAHGNPVSPEDQVSLAQQISDVVKQPAFIAGIGAACWIILMVFSIWLYRHRKKRNGLTSTYAGIRKVPSFTFTPTVTYQRGGEAVSSGGRPGLLNISEPAAQPWLADTWPNTGNNHNDCSISCCTAGNGNSDSNLTTYSRPADCIANYNNQLDNKQTNLMLPESTVYGDVDLSNKINEMKTFNSPNLKDGRFVNPSGQPTPYATTQLIQSNLSNNMNNGSGDSGEKHWKPLGQQKQEVAPVQYNIVEQNKLNKDYRANDTVPPTIPYNQSYDQNTGGSYNSSDRGSSTSGSQGHKKGARTPKVPKQGGMNWADLLPPPPAHPPPHSNSEEYNISVDESYDQEMPCPVPPARMYLQQDELEEEEDERGPTPPVRGAASSPAAVSYSHQSTATLTPSPQEELQPMLQDCPEETGHMQHQPDRRRQPVSPPPPPRPISPPHTYGYISGPLVSDMDTDAPEEEEDEADMEVAKMQTRRLLLRGLEQTPASSVGDLESSVTGSMINGWGSASEEDNISSGRSSVSSSDGSFFTDADFAQAVAAAAEYAGLKVARRQMQDAAGRRHFHASQCPRPTSPVSTDSNMSAAVMQKTRPAKKLKHQPGHLRRETYTDDLPPPPVPPPAIKSPTAQSKTQLEVRPVVVPKLPSMDARTDRSSDRKGSSYKGREVLDGRQVVDMRTNPGDPREAQEQQNDGKGRGNKAAKRDLPPAKTHLIQEDILPYCRPTFPTSNNPRDPSSSSSMSSRGSGSRQREQANVGRRNIAEMQVLGGYERGEDNNEELEETES

SEQ ID NO: 35737 - protein, 1612 aa, Homo sapiens
MIAEPAHFYLFGLICLCSGSRLRQEDFPPRIVEHPSDLIVSKGEPATLNCKAEGRPTPTIEWYKGGERVETDKDDPRSHRMLLPSGSLFFLRIVHGRKSRPDEGVYVCVARNYLGEAVSHNASLEVAILRDDFRQNPSDVMVAVGEPAVMECQPPRGHPEPTISWKKDGSPLDDKDERITIRGGKLMITYTRKSDAGKYVCVGTNMVGERESEVAELTVLERPSFVKRPSNLAVTVDDSAEFKCEARGDPVPTVRWRKDDGELPKSRYEIRDDHTLKIRKVTAGDMGSYTCVAENMVGKAEASATLTVQEPPHFVVKPRDQVVALGRTVTFQCEATGNPQPAIFWRREGSQNLLFSYQPPQSSSRFSVSQTGDLTITNVQRSDVGYYICQTLNVAGSIITKAYLEVTDVIADRPPPVIRQGPVNQTVAVDGTFVLSCVATGSPVPTILWRKDGVLVSTQDSRIKQLENGVLQIRYAKLGDTGRYTCIASTPSGEATWSAYIEVQEFGVPVQPPRPTDPNLIPSAPSKPEVTDVSRNTVTLSWQPNLNSGATPTSYIIEAFSHASGSSWQTVAENVKTETSAIKGLKPNAIYLFLVRAANAYGISDPSQISDPVKTQDVLPTSQGVDHKQVQRELGNAVLHLHNPTVLSSSSIEVHWTVDQQSQYIQGYKILYRPSGANHGESDWLVFEVRTPAKNSVVIPDLRKGVNYEIKARPFFNEFQGADSEIKFAKTLEEAPSAPPQGVTVSKNDGNGTAILVSWQPPPEDTQNGMVQEYKVWCLGNETRYHINKTVDGSTFSVVIPFLVPGIRYSVEVAASTGAGSGVKSEPQFIQLDAHGNPVSPEDQVSLAQQISDVVKQPAFIAGIGAACWIILMVFSIWLYRHRKKRNGLTSTYAGIRKVPSFTFTPTVTYQRGGEAVSSGGRPGLLNISEPAAQPWLADTWPNTGNNHNDCSISCCTAGNGNSDSNLTTYSRPADCIANYNNQLDNKQTNLMLPESTVYGDVDLSNKINEMKTFNSPNLKDGRFVNPSGQPTPYATTQLIQSNLSNNMNNGSGDSGEKHWKPLGQQKQEVAPVQYNIVEQNKLNKDYRANDTVPPTIPYNQSYDQNTGGSYNSSDRGSSTSGSQGHKKGARTPKVPKQGGMNWADLLPPPPAHPPPHSNSEEYNISVDESYDQEMPCPVPPARMYLQQDELEEEEDERGPTPPVRGAASSPAAVSYSHQSTATLTPSPQEELQPMLQDCPEETGHMQHQPDRRRQPVSPPPPPRPISPPHTYGYISGPLVSDMDTDAPEEEEDEADMEVAKMQTRRLLLRGLEQTPASSVGDLESSVTGSMINGWGSASEEDNISSGRSSVSSSDGSFFTDADFAQAVAAAAEYAGLKVARRQMQDAAGRRHFHASQCPRPTSPVSTDSNMSAAVMQKTRPAKKLKHQPGHLRRETYTDDLPPPPVPPPAIKSPTAQSKTQLEVRPVVVPKLPSMDARTDRSSDRKGSSYKGREVLDGRQVVDMRTNPGDPREAQEQQNDGKGRGNKAAKRDLPPAKTHLIQEDILPYCRPTFPTSNNPRDPSSSSSMSSRGSGSRQREQANVGRRNIAEMQVLGGYERGEDNNEELEETES

SEQ ID NO: 35738 - protein, 1606 aa, Homo sapiens
MIAEPAHFYLFGLICLCSGSRLRQEDFPPRIVEHPSDLIVSKGEPATLNCKAEGRPTPTIEWYKGGERVETDKDDPRSHRMLLPSGSLFFLRIVHGRKSRPDEGVYVCVARNYLGEAVSHNASLEVAILRDDFRQNPSDVMVAVGEPAVMECQPPRGHPEPTISWKKDGSPLDDKDERITIRGGKLMITYTRKSDAGKYVCVGTNMVGERESEVAELTVLERPSFVKRPSNLAVTVDDSAEFKCEARGDPVPTVRWRKDDGELPKSRYEIRDDHTLKIRKVTAGDMGSYTCVAENMVGKAEASATLTVQVGSEPPHFVVKPRDQVVALGRTVTFQCEATGNPQPAIFWRREGSQNLLFSYQPPQSSSRFSVSQTGDLTITNVQRSDVGYYICQTLNVAGSIITKAYLEVTDVIADRPPPVIRQGPVNQTVAVDGTFVLSCVATGSPVPTILWRKDGVLVSTQDSRIKQLENGVLQIRYAKLGDTGRYTCIASTPSGEATWSAYIEVQEFGVPVQPPRPTDPNLIPSAPSKPEVTDVSRNTVTLSWQPNLNSGATPTSYIIEAFSHASGSSWQTVAENVKTETSAIKGLKPNAIYLFLVRAANAYGISDPSQISDPVKTQDVLPTSQGVDHKQVQRELGNAVLHLHNPTVLSSSSIEVHWTVDQQSQYIQGYKILYRPSGANHGESDWLVFEVRTPAKNSVVIPDLRKGVNYEIKARPFFNEFQGADSEIKFAKTLEEAPSAPPQGVTVSKNDGNGTAILVSWQPPPEDTQNGMVQEYKVWCLGNETRYHINKTVDGSTFSVVIPFLVPGIRYSVEVAASTGAGSGVKSEPQFIQLDAHGNPVSPEDQVSLAQQISDVVKQPAFIAGIGAACWIILMVFSIWLYRHRKKRNGLTSTYAGIRKVTYQRGGEAVSSGGRPGLLNISEPAAQPWLADTWPNTGNNHNDCSISCCTAGNGNSDSNLTTYSRPADCIANYNNQLDNKQTNLMLPESTVYGDVDLSNKINEMKTFNSPNLKDGRFVNPSGQPTPYATTQLIQSNLSNNMNNGSGDSGEKHWKPLGQQKQEVAPVQYNIVEQNKLNKDYRANDTVPPTIPYNQSYDQNTGGSYNSSDRGSSTSGSQGHKKGARTPKVPKQGGMNWADLLPPPPAHPPPHSNSEEYNISVDESYDQEMPCPVPPARMYLQQDELEEEEDERGPTPPVRGAASSPAAVSYSHQSTATLTPSPQEELQPMLQDCPEETGHMQHQPDRRRQPVSPPPPPRPISPPHTYGYISGPLVSDMDTDAPEEEEDEADMEVAKMQTRRLLLRGLEQTPASSVGDLESSVTGSMINGWGSASEEDNISSGRSSVSSSDGSFFTDADFAQAVAAAAEYAGLKVARRQMQDAAGRRHFHASQCPRPTSPVSTDSNMSAAVMQKTRPAKKLKHQPGHLRRETYTDDLPPPPVPPPAIKSPTAQSKTQLEVRPVVVPKLPSMDARTDRSSDRKGSSYKGREVLDGRQVVDMRTNPGDPREAQEQQNDGKGRGNKAAKRDLPPAKTHLIQEDILPYCRPTFPTSNNPRDPSSSSSMSSRGSGSRQREQANVGRRNIAEMQVLGGYERGEDNNEELEETES

SEQ ID NO: 35739 - protein, 1551 aa, Homo sapiens
MIAEPAHFYLFGLICLCSGSRLRQEDFPPRIVEHPSDLIVSKGEPATLNCKAEGRPTPTIEWYKGGERVETDKDDPRSHRMLLPSGSLFFLRIVHGRKSRPDEGVYVCVARNYLGEAVSHNASLEVAILRDDFRQNPSDVMVAVGEPAVMECQPPRGHPEPTISWKKDGSPLDDKDERITIRGGKLMITYTRKSDAGKYVCVGTNMVGERESEVAELTVLERPSFVKRPSNLAVTVDDSAEFKCEARGDPVPTVRWRKDDGELPKSRYEIRDDHTLKIRKVTAGDMGSYTCVAENMVGKAEASATLTVQVGSEPPHFVVKPRDQVVALGRTVTFQCEATGNPQPAIFWRREGSQNLLFSYQPPQSSSRFSVSQTGDLTITNVQRSDVGYYICQTLNVAGSIITKAYLEVTDVIADRPPPVIRQGPVNQTVAVDGTFVLSCVATGSPVPTILWRKDGVLVSTQDSRIKQLENGVLQIRYAKLGDTGRYTCIASTPSGEATWSAYIEVQEFGVPVQPPRPTDPNLIPSAPSKPEVTDVSRNTVTLSWQPNLNSGATPTSYIIEAFSHASGSSWQTVAENVKTETSAIKGLKPNAIYLFLVRAANAYGISDPSQISDPVKTQDVLPTSQGVDHKQVQRELGNAVLHLHNPTVLSSSSIEVHWTVDQQSQYIQGYKILYRPSGANHGESDWLVFEVRTPAKNSVVIPDLRKGVNYEIKARPFFNEFQGADSEIKFAKTLEEAPSAPPQGVTVSKNDGNGTAILVSWQPPPEDTQNGMVQEYKVWCLGNETRYHINKTVDGSTFSVVIPFLVPGIRYSVEVAASTGAGSGVKSEPQFIQLDAHGNPVSPEDQVSLAQQISDVVKQPAFIAGIGAACWIILMVFSIWLYRHRKKRNGLTSTYAGIRKVTYQRGGEAVSSGGRPGLLNISEPAAQPWLADTWPNTGNNHNDCSISCCTAGNGNSDSNLTTYSRPGQPTPYATTQLIQSNLSNNMNNGSGDSGEKHWKPLGQQKQEVAPVQYNIVEQNKLNKDYRANDTVPPTIPYNQSYDQNTGGSYNSSDRGSSTSGSQGHKKGARTPKVPKQGGMNWADLLPPPPAHPPPHSNSEEYNISVDESYDQEMPCPVPPARMYLQQDELEEEEDERGPTPPVRGAASSPAAVSYSHQSTATLTPSPQEELQPMLQDCPEETGHMQHQPDRRRQPVSPPPPPRPISPPHTYGYISGPLVSDMDTDAPEEEEDEADMEVAKMQTRRLLLRGLEQTPASSVGDLESSVTGSMINGWGSASEEDNISSGRSSVSSSDGSFFTDADFAQAVAAAAEYAGLKVARRQMQDAAGRRHFHASQCPRPTSPVSTDSNMSAAVMQKTRPAKKLKHQPGHLRRETYTDDLPPPPVPPPAIKSPTAQSKTQLEVRPVVVPKLPSMDARTDRSSDRKGSSYKGREVLDGRQVVDMRTNPGDPREAQEQQNDGKGRGNKAAKRDLPPAKTHLIQEDILPYCRPTFPTSNNPRDPSSSSSMSSRGSGSRQREQANVGRRNIAEMQVLGGYERGEDNNEELEETES

SEQ ID NO: 35740 - protein, 523 aa, Homo sapiens
MESAPAAPDPAASEPGSSGADAAAGSRETPLNQESARKSEPPAPVRRQSYSSTSRGISVTKKTHTSQIEIIPCKICGDKSSGIHYGVITCEGCKGFFRRSQQSNATYSCPRQKNCLIDRTSRNRCQHCRLQKCLAVGMSRDAVKFGRMSKKQRDSLYAEVQKHRMQQQQRDHQQQPGEAEPLTPTYNISANGLTELHDDLSNYIDGHTPEGSKADSAVSSFYLDIQPSPDQSGLDINGIKPEPICDYTPASGFFPYCSFTNGETSPTVSMAELEHLAQNISKSHLETCQYLREELQQITWQTFLQEEIENYQNKQREVMWQLCAIKITEAIQYVVEFAKRIDGFMELCQNDQIVLLKAGSLEVVFIRMCRAFDSQNNTVYFDGKYASPDVFKSLGCEDFISFVFEFGKSLCSMHLTEDEIALFSAFVLMSADRSWLQEKVKIEKLQQKIQLALQHVLQKNHREDGILTKLICKVSTLRALCGRHTEKLMAFKAIYPDIVRLHFPPLYKELFTSEFEPAMQIDG

SEQ ID NO: 35741 - protein, 556 aa, Homo sapiens
MNEGAPGDSDLETEARVPWSIMGHCLRTGQARMSATPTPAGEGARRDELFGILQILHQCILSSGDAFVLTGVCCSWRQNGKPPYSQKEDKEVQTGYMNAQIEIIPCKICGDKSSGIHYGVITCEGCKGFFRRSQQSNATYSCPRQKNCLIDRTSRNRCQHCRLQKCLAVGMSRDAVKFGRMSKKQRDSLYAEVQKHRMQQQQRDHQQQPGEAEPLTPTYNISANGLTELHDDLSNYIDGHTPEGSKADSAVSSFYLDIQPSPDQSGLDINGIKPEPICDYTPASGFFPYCSFTNGETSPTVSMAELEHLAQNISKSHLETCQYLREELQQITWQTFLQEEIENYQNKQREVMWQLCAIKITEAIQYVVEFAKRIDGFMELCQNDQIVLLKAGSLEVVFIRMCRAFDSQNNTVYFDGKYASPDVFKSLGCEDFISFVFEFGKSLCSMHLTEDEIALFSAFVLMSADRSWLQEKVKIEKLQQKIQLALQHVLQKNHREDGILTKLICKVSTLRALCGRHTEKLMAFKAIYPDIVRLHFPPLYKELFTSEFEPAMQIDG

SEQ ID NO: 35742 - protein, 540 aa, Homo sapiens
MESAPAAPDPAASEPGSSGADAAAGSRETPLNQESARSSSTCSSLSRLFWSQLEHINWDGATAKNFINLREFFSFLLPALRKSQIEIIPCKICGDKSSGIHYGVITCEGCKGFFRRSQQSNATYSCPRQKNCLIDRTSRNRCQHCRLQKCLAVGMSRDAVKFGRMSKKQRDSLYAEVQKHRMQQQQRDHQQQPGEAEPLTPTYNISANGLTELHDDLSNYIDGHTPEGSKADSAVSSFYLDIQPSPDQSGLDINGIKPEPICDYTPASGFFPYCSFTNGETSPTVSMAELEHLAQNISKSHLETCQYLREELQQITWQTFLQEEIENYQNKQREVMWQLCAIKITEAIQYVVEFAKRIDGFMELCQNDQIVLLKAGSLEVVFIRMCRAFDSQNNTVYFDGKYASPDVFKSLGCEDFISFVFEFGKSLCSMHLTEDEIALFSAFVLMSADRSWLQEKVKIEKLQQKIQLALQHVLQKNHREDGILTKLICKVSTLRALCGRHTEKLMAFKAIYPDIVRLHFPPLYKELFTSEFEPAMQIDG

SEQ ID NO: 35743 - protein, 468 aa, Homo sapiens
MMYFVIAAMKSQIEIIPCKICGDKSSGIHYGVITCEGCKGFFRRSQQSNATYSCPRQKNCLIDRTSRNRCQHCRLQKCLAVGMSRDAVKFGRMSKKQRDSLYAEVQKHRMQQQQRDHQQQPGEAEPLTPTYNISANGLTELHDDLSNYIDGHTPEGSKADSAVSSFYLDIQPSPDQSGLDINGIKPEPICDYTPASGFFPYCSFTNGETSPTVSMAELEHLAQNISKSHLETCQYLREELQQITWQTFLQEEIENYQNKQREVMWQLCAIKITEAIQYVVEFAKRIDGFMELCQNDQIVLLKAGSLEVVFIRMCRAFDSQNNTVYFDGKYASPDVFKSLGCEDFISFVFEFGKSLCSMHLTEDEIALFSAFVLMSADRSWLQEKVKIEKLQQKIQLALQHVLQKNHREDGILTKLICKVSTLRALCGRHTEKLMAFKAIYPDIVRLHFPPLYKELFTSEFEPAMQIDG

SEQ ID NO: 35744 - protein, 592 aa, Homo sapiens
MKRSKELITKNHSQEETSILRCWKCRKCIASSGCFMEYLENQVIKDKDDSVDAQNICHVWHMNVEALPEWISCLIQKAQWTVGKLNCPFCGARLGGFNFVSTPKCSCGQLAAVHLSKSRTDYQPTQAGRLMRPSVKYLSHPRVQSGCDKEALLTGGGSENRNHRLLNMARNNNDPGRLTEALCLEVRPTYFEMKNEKLLSKASEPKYQLFVPQLVTGRCATRAFHRKSHSLDLNISEKLTLLPTLYEIHSKTTAYSRLNETQPIDLSGLPLQSSKNSYSFQNPSSFDPSMLLQRFSVAPHETQTQRGGEFQCGLEAASVYSDHTNTNNLTFLMDLPSAGRSMPEASDQEEHLSPLDFLHSANFSLGSINQRLNKRERSKLKNLRRKQRRRERWLQKQGKYSGVGLLDHMTLNNEMSTDEDNEYAEEKDSYICAVCLDVYFNPYMCYPCHHIFCEPCLRTLAKDNPSSTPCPLCRTIISRVFFQTELNNATKTFFTKEYLKIKQSFQKSNSAKWPLPSCRKAFHLFGGFRRHAAPVTRRQFPHGAHRMDYLHFEDDSRGWWFDMDMVIIYIYSVNWVIGFIVFCFLCYFFFPF

SEQ ID NO: 35745 - protein, 416 aa, Homo sapiens
MKRSKELITKNHSQEETSILRCWKCRKCIASSGCFMEYLENQVIKDKDDSVDAQNICHVWHMNVEALPEWISCLIQKAQWTVGKLNCPFCGARLGGFNFVSTPKCSCGQLAAVHLSKSRTDYQPTQAGRLMRPSVKYLSHPRVQSGCDKEALLTGGGSENRNHRLLNMARNNNDPGRLTEALCLEVRPTYFEMKNEKLLSKASEPKYQLFVPQLVTGRCATRAFHRKSHSLDLNISEKLTLLPTLYEIHSKTTAYSRLNETQPIDLSGLPLQSSKNSYSFQNPSSFDPSMLLQRFSVAPHETQTQRGGEFQCGLEAASVYSDHTNTNNLTFLMDLPSAGRSMPEASDQEEHLSPLDFLHSANFSLGSINQRLNKRERSKLKNLRRKQRRRERWLQKQGKYSGVGLLDHMVSIYLLI

SEQ ID NO: 35746 - protein, 96 aa, Homo sapiens
MKRSKELITKNHSQEETSILRCWKCRKCIASSGCFMEYLENQVIKDKDDSVDAQNICHVWHMNVEALPEWISCLIQKGKYSGVGLLDHMVSIYLLI

SEQ ID NO: 35747 - protein, 1378 aa, Homo sapiens
MSLLMFTQLLLCGFLYVRVDGSRLRQEDFPPRIVEHPSDVIVSKGEPTTLNCKAEGRPTPTIEWYKDGERVETDKDDPRSHRMLLPSGSLFFLRIVHGRRSKPDEGSYVCVARNYLGEAVSRNASLEVALLRDDFRQNPTDVVVAAGEPAILECQPPRGHPEPTIYWKKDKVRIDDKEERISIRGGKLMISNTRKSDAGMYTCVGTNMVGERDSDPAELTVFERPTFLRRPINQVVLEEEAVEFRCQVQGDPQPTVRWKKDDADLPRGRYDIKDDYTLRIKKTMSTDEGTYMCIAENRVGKMEASATLTVRAPPQFVVRPRDQIVAQGRTVTFPCETKGNPQPAVFWQKEGSQNLLFPNQPQQPNSRCSVSPTGDLTITNIQRSDAGYYICQALTVAGSILAKAQLEVTDVLTDRPPPIILQGPANQTLAVDGTALLKCKATGDPLPVISWLKEGFTFPGRDPRATIQEQGTLQIKNLRISDTGTYTCVATSSSGETSWSAVLDVTESGATISKNYDLSDLPGPPSKPQVTDVTKNSVTLSWQPGTPGTLPASAYIIEAFSQSVSNSWQTVANHVKTTLYTVRGLRPNTIYLFMVRAINPQGLSDPSPMSDPVRTQDISPPAQGVDHRQVQKELGDVLVRLHNPVVLTPTTVQVTWTVDRQPQFIQGYRVMYRQTSGLQATSSWQNLDAKVPTERSAVLVNLKKGVTYEIKVRPYFNEFQGMDSESKTVRTTEEAPSAPPQSVTVLTVGSYNSTSISVSWDPPPPDHQNGIIQEYKIWCLGNETRFHINKTVDAAIRSVIIGGLFPGIQYRVEVAASTSAGVGVKSEPQPIIIGRRNEVVITENNNSITEQITDVVKQPAFIAGIGGACWVILMGFSIWLYWRRKKRKGLSNYAVTFQRGDGGLMSNGSRPGLLNAGDPSYPWLADSWPATSLPVNNSNSGPNEIGNFGRGDVLPPVPGQGDKTATMLSDGAIYSSIDFTTKTSYNSSSQITQATPYATTQILHSNSIHELAVDLPDPQWKSSIQQKTDLMGFGYSLPDQNKGNNGGKGGKKKKNKNSSKPQKNNGSTWANVPLPPPPVQPLPGTELEHYAVEQQENGYDSDSWCPPLPVQTYLHQGLEDELEEDDDRVPTPPVRGVASSPAISFGQQSTATLTPSPREEMQPMLQAHLDELTRAYQFDIAKQTWHIQSNNQPPQPPVPPLGYVSGALISDLETDVADDDADDEEEALEIPRPLRALDQTPGSSMDNLDSSVTGKAFTSSQRPRPTSPFSTDSNTSAALSQSQRPRPTKKHKGGRMDQQPALPHRREGMTDEEALVPYSKPSFPSPGGHSSSGTASSKGSTGPRKTEVLRAGHQRNASDLLDIGYMGSNSQGQFTGEL

SEQ ID NO: 35748 - protein, 1185 aa, Homo sapiens
MSLLMFTQLLLCGFLYVRVDGSRLRQEDFPPRIVEHPSDVIVSKGEPTTLNCKAEGRPTPTIEWYKDGERVETDKDDPRSHRMLLPSGSLFFLRIVHGRRSKPDEGSYVCVARNYLGEAVSRNASLEVALLRDDFRQNPTDVVVAAGEPAILECQPPRGHPEPTIYWKKDKVRIDDKEERISIRGGKLMISNTRKSDAGMYTCVGTNMVGERDSDPAELTVFERPTFLRRPINQVVLEEEAVEFRCQVQGDPQPTVRWKKDDADLPRGRYDIKDDYTLRIKKTMSTDEGTYMCIAENRVGKMEASATLTVRAPPQFVVRPRDQIVAQGRTVTFPCETKGNPQPAVFWQKEGSQNLLFPNQPQQPNSRCSVSPTGDLTITNIQRSDAGYYICQALTVAGSILAKAQLEVTDVLTDRPPPIILQGPANQTLAVDGTALLKCKATGDPLPVISWLKEGFTFPGRDPRATIQEQGTLQIKNLRISDTGTYTCVATSSSGETSWSAVLDVTESGATISKNYDLSDLPGPPSKPQVTDVTKNSVTLSWQPGTPGTLPASAYIIEAFSQSVSNSWQTVANHVKTTLYTVRGLRPNTIYLFMVRAINPQGLSDPSPMSDPVRTQDISPPAQGVDHRQVQKELGDVLVRLHNPVVLTPTTVQVTWTVDRQPQFIQGYRVMYRQTSGLQATSSWQNLDAKVPTERSAVLVNLKKGVTYEIKVRPYFNEFQGMDSESKTVRTTEEAPSAPPQSVTVLTVGSYNSTSISVSWDPPPPDHQNGIIQEYKIWCLGNETRFHINKTVDAAIRSVIIGGLFPGIQYRVEVAASTSAGVGVKSEPQPIIIGRRNEVVITENNNSITEQITDVVKQPAFIAGIGGACWVILMGFSIWLYWRRKKRKGLSNYAVTFQRGDGGLMSNGSRPGLLNAGDPSYPWLADSWPATSLPVNNSNSGPNEIGNFGRGDVLPPVPGQGDKTATMLSDGAIYSSIDFTTKTSYNSSSQITQATPYATTQILHSNSIHELAVDLPDPQWKSSIQQKTDLMGFGYSLPDQNKGNNGGKGGKKKKNKNSSKPQKNNGSTWANVPLPPPPVQPLPGTELEHYAVEQQENGYDSDSWCPPLPVQTYLHQGLEDELEEDDDRVPTPPVRGVASSPAISFGQQSTATLTPSPREEMQPMLQAHLDELTRAYQFDIAKQTW

SEQ ID NO: 35749 - protein, 1394 aa, Homo sapiens
MARRHERVTRRMWTWAPGLLMMTVVFWGHQGNGQGQGSRLRQEDFPPRIVEHPSDVIVSKGEPTTLNCKAEGRPTPTIEWYKDGERVETDKDDPRSHRMLLPSGSLFFLRIVHGRRSKPDEGSYVCVARNYLGEAVSRNASLEVALLRDDFRQNPTDVVVAAGEPAILECQPPRGHPEPTIYWKKDKVRIDDKEERISIRGGKLMISNTRKSDAGMYTCVGTNMVGERDSDPAELTVFERPTFLRRPINQVVLEEEAVEFRCQVQGDPQPTVRWKKDDADLPRGRYDIKDDYTLRIKKTMSTDEGTYMCIAENRVGKMEASATLTVRAPPQFVVRPRDQIVAQGRTVTFPCETKGNPQPAVFWQKEGSQNLLFPNQPQQPNSRCSVSPTGDLTITNIQRSDAGYYICQALTVAGSILAKAQLEVTDVLTDRPPPIILQGPANQTLAVDGTALLKCKATGDPLPVISWLKEGFTFPGRDPRATIQEQGTLQIKNLRISDTGTYTCVATSSSGETSWSAVLDVTESGATISKNYDLSDLPGPPSKPQVTDVTKNSVTLSWQPGTPGTLPASAYIIEAFSQSVSNSWQTVANHVKTTLYTVRGLRPNTIYLFMVRAINPQGLSDPSPMSDPVRTQDISPPAQGVDHRQVQKELGDVLVRLHNPVVLTPTTVQVTWTVDRQPQFIQGYRVMYRQTSGLQATSSWQNLDAKVPTERSAVLVNLKKGVTYEIKVRPYFNEFQGMDSESKTVRTTEEAPSAPPQSVTVLTVGSYNSTSISVSWDPPPPDHQNGIIQEYKIWCLGNETRFHINKTVDAAIRSVIIGGLFPGIQYRVEVAASTSAGVGVKSEPQPIIIGRRNEVVITENNNSITEQITDVVKQPAFIAGIGGACWVILMGFSIWLYWRRKKRKGLSNYAVTFQRGDGGLMSNGSRPGLLNAGDPSYPWLADSWPATSLPVNNSNSGPNEIGNFGRGDVLPPVPGQGDKTATMLSDGAIYSSIDFTTKTSYNSSSQITQATPYATTQILHSNSIHELAVDLPDPQWKSSIQQKTDLMGFGYSLPDQNKGNNGGKGGKKKKNKNSSKPQKNNGSTWANVPLPPPPVQPLPGTELEHYAVEQQENGYDSDSWCPPLPVQTYLHQGLEDELEEDDDRVPTPPVRGVASSPAISFGQQSTATLTPSPREEMQPMLQAHLDELTRAYQFDIAKQTWHIQSNNQPPQPPVPPLGYVSGALISDLETDVADDDADDEEEALEIPRPLRALDQTPGSSMDNLDSSVTGKAFTSSQRPRPTSPFSTDSNTSAALSQSQRPRPTKKHKGGRMDQQPALPHRREGMTDEEALVPYSKPSFPSPGGHSSSGTASSKGSTGPRKTEVLRAGHQRNASDLLDIGYMGSNSQGQFTGEL

SEQ ID NO: 35750 - protein, 79 aa, Homo sapiens
MPVAVGPYGQSQPSCFDRVKMGFVMGCAVGMAAGALFGTFSCLRIGMRGRELMGGIGKTMMQSGGTFGTFMAIGMGIRC

SEQ ID NO: 35751 - protein, 59 aa, Homo sapiens
MPVAVGPYGQSQPSCFDRVKMGFVMGCAVGMAAGALFGTFSCLSSILVSSSGSECGVES

SEQ ID NO: 35752 - protein, 192 aa, Homo sapiens [sequence omitted]

SEQ ID NO: 35753 - protein, 166 aa, Homo sapiens
MSKLGRAARGLRKPERGVSINQFCKEFNERTKDIKEGIPLPTKILVKPDRTFEIKIGQPTVSYFLKAAAGIEKGARQTGKEVAGLVTLKHVYEIARIKAQDEAFALQDVPLSSVVRSIIGSARSLGIRVVKDLSSEELAAFQKERAIFLAAQKEADLAAQEEAAKK

SEQ ID NO: 35754 - protein, 181 aa, Homo sapiens
MSKLGRAARGLRKPEVGGVIRAIVRAGLAMPGPPLGPVLGQRGVSINQFCKEFNERTKDIKEGIPLPTKILVKPDRTFEIKIGQPTVSYFLKAAAGIEKGARQTGKEVAGLVTLKHVYEIARIKAQDEAFALQDVPLSSVVRSIIGSARSLGIRVVKERCSANVLRNGKISMKDPSGRSSV

SEQ ID NO: 35755 - protein, 428 aa, Homo sapiens
MGPPPGAGVSCRGGCGFSRLLAWCFLLALSPQAPGSRGAEAVWTAYLNVSWRVPHTGVNRTVWELSEEGVYGQDSPLEPVAGVLVPPDGPGALNACNPHTNFTVPTVWGSTVQVSWLALIQRGGGCTFADKIHLAYERGASGAVIFNFPGTRNEVIPMSHPGAVDIVAIMIGNLKGTKILQSIQRGIQVTMVIEVGKKHGPWVNHYSIFFVSVSFFIITAATVGYFIFYSARRLRNARAQSRKQRQLKADAKKAIGRLQLRTLKQGDKEIGPDGDSCAVCIELYKPNDLVRILTCNHIFHKTCVDPWLLEHRTCPMCKCDILKALGIEVDVEDGSVSLQVPVSNEISNSASSHEEDNRSETASSGYASVQGTDEPPLEEHVQSTNESLQLVNHEANSVAVDVIPHVDNPTFEEDETPNQETAVREIKS

SEQ ID NO: 35756 - protein, 402 aa, Homo sapiens
MNQENRSSFFWLLVIFTFLLKITASFSMSAYVTVTYYNETSNYTAIETCECGVYGLASPVANAMGVVGIPKNNNYQACDHNTEFSNTKKPWIALIERGNCTFSEKIQTAGRRNADAVVIYNAPETGNQTIQMANFGAVDIVAIMIGNLKGTKILQSIQRGIQVTMVIEVGKKHGPWVNHYSIFFVSVSFFIITAATVGYFIFYSARRLRNARAQSRKQRQLKADAKKAIGRLQLRTLKQGDKEIGPDGDSCAVCIELYKPNDLVRILTCNHIFHKTCVDPWLLEHRTCPMCKCDILKALGIEVDVEDGSVSLQVPVSNEISNSASSHEEDNRSETASSGYASVQGTDEPPLEEHVQSTNESLQLVNHEANSVAVDVIPHVDNPTFEEDETPNQETAVREIKS

SEQ ID NO: 35757 - protein, 1682 aa, Homo sapiens
MLASPEPKGLVPFTKESFELIKQHIAKTHNEDHEEEDLKPTPDLEVGKKLPFIYGNLSQGMVSEPLEDVDPYYYKKKNTFIVLNKNRTIFRFNAASILCTLSPFNCIRRTTIKVLVHPFFQLFILISVLIDCVFMSLTNLPKWRPVLENTLLGIYTFEILVKLFARGVWAGSFSFLGDPWNWLDFSVTVFEVIIRYSPLDFIPTLQTARTLRILKIIPLNQGLKSLVGVLIHCLKQLIGVIILTLFFLSIFSLIGMGLFMGNLKHKCFRWPQENENETLHNRTGNPYYIRETENFYYLEGERYALLCGNRTDAGQCPEGYVCVKAGINPDQGFTNFDSFGWALFALFRLMAQDYPEVLYHQILYASGKVYMIFFVVVSFLFSFYMASLFLGILAMAYEEEKQRVGEISKKIEPKFQQTGKELQEGNETDEAKTIQIEMKKRSPISTDTSLDVLEDATLRHKEELEKSKKICPLYWYKFAKTFLIWNCSPCWLKLKEFVHRIIMAPFTDLFLIICIILNVCFLTLEHYPMSKQTNTLLNIGNLVFIGIFTAEMIFKIIAMHPYGYFQVGWNIFDSMIVFHGLIELCLANVAGMALLRLFRMLRIFKLGKYWPTFQILMWSLSNSWVALKDLVLLLFTFIFFSAAFGMKLFGKNYEEFVCHIDKDCQLPRWHMHDFFHSFLNVFRILCGEWVETLWDCMEVAGQSWCIPFYLMVILIGNLLVLYLFLALVSSFSSCKDVTAEENNEAKNLQLAVARIKKGINYVLLKILCKTQNVPKDTMDHVNEVYVKEDISDHTLSELSNTQDFLKDKEKSSGTEKNATENESQSLIPSPSVSETVPIASGESDIENLDNKEIQSKSGDGGSKEKIKQSSSSECSTVDIAISEEEEMFYGGERSKHLKNGCRRGSSLGQISGASKKGKIWQNIRKTCCKIVENNWFKCFIGLVTLLSTGTLAFEDIYMDQRKTIKILLEYADMIFTYIFILEMLLKWMAYGFKAYFSNGWYRLDFVVVIVFCLSLIGKTREELKPLISMKFLRPLRVLSQFERMKVVVRALIKTTLPTLNVFLVCLMIWLIFSIMGVDLFAGRFYECIDPTSGERFPSSEVMNKSRCESLLFNESMLWENAKMNFDNVGNGFLSLLQVATFNGWITIMNSAIDSVAVNIQPHFEVNIYMYCYFINFIIFGVFLPLSMLITVIIDNFNKHKIKLGGSNIFITVKQRKQYRRLKKLMYEDSQRPVPRPLNKLQGFIFDVVTSQAFNVIVMVLICFQAIAMMIDTDVQSLQMSIALYWINSIFVMLYTMECILKLIAFRCFYFTIAWNIFDFMVVIFSITGLCLPMTVGSYLVPPSLVQLILLSRIIHMLRLGKGPKVFHNLMLPLMLSLPALLNIILLIFLVMFIYAVFGMYNFAYVKKEAGINDVSNFETFGNSMLCLFQVAIFAGWDGMLDAIFNSKWSDCDPDKINPGTQVRGDCGNPSVGIFYFVSYILISWLIIVNMYIVVVMEFLNIASKKKNKTLSEDDFRKFFQVWKRFDPDRTQYIDSSKLSDFAAALDPPLFMAKPNKGQLIALDLPMAVGDRIHCLDILLAFTKRVMGQDVRMEKVVSEIESGFLLANPFKITCEPITTTLKRKQEAVSATIIQRAYKNYRLRRNDKNTSDIHMIDGDRDVHATKEGAYFDKAKEKSPIQSQI

SEQ ID NO: 35758 - protein, 237 aa, Homo sapiens
MAMFRSLVASAQQRQPPAGPAGGDSGLEAQYTCPICLEVYHRPVAIGSCGHTFCGECLQPCLQVPSPLCPLCRLPFDPKKVDKATHVEKQLSSYKAPCRGCNKKVTLAKMRVHISSCLKVQEQMANCPKFVPVVPTSQPIPSNIPNRSTFACPYCGARNLDQQELVKHCVESHRSDPNRVVCPICSAMPWGDPSYKSANFLQHLLHRHKFSYDTFVDYSIDEEAAFQAALALSLSEN

SEQ ID NO: 35759 - protein, 128 aa, Homo sapiens
MRVHISSCLKVQEQMANCPKFVPVVPTSQPIPSNIPNRSTFACPYCGARNLDQQELVKHCVESHRSDPNRVVCPICSAMPWGDPSYKSANFLQHLLHRHKFSYDTFVDYSIDEEAAFQAALALSLSEN

SEQ ID NO: 35760 - protein, 156 aa, Homo sapiens
MAMFRSLVASAQQRQPPAGPAGGDSGLEAQYTCPICLEVQEQMANCPKFVPVVPTSQPIPSNIPNRSTFACPYCGARNLDQQELVKHCVESHRSDPNRVVCPICSAMPWGDPSYKSANFLQHLLHRHKFSYDTFVDYSIDEEAAFQAALALSLSEN

SEQ ID NO: 35761 - protein, 304 aa, Homo sapiens
MAEASAAGADSGAAVAAHRFFCHFCKGEVSPKLPEYICPRCESGFIEEVTDDSSFLGGGGSRIDNTTTTHFAELWGHLDHTMFFQDFRPFLSSSPLDQDNRANERGHQTHTDFWGARPPRLPLGRRYRSRGSSRPDRSPAIEGILQHIFAGFFANSAIPGSPHPFSWSGMLHSNPGDYAWGQTGLDAIVTQLLGQLENTGPPPADKEKITSLPTVTVTQEQVDMGLECPVCKEDYTVEEEVRQLPCNHFFHSSCIVPWLELHDTCPVCRKSLNGEDSTRQSQSTEASASNRFSNDSQLHDRWTF

SEQ ID NO: 35762 - protein, 192 aa, Homo sapiens
MASKGPSASASPENSSAGGPSGSSNGAGESGGQDSTFECNICLDTAKDAVISLCGHLFCWPCLHQWLETRPNRQVCPVCKAGISRDKVIPLYGRGSTGQQDPREKTPPRPQGQRPEPENRGGFQGFGFGDGGFQMSFGIGAFPFGIFATAFNINDGRPPPAVPGTPQYVDEQFLSRLFLFVALVIMFWLLIA

SEQ ID NO: 35763 - protein, 136 aa, Homo sapiens
MASKGPSASASPENSSAGGPSGSSNGAGESGGQDSTFECNICLDTAKDAVISLCGHLFCWPCLHQGFQGFGFGDGGFQMSFGIGAFPFGIFATAFNINDGRPPPAVPGTPQYVDEQFLSRLFLFVALVIMFWLLIA

SEQ ID NO: 35764 - protein, 329 aa, Homo sapiens
MPCPRPFWLRHSRAPQGSGPSSPGSLSAPRSPSRGEDQEEEEEEEGDGSPGSGPILPPASPVECLICVSSFDGVFKLPKRLDCGHVFCLECLARLSLATAGGGNAVACPVCRAPTRLAPRRGLPALPTQSGLLPRDARAPPSRQGSVRFDRRRGLLYLRPPPPPPGPRKARAPPPPPPLRLGRPLSRRLSLASPAWVFNAAVALAVLVAAGLVVSGVYIFFLIPHATSSGPPRPQLVALAPAPGFSWFPPRPPPGSPWAPAWTPRPTGPDLDTALPGTAEDALEPEAGPEDPAEAERTLDRRSDGTWGTEAGPGWAPWPRGARRLWGSQ

SEQ ID NO: 35765 - protein, 190 aa, Homo sapiens
MQLLVRVPSLPERGELDCNICYRPFNLGCRAPRRLPGTARARCGHTICTACLRELAARGDGGGAAARVVRLRRVVTCPFCRAPSQLPRGGLTEMALDSDLWSRLEEKARAKCERDEAGNPAKESSDADGEAEEEGESEKGAGPRSAGWRALRRLWDRVLGPARRWRRPLPSNVLYCAEIKDIGHLTRCTL

SEQ ID NO: 35766 - protein, 634 aa, Homo sapiens
MSGAIFGPLEGPSSLDAPSIHPLVCPLCHVQYERPCLLDCFHDFCAGCLRGRATDGRLTCPLCQHQTVLKGPSGLPPVDRLLQFLVDSSGDGVEAVRCANCDLECSEQDVETTYFCNTCGQPLCARCRDETHRARMFARHDIVALGQRSRDVPQKCTLHAEPYLLFSTDKKLLLCIRCFRDMQKESRAHCVDLESAYVQGCERLEQAVLAVKALQTATREAIALLQAMVEEVRHSAAEEEDAIHALFGSMQDRLAERKALLLQAVQSQYEEKDKAFKEQLSHLATLLPTLQVHLVICSSFLSLANKAEFLDLGYELMERLQGIVTRPHHLRPIQSSKIASDHRAEFARCLEPLLLLGPRRVAAAASGANTLAGGLGPKALTGPHCPSPVGKMSGSPVQKPTLHRSISTKVLLAEGENTPFAEHCRHYEDSYRHLQAEMQSLKDQVQELHRDLTKHHSLIKAEIMGDVLHKSLQLDVQIASEHASLEGMRVVFQEIWEEAYQRVANEQEIYEAQLHDLLQLRQENAYLTTITKQITPYVRSIAKVKERLEPRFQAPVDEQSESLQNTHDDSRNNAASARNNPGSVPEKREKTSEPKGNSWAPNGLSEEPLLKNMDHHRSKQKNGGDVPTWREHPT

SEQ ID NO: 35767 - protein, 244 aa, Homo sapiens
MSGAIFGPLEGPSSLDAPSIHPLVCPLCHVQYERPCLLDCFHDFCAGCLRGRATDGRLTCPLCQHQTVLKGPSGLPPVDRLLQFLVDSSGDGVEAVRCANCDLECSEQAGAAGRVGEEQRVPGCTVPNACTCTQHVFRGRPGSGFSSTSLGHLGPKCEPHYTGGETEVQNKGLEPVSRQWQRLRPFDLGRAHWSPIQGGVVDLHRRGSPVCRPGPTLKGLCYPSGIEAATAQGRWGQHAVPSGL

SEQ ID NO: 35768 - protein, 144 aa, Homo sapiens
MVEEVRHSAAEEEDAIHALFGSMQDRLAERKALLLQAVQSQYEEKDKAFKEQLSHLATLLPTLQVHLVICSSFLSLANKAEFLDLGYAGRGLRPQGADGAPLPLPSRKDVGVTRPKAHAAPVHQHQGAAGGGREHALRRALPPL

SEQ ID NO: 35769 - protein, 292 aa, Homo sapiens
MVEEVRHSAAEEEDAIHALFGSMQDRLAERKALLLQAVQSQYEEKDKAFKEQLSHLATLLPTLQVHLVICSSFLSLANKAEFLDLGYELMERLQGIVTRPHHLRPIQSSKIASDHRAEFARCLEPLLLLGPRRVAAAASGANTLAGGLGPKALTGPHCPSPVGKMSGSPVQKPTLHRSISTKVLLAEGENTPFAEHCRHYEDSYRHLQAEMQSLKDQVQELHRDLTKHHSLIKAEIMGDVLHKSLQLDVQIASEHASLEGMRVVFQEIWEEAYQRVANEQEIYEGSRQLAAE

SEQ ID NO: 35770 - protein, 1335 aa, Homo sapiens
MESEMLQSPLLGLGEEDEADLTDWNLPLAFMKKRHCEKIEGSKSLAQSWRMKDRMKTVSVALVLCLNVGVDPPDVVKTTPCARLECWIDPLSMGPQKALETIGANLQKQYENWQPRARYKQSLDPTVDEVKKLCTSLRRNAKEERVLFHYNGHGVPRPTVNGEVWVFNKNYTQYIPLSIYDLQTWMGSPSIFVYDCSNAGLIVKSFKQFALQREQELEVAAINPNHPLAQMPLPPSMKNCIQLAACEATELLPMIPDLPADLFTSCLTTPIKIALRWFCMQKCVSLVPGVTLDLIEKIPGRLNDRRTPLGELNWIFTAITDTIAWNVLPRDLFQKLFRQDLLVASLFRNFLLAERIMRSYNCTPVSSPRLPPTYMHAMWQAWDLAVDICLSQLPTIIEEGTAFRHSPFFAEQLTAFQVWLTMGVENRNPPEQLPIVLQVLLSQVHRLRALDLLGRFLDLGPWAVSLALSVGIFPYVLKLLQSSARELRPLLVFIWAKILAVDSSCQADLVKDNGHKYFLSVLADPYMPAEHRTMTAFILAVIVNSYHTGQEACLQGNLIAICLEQLNDPHPLLRQWVAICLGRIWQNFDSARWCGVRDSAHEKLYSLLSDPIPEVRCAAVFALGTFVGNSAERTDHSTTIDHNVAMMLAQLVSDGSPMVRKELVVALSHLVVQYESNFCTVALQFIEEEKNYALPSPATTEGGSLTPVRDSPCTPRLRSVSSYGNIRAVATARSLNKSLQNLSLTEESGGAVAFSPGNLSTSSSASSTLGSPENEEHILSFETIDKMRRASSYSSLNSLIGVSFNSVYTQIWRVLLHLAADPYPEVSDVAMKVLNSIAYKATVNARPQRVLDTSSLTQSAPASPTNKGVHIHQAGGSPPASSTSSSSLTNDVAKQPVSRDLPSGRPGTTGPAGAQYTPHSHQFPRTRKMFDKGPEQTADDADDAAGHKSFISATVQTGFCDWSARYFAQPVMKIPEEHDLESQIRKEREWRFLRNSRVRRQAQQVIQKGITRLDDQIFLNRNPGVPSVVKFHPFTPCIAVADKDSICFWDWEKGEKLDYFHNGNPRYTRVTAMEYLNGQDCSLLLTATDDGAIRVWKNFADLEKNPEMVTAWQGLSDMLPTTRGAGMVVDWEQETGLLMSSGDVRIVRIWDTDREMKVQDIPTGADSCVTSLSCDSHRSLIVAGLGDGSIRVYDRRMALSECRVMTYREHTAWVVKASLQKRPDGHIVSVSVNGDVRIFDPRMPESVNVLQIVKGLTALDIHPQADLIACGSVNQFTAIYNSSGELINNIKYYDGFMGQRVGAISCLAFHPHWPHLAVGSNDYYISVYSVEKRVR

SEQ ID NO: 35771 - protein, 379 aa, Homo sapiens
MESEMLQSPLLGLGEEDEADLTDWNLPLAFMKKRHCEKIEGSKSLAQSWRMKDRMKTVSVALVLCLNVGVDPPDVVKTTPCARLECWIDPLSMGPQKALETIGANLQKQYENWQPRARYKQSLDPTVDEVKKLCTSLRRNAKEERVLFHYNGHGVPRPTVNGEVWVFNKNYTQYIPLSIYDLQTWMGSPSIFVYDCSNAGLIVKSFKQFALQREQELEVAAINPNHPLAQMPLPPSMKNCIQLAACEATELLPMIPDLPADLFTSCLTTPIKIALRWFCMQKCVSLVPGVTLDLIEKIPGRLNDRRTPLGELNWIFTAITDTIAWNVLPRDLFQKLFRQDLLVASLFRNFLLAERIMRSYNCTPVSSPRLPPTYMHAMW

SEQ ID NO: 35772 - protein, 1177 aa, Homo sapiens
MESEMLQSPLLGLGEEDEADLTDWNLPLAFMKKRHCEKIEGSKSLAQSWRMKDRMKTVSVALVLCLNVGVDPPDVVKTTPCARLECWIDPLSMGPQKALETIGANLQKQYENWQPRARYKQSLDPTVDEVKKLCTSLRRNAKEERVLFHYNGHGVPRPTVNGEVWVFNKNYTQYIPLSIYDLQTWMGSPSIFVYDCSNAGLIVKSFKQFALQREQELEVAAINPNHPLAQMPLPPSMKNCIQLAACEATELLPMIPDLPADLFTSCLTTPIKIALRWFCMQKCVSLVPGVTLDLIEKIPGRLNDRRTPLGELNWIFTAITDTIAWNVLPRDLFQKLFRQDLLVASLFRNFLLAERIMRSYNCTPVSSPRLPPTYMHAMWQAWDLAVDICLSQLPTIIEEGTAFRHSPFFAEQLTAFQVWLTMGVENRNPPEQLPIVLQVLLSQVHRLRALDLLGRFLDLGPWAVSLALSVGIFPYVLKLLQSSARELRPLLVFIWAKILAVDSELVVALSHLVVQYESNFCTVALQFIEEEKNYALPSPATTEGGSLTPVRDSPCTPRLRSVSSYGNIRAVATARSLNKSLQNLSLTEESGGAVAFSPGNLSTSSSASSTLGSPENEEHILSFETIDKMRRASSYSSLNSLIGVSFNSVYTQIWRVLLHLAADPYPEVSDVAMKVLNSIAYKATVNARPQRVLDTSSLTQSAPASPTNKGVHIHQAGGSPPASSTSSSSLTNDVAKQPVSRDLPSGRPGTTGPAGAQYTPHSHQFPRTRKMFDKGPEQTADDADDAAGHKSFISATVQTGFCDWSARYFAQPVMKIPEEHDLESQIRKEREWRFLRNSRVRRQAQQVIQKGITRLDDQIFLNRNPGVPSVVKFHPFTPCIAVADKDSICFWDWEKGEKLDYFHNGNPRYTRVTAMEYLNGQDCSLLLTATDDGAIRVWKNFADLEKNPEMVTAWQGLSDMLPTTRGAGMVVDWEQETGLLMSSGDVRIVRIWDTDREMKVQDIPTGADSCVTSLSCDSHRSLIVAGLGDGSIRVYDRRMALSECRVMTYREHTAWVVKASLQKRPDGHIVSVSVNGDVRIFDPRMPESVNVLQIVKGLTALDIHPQADLIACGSVNQFTAIYNSSGELINNIKYYDGFMGQRVGAISCLAFHPHWPHLAVGSNDYYISVYSVEKRVR

SEQ ID NO: 35773 - protein, 400 aa, Homo sapiens
MSQVLGKPQPQDEDDAEEEEEEDELVGLADYGDGPDSSDADPDSGTEEGVLDFSDPFSTEVKPRILLMGLRRSGKSSIQKVVFHKMSPNETLFLESTNKICREDVSNSSFVNFQIWDFPGQIDFFDPTFDYEMIFRGTGALIFVIDSQDDYMEALARLHLTVTRAYKVNTDINFEVFIHKVDGLSDDHKIETQRDIHQRANDDLADAGLEKIHLSFYLTSIYDHSIFEAFSKVVQKLIPQLPTLENLLNIFISNSGIEKAFLFDVVSKIYIATDSTPVDMQTYELCCDMIDVVIDISCIYGLKEDGAGTPYDKESTAIIKLNNTTVLYLKEVTKFLALVCFVREESFERKGLIDYNFHCFRKAIHEVFEVRMKVVKSRKVQNRLQKKKRATPNGTPRVLL

SEQ ID NO: 35774 - protein, 249 aa, Homo sapiens
MEALARLHLTVTRAYKVNTDINFEVFIHKVDGLSDDHKIETQRDIHQRANDDLADAGLEKIHLSFYLTSIYDHSIFEAFSKVVQKLIPQLPTLENLLNIFISNSGIEKAFLFDVVSKIYIATDSTPVDMQTYELCCDMIDVVIDISCIYGLKEDGAGTPYDKESTAIIKLNNTTVLYLKEVTKFLALVCFVREESFERKGLIDYNFHCFRKAIHEVFEVRMKVVKSRKVQNRLQKKKRATPNGTPRVLL

SEQ ID NO: 35775 - protein, 847 aa, Homo sapiens
MGKKGKVGKSRRDKFYHLAKETGYRSRSAFKLIQLNRRFQFLQKARALLDLCAAPGGWLQVAAKFMPVSSLIVGVDLVPIKPLPNVVTLQQDITTERCRQALRKELKTWKVDVVLNDGAPNVGASWVHDAYSQAHLTLMALRLACDFLARGGSFITKVFRSRDYQPLLWIFQQLFRRVQATKPQASRHESAEIFVVCQGFLAPDKVDSKFFDPKFAFKEVEVQAKTVTELVTKKKPKAEGYAEGDLTLYHRTSVTDFLRAANPVDFLSKASEIMVDDEELAQHPATTEDIRVCCQDIRVLGRKELRSLLNWRTKLRRYVAKKLKEQAKALDISLSSGEEDEGDEEDSTAGTTKQPSKEEEEEEEEEQLNQTLAEMKAQEVAELKRKKKKLLREQRKQRERVELKMDLPGVSIADEGETGMFSLSTIRGHQLLEEVTQGDMSAADTFLSDLPRDDIYVSDVEDDGDDTSLDSDLDPEELAGVRGHQGLRDQKRMRLTEVQDDKEEEEEENPLLVPLEEKAVLQEEQANLWFSKGSFAGIEDDADEALEISQAQLLFENRRKGRQQQQKQQLPQTPPSCLKTEIMSPLYQDEAPKGTEASSGTEAATGLEGEEKDGISDSDSSTSSEEEESWEPLRGKKRSRGPKSDDDGFEIVPIEDPAKHRILDPEGLALGAVIASSKKAKRDLIDNSFNRYTFNEDEGELPEWFVQEEKQHRIRQLPVGKKEVEHYRKRWREINARPIKKVAEAKARKKRRMLKRLEQTRKKAEAVVNTVDISEREKVAQLRSLYKKAGLGKEKRHVTYVVAKKGVGRKVRRPAGVRGHFKVVDSRMKKDQRAQQRKEQKKKHKRK

SEQ ID NO: 35776 - protein, 313 aa, Homo sapiens
MRHNQMCCETPPTVTVYVKSGSNRSHQPKKPITLKRPICKDNWQAFEKNTHNNNKSKRPKGPCLVIQRQDMTAFFKLFDDDLIQDFLWMDCCCKIADKYLLAMTFVYFKRAKFTISEHTRINFFIALYLANTVEEDEEETKYEIFPWALGKNWRKLFPNFLKLRDQLWDRIDYRAIVSRRCCEEVMAIAPTHYIWQRERSVHHSGAVRNYNRDEVQLPRGPSATPVDCSLCGKKRRYVRLGLSSSSSLSSHTAGVTEKHSQDSYNSLSMDIIGDPSQAYTGSEVVNDHQSNKGKKTNFLKKDKSMEWFTGSEE

SEQ ID NO: 35777 - protein, 286 aa, Homo sapiens
MRHNQMCCETPPTVTVYVKSGSNRSHQPKKPITLKRPICKDNWQAFEKNTHNNNKSKRPKGPCLVIQRQDMTAFFKLFDDDLIQDFLWMDCCCKIADKYLLAMTFVYFKRAKFTISEHTRINFFIALYLANTVEEDEEETKYEIFPWALGKNWRKLFPNFLKLRDQLWDRIDYRAIVSRRCCEEVMAIAPTHYIWQRERSVHHSGAVRNYNRDEVQLPRGPSATPVDCSLCGKKRRYVRLGLSSSSSLSSHTAGVTEKHSQDSYNSLSMDIIGDPSQAYTGSEGMI

SEQ ID NO: 35778 - protein, 268 aa, Homo sapiens
MAVFADLDLRAGSDLKALRGLVETAAHLGYSVVAINHIVDFKEKKQEIEKPVAVSELFTTLPIVQGKSRPIKILTRLTIIVSDPSHCNVLRATSSRARLYDVVAVFPKTEKLFHIACTHLDVDLVCITVTEKLPFYFKRPPINVAIDRGLAFELVYSPAIKDSTMRRYTISSALNLMQICKGKNVIISSAAERPLEIRGPYDVANLGLLFGLSESDAKAAVSTNCRAALLHGETRKTAFGIISTVKKPRPSEGDEDCLPASKKAKCEG

SEQ ID NO: 35779 - protein, 322 aa, Homo sapiens
MAVFADLDLRAGSDLKALRGLVETAAHLGYSVVAINHIVDFKEKKQEIEKPVAVSELFTTLPIVQGKSRPIKILTRLTIIVSDPSHCNVLRATSSRARLYDVVAVFPKTEKLFHIACTHLDVDLVCITVTEKLPFYFKRPPINVAIDRGLAFELVYSPAIKDSTMRRYTISSALNLMQICKGKNVIISSAAERPLEIRGPYDVANLGLLFGLSESDAKAAVSTNCRAALLHGETRKTAFGIISTVKKPRPSEGDEDCLPASKKAKWSHSVTQAGVQWHNLGSLQPLPLGLKPSSHLSLPRTRIQQRQLLISHQRDHTPKNRL

SEQ ID NO: 35780 - protein, 1168 aa, Homo sapiens
MGKVGAGGGSQARLSALLAGAGLLILCAPGVCGGGSCCPSPHPSSAPRSASTPRGFSHQGRPGRAPATPLPLVVRPLFSVAPGDRALSLERARGTGASMAVAARSGRRRRSGADQEKAERGEGASRSPRGVLRDGGQQEPGTRERDPDKATRFRMEELRLTSTTFALTGDSAHNQAMVHWSGHNSSVILILTKLYDYNLGSITESSLWRSTDYGTTYEKLNDKVGLKTILSYLYVCPTNKRKIMLLTDPEIESSLLISSDEGATYQKYRLNFYIQSLLFHPKQEDWILAYSQDQKLYSSAEFGRRWQLIQEGVVPNRFYWSVMGSNKEPDLVHLEARTVDGHSHYLTCRMQNCTEANRNQPFPGYIDPDSLIVQDHYVFVQLTSGGRPHYYVSYRRNAFAQMKLPKYALPKDMHVISTDENQVFAAVQEWNQNDTYNLYISDTRGVYFTLALENVQSSRGPEGNIMIDLYEVAGIKGMFLANKKIDNQVKTFITYNKGRDWRLLQAPDTDLRGDPVHCLLPYCSLHLHLKVSENPYTSGIIASKDTAPSIIVASGNIGSELSDTDISMFVSSDAGNTWRQIFEEEHSVLYLDQGGVLVAMKHTSLPIRHLWLSFDEGRSWSKYSFTSIPLFVDGVLGEPGEETLIMTVFGHFSHRSEWQLVKVDYKSIFDRRCAEEDYRPWQLHSQGEACIMGAKRIYKKRKSERKCMQGKYAGAMESEPCVCTEADFDCDYGYERHSNGQCLPAFWFNPSSLSKDCSLGQSYLNSTGYRKVVSNNCTDGVREQYTAKPQKCPGKAPRGLRIVTADGKLTAEQGHNVTLMVQLEEGDVQRTLIQVDFGDGIAVSYVNLSSMEDGIKHVYQNVGIFRVTVQVDNSLGSDSAVLYLHVTCPLEHVHLSLPFVTTKNKEVNATAVLWPSQVGTLTYVWWYGNNTEPLITLEGSISFRFTSEGMNTITVQVSAGNAILQDTKTIAVYEEFRSLRLSFSPNLDDYNPDIPEWRRDIGRVIKKSLVEATGVPGQHILVAVLPGLPTTAELFVLPYQDPAGENKRSTDDLEQISELLIHTLNQNSVHFELKPGVRVLVHAAHLTAAPLVDLTPTHSGSAMLMLLSVVFVGLAVFVIYKFKRRVALPSPPSPSTQPGDSSLRLQRARHATPPSTPKRGSAGAQYAI

SEQ ID NO: 35781 - protein, 1198 aa, Homo sapiens
MGKVGAGGGSQARLSALLAGAGLLILCAPGVCGGGSCCPSPHPSSAPRSASTPRGFSHQGRPGRAPATPLPLVVRPLFSVAPGDRALSLERARGTGASMAVAARSGRRRRSGADQEKAERGEGASRSPRGVLRDGGQQEPGTRERDPDKATRFRMEELRLTSTTFALTGDSAHNQAMVHWSGHNSSVILILTKLYDYNLGSITESSLWRSTDYGTTYEKLNDKVGLKTILSYLYVCPTNKRKIMLLTDPEIESSLLISSDEGATYQKYRLNFYIQSLLFHPKQEDWILAYSQDQKLYSSAEFGRRWQLIQEGVVPNRFYWSVMGSNKEPDLVHLEARTVDGHSHYLTCRMQNCTEANRNQPFPGYIDPDSLIVQDHYVFVQLTSGGRPHYYVSYRRNAFAQMKLPKYALPKDMHVISTDENQVFAAVQEWNQNDTYNLYISDTRGVYFTLALENVQSSRGPEGNIMIDLYEVAGIKGMFLANKKIDNQVKTFITYNKGRDWRLLQAPDTDLRGDPVHCLLPYCSLHLHLKVSENPYTSGIIASKDTAPSIIVASGNIGSELSDTDISMFVSSDAGNTWRQIFEEEHSVLYLDQGGVLVAMKHTSLPIRHLWLSFDEGRSWSKYSFTSIPLFVDGVLGEPGEETLIMTVFGHFSHRSEWQLVKVDYKSIFDRRCAEEDYRPWQLHSQGEACIMGAKRIYKKRKSERKCMQGKYAGAMESEPCVCTEADFDCDYGYERHSNGQCLPAFWFNPSSLSKDCSLGQSYLNSTGYRKVVSNNCTDGVREQYTAKPQKCPGKAPRGLRIVTADGKLTAEQGHNVTLMVQLEEGDVQRTLIQVDFGDGIAVSYVNLSSMEDGIKHVYQNVGIFRVTVQVDNSLGSDSAVLYLHVTCPLEHVHLSLPFVTTKNKEVNATAVLWPSQVGTLTYVWWYGNNTEPLITLEGSISFRFTSEGMNTITVQVSAGNAILQDTKTIAVYEEFRSLRLSFSPNLDDYNPDIPEWRRDIGRVIKKSLVEATGVPGQHILVAVLPGLPTTAELFVLPYQDPAGENKRSTDDLEQISELLIHTLNQNSVHFELKPGVRVLVHAAHLTAAPLVDLTPTHSGSAMLMLLSVVFVGLAVFVIYKFKRKIPGINVYAQMQNEKEQEMISPVSHSESRPNVPQTELRRPGQLIDEKVESQLIGSISIVAENQSTKEIPTYVNV

SEQ ID NO: 35782 - protein, 1179 aa, Homo sapiens
MGKVGAGGGSQARLSALLAGAGLLILCAPGVCGGGSCCPSPHPSSAPRSASTPRGFSHQGRPGRAPATPLPLVVRPLFSVAPGDRALSLERARGTGASMAVAARSGRRRRSGADQEKAERGEGASRSPRGVLRDGGQQEPGTRERDPDKATRFRMEELRLTSTTFALTGDSAHNQAMVHWSGHNSSVILILTKLYDYNLGSITESSLWRSTDYGTTYEKLNDKVGLKTILSYLYVCPTNKRKIMLLTDPEIESSLLISSDEGATYQKYRLNFYIQSLLFHPKQEDWILAYSQDQKLYSSAEFGRRWQLIQEGVVPNRFYWSVMGSNKEPDLVHLEARTVDGHSHYLTCRMQNCTEANRNQPFPGYIDPDSLIVQDHYVFVQLTSGGRPHYYVSYRRNAFAQMKLPKYALPKDMHVISTDENQVFAAVQEWNQNDTYNLYISDTRGVYFTLALENVQSSRGPEGNIMIDLYEVAGIKGMFLANKKIDNQVKTFITYNKGRDWRLLQAPDTDLRGDPVHCLLPYCSLHLHLKVSENPYTSGIIASKDTAPSIIVASGNIGSELSDTDISMFVSSDAGNTWRQIFEEEHSVLYLDQGGVLVAMKHTSLPIRHLWLSFDEGRSWSKYSFTSIPLFVDGVLGEPGEETLIMTVFGHFSHRSEWQLVKVDYKSIFDRRCAEEDYRPWQLHSQGEACIMGAKRIYKKRKSERKCMQGKYAGAMESEPCVCTEADFDCDYGYERHSNGQCLPAFWFNPSSLSKDCSLGQSYLNSTGYRKVVSNNCTDGVREQYTAKPQKCPGKAPRGLRIVTADGKLTAEQGHNVTLMVQLEEGDVQRTLIQVDFGDGIAVSYVNLSSMEDGIKHVYQNVGIFRVTVQVDNSLGSDSAVLYLHVTCPLEHVHLSLPFVTTKNKEVNATAVLWPSQVGTLTYVWWYGNNTEPLITLEGSISFRFTSEGMNTITVQVSAGNAILQDTKTIAVYEEFRSLRLSFSPNLDDYNPDIPEWRRDIGRVIKKSLVEATGVPGQHILVAVLPGLPTTAELFVLPYQDPAGENKRSTDDLEQISELLIHTLNQNSVHFELKPGVRVLVHAAHLTAAPLVDLTPTHSGSAMLMLLSVVFVGLAVFVIYKFKRKIPGINVYAQMQNEKEQEMISPVSHSESRPNVPQTELRRPGQLIDEKVESQLIGK

SEQ ID NO: 35783 - protein, 1159 aa, Homo sapiens
MGKVGAGGGSQARLSALLAGAGLLILCAPGVCGGGSCCPSPHPSSAPRSASTPRGFSHQGRPGRAPATPLPLVVRPLFSVAPGDRALSLERARGTGASMAVAARSGRRRRSGADQEKAERGEGASRSPRGVLRDGGQQEPGTRERDPDKATRFRMEELRLTSTTFALTGDSAHNQAMVHWSGHNSSVILILTKLYDYNLGSITESSLWRSTDYGTTYEKLNDKVGLKTILSYLYVCPTNKRKIMLLTDPEIESSLLISSDEGATYQKYRLNFYIQSLLFHPKQEDWILAYSQDQKLYSSAEFGRRWQLIQEGVVPNRFYWSVMGSNKEPDLVHLEARTVDGHSHYLTCRMQNCTEANRNQPFPGYIDPDSLIVQDHYVFVQLTSGGRPHYYVSYRRNAFAQMKLPKYALPKDMHVISTDENQVFAAVQEWNQNDTYNLYISDTRGVYFTLALENVQSSRGPEGNIMIDLYEVAGIKGMFLANKKIDNQVKTFITYNKGRDWRLLQAPDTDLRGDPVHCLLPYCSLHLHLKVSENPYTSGIIASKDTAPSIIVASGNIGSELSDTDISMFVSSDAGNTWRQIFEEEHSVLYLDQGGVLVAMKHTSLPIRHLWLSFDEGRSWSKYSFTSIPLFVDGVLGEPGEETLIMTVFGHFSHRSEWQLVKVDYKSIFDRRCAEEDYRPWQLHSQGEACIMGAKRIYKKRKSERKCMQGKYAGAMESEPCVCTEADFDCDYGYERHSNGQCLPAFWFNPSSLSKDCSLGQSYLNSTGYRKVVSNNCTDGVREQYTAKPQKCPGKAPRGLRIVTADGKLTAEQGHNVTLMVQLEEGDVQRTLIQVDFGDGIAVSYVNLSSMEDGIKHVYQNVGIFRVTVQVDNSLGSDSAVLYLHVTCPLEHVHLSLPFVTTKNKEVNATAVLWPSQVGTLTYVWWYGNNTEPLITLEGSISFRFTSEGMNTITVQVSAGNAILQDTKTIAVYEEFRSLRLSFSPNLDDYNPDIPEWRRDIGRVIKKSLVEATGVPGQHILVAVLPGLPTTAELFVLPYQDPAGENKRSTDDLEQISELLIHTLNQNSVHFELKPGVRVLVHAAHLTAAPLVDLTPTHSGSAMLMLLSVVFVGLAVFVIYKFKRCVSLYPRSPTPDLFLLPDRFRSMCYSDVHSSDGFY

SEQ ID NO: 35784 - protein, 1159 aa, Homo sapiens
MAHRGPSRASKGPGPTARAPSPGAPPPPRSPRSRPLLLLLLLLGACGAAGRSPEPGRLGPHAQLTRVPRSPPAGRAEPGGGEDRQARGTEPGAPGPSPGPAPGPGEDGAPAAGYRRWERAAPLAGVASRAQVSLISTSFVLKGDATHNQAMVHWTGENSSVILILTKYYHADMGKVLESSLWRSSDFGTSYTKLTLQPGVTTVIDNFYICPTNKRKVILVSSSLSDRDQSLFLSADEGATFQKQPIPFFVETLIFHPKEEDKVLAYTKESKLYVSSDLGKKWTLLQERVTKDHVFWSVSGVDADPDLVHVEAQDLGGDFRYVTCAIHNCSEKMLTAPFAGPIDHGSLTVQDDYIFFKATSANQTKYYVSYRRNEFVLMKLPKYALPKDLQIISTDESQVFVAVQEWYQMDTYNLYQSDPRGVRYALVLQDVRSSRQAEESVLIDILEVRGVKGVFLANQKIDGKVMTLITYNKGRDWDYLRPPSMDMNGKPTNCKPPDCHLHLHLRWADNPYVSGTVHTKDTAPGLIMGAGNLGSQLVEYKEEMYITSDCGHTWRQVFEEEHHILYLDHGGVIVAIKDTSIPLKILKFSVDEGLTWSTHNFTSTSVFVDGLLSEPGDETLVMTVFGHISFRSDWELVKVDFRPSFSRQCGEEDYSSWELSNLQGDRCIMGQQRSFRKRKSTSWCIKGRSFTSALTSRVCECRDSDFLCDYGFERSSSSESSTNKCSANFWFNPLSPPDDCALGQTYTSSLGYRKVVSNVCEGGVDMQQSQVQLQCPLTPPRGLQVSIQGEAVAVRPGEDVLFVVRQEQGDVLTTKYQVDLGDGFKAMYVNLTLTGEPIRHRYESPGIYRVSVRAENTAGHDEAVLFVQVNSPLQALYLEVVPVIGLNQEVNLTAVLLPLNPNLTVFYWWIGHSLQPLLSLDNSVTTRFSDTGDVRVTVQAACGNSVLQDSRVLRVLDQFQVMPLQFSKELDAYNPNTPEWREDVGLVVTRLLSKETSVPQELLVTVVKPGLPTLADLYVLLPPPRPTRKRSLSSDKRLAAIQQVLNAQKISFLLRGGVRVLVALRDTGTGAEQLGGGGGYWAVVVLFVIGLFAAGAFILYKFKRKRPGRTVYAQMHNEKEQEMTSPVSHSEDVQGAVQGNHSGVVLSINSREMHSYLVS

SEQ ID NO: 35785 - protein, 493 aa, Homo sapiens
MNRTKGDEEEYWNSSKFKAFTFDDEDDELSQLKESKRAVNSLRDFVDDDDDDDLERVSWSGEPVGSISWSIRETAGNSGSTHEGREQLKSRNSFSSYAQLPKPTSTYSLSSFFRGRTRPGSFQSLSDALSDTPAKSYAPELGRPKGEYRDYSNDWSPSDTVRRLRKGKVCSLERFRSLQDKLQLLEEAVSMHDGNVITAVLIFLKRTLSKEILFRELEVRQVALRHLIHFLKEIGDQKLLLDLFRFLDRTEELALSHYREHLNIQDPDKRKEFLKTCVGLPFSAEDSAHIQDHYTLLERQIIIEANDRHLESAGQTEIFRKHPRKASILNMPLVTTLFYSCFYHYTEAEGTFSSPVNLKKTFKIPDKQYVLTALAARAKLRAWNDVDALFTTKNWLGYTKKRAPIGFHRVVEILHKNNAPVQILQEYVNLVEDVDTKLNLATKFKCHDVVIDTYRDLKDRQQLLAYRSKVDKGSAEEEKIDALLSSSQIRWKN

SEQ ID NO: 35786 - protein, 444 aa, Homo sapiens
MNRTKGDEEEYWNSSKFKAFTFDDEDDELSQLKESKRAVNSLRDFVDDDDDDDLERVSWSGEPVGSRTRPGSFQSLSDALSDTPAKSYAPELGRPKGEYRDYSNDWSPSDTVRRLRKGKVCSLERFRSLQDKLQLLEEAVSMHDGNVITAVLIFLKRTLSKEILFRELEVRQVALRHLIHFLKEIGDQKLLLDLFRFLDRTEELALSHYREHLNIQDPDKRKEFLKTCVGLPFSAEDSAHIQDHYTLLERQIIIEANDRHLESAGQTEIFRKHPRKASILNMPLVTTLFYSCFYHYTEAEGTFSSPVNLKKTFKIPDKQYVLTALAARAKLRAWNDVDALFTTKNWLGYTKKRAPIGFHRVVEILHKNNAPVQILQEYVNLVEDVDTKLNLATKFKCHDVVIDTYRDLKDRQQLLAYRSKVDKGSAEEEKIDALLSSSQIRWKN

SEQ ID NO: 35787 - protein, 3661 aa, Homo sapiens
MSRRAPGSRLSSGGGGGGTKYPRSWNDWQPRTDSASADPDNLKYSSSRDRGGSSSYGLQPSNSAVVSRQRHDDTRVHADIQNDEKGGYSVNGGSGENTYGRKSLGQELRVNNVTSPEFTSVQHGSRALATKDMRKSQERSMSYSDESRLSNLLRRITREDDRDRRLATVKQLKEFIQQPENKLVLVKQLDNILAAVHDVLNESSKLLQELRQEGACCLGLLCASLSYEAEKIFKWIFSKFSSSAKDEVKLLYLCATYKALETVGEKKAFSSVMQLVMTSLQSILENVDTPELLCKCVKCILLVARCYPHIFSTNFRDTVDILVGWHIDHTQKPSLTQQVSGWLQSLEPFWVADLAFSTTLLGQFLEDMEAYAEDLSHVASGESVDEDVPPPSVSLPKLAALLRVFSTVVRSIGERFSPIRGPPITEAYVTDVLYRVMRCVTAANQVFFSEAVLTAANECVGVLLGSLDPSMTIHCDMVITYGLDQLENCQTCGTDYIISVLNLLTLIVEQINTKLPSSFVEKLFIPSSKLLFLRYHKEKEVVAVAHAVYQAVLSLKNIPVLETAYKLILGEMTCALNNLLHSLQLPEACSEIKHEAFKNHVFNVDNAKFVVIFDLSALTTIGNAKNSLIGMWALSPTVFALLSKNLMIVHSDLAVHFPAIQYAVLYTLYSHCTRHDHFISSSLSSSSPSLFDGAVISTVTTATKKHFSIILNLLGILLKKDNLNQDTRKLLMTWALEAAVLMKKSETYAPLFSLPSFHKFCKGLLANTLVEDVNICLQACSSLHALSSSLPDDLLQRCVDVCRVQLVHSGTRIRQAFGKLLKSIPLDVVLSNNNHTEIQEISLALRSHMSKAPSNTFHPQDFSDVISFILYGNSHRTGKDNWLERLFYSCQRLDKRDQSTIPRNLLKTDAVLWQWAIWEAAQFTVLSKLRTPLGRAQDTFQTIEGIIRSLAAHTLNPDQDVSQWTTADNDEGHGNNQLRLVLLLQYLENLEKLMYNAYEGCANALTSPPKVIRTFFYTNRQTCQDWLTRIRLSIMRVGLLAGQPAVTVRHGFDLLTEMKTTSLSQGNELEVTIMMVVEALCELHCPEAIQGIAVWSSSIVGKNLLWINSVAQQAEGRFEKASVEYQEHLCAMTGVDCCISSFDKSVLTLANAGRNSASPKHSLNGESRKTVLSKPTDSSPEVINYLGNKACECYISIADWAAVQEWQNAIHDLKKSTSSTSLNLKADFNYIKSLSSFESGKFVECTEQLELLPGENINLLAGGSKEKIDMKKLLPNMLSPDPRELQKSIEVQLLRSSVCLATALNPIEQDQKWQSITENVVKYLKQTSRIAIGPLRLSTLTVSQSLPVLSTLQLYCSSALENTVSNRLSTEDCLIPLFSEALRSCKQHDVRPWMQALRYTMYQNQLLEKIKEQTVPIRSHLMELGLTAAKFARKRGNVSLATRLLAQCSEVQLGKTTTAQDLVQHFKKLSTQGQVDEKWGPELDIEKTKLLYTAGQSTHAMEMLSSCAISFCKSVKAEYAVAKSILTLAKWIQAEWKEISGQLKQVYRAQHQQNFTGLSTLSKNILTLIELPSVNTMEEEYPRIESESTVHIGVGEPDFILGQLYHLSSVQAPEVAKSWAALASWAYRWGRKVVDNASQGEGVRLLPREKSEVQNLLPDTITEEEKERIYGILGQAVCRPAGIQDEDITLQITESEDNEEDDMVDVIWRQLISSCPWLSELDESATEGVIKVWRKVVDRIFSLYKLSCSAYFTFLKLNAGQIPLDEDDPRLHLSHRVEQSTDDMIVMATLRLLRLLVKHAGELRQYLEHGLETTPTAPWRGIIPQLFSRLNHPEVYVRQSICNLLCRVAQDSPHLILYPAIVGTISLSSESQASGNKFSTAIPTLLGNIQGEELLVSECEGGSPPASQDSNKDEPKSGLNEDQAMMQDCYSKIVDKLSSANPTMVLQVQMLVAELRRVTVLWDELWLGVLLQQHMYVLRRIQQLEDEVKRVQNNNTLRKEEKIAIMREKHTALMKPIVFALEHVRSITAAPAETPHEKWFQDNYGDAIENALEKLKTPLNPAKPGSSWIPFKEIMLSLQQRAQKRASYILRLEEISPWLAAMTNTEIALPGEVSARDTVTIHSVGGTITILPTKTKPKKLLFLGSDGKSYPYLFKGLEDLHLDERIMQFLSIVNTMFATINRQETPRFHARHYSVTPLGTRSGLIQWVDGATPLFGLYKRWQQREAALQAQKAQDSYQTPQNPGIVPRPSELYYSKIGPALKTVGLSLDVSRRDWPLHVMKAVLEELMEATPPNLLAKELWSSCTTPDEWWRVTQSYARSTAVMSMVGYIIGLGDRHLDNVLIDMTTGEVVHIDYNVCFEKGKSLRVPEKVPFRMTQNIETALGVTGVEGVFRLSCEQVLHIMRRGRETLLTLLEAFVYDPLVDWTAGGEAGFAGAVYGGGGQQAESKQSKREMEREITRSLFSSRVAEIKVNWFKNRDEMLVVLPKLDGSLDEYLSLQEQLTDVEKLQGKLLEEIEFLEGAEGVDHPSHTLQHRYSEHTQLQTQQRAVQEAIQVKLNEFEQWITHYQAAFNNLEATQLASLLQEISTQMDLGPPSYVPATAFLQNAGQAHLISQCEQLEGEVGALLQQRRSVLRGCLEQLHHYATVALQYPKAIFQKHRIEQWKTWMEELICNTTVERCQELYRKYEMQYAPQPPPTVCQFITATEMTLQRYAADINSRLIRQVERLKQEAVTVPVCEDQLKEIERCIKVFLHENGEEGSLSLASVIISALCTLTRRNLMMEGAASSAGEQLVDLTSRDGAWFLEELCSMSGNVTCLVQLLKQCHLVPQDLDIPNPMEASETVHLANGVYTSLQELNSNFRQIIFPEALRCLMKGEYTLESMLHELDGLIEQTTDGVPLQTLVESLQAYLRNAAMGLEEETHAHYIDVARLLHAQYGELIQPRNGSVDETPKMSAGQMLLVAFDGMFAQVETAFSLLVEKLNKMEIPIAWRKIDIIREARSTQVNFFDDDNHRQVLEEIFFLKRLQTIKEFFRLCGTFSKTLSGSSSLEDQNTVNGPVQIVNVKTLFRNSCFSEDQMAKPIKAFTADFVRQLLIGLPNQALGLTLCSFISALGVDIIAQVEAKDFGAESKVSVDDLCKKAVEHNIQIGKFSQLVMNRATVLASSYDTAWKKHDLVRRLETSISSCKTSLQRVQLHIAMFQWQHEDLLINRPQAMSVTPPPRSAILTSMKKKLHTLSQIETSIATVQEKLAALESSIEQRLKWAGGANPALAPVLQDFEATIAERRNLVLKESQRASQVTFLCSNIIHFESLRTRTAEALNLDAALFELIKRCQQMCSFASQFNSSVSELELRLLQRVDTGLEHPIGSSEWLLSAHKQLTQDMSTQRAIQTEKEQQIETVCETIQNLVDNIKTVLTGHNRQLGDVKHLLKAMAKDEEAALADGEDVPYENSVRQFLGEYKSWQDNIQTVLFTLVQAMGQVRSQEHVEMLQEITPTLKELKTQSQSIYNNLVSFASPLVTDATNECSSPTSSATYQPSFAAAVRSNTGQKTQPDVMSQNARKLIQKNLATSADTPPSTVPGTGKSVACSPKKAVRDPKTGKAVQERNSYAVSVWKRVKAKLEGRDVDPNRRMSVAEQVDYVIKEATNLDNLAQLYEGWTAWV

SEQ ID NO: 35788 - protein, 3521 aa, Homo sapiens
MSYSDESRLSNLLRRITREDDRDRRLATVKQLKEFIQQPENKLVLVKQLDNILAAVHDVLNESSKLLQELRQEGACCLGLLCASLSYEAEKIFKWIFSKFSSSAKDEVKLLYLCATYKALETVGEKKAFSSVMQLVMTSLQSILENVDTPELLCKCVKCILLVARCYPHIFSTNFRDTVDILVGWHIDHTQKPSLTQQVSGWLQSLEPFWVADLAFSTTLLGQFLEDMEAYAEDLSHVASGESVDEDVPPPSVSLPKLAALLRVFSTVVRSIGERFSPIRGPPITEAYVTDVLYRVMRCVTAANQVFFSEAVLTAANECVGVLLGSLDPSMTIHCDMVITYGLDQLENCQTCGTDYIISVLNLLTLIVEQINTKLPSSFVEKLFIPSSKLLFLRYHKEKEVVAVAHAVYQAVLSLKNIPVLETAYKLILGEMTCALNNLLHSLQLPEACSEIKHEAFKNHVFNVDNAKFVVIFDLSALTTIGNAKNSLIGMWALSPTVFALLSKNLMIVHSDLAVHFPAIQYAVLYTLYSHCTRHDHFISSSLSSSSPSLFDGAVISTVTTATKKHFSIILNLLGILLKKDNLNQDTRKLLMTWALEAAVLMKKSETYAPLFSLPSFHKFCKGLLANTLVEDVNICLQACSSLHALSSSLPDDLLQRCVDVCRVQLVHSGTRIRQAFGKLLKSIPLDVVLSNNNHTEIQEISLALRSHMSKAPSNTFHPQDFSDVISFILYGNSHRTGKDNWLERLFYSCQRLDKRDQSTIPRNLLKTDAVLWQWAIWEAAQFTVLSKLRTPLGRAQDTFQTIEGIIRSLAAHTLNPDQDVSQWTTADNDEGHGNNQLRLVLLLQYLENLEKLMYNAYEGCANALTSPPKVIRTFFYTNRQTCQDWLTRIRLSIMRVGLLAGQPAVTVRHGFDLLTEMKTTSLSQGNELEVTIMMVVEALCELHCPEAIQGIAVWSSSIVGKNLLWINSVAQQAEGRFEKASVEYQEHLCAMTGVDCCISSFDKSVLTLANAGRNSASPKHSLNGESRKTVLSKPTDSSPEVINYLGNKACECYISIADWAAVQEWQNAIHDLKKSTSSTSLNLKADFNYIKSLSSFESGKFVECTEQLELLPGENINLLAGGSKEKIDMKKLLPNMLSPDPRELQKSIEVQLLRSSVCLATALNPIEQDQKWQSITENVVKYLKQTSRIAIGPLRLSTLTVSQSLPVLSTLQLYCSSALENTVSNRLSTEDCLIPLFSEALRSCKQHDVRPWMQALRYTMYQNQLLEKIKEQTVPIRSHLMELGLTAAKFARKRGNVSLATRLLAQCSEVQLGKTTTAQDLVQHFKKLSTQGQVDEKWGPELDIEKTKLLYTAGQSTHAMEMLSSCAISFCKSVKAEYAVAKSILTLAKWIQAEWKEISGQLKQVYRAQHQQNFTGLSTLSKNILTLIELPSVNTMEEEYPRIESESTVHIGVGEPDFILGQLYHLSSVQAPEVAKSWAALASWAYRWGRKVVDNASQGEGVRLLPREKSEVQNLLPDTITEEEKERIYGILGQAVCRPAGIQDEDITLQITESEDNEEDDMVDVIWRQLISSCPWLSELDESATEGVIKVWRKVVDRIFSLYKLSCSAYFTFLKLNAGQIPLDEDDPRLHLSHRVEQSTDDMIVMATLRLLRLLVKHAGELRQYLEHGLETTPTAPWRGIIPQLFSRLNHPEVYVRQSICNLLCRVAQDSPHLILYPAIVGTISLSSESQASGNKFSTAIPTLLGNIQGEELLVSECEGGSPPASQDSNKDEPKSGLNEDQAMMQDCYSKIVDKLSSANPTMVLQVQMLVAELRRVTVLWDELWLGVLLQQHMYVLRRIQQLEDEVKRVQNNNTLRKEEKIAIMREKHTALMKPIVFALEHVRSITAAPAETPHEKWFQDNYGDAIENALEKLKTPLNPAKPGSSWIPFKEIMLSLQQRAQKRASYILRLEEISPWLAAMTNTEIALPGEVSARDTVTIHSVGGTITILPTKTKPKKLLFLGSDGKSYPYLFKGLEDLHLDERIMQFLSIVNTMFATINRQETPRFHARHYSVTPLGTRSGLIQWVDGATPLFGLYKRWQQREAALQAQKAQDSYQTPQNPGIVPRPSELYYSKIGPALKTVGLSLDVSRRDWPLHVMKAVLEELMEATPPNLLAKELWSSCTTPDEWWRVTQSYARSTAVMSMVGYIIGLGDRHLDNVLIDMTTGEVVHIDYNVCFEKGKSLRVPEKVPFRMTQNIETALGVTGVEGVFRLSCEQVLHIMRRGRETLLTLLEAFVYDPLVDWTAGGEAGFAGAVYGGGGQQAESKQSKREMEREITRSLFSSRVAEIKVNWFKNRDEMLVVLPKLDGSLDEYLSLQEQLTDVEKLQGKLLEEIEFLEGAEGVDHPSHTLQHRYSEHTQLQTQQRAVQEAIQVKLNEFEQWITHYQAAFNNLEATQLASLLQEISTQMDLGPPSYVPATAFLQNAGQAHLISQCEQLEGEVGALLQQRRSVLRGCLEQLHHYATVALQYPKAIFQKHRIEQWKTWMEELICNTTVERCQELYRKYEMQYAPQPPPTVCQFITATEMTLQRYAADINSRLIRQVERLKQEAVTVPVCEDQLKEIERCIKVFLHENGEEGSLSLASVIISALCTLTRRNLMMEGAASSAGEQLVDLTSRDGAWFLEELCSMSGNVTCLVQLLKQCHLVPQDLDIPNPMEASETVHLANGVYTSLQELNSNFRQIIFPEALRCLMKGEYTLESMLHELDGLIEQTTDGVPLQTLVESLQAYLRNAAMGLEEETHAHYIDVARLLHAQYGELIQPRNGSVDETPKMSAGQMLLVAFDGMFAQVETAFSLLVEKLNKMEIPIAWRKIDIIREARSTQVNFFDDDNHRQVLEEIFFLKRLQTIKEFFRLCGTFSKTLSGSSSLEDQNTVNGPVQIVNVKTLFRNSCFSEDQMAKPIKAFTADFVRQLLIGLPNQALGLTLCSFISALGVDIIAQVEAKDFGAESKVSVDDLCKKAVEHNIQIGKFSQLVMNRATVLASSYDTAWKKHDLVRRLETSISSCKTSLQRVQLHIAMFQWQHEDLLINRPQAMSVTPPPRSAILTSMKKKLHTLSQIETSIATVQEKLAALESSIEQRLKWAGGANPALAPVLQDFEATIAERRNLVLKESQRASQVTFLCSNIIHFESLRTRTAEALNLDAALFELIKRCQQMCSFASQFNSSVSELELRLLQRVDTGLEHPIGSSEWLLSAHKQLTQDMSTQRAIQTEKEQQIETVCETIQNLVDNIKTVLTGHNRQLGDVKHLLKAMAKDEEAALADGEDVPYENSVRQFLGEYKSWQDNIQTVLFTLVQAMGQVRSQEHVEMLQEITPTLKELKTQSQSIYNNLVSFASPLVTDATNECSSPTSSATYQPSFAAAVRSNTGQKTQPDVMSQNARKLIQKNLATSADTPPSTVPGTGKSVACSPKKAVRDPKTGKAVQERNSYAVSVWKRVKAKLEGRDVDPNRRMSVAEQVDYVIKEATNLDNLAQLYEGWTAWV

SEQ ID NO: 35789 - protein, 3031 aa, Homo sapiens
MWALSPTVFALLSKNLMIVHSDLAVHFPAIQYAVLYTLYSHCTRHDHFISSSLSSSSPSLFDGAVISTVTTATKKHFSIILNLLGILLKKDNLNQDTRKLLMTWALEAAVLMKKSETYAPLFSLPSFHKFCKGLLANTLVEDVNICLQACSSLHALSSSLPDDLLQRCVDVCRVQLVHSGTRIRQAFGKLLKSIPLDVVLSNNNHTEIQEISLALRSHMSKAPSNTFHPQDFSDVISFILYGNSHRTGKDNWLERLFYSCQRLDKRDQSTIPRNLLKTDAVLWQWAIWEAAQFTVLSKLRTPLGRAQDTFQTIEGIIRSLAAHTLNPDQDVSQWTTADNDEGHGNNQLRLVLLLQYLENLEKLMYNAYEGCANALTSPPKVIRTFFYTNRQTCQDWLTRIRLSIMRVGLLAGQPAVTVRHGFDLLTEMKTTSLSQGNELEVTIMMVVEALCELHCPEAIQGIAVWSSSIVGKNLLWINSVAQQAEGRFEKASVEYQEHLCAMTGVDCCISSFDKSVLTLANAGRNSASPKHSLNGESRKTVLSKPTDSSPEVINYLGNKACECYISIADWAAVQEWQNAIHDLKKSTSSTSLNLKADFNYIKSLSSFESGKFVECTEQLELLPGENINLLAGGSKEKIDMKKLLPNMLSPDPRELQKSIEVQLLRSSVCLATALNPIEQDQKWQSITENVVKYLKQTSRIAIGPLRLSTLTVSQSLPVLSTLQLYCSSALENTVSNRLSTEDCLIPLFSEALRSCKQHDVRPWMQALRYTMYQNQLLEKIKEQTVPIRSHLMELGLTAAKFARKRGNVSLATRLLAQCSEVQLGKTTTAQDLVQHFKKLSTQGQVDEKWGPELDIEKTKLLYTAGQSTHAMEMLSSCAISFCKSVKAEYAVAKSILTLAKWIQAEWKEISGQLKQVYRAQHQQNFTGLSTLSKNILTLIELPSVNTMEEEYPRIESESTVHIGVGEPDFILGQLYHLSSVQAPEVAKSWAALASWAYRWGRKVVDNASQGEGVRLLPREKSEVQNLLPDTITEEEKERIYGILGQAVCRPAGIQDEDITLQITESEDNEEDDMVDVIWRQLISSCPWLSELDESATEGVIKVWRKVVDRIFSLYKLSCSAYFTFLKLNAGQIPLDEDDPRLHLSHRVEQSTDDMIVMATLRLLRLLVKHAGELRQYLEHGLETTPTAPWRGIIPQLFSRLNHPEVYVRQSICNLLCRVAQDSPHLILYPAIVGTISLSSESQASGNKFSTAIPTLLGNIQGEELLVSECEGGSPPASQDSNKDEPKSGLNEDQAMMQDCYSKIVDKLSSANPTMVLQVQMLVAELRRVTVLWDELWLGVLLQQHMYVLRRIQQLEDEVKRVQNNNTLRKEEKIAIMREKHTALMKPIVFALEHVRSITAAPAETPHEKWFQDNYGDAIENALEKLKTPLNPAKPGSSWIPFKEIMLSLQQRAQKRASYILRLEEISPWLAAMTNTEIALPGEVSARDTVTIHSVGGTITILPTKTKPKKLLFLGSDGKSYPYLFKGLEDLHLDERIMQFLSIVNTMFATINRQETPRFHARHYSVTPLGTRSGLIQWVDGATPLFGLYKRWQQREAALQAQKAQDSYQTPQNPGIVPRPSELYYSKIGPALKTVGLSLDVSRRDWPLHVMKAVLEELMEATPPNLLAKELWSSCTTPDEWWRVTQSYARSTAVMSMVGYIIGLGDRHLDNVLIDMTTGEVVHIDYNVCFEKGKSLRVPEKVPFRMTQNIETALGVTGVEGVFRLSCEQVLHIMRRGRETLLTLLEAFVYDPLVDWTAGGEAGFAGAVYGGGGQQAESKQSKREMEREITRSLFSSRVAEIKVNWFKNRDEMLVVLPKLDGSLDEYLSLQEQLTDVEKLQGKLLEEIEFLEGAEGVDHPSHTLQHRYSEHTQLQTQQRAVQEAIQVKLNEFEQWITHYQAAFNNLEATQLASLLQEISTQMDLGPPSYVPATAFLQNAGQAHLISQCEQLEGEVGALLQQRRSVLRGCLEQLHHYATVALQYPKAIFQKHRIEQWKTWMEELICNTTVERCQELYRKYEMQYAPQPPPTVCQFITATEMTLQRYAADINSRLIRQVERLKQEAVTVPVCEDQLKEIERCIKVFLHENGEEGSLSLASVIISALCTLTRRNLMMEGAASSAGEQLVDLTSRDGAWFLEELCSMSGNVTCLVQLLKQCHLVPQDLDIPNPMEASETVHLANGVYTSLQELNSNFRQIIFPEALRCLMKGEYTLESMLHELDGLIEQTTDGVPLQTLVESLQAYLRNAAMGLEEETHAHYIDVARLLHAQYGELIQPRNGSVDETPKMSAGQMLLVAFDGMFAQVETAFSLLVEKLNKMEIPIAWRKIDIIREARSTQVNFFDDDNHRQVLEEIFFLKRLQTIKEFFRLCGTFSKTLSGSSSLEDQNTVNGPVQIVNVKTLFRNSCFSEDQMAKPIKAFTADFVRQLLIGLPNQALGLTLCSFISALGVDIIAQVEAKDFGAESKVSVDDLCKKAVEHNIQIGKFSQLVMNRATVLASSYDTAWKKHDLVRRLETSISSCKTSLQRVQLHIAMFQWQHEDLLINRPQAMSVTPPPRSAILTSMKKKLHTLSQIETSIATVQEKLAALESSIEQRLKWAGGANPALAPVLQDFEATIAERRNLVLKESQRASQVTFLCSNIIHFESLRTRTAEALNLDAALFELIKRCQQMCSFASQFNSSVSELELRLLQRVDTGLEHPIGSSEWLLSAHKQLTQDMSTQRAIQTEKEQQIETVCETIQNLVDNIKTVLTGHNRQLGDVKHLLKAMAKDEEAALADGEDVPYENSVRQFLGEYKSWQDNIQTVLFTLVQAMGQVRSQEHVEMLQEITPTLKELKTQSQSIYNNLVSFASPLVTDATNECSSPTSSATYQPSFAAAVRSNTGQKTQPDVMSQNARKLIQKNLATSADTPPSTVPGTGKSVACSPKKAVRDPKTGKAVQERNSYAVSVWKRVKAKLEGRDVDPNRRMSVAEQVDYVIKEATNLDNLAQLYEGWTAWV

SEQ ID NO: 35790 - protein, 2392 aa, Homo sapiens
MKKLLPNMLSPDPRELQKSIEVQLLRSSVCLATALNPIEQDQKWQSITENVVKYLKQTSRIAIGPLRLSTLTVSQSLPVLSTLQLYCSSALENTVSNRLSTEDCLIPLFSEALRSCKQHDVRPWMQALRYTMYQNQLLEKIKEQTVPIRSHLMELGLTAAKFARKRGNVSLATRLLAQCSEVQLGKTTTAQDLVQHFKKLSTQGQVDEKWGPELDIEKTKLLYTAGQSTHAMEMLSSCAISFCKSVKAEYAVAKSILTLAKWIQAEWKEISGQLKQVYRAQHQQNFTGLSTLSKNILTLIELPSVNTMEEEYPRIESESTVHIGVGEPDFILGQLYHLSSVQAPEVAKSWAALASWAYRWGRKVVDNASQGEGVRLLPREKSEVQNLLPDTITEEEKERIYGILGQAVCRPAGIQDEDITLQITESEDNEEDDMVDVIWRQLISSCPWLSELDESATEGVIKVWRKVVDRIFSLYKLSCSAYFTFLKLNAGQIPLDEDDPRLHLSHRVEQSTDDMIVMATLRLLRLLVKHAGELRQYLEHGLETTPTAPWRGIIPQLFSRLNHPEVYVRQSICNLLCRVAQDSPHLILYPAIVGTISLSSESQASGNKFSTAIPTLLGNIQGEELLVSECEGGSPPASQDSNKDEPKSGLNEDQAMMQDCYSKIVDKLSSANPTMVLQVQMLVAELRRVTVLWDELWLGVLLQQHMYVLRRIQQLEDEVKRVQNNNTLRKEEKIAIMREKHTALMKPIVFALEHVRSITAAPAETPHEKWFQDNYGDAIENALEKLKTPLNPAKPGSSWIPFKEIMLSLQQRAQKRASYILRLEEISPWLAAMTNTEIALPGEVSARDTVTIHSVGGTITILPTKTKPKKLLFLGSDGKSYPYLFKGLEDLHLDERIMQFLSIVNTMFATINRQETPRFHARHYSVTPLGTRSGLIQWVDGATPLFGLYKRWQQREAALQAQKAQDSYQTPQNPGIVPRPSELYYSKIGPALKTVGLSLDVSRRDWPLHVMKAVLEELMEATPPNLLAKELWSSCTTPDEWWRVTQSYARSTAVMSMVGYIIGLGDRHLDNVLIDMTTGEVVHIDYNVCFEKGKSLRVPEKVPFRMTQNIETALGVTGVEGVFRLSCEQVLHIMRRGRETLLTLLEAFVYDPLVDWTAGGEAGFAGAVYGGGGQQAESKQSKREMEREITRSLFSSRVAEIKVNWFKNRDEMLVVLPKLDGSLDEYLSLQEQLTDVEKLQGKLLEEIEFLEGAEGVDHPSHTLQHRYSEHTQLQTQQRAVQEAIQVKLNEFEQWITHYQAAFNNLEATQLASLLQEISTQMDLGPPSYVPATAFLQNAGQAHLISQCEQLEGEVGALLQQRRSVLRGCLEQLHHYATVALQYPKAIFQKHRIEQWKTWMEELICNTTVERCQELYRKYEMQYAPQPPPTVCQFITATEMTLQRYAADINSRLIRQVERLKQEAVTVPVCEDQLKEIERCIKVFLHENGEEGSLSLASVIISALCTLTRRNLMMEGAASSAGEQLVDLTSRDGAWFLEELCSMSGNVTCLVQLLKQCHLVPQDLDIPNPMEASETVHLANGVYTSLQELNSNFRQIIFPEALRCLMKGEYTLESMLHELDGLIEQTTDGVPLQTLVESLQAYLRNAAMGLEEETHAHYIDVARLLHAQYGELIQPRNGSVDETPKMSAGQMLLVAFDGMFAQVETAFSLLVEKLNKMEIPIAWRKIDIIREARSTQVNFFDDDNHRQVLEEIFFLKRLQTIKEFFRLCGTFSKTLSGSSSLEDQNTVNGPVQIVNVKTLFRNSCFSEDQMAKPIKAFTADFVRQLLIGLPNQALGLTLCSFISALGVDIIAQVEAKDFGAESKVSVDDLCKKAVEHNIQIGKFSQLVMNRATVLASSYDTAWKKHDLVRRLETSISSCKTSLQRVQLHIAMFQWQHEDLLINRPQAMSVTPPPRSAILTSMKKKLHTLSQIETSIATVQEKLAALESSIEQRLKWAGGANPALAPVLQDFEATIAERRNLVLKESQRASQVTFLCSNIIHFESLRTRTAEALNLDAALFELIKRCQQMCSFASQFNSSVSELELRLLQRVDTGLEHPIGSSEWLLSAHKQLTQDMSTQRAIQTEKEQQIETVCETIQNLVDNIKTVLTGHNRQLGDVKHLLKAMAKDEEAALADGEDVPYENSVRQFLGEYKSWQDNIQTVLFTLVQAMGQVRSQEHVEMLQEITPTLKELKTQSQSIYNNLVSFASPLVTDATNECSSPTSSATYQPSFAAAVRSNTGQKTQPDVMSQNARKLIQKNLATSADTPPSTVPGTGKSVACSPKKAVRDPKTGKAVQERNSYAVSVWKRVKAKLEGRDVDPNRRMSVAEQVDYVIKEATNLDNLAQLYEGWTAWV

SEQ ID NO: 35791 - protein, 425 aa, Homo sapiens
MSSILPFTPPIVKRLLGWKKGEQNGQEEKWCEKAVKSLVKKLKKTGQLDELEKAITTQNVNTKCITIPRSLDGRLQVSHRKGLPHVIYCRLWRWPDLHSHHELRAMELCEFAFNMKKDEVCVNPYHYQRVETPVLPPVLVPRHTEIPAEFPPLDDYSHSIPENTNFPAGIEPQSNIPETPPPGYLSEDGETSDHQMNHSMDAGSPNLSPNPMSPAHNNLDLQPVTYCEPAFWCSISYYELNQRVGETFHASQPSMTVDGFTDPSNSERFCLGLLSNVNRNAAVELTRRHIGRGVRLYYIGGEVFAECLSDSAIFVQSPNCNQRYGWHPATVCKIPPGCNLKIFNNQEFAALLAQSVNQGFEAVYQLTRMCTIRMSFVKGWGAEYRRQTVTSTPCWIELHLNGPLQWLDKVLTQMGSPSIRCSSVS

SEQ ID NO: 35792 - protein, 381 aa, Homo sapiens
MSCLHPRQTWKGAALVHRKAWWMGRSLDGRLQVSHRKGLPHVIYCRLWRWPDLHSHHELRAMELCEFAFNMKKDEVCVNPYHYQRVETPVLPPVLVPRHTEIPAEFPPLDDYSHSIPENTNFPAGIEPQSNIPETPPPGYLSEDGETSDHQMNHSMDAGSPNLSPNPMSPAHNNLDLQPVTYCEPAFWCSISYYELNQRVGETFHASQPSMTVDGFTDPSNSERFCLGLLSNVNRNAAVELTRRHIGRGVRLYYIGGEVFAECLSDSAIFVQSPNCNQRYGWHPATVCKIPPGCNLKIFNNQEFAALLAQSVNQGFEAVYQLTRMCTIRMSFVKGWGAEYRRQTVTSTPCWIELHLNGPLQWLDKVLTQMGSPSIRCSSVS

SEQ ID NO: 35793 - protein, 320 aa, Homo sapiens
MELCEFAFNMKKDEVCVNPYHYQRVETPVLPPVLVPRHTEIPAEFPPLDDYSHSIPENTNFPAGIEPQSNIPETPPPGYLSEDGETSDHQMNHSMDAGSPNLSPNPMSPAHNNLDLQPVTYCEPAFWCSISYYELNQRVGETFHASQPSMTVDGFTDPSNSERFCLGLLSNVNRNAAVELTRRHIGRGVRLYYIGGEVFAECLSDSAIFVQSPNCNQRYGWHPATVCKIPPGCNLKIFNNQEFAALLAQSVNQGFEAVYQLTRMCTIRMSFVKGWGAEYRRQTVTSTPCWIELHLNGPLQWLDKVLTQMGSPSIRCSSVS

SEQ ID NO: 35794 - protein, 230 aa, Homo sapiens
MNHSMDAGSPNLSPNPMSPAHNNLDLQPVTYCEPAFWCSISYYELNQRVGETFHASQPSMTVDGFTDPSNSERFCLGLLSNVNRNAAVELTRRHIGRGVRLYYIGGEVFAECLSDSAIFVQSPNCNQRYGWHPATVCKIPPGCNLKIFNNQEFAALLAQSVNQGFEAVYQLTRMCTIRMSFVKGWGAEYRRQTVTSTPCWIELHLNGPLQWLDKVLTQMGSPSIRCSSVS

SEQ ID NO: 35795 - protein, 1137 aa, Homo sapiens
MSLQSAQYLRQAEVLKADMTDSKLGPAEVWTSRQALQDLYQKMLVTDLEYALDKKVEQDLWNHAFKNQITTLQGQAKNRANPNRSEVQANLSLFLEAASGFYTQLLQELCTVFNVDLPCRVKSSQLGIISNKQTHTSAIVKPQSSSCSYICQHCLVHLGDIARYRNQTSQAESYYRHAAQLVPSNGQPYNQLAILASSKGDHLTTIFYYCRSIAVKFPFPAASTNLQKALSKALESRDEVKTKWGVSDFIKAFIKFHGHVYLSKSLEKLSPLREKLEEQFKRLLFQKAFNSQQLVHVTVINLFQLHHLRDFSNETEQHTYSQDEQLCWTQLLALFMSFLGILCKCPLQNESQEESYNAYPLPAVKVSMDWLRLRPRVFQEAVVDERQYIWPWLISLLNSFHPHEEDLSSISATPLPEEFELQGFLALRPSFRNLDFSKGHQGITGDKEGQQRRIRQQRLISIGKWIADNQPRLIQCENEVGKLLFITEIPELILEDPSEAKENLILQETSVIESLAADGSPGLKSVLSTSRNLSNNCDTGEKPVVTFKENIKTREVNRDQGRSFPPKEVRRDYSKGITVTKNDGKKDNNKRKTETKKCTLEKLQETGKQNVAVQVKSQTELRKTPVSEARKTPVTQTPTQASNSQFIPIHHPGAFPPLPSRPGFPPPTYVIPPPVAFSMGSGYTFPAGVSVPGTFLQPTAHSPAGNQVQAGKQSHIPYSQQRPSGPGPMNQGPQQSQPPSQQPLTSLPAQPTAQSTSQLQVQALTQQQQSPTKAVPALGKSPPHHSGFQQYQQADASKQLWNPPQVQGPLGKIMPVKQPYYLQTQDPIKLFEPSLQPPVMQQQPLEKKMKPFPMEPYNHNPSEVKVPEFYWDSSYSMADNRSVMAQQANIDRRGKRSPGVFRPEQDPVPRMPFEKSLLEKPSELMSHSSSFLSLTGFSLNQERYPNNSMFNEVYGKNLTSSSKAELSPSMAPQETSLYSLFEGTPWSPSLPASSDHSTPASQSPHSSNPSSLPSSPPTHNHNSVPFSNFGPIGTPDNRDRRTADRWKTDKPAMGGFGIDYLSATSSSESSWHQASTPSGTWTGHGPSMEDSSAVLMESLKSIWSSSMMHPGPSALEQLLMQQKQKQQRGQGTMNPPH

SEQ ID NO: 35796 - protein, 1091 aa, Homo sapiens
MSLQSAQYLRQAEVLKADMTDSKLGPAEVWTSRQALQDLYQKMLVTDLEYALDKKVEQDLWNHAFKNQITTLQGQAKNRANPNRSEVQANLSLFLEAASGFYTQLLQELCTVFNVDLPCRVKSSQLGIISNKQTHTSAIVKPQSSSCSYICQHCLVHLGDIARYRNQTSQAESYYRHAAQLVPSNGQPYNQLAILASSKGDHLTTIFYYCRSIAVKFPFPAASTNLQKALSKALESRDEVKTKWGVSDFIKAFIKFHGHVYLSKSLEKLSPLREKLEEQFKRLLFQKAFNSQQLVHVTVINLFQLHHLRDFSNETEQHTYSQDEQLCWTQLLALFMSFLGILCKCPLQNESQEESYNAYPLPAVKVSMDWLRLRPRVFQEAVVDERQYIWPWLISLLNSFHPHEEDLSSISATPLPEEFELQGFLALRPSFRNLDFSKGHQGITGDKEGQQRRIRQQRLISIGKWIADNQPRLIQCENEVGKLLFITEIPELILEDPSEAKENLILQETSVIESLAADGSPGLKSVLSTSRNLSNNCDTGEKPVVTFKENIKTREVNRDQGRSFPPKEVKSQTELRKTPVSEARKTPVTQTPTQASNSQFIPIHHPGAFPPLPSRPGFPPPTYVIPPPVAFSMGSGYTFPAGVSVPGTFLQPTAHSPAGNQVQAGKQSHIPYSQQRPSGPGPMNQGPQQSQPPSQQPLTSLPAQPTAQSTSQLQVQALTQQQQSPTKAVPALGKSPPHHSGFQQYQQADASKQLWNPPQVQGPLGKIMPVKQPYYLQTQDPIKLFEPSLQPPVMQQQPLEKKMKPFPMEPYNHNPSEVKVPEFYWDSSYSMADNRSVMAQQANIDRRGKRSPGVFRPEQDPVPRMPFEKSLLEKPSELMSHSSSFLSLTGFSLNQERYPNNSMFNEVYGKNLTSSSKAELSPSMAPQETSLYSLFEGTPWSPSLPASSDHSTPASQSPHSSNPSSLPSSPPTHNHNSVPFSNFGPIGTPDNRDRRTADRWKTDKPAMGGFGIDYLSATSSSESSWHQASTPSGTWTGHGPSMEDSSAVLMESLKSIWSSSMMHPGPSALEQLLMQQKQKQQRGQGTMNPPH

SEQ ID NO: 35797 - protein, 1178 aa, Homo sapiens
MSLQSAQYLRQAEVLKADMTDSKLGPAEVWTSRQALQDLYQKMLVTDLEYALDKKVEQDLWNHAFKNQITTLQGQAKNRANPNRSEVQANLSLFLEAASGFYTQLLQELCTVFNVDLPCRVKSSQLGIISNKQTHTSAIVKPQSSSCSYICQHCLVHLGDIARYRNQTSQAESYYRHAAQLVPSNGQPYNQLAILASSKGDHLTTIFYYCRSIAVKFPFPAASTNLQKALSKALESRDEVKTKWGVSDFIKAFIKFHGHVYLSKSLEKLSPLREKLEEQFKRLLFQKAFNSQQLVHVTVINLFQLHHLRDFSNETEQHTYSQDEQLCWTQLLALFMSFLGILCKCPLQNESQEESYNAYPLPAVKVSMDWLRLRPRVFQEAVVDERQYIWPWLISLLNSFHPHEEDLSSISATPLPEEFELQGFLALRPSFRNLDFSKGHQGITGDKEGQQRRIRQQRLISIGKWIADNQPRLIQCENEVGKLLFITEIPELILEDPSEAKENLILQETSVIESLAADGSPGLKSVLSTSRNLSNNCDTGEKPVVTFKENIKTREVNRDQGRSFPPKEVKSQTELRKTPVSEARKTPVTQTPTQASNSQFIPIHHPGAFPPLPSRPGFPPPTYVIPPPVAFSMGSGYTFPAGVSVPGTFLQPTAHSPAGNQVQAGKQSHIPYSQQRPSGPGPMNQGPQQSQPPSQQPLTSLPAQPTAQSTSQLQVQALTQQQQSPTKAVPALGKSPPHHSGFQQYQQADASKQLWNPPQVQGPLGKIMPVKQPYYLQTQDPIKLFEPSLQPPVMQQQPLEKKMKPFPMEPYNHNPSEVKVPEFYWDSSYSMADNRSVMAQQANIDRRGKRSPGVFRPEQDPVPRMPFEDPKSSPLLPPDLLKSLAALEEEEELIFSNPPDLYPALLGPLASLPGRSLFKSLLEKPSELMSHSSSFLSLTGFSLNQERYPNNSMFNEVYGKNLTSSSKAELSPSMAPQETSLYSLFEGTPWSPSLPASSDHSTPASQSPHSSNPSSLPSSPPTHNHNSVPFSNFGPIGTPDNRDRRTADRWKTDKPAMGGFGIDYLSATSSSESSWHQASTPSGTWTGHGPSMEDSSAVLMESLKKQQHGVQQLGPKRQSEEEGSSSICVAHRGPRPLPSCSLPASTFRVKFKAARTCAHQAQKKTRRRPFWKRRKKGK

SEQ ID NO: 35798 - protein, 1145 aa, Homo sapiens
MLVTDLEYALDKKVEQDLWNHAFKNQITTLQGQAKNRANPNRSEVQANLSLFLEAASGFYTQLLQELCTVFNVDLPCRVKSSQLGIISNKQTHTSAIVKPQSSSCSYICQHCLVHLGDIARYRNQTSQAESYYRHAAQLVPSNGQPYNQLAILASSKGDHLTTIFYYCRSIAVKFPFPAASTNLQKALSKALESRDEVKTKWGVSDFIKAFIKFHGHVYLSKSLEKLSPLREKLEEQFKRLLFQKAFNSQQLVHVTVINLFQLHHLRDFSNETEQHTYSQDEQLCWTQLLALFMSFLGILCKCPLQNESQEESYNAYPLPAVKVSMDWLRLRPRVFQEAVVDERQYIWPWLISLLNSFHPHEEDLSSISATPLPEEFELQGFLALRPSFRNLDFSKGHQGITGDKEGQQRRIRQQRLISIGKWIADNQPRLIQCENEVGKLLFITEIPELILEDPSEAKENLILQETSVIESLAADGSPGLKSVLSTSRNLSNNCDTGEKPVVTFKENIKTREVNRDQGRSFPPKEVRRDYSKGITVTKNDGKKDNNKRKTETKKCTLEKLQETGKQNVAVQVKSQTELRKTPVSEARKTPVTQTPTQASNSQFIPIHHPGAFPPLPSRPGFPPPTYVIPPPVAFSMGSGYTFPAGVSVPGTFLQPTAHSPAGNQVQAGKQSHIPYSQQRPSGPGPMNQGPQQSQPPSQQPLTSLPAQPTAQSTSQLQVQALTQQQQSPTKAVPALGKSPPHHSGFQQYQQADASKQLWNPPQVQGPLGKIMPVKQPYYLQTQDPIKLFEPSLQPPVMQQQPLEKKMKPFPMEPYNHNPSEVKVPEFYWDSSYSMADNRSVMAQQANIDRRGKRSPGVFRPEQDPVPRMPFEDPKSSPLLPPDLLKSLAALEEEEELIFSNPPDLYPALLGPLASLPGRSLFKSLLEKPSELMSHSSSFLSLTGFSLNQERYPNNSMFNEVYGKNLTSSSKAELSPSMAPQETSLYSLFEGTPWSPSLPASSDHSTPASQSPHSSNPSSLPSSPPTHNHNSVPFSNFGPIGTPDNRDRRTADRWKTDKPAMGGFGIDYLSATSSSESSWHQASTPSGTWTGHGPSMEDSSAVLMESLKSIWSSSMMHPGPSALEQLLMQQKQKQQRGQGTMNPPH

SEQ ID NO: 35799 - protein, 1015 aa, Homo sapiens
MASSPLPGPNDILLASPSSAFQPDTLSQPRPGHANLKPNQVGQVILYGIPIVSLVIDGQERLCLAQISNTLLKNFSYNEIHNRRVALGITCVQCTPVQLEILRRAGAMPISSRRCGMITKREAERLCKSFLGENRPPKLPDNFAFDVSHECAWGCRGSFIPARYNSSRAKCIKCSYCNMYFSPNKFIFHSHRTPDAKYTQPDAANFNSWRRHLKLTDKSPQDELVFAWEDVKAMFNGGSRKRALPQPGAHPACHPLSSVKAAAVAAAAAVAGGGGLLGPHLLGAPPPPPPPPPPLAELAGAPHAHHKRPRFDDDDDSLQEAAVVAAASLSAAAASLSVAAASGGAGTGGGGAGGGCVAGVGVGAGAGAGAGAGAKGPRSYPVIPVPSKGSFGGVLQKFPGCGGLFPHPYTFPAAAAAFSLCHKKEDAGAAAEALGGAGAGGAGAAPKAGLSGLFWPAGRKDAFYPPFCMFWPPRTPGGLPVPTYLQPPPQPPSALGCALGESPALLRQAFLDLAEPGGAAGSAEAAPPPGQPPQVVANGPGSGPPPPAGGAGSRDALFESPPGGSGGDCSAGSTPPADSVAAAGAGAAAAGSGPAGSRVPAPHHPHLLEGRKAGGGSYHHSSAFRPVGGKDDAESLAKLHGASAGAPHSAQTHPHHHHHPHHHHHHHHPPQPPSPLLLLPPQPDEPGSERHHPAPPPPPPPPPPPPLAQHPHHRGLLSPGGTSCCYPSEDSSEDEDDEEEEQEVDVEGHKPPEGEEEEEGRDPDDDEEEDEETEVLLGDPLVGGGRFLQGRGPSEKGSSRDRAPAVAGAFPLGLNSSRLLQEDGKLGDPGSDLPPPPPPPLAPQKASGGGSSSPGSPVHHPSLEEQPSYKDSQKTKENNQVIVSTKDDNSFSDKNKEHSFFITDSDASGGDFWRERSGEHTQETNSPHSLKKDVENMGKEELQKVLFEQIDLRRRLEQEFQVLKGNTSFPVFNNFQDQMKRELAYREEMVQQLQIIPYAASLIRKEKLGAHLSKS

SEQ ID NO: 35800 - protein, 296 aa, Homo sapiens
MASSPLPGPNDILLASPSSAFQPDTLSQPRPGHANLKPNQVGQVILYGIPIVSLVIDGQERLCLAQISNTLLKNFSYNEIHNRRVALGITCVQCTPVQLEILRRAGAMPISSRRCGMITKREAERLCKSFLGENRPPKLPDNFAFDVSHECAWGCRGSFIPARYNSSRAKCIKCSYCNMYFSPNKFIFHSHRTPDAKYTQPDAANFNSWRRHLKLTDKSPQDELVFAWEDVKAMFNGGSRKRALPQPGAHPACHPLSSIRTRSIAFSSQTLMLLEEIFGEKDQEDYMRINEDNIWL

SEQ ID NO: 35801 - protein, 295 aa, Homo sapiens
MLQGPGSLLLLFLASHCCLGSARGLFLFGQPDFSYKRSNCKPIPANLQLCHGIEYQNMRLPNLLGHETMKEVLEQAGAWIPLVMKQCHPDTKKFLCSLFAPVCLDDLDETIQPCHSLCVQVKDRCAPVMSAFGFPWPDMLECDRFPQDNDLCIPLASSDHLLPATEEAPKVCEACKNKNDDDNDIMETLCKNDFALKIKVKEITYINRDTKIILETKSKTIYKLNGVSERDLKKSVLWLKDSLQCTCEEMNDINAPYLVMGQKQGGELVITSVKRWQKGQREFKRISRSIRKLQC

SEQ ID NO: 35802 - protein, 523 aa, Homo sapiens
MVAPGLVLGLVLPLILWADRSAGIGFRFASYINNDMVLQKEPAGAVIWGFGTPGATVTVTLRQGQETIMKKVTSVKAHSDTWMVVLDPMKPGGPFEVMAQQTLEKINFTLRVHDVLFGDVWLCSGQSNMQMTVLQIFNATRELSNTAAYQSVRILSVSPIQAEQELEDLVAVDLQWSKPTSENLGHGYFKYMSAVCWLFGRHLYDTLQYPIGLIASSWGGTPIEAWSSGRSLKACGVPKQGSIPYDSVTGPSKHSVLWNAMIHPLCNMTLKGVVWYQGESNINYNTDLYNCTFPALIEDWRETFHRGSQGQTERFFPFGLVQLSSDLSKKSSDDGFPQIRWHQTADFGYVPNPKMPNTFMAVAMDLCDRDSPFGSIHPRDKQTVAYRLHLGARALAYGEKNLTFEGPLPEKIELLAHKGLLNLTYYQQIQVQKKDNKIFEISCCSDHRCKWLPASMNTVSTQSLTLAIDSCHGTVVALRYAWTTWPCEYKQCPLYHPSSALPAPPFIAFITDQGPGHQSNVAK

SEQ ID NO: 35803 - protein, 488 aa, Homo sapiens
MVLQKEPAGAVIWGFGTPGATVTVTLRQGQETIMKKVTSVKAHSDTWMVVLDPMKPGGPFEVMAQQTLEKINFTLRVHDVLFGDVWLCSGQSNMQMTVLQIFNATRELSNTAAYQSVRILSVSPIQAEQELEDLVAVDLQWSKPTSENLGHGYFKYMSAVCWLFGRHLYDTLQYPIGLIASSWGGTPIEAWSSGRSLKACGVPKQGSIPYDSVTGPSKHSVLWNAMIHPLCNMTLKGVVWYQGESNINYNTDLYNCTFPALIEDWRETFHRGSQGQTERFFPFGLVQLSSDLSKKSSDDGFPQIRWHQTADFGYVPNPKMPNTFMAVAMDLCDRDSPFGSIHPRDKQTVAYRLHLGARALAYGEKNLTFEGPLPEKIELLAHKGLLNLTYYQQIQVQKKDNKIFEISCCSDHRCKWLPASMNTVSTQSLTLAIDSCHGTVVALRYAWTTWPCEYKQCPLYHPSSALPAPPFIAFITDQGPGHQSNVAK

SEQ ID NO: 35804 - protein, 197 aa, Homo sapiens
MLPLLQLVPAKLLNSSCSLEKTLQCSCSFHGIPTPSVQWWMGGVPVGVDGMDGSLQVTSTMLGPWANSTISLTEEPEMGMRLLCEGKNQNGTHALSILLMSRKSSLAAQAFVKGLIQGAIYAGIVIALLFLCLLPLIVKHIRKKQAKKAAAIRAKKSSKVRASQELEMSLKPEEPGKPVVATFSESRILEKQDKRAS

SEQ ID NO: 35805 - protein, 325 aa, Homo sapiens
MVCGSPGGMLLLRAGLLALAALCLLRVPGARAAACEPVRIPLCKSLPWNMTKMPNHLHHSTQANAILAIEQFEGLLGTHCSPDLLFFLCAMYAPICTIDFQHEPIKPCKSVCERARQGCEPILIKYRHSWPENLACEELPVYDRGVCISPEAIVTADGADFPMDSSNGNCRGASSERCKCKPIRATQKTYFRNNYNYVIRAKVKEIKTKCHDVTAVVEVKEILKSSLVNIPRDTVNLYTSSGCLCPPLNVNEEYIIMGYEDEERSRLLLVEGSIAEKWKDRLGKKVKRWDMKLRHLGLSKSDSSNSDSTQSQKSGRNSNPRQARN

SEQ ID NO: 35806 - protein, 852 aa, Homo sapiens
MEALGPGGDRASPASSTSSLDLWHLSMRADSAYSSFSAASGGPEPRTQSPGTDLLPYLDWDYVRVVWGGPGPAPPDAALCTSPRPRPAVAARSGPQPTEVPGTPGPLNRQATPLLYALAAEAEAAAQAAEPPSPPASRAAYRQRLQGAQRRVLRETSFQRKELRMSLPARLRPTVPARPPATHPRSASLSHPGGEGEPARSRAPAPGTAGRGPLANQQRKWCFSEPGKLDRVGRGGGPARECLGEACSSSGLPGPEPLEFQHPALAKFEDHEVGWLPETQPQGSMNLDSGSLKLGDAFRPASRSRSASGEVLGSWGGSGGTIPIVQAVPQGAETPRPLFQTKLSRFLPQKEAAVMYPAELPQSSPADSEQRVSETCIVPAWLPSLPDEVFLEEAPLVRMRSPPDPHASQGPPASVHASDQPYGTGLGQRTGQVTVPTEYPLHECPGTAGADDCWQGVNGSVGISRPTSHTPTGTANDNIPTIDPTGLTTNPPTAAESDLLKPVPADALGLSGNDTPGPSHNTALARGTGQPGSRPTWPSQCLEELVQELARLDPSLCDPLASQPSPEPPLGLLDGLIPLAEVRAAMRPACGEAGEEAASTFEPGSYQFSFTQLLPAPREETRLENPATHPVLDQPCGQGLPAPNNSIQGKKVELAARLQKMLQDLHTEQERLQGEAQAWARRQAALEAAVRQACAPQELERFSRFMADLERVLGLLLLLGSRLARVRRALARAASDSDPDEQASLLQRLRLLQRQEEDAKELKEHVARRERAVREVLVRALPVEELRVYCALLAGKAAVLAQQRNLDERIRLLQDQLDAIRDDLGHHAPSPSPARPPGTCPPVQPPFPLLLT

SEQ ID NO: 35807 - protein, 847 aa, Homo sapiens
MEALGPGGDRASPASSTSSLDLWHLSMRADSAYSSFSAASGGPEPRTQSPGTDLLPYLDWDYVRVVWGGPGPAPPDAALCTSPRPRPAVAARSGPQPTEVPGTPGPLNRQATPLLYALAAEAEAAAQAAEPPSPPASRAAYRQRLQGAQRRVLRETSFQRKELRMSLPARLRPTVPARPPATHPRSASLSHPGGEGEPARSRAPAPGTAGRGPLANQQRKWCFSEPGKLDRVGRGGGPARECLGEACSSSGLPGPEPLEFQHPALAKFEDHEVGWLPETQPQGSMNLDSGSLKLGDAFRPASRSRSASGEVLGSWGGSGGTIPIVQAVPQGAETPRPLFQTKLSRFLPQKEAAVMYPAELPQSSPADSEQRVSETCIVPAWLPSLPDEVFLEEAPLVRMRSPPDPHASQGPPASVHASDQPYGTGLGQRTGQVTVPTEYPLHECPGTAGADDCWQGVNGSVGISRPTSHTPTGTANDNIPTIDPTGLTTNPPTAAESDLLKPVPADALGLSGNDTPGPSHNTALARGTGQPGSRPTWPSQCLEELVQELARLDPSLCDPLASQPSPEPPLGLLDGLIPLAEVRAAMRPACGEAGEEAASTFEPGSYQFSFTQLLPAPREETRLENPATHPVLDQPCGQGLPAPNNSIQGKKVELAARLQKMLQDLHTEQERLQGEAQAWARRQAALEAAVRQACAPQELERFSRFMADLERVLGLLLLLGSRLARVRRALARAASDSDPDEQRLRLLQRQEEDAKELKEHVARRERAVREVLVRALPVEELRVYCALLAGKAAVLAQQRNLDERIRLLQDQLDAIRDDLGHHAPSPSPARPPGTCPPVQPPFPLLLT

SEQ ID NO: 35808 - protein, 473 aa, Homo sapiens
MATQAKRPRVAGPVDGGDLDPVACFLSWCRRVGLELSPKVSERAGGRRTRGGARAALTSPPAQVAVSRQGTVAGYGMVARESVQAGELLFVVPRAALLSQHTCSIGGLLERERVALQSQSGWVPLLLALLHELQAPASRWRPYFALWPELGRLEHPMFWPEEERRCLLQGTGVPEAVEKDLANIRSEYQSIVLPFMEAHPDLFSLRVRSLELYHQLVALVMAYSFQEPLEEEEDEKEPNSPVMVPAADILNHLANHNANLEYSANCLRMVATQPIPKGHEIFNTYGQMANWQLIHMYGFVEPYPDNTDDTADIQMVTVREAALQGTKTEAERHLVYERWDFLCKLEMVGEEGAFVIGREEVLTEEELTTTLKVLCMPAEEFRELKDQDGGGDDKREEGSLTITNIPKLKASWRQLLQNSVLLTLQTYATDLKTDQGLLSNKEVYAKLSWREQQALQVRYGQKMILHQLLELTS

SEQ ID NO: 35809 - protein, 449 aa, Homo sapiens
MATQAKRPRVAGPVDGGDLDPVACFLSWCRRVGLELSPKVAVSRQGTVAGYGMVARESVQAGELLFVVPRAALLSQHTCSIGGLLERERVALQSQSGWVPLLLALLHELQAPASRWRPYFALWPELGRLEHPMFWPEEERRCLLQGTGVPEAVEKDLANIRSEYQSIVLPFMEAHPDLFSLRVRSLELYHQLVALVMAYSFQEPLEEEEDEKEPNSPVMVPAADILNHLANHNANLEYSANCLRMVATQPIPKGHEIFNTYGQMANWQLIHMYGFVEPYPDNTDDTADIQMVTVREAALQGTKTEAERHLVYERWDFLCKLEMVGEEGAFVIGREEVLTEEELTTTLKVLCMPAEEFRELKDQDGGGDDKREEGSLTITNIPKLKASWRQLLQNSVLLTLQTYATDLKTDQGLLSNKEVYAKLSWREQQALQVRYGQKMILHQLLELTS

SEQ ID NO: 35810 - protein, 78 aa, Homo sapiens; identical to SEQ ID NO: 4982

SEQ ID NO: 35811 - protein, 366 aa, Homo sapiens
MDSDDEMVEEAVEGHLDDDGLPHGFCTVTYSSTDRFEGNFVHGEKNGRGKFFFFDGSTLEGYYVDDALQGQGVYTYEDGGVLQGTYVDGELNGPAQEYDTDGRLIFKGQYKDNIRHGVCWIYYPDGGSLVGEVNEDGEMTGEKIAYVYPDERTALYGKFIDGEMIEGKLATLMSTEEGRPHFELMPGNSVYHFDKSTSSCISTNALLPDPYESERVYVAESLISSAGEGLFSKVAVGPNTVMSFYNGVRITHQEVDSRDWALNGNTLSLDEETVIDVPEPYNHVSKYCASLGHKANHSFTPNCIYDMFVHPRFGPIKCIRTLRAVEADEELTVAYGYDHSPPGKSGPEAPEWYQVELKAFQATQQK

SEQ ID NO: 35812 - protein, 83 aa, Homo sapiens
MEALGSGHYVGGSIRSMAAAALSGLAVRLSRPQGTRGSYGAFCKTLTRTLLTFFDLAWRLRKNFFYFYILASVILNVHLQVYI

SEQ ID NO: 35813 - protein, 337 aa, Homo sapiens
MSLEQEEETQPGRLLGRRDAVPAFIEPNVRFWITERQSFIRRFLQWTELLDPTNVFISVESIENSRQLLCTNEDVSSPASADQRIQEAWKRSLATVHPDSSNLIPKLFRPAAFLPFMAPTVFLSMTPLKGIKSVILPQVFLCAYMAAFNSINGNRSYTCKPLERSLLMAGAVASSTFLGVIPQFVQMKYGLTGPWIKRLLPVIFLVQASGMNVYMSRSLESIKGIAVMDKEGNVLGHSRIAGTKAVRETLASRIVLFGTSALIPEVFTYFFKRTQYFRKNPGSLWILKLSCTVLAMGLMVPFSFSIFPQIGQIQYCSLEEKIQSPTEETEIFYHRGV

SEQ ID NO: 35814 - protein, 305 aa, Homo sapiens
MSLEQEEETQPGRLLGRRDAVPAFIEPNVRFWITERQSFIRRFLQWTELLDPTNVFISVESIENSRQLLCTNEDVSSPASADQRATVHPDSSNLIPKLFRPAAFLPFMAPTVFLSMTPLKGIKSVILPQVFLCAYMAAFNSINGNRSYTCKPLERSLLMAGAVASSTFLGVIPQFVQMKYGLTGPWIKRLLPVIFLVQASGMNVYMSRSLESIKGIAVMDKEGNVLGHSRIAGTKAVRETLASRIVLFGTSALIPEVFTYFFKRTQYFRKNPGSLWILKLSCTVLAMGLMVPFSFSIFPQIGQVT

SEQ ID NO: 35815 - protein, 221 aa, Homo sapiens
MAPTVFLSMTPLKGIKSVILPQVFLCAYMAAFNSINGNRSYTCKPLERSLLMAGAVASSTFLGVIPQFVQMKYGLTGPWIKRLLPVIFLVQASGMNVYMSRSLESIKGIAVMDKEGNVLGHSRIAGTKAVRETLASRIVLFGTSALIPEVFTYFFKRTQYFRKNPGSLWILKLSCTVLAMGLMVPFSFSIFPQIGQIQYCSLEEKIQSPTEETEIFYHRGV

SEQ ID NO: 35816 - protein, 475 aa, Homo sapiens
MVEDLAASYIVLKLENEIRQAQVQWLMEENAALQAQIPELQKSQAAKEYDLLRKSSEAKEPQKLPEHMNPPAAWEAQKTPEFKEPQKPPEPQDLLPWEPPAAWELQEAPAAPESLAPPATRESQKPPMAHEIPTVLEGQGPANTQDATIAQEPKNSEPQDPPNIEKPQEAPEYQETAAQLEFLELPPPQEPLEPSNAQEFLELSAAQESLEGLIVVETSAASEFPQAPIGLEATDFPLQYTLTFSGDSQKLPEFLVQLYSYMRVRGHLYPTEAALVSFVGNCFSGRAGWWFQLLLDIQSPLLEQCESFIPVLQDTFDNPENMKDANQCIHQLCQGEGHVATHFHLIAQELNWDESTLWIQFQEGLASSIQDELSHTSPATNLSDLITQCISLEEKPDPNPLGKSSSAEGDGPESPPAENQPMQAAINCPHISEAEWVRWHKGRLCLYCGYPGHFARDCPVKPHQALQAGNIQACQ

SEQ ID NO: 35817 - protein, 223 aa, Homo sapiens
MNKPLLWISVLTSLLEAFAHTDLSGKVFVFPRESVTDHVNLITPLEKPLQNFTLCFRAYSDLSRAYSLFSYNTQGRDNELLVYKERVGEYSLYIGRHKVTSKVIEKFPAPVHICVSWESSSGIAEFWINGTPLVKKGLRQGYFVEAQPKIVLGQEQDSYGGKFDRSQSFVGEIGDLYMWDSVLPPENILSAYQGTPLPANILDWQALNYEIRGYVIIKPLVWV

SEQ ID NO: 35818 - protein, 1094 aa, Homo sapiens
MNVNQSVPPVPPFGQPQPIYPGYHQSSYGGQSGSTAPAIPYGAYNGPVPGYQQTPPQGMSRAPPSSGAPPASTAQAPCGQAAYGQFGQGDVQNGPSSTVQMQRLPGSQPFGSPLAPVGNQPPVLQPYGPPPTSAQVATQLSGMQISGAVAPAPPSSGLGFGPPTSLASASGSFPNSGLYGSYPQGQAPPLSQAQGHPGIQTPQRSAPSQASSFTPPASGGPRLPSMTGPLLPGQSFGGPSVSQPNHVSSPPQALPPGTQMTGPLGPLPPMHSPQQPGYQPQQNGSFGPARGPQSNYGGPYPAAPTFGSQPGPPQPLPPKRLDPDAIPSPIQVIEDDRNNRGTEPFVTGVRGQVPPLVTTNFLVKDQGNASPRYIRCTSYNIPCTSDMAKQAQVPLAAVIKPLARLPPEEASPYVVDHGESGPLRCNRCKAYMCPFMQFIEGGRRFQCCFCSCINDVPPQYFQHLDHTGKRVDAYDRPELSLGSYEFLATVDYCKNNKFPSPPAFIFMIDVSYNAIRTGLVRLLCEELKSLLDFLPREGGAEESAIRVGFVTYNKVLHFYNVKSSLAQPQMMVVSDVADMFVPLLDGFLVNVNESRAVITSLLDQIPEMFADTRETETVFVPVIQAGMEALKAAECAGKLFLFHTSLPIAEAPGKLKNRDDRKLINTDKEKTLFQPQTGAYQTLAKECVAQGCCVDLFLFPNQYVDVATLSVVPQLTGGSVYKYASFQVENDQERFLSDLRRDVQKVVGFDAVMRVRTSTGIRAVDFFGAFYMSNTTDVELAGLDGDKTVTVEFKHDDRLNEESGALLQCALLYTSCAGQRRLRIHNLALNCCTQLADLYRNCETDTLINYMAKFAYRGVLNSPVKAVRDTLITQCAQILACYRKNCASPSSAGQLILPECMKLLPVYLNCVLKSDVLQPGAEVTTDDRAYVRQLVTSMDVTETNVFFYPRLLPLTKSPVESTTEPPAVRASEERLSNGDIYLLENGLNLFLWVGASVQQGVVQSLFSVSSFSQITSGLSVLPVLDNPLSKKVRGLIDSLRAQRSRYMKLTVVKQEDKMEMLFKHFLVEDKSLSGGASYVDFLCHMHKEIRQLLS

SEQ ID NO: 35819 - protein, 342 aa, Homo sapiens
MRVRTSTGIRAVDFFGAFYMSNTTDVELAGLDGDKTVTVEFKHDDRLNEESGALLQCALLYTSCAGQRRLRIHNLALNCCTQLADLYRNCETDTLINYMAKFAYRGVLNSPVKAVRDTLITQCAQILACYRKNCASPSSAGQLILPECMKLLPVYLNCVLKSDVLQPGAEVTTDDRAYVRQLVTSMDVTETNVFFYPRLLPLTKSPVESTTEPPAVRASEERLSNGDIYLLENGLNLFLWVGASVQQGVVQSLFSVSSFSQITSGLSVLPVLDNPLSKKVRGLIDSLRAQRSRYMKLTVVKQEDKMEMLFKHFLVEDKSLSGGASYVDFLCHMHKEIRQLLS

SEQ ID NO: 35820 - protein, 425 aa, Homo sapiens
MMPSESGAERRDRAAAQVGTAAATAVATAAPAGGGPDPEALSAFPGRHLSGLSWPQVKRLDALLSEPIPIHGRGNFPTLSVQPRQIVQVVRSTLEEQGLHVHSVRLHGSAASHVLHPESGLGYKDLDLVFRVDLRSEASFQLTKAVVLACLLDFLPAGVSRAKITPLTLKEAYVQKLVKVCTDSDRWSLISLSNKSGKNVELKFVDSVRRQFEFSIDSFQIILDSLLLFGQCSSTPMSEAFHPTVTGESLYGDFTEALEHLRHRVIATRSPEEIRGGGLLKYCHLLVRGFRPRPSTDVRALQRYMCSRFFIDFPDLVEQRRTLERYLEAHFGGADAARRYACLVTLHRVVNESTVCLMNHERRQTLDLIAALALQALAEQGPAATAALAWRPPGTDGVVPATVNYYVTPVQPLLAHAYPTWLPCN

SEQ ID NO: 35821 - protein, 765 aa, Homo sapiens
MTTYLEFIQQNEERDGVRFSWNVWPSSRLEATRMVVPVAALFTPLKERPDLPPIQYEPVLCSRTTCRAVLNPLCQVDYRAKLWACNFCYQRNQFPPSYAGISELNQPAELLPQFSSIEYVVLRGPQMPLIFLYVVDTCMEDEDLQALKESMQMSLSLLPPTALVGLITFGRMVQVHELGCEGISKSYVFRGTKDLSAKQLQEMLGLSKVPLTQATRGPQVQQPPPSNRFLQPVQKIDMNLTDLLGELQRDPWPVPQGKRPLRSSGVALSIAVGLLECTFPNTGARIMMFIGGPATQGPGMVVGDELKTPIRSWHDIDKDNAKYVKKGTKHFEALANRAATTGHVIDIYACALDQTGLLEMKCCPNLTGGYMVMGDSFNTSLFKQTFQRVFTKDMHGQFKMGFGGTLEIKTSREIKISGAIGPCVSLNSKGPCVSENEIGTGGTCQWKICGLSPTTTLAIYFEVVNQHNAPIPQGGRGAIQFVTQYQHSSGQRRIRVTTIARNWADAQTQIQNIAASFDQEAAAILMARLAIYRAETEEGPDVLRWLDRQLIRLCQKFGEYHKDDPSSFRFSETFSLYPQFMFHLRRSSFLQVFNNSPDESSYYRHHFMRQDLTQSLIMIQPILYAYSFSGPPEPVLLDSSSILADRILLMDTFFQILIYHGETIAQWRKSGYQDMPEYENFRHLLQAPVDDAQEILHSRFPMPRYIDTEHGGSQARFLLSKVNPSQTHNNMYAWGQESGAPILTDDVSLQVFMDHLKKLAVSSAA

SEQ ID NO: 35822 - protein, 563 aa, Homo sapiens
MLGLSKVPLTQATRGPQVQQPPPSNRFLQPVQKIDMNLTDLLGELQRDPWPVPQGKRPLRSSGVALSIAVGLLECTFPNTGARIMMFIGGPATQGPGMVVGDELKTPIRSWHDIDKDNAKYVKKGTKHFEALANRAATTGHVIDIYACALDQTGLLEMKCCPNLTGGYMVMGDSFNTSLFKQTFQRVFTKDMHGQFKMGFGGTLEIKTSREIKISGAIGPCVSLNSKGPCVSENEIGTGGTCQWKICGLSPTTTLAIYFEVVNQHNAPIPQGGRGAIQFVTQYQHSSGQRRIRVTTIARNWADAQTQIQNIAASFDQEAAAILMARLAIYRAETEEGPDVLRWLDRQLIRLCQKFGEYHKDDPSSFRFSETFSLYPQFMFHLRRSSFLQVFNNSPDESSYYRHHFMRQDLTQSLIMIQPILYAYSFSGPPEPVLLDSSSILADRILLMDTFFQILIYHGETIAQWRKSGYQDMPEYENFRHLLQAPVDDAQEILHSRFPMPRYIDTEHGGSQARFLLSKVNPSQTHNNMYAWGQESGAPILTDDVSLQVFMDHLKKLAVSSAA

SEQ ID NO: 35823 - protein, 455 aa, Homo sapiens
MGACLGACSLLSCASCLCGSAPCILCSCCPASRNSTVSRLIFTFFLFLGVLVSIIMLSPGVESQLYKLPWVCEEGAGIPTVLQGHIDCGSLLGYRAVYRMCFATAAFFFFFTLLMLCVSSSRDPRAAIQNGFWFFKFLILVGLTVGAFYIPDGSFTNIWFYFGVVGSFLFILIQLVLLIDFAHSWNQRWLGKAEECDSRAWYAGLFFFTLLFYLLSIAAVALMFMYYTEPSGCHEGKVFISLNLTFCVCVSIAAVLPKVQDAQPNSGLLQASVITLYTMFVTWSALSSIPEQKCNPHLPTQLGNETVVAGPEGYETQWWDAPSIVGLIIFLLCTLFISLRSSDHRQVNSLMQTEECPPMLDATQQQQQVAACEGRAFDNEQDGVTYSYSFFHFCLVLASLHVMMTLTNWYKPGETRKMISTWTAVWVKICASWAGLLLYLWTLVAPLLLRNRDFS

SEQ ID NO: 35824 - protein, 459 aa, Homo sapiens
MGAEGAPDFLSCPRVRRASCLCGSAPCILCSCCPASRNSTVSRLIFTFFLFLGVLVSIIMLSPGVESQLYKLPWVCEEGAGIPTVLQGHIDCGSLLGYRAVYRMCFATAAFFFFFTLLMLCVSSSRDPRAAIQNGFWFFKFLILVGLTVGAFYIPDGSFTNIWFYFGVVGSFLFILIQLVLLIDFAHSWNQRWLGKAEECDSRAWYAGLFFFTLLFYLLSIAAVALMFMYYTEPSGCHEGKVFISLNLTFCVCVSIAAVLPKVQDAQPNSGLLQASVITLYTMFVTWSALSSIPEQKCNPHLPTQLGNETVVAGPEGYETQWWDAPSIVGLIIFLLCTLFISLRSSDHRQVNSLMQTEECPPMLDATQQQQQVAACEGRAFDNEQDGVTYSYSFFHFCLVLASLHVMMTLTNWYKPGETRKMISTWTAVWVKICASWAGLLLYLWTLVAPLLLRNRDFS

SEQ ID NO: 35825 - protein, 459 aa, Homo sapiens
MRSMRLREEESPGPSHTASCLCGSAPCILCSCCPASRNSTVSRLIFTFFLFLGVLVSIIMLSPGVESQLYKLPWVCEEGAGIPTVLQGHIDCGSLLGYRAVYRMCFATAAFFFFFTLLMLCVSSSRDPRAAIQNGFWFFKFLILVGLTVGAFYIPDGSFTNIWFYFGVVGSFLFILIQLVLLIDFAHSWNQRWLGKAEECDSRAWYAGLFFFTLLFYLLSIAAVALMFMYYTEPSGCHEGKVFISLNLTFCVCVSIAAVLPKVQDAQPNSGLLQASVITLYTMFVTWSALSSIPEQKCNPHLPTQLGNETVVAGPEGYETQWWDAPSIVGLIIFLLCTLFISLRSSDHRQVNSLMQTEECPPMLDATQQQQQVAACEGRAFDNEQDGVTYSYSFFHFCLVLASLHVMMTLTNWYKPGETRKMISTWTAVWVKICASWAGLLLYLWTLVAPLLLRNRDFS

SEQ ID NO: 35826 - protein, 464 aa, Homo sapiens
MDGRMMRSMRLREEESPGPSHTASCLCGSAPCILCSCCPASRNSTVSRLIFTFFLFLGVLVSIIMLSPGVESQLYKLPWVCEEGAGIPTVLQGHIDCGSLLGYRAVYRMCFATAAFFFFFTLLMLCVSSSRDPRAAIQNGFWFFKFLILVGLTVGAFYIPDGSFTNIWFYFGVVGSFLFILIQLVLLIDFAHSWNQRWLGKAEECDSRAWYAGLFFFTLLFYLLSIAAVALMFMYYTEPSGCHEGKVFISLNLTFCVCVSIAAVLPKVQDAQPNSGLLQASVITLYTMFVTWSALSSIPEQKCNPHLPTQLGNETVVAGPEGYETQWWDAPSIVGLIIFLLCTLFISLRSSDHRQVNSLMQTEECPPMLDATQQQQQVAACEGRAFDNEQDGVTYSYSFFHFCLVLASLHVMMTLTNWYKPGETRKMISTWTAVWVKICASWAGLLLYLWTLVAPLLLRNRDFS

SEQ ID NO: 35827 - protein, 518 aa, Homo sapiens
MVGAKAGPSPGTSLGLAQQHSGGSSVLVKSPFCQVCCCGPAPCASCCHSRWPSLTASTCSRLFYILLHVGASAICCLLLSRTVVERVWGKTHRIQMPSGLCAHLFGLSDCPVLSGSGAVYRVCAGTATFHLLQAVLLVHLHSPTSPRAQLHNSFWLLKLLFLLGLCAIAFCIPDEHLFPAWHYIGICGGFAFILLQLVLITAFAHSWNKNWQTGAAQDCSWFLAVLLATLGFYSMAGVGAVLLFHYYTHPAGCLLNKMLLSLHLCFCGLISFLSIAPCIRLKQPRSGLLQASVISCYIMYLTFSALSSRPPERVILQGQNHTLCLPGLSKMEPQTPDISLAMLSASIMYACVLFACNEASYLAEVFGPLWIVKVYSYEFQKPSLCFCCPETVEADKGQRGGAARPADQETPPAPPVQVQHLSYNYSAFHFVFFLASLYVMVTLTNWFSYEGAELEKTFIKGSWATFWVKVASCWACVLLYLGLLLAPLCWPPTQKPQPLILRRRRHRIISPDNKYPPV

SEQ ID NO: 35828 - protein, 274 aa, Homo sapiens
MSISSQHGITLASVEALHSSYCSWCLLQLLPIPGTRTEQPRSGLLQASVISCYIMYLTFSALSSRPPERVILQGQNHTLCLPGLSKMEPQTPDISLAMLSASIMYACVLFACNEASYLAEVFGPLWIVKVYSYEFQKPSLCFCCPETVEADKGQRGGAARPADQETPPAPPVQVQHLSYNYSAFHFVFFLASLYVMVTLTNWFSYEGAELEKTFIKGSWATFWVKVASCWACVLLYLGLLLAPLCWPPTQKPQPLILRRRRHRIISPDNKYPPV

SEQ ID NO: 35829 - protein, 338 aa, Homo sapiens
MAGSHPYFNLPDSTHPSPPSTPPSLHWHQRCQPSDATNGLLVALLGGGLPAGFVGPLSRMAYQASNLPSLELVICRCLFHLPIALLLKLRGDPLLGPPDIRGRTCFCALLNVLNIGCAYSAVQVVPTGNAATVRKHSSTVCSAILTLCLESQVLSGYDWCGLLGSILGLIIIVGPGLWTLQEGTTGVYTGLGYVQAFLGGLALSLGLLVYRSLHFPSCLPTVAFLSGLVGLLGSVPGLFVLQSPVLPSDLLSWSCVGAVGILTLVSFTCVGYAVTKAHPALVCAVLHSEVVMALILQYFMLHETVAPSDIMGAGVVLGSIAIITARNLICERTGKVEE

SEQ ID NO: 35830 - protein, 506 aa, Homo sapiens
MKKAEMGRFSISPDEDSSSYSSNSDFNYSYPTKQAALKSHYADVDPENQNFLLESNLGKKKYETEFHPGTTSFGMSVFNLSNAIVGSGILGLSYAMANTGIALFIILLTFVSIFSLYSVHLLLKTANEGGSLLYEQLGYKAFGLVGKLAASGSITMQNIGAMSSYLFIVKYELPLVIQALTNIEDKTGLWYLNGNYLVLLVSLVVILPLSLFRNLGYLGYTSGLSLLCMVFFLIVVICKKFQVPCPVEAALIINETINTTLTQPTALVPALSHNVTENDSCRPHYFIFNSQTVYAVPILIFSFVCHPAVLPIYEELKDRSRRRMMNVSKISFFAMFLMYLLAALFGYLTFYEHVESELLHTYSSILGTDILLLIVRLAVLMAVTLTVPVVIFPIRSSVTHLLCASKDFSWWRHSLITVSILAFTNLLVIFVPTIRDIFGFIGASAASMLIFILPSAFYIKLVKKEPMKSVQKIGALFFLLSGVLVMTGSMALIVLDWVHNAPGGGH

SEQ ID NO: 35831 - protein, 406 aa, Homo sapiens
MKQNLILLTFVSIFSLYSVHLLLKTANEGGSLLYEQLGYKAFGLVGKLAASGSITMQNIGAMSSYLFIVKYELPLVIQALTNIEDKTGLWYLNGNYLVLLVSLVVILPLSLFRNLGYLGYTSGLSLLCMVFFLIVVICKKFQVPCPVEAALIINETINTTLTQPTALVPALSHNVTENDSCRPHYFIFNSQTVYAVPILIFSFVCHPAVLPIYEELKDRSRRRMMNVSKISFFAMFLMYLLAALFGYLTFYEHVESELLHTYSSILGTDILLLIVRLAVLMAVTLTVPVVIFPIRSSVTHLLCASKDFSWWRHSLITVSILAFTNLLVIFVPTIRDIFGFIGASAASMLIFILPSAFYIKLVKKEPMKSVQKIGALFFLLSGVLVMTGSMALIVLDWVHNAPGGGH

SEQ ID NO: 35832 - protein, 311 aa, Homo sapiens
MGSFQLEDFAAGWIGGAASVIVGHPLDTVKTRLQAGVGYGNTLSCIRVVYRRESMFGFFKGMSFPLASIAVYNSVVFGVFSNTQRFLSQHRCGEPEASPPRTLSDLLLASMVAGVVSVGLGGPVDLIKIRLQMQTQPFRDANLGLKSRAVAPAEQPAYQGPVHCITTIVRNEGLAGLYRGASAMLLRDVPGYCLYFIPYVFLSEWITPEACTGPSPCAVWLAGGMAGAISWGTATPMDVVKSRLQADGVYLNKYKGVLDCISQSYQKEGLKVFFRGITVNAVRGFPMSAAMFLGYELSLQAIRGDHAVTSP

SEQ ID NO: 35833 - protein, 291 aa, Homo sapiens
MGSFQLEDFAAGWIGGAASVIVGHPLDTVKTRLQAGVGYGNTLSCIRVVYRRESMFGFFKGMSFPLASIAVYNSVVFGVFSNTQRFLSQHRCGEPEASPPRTLSDLLLASMVAGVVSVGLGGPVDLIKIRLQMQTQPFRDANLGLKSRAVAPAEQPAYQGPVHCITTIVRNEGLAGLYRGASAMLLRDVPGYCLYFIPYVFLSEWITPEACTGPSPCAVWLAGGMAGKGSSSWSRTPVQATAVGQLGNCHALLSPGGGQDTFRYSPNNSLLGTYSVPGPLPPQSHPFPMQL

SEQ ID NO: 35834 - protein, 157 aa, Homo sapiens
MGSFQLEDFAAGWIGGAASVIVGHPLDTVKTRLQAGVGYGNTLSCIRVVYRRESMFGFFKGMSFPLASIAVYNSVVFGVFSNTQRFLSQHRCGEPEASPPRTLSDLLLASMVAGVVSVGLGGPVDLIKIRLQMQTQPFRDGGEHRMTTVFPGPHLCM

SEQ ID NO: 35835 - protein, 487 aa, Homo sapiens
MMHFKSGLELTELQNMTVPEDDNISNDSNDFTEVENGQINSKFISDRESRRSLTNSHLEKKKCDEYIPGTTSLGMSVFNLSNAIMGSGILGLAFALANTGILLFLVLLTSVTLLSIYSINLLLICSKETGCMVYEKLGEQVFGTTGKFVIFGATSLQNTGAMLSYLFIVKNELPSAIKFLMGKEETFSAWYVDGRVLVVIVTFGIILPLCLLKNLGYLGYTSGFSLSCMVFFLIVVIYKKFQIPCIVPELNSTISANSTNADTCTPKYVTFNSKTVYALPTIAFAFVCHPSVLPIYSELKDRSQKKMQMVSNISFFAMFVMYFLTAIFGYLTFYDNVQSDLLHKYQSKDDILILTVRLAVIVAVILTVPVLFFTVRSSLFELAKKTKFNLCRHTVVTCILLVVINLLVIFIPSMKDIFGVVGVTSANMLIFILPSSLYLKITDQDGDKGTQRIWAALFLGLGVLFSLVSIPLVIYDWACSSSSDEGH

SEQ ID NO: 35836 - protein, 472 aa, Homo sapiens
MELQDPKMNGALPSDAVGYRQEREGFLPSRGPAPGSKPVQFMDFEGKTSFGMSVFNLSNAIMGSGILGLAYAMAHTGVIFFLALLLCIALLSSYSIHLLLTCAGIAGIRAYEQLGQRAFGPAGKVVVATVICLHNVGAMSSYLFIIKSELPLVIGTFLYMDPEGDWFLKGNLLIIIVSVLIILPLALMKHLGYLGYTSGLSLTCMLFFLVSVIYKKFQLGCAIGHNETAMESEALVGLPSQGLNSSCEAQMFTVDSQMSYTVPIMAFAFVCHPEVLPIYTELCRPSKRRMQAVANVSIGAMFCMYGLTATFGYLTFYSSVKAEMLHMYSQKDPLILCVRLAVLLAVTLTVPVVLFPIRRALQQLLFPGKAFSWPRHVAIALILLVLVNVLVICVPTIRDIFGVIGSTSAPSLIFILPSIFYLRIVPSEVEPFLSWPKIQALCFGVLGVLFMAVSLGFMFANWATGQSRMSGH

SEQ ID NO: 35837 - protein, 421 aa, Homo sapiens
MSVFNLSNAIMGSGILGLAYAMAHTGVIFFLALLLCIALLSSYSIHLLLTCAGIAGIRAYEQLGQRAFGPAGKVVVATVICLHNVGAMSSYLFIIKSELPLVIGTFLYMDPEGDWFLKGNLLIIIVSVLIILPLALMKHLGYLGYTSGLSLTCMLFFLVSVIYKKFQLGCAIGHNETAMESEALVGLPSQGLNSSCEAQMFTVDSQMSYTVPIMAFAFVCHPEVLPIYTELCRPSKRRMQAVANVSIGAMFCMYGLTATFGYLTFYSSVKAEMLHMYSQKDPLILCVRLAVLLAVTLTVPVVLFPIRRALQQLLFPGKAFSWPRHVAIALILLVLVNVLVICVPTIRDIFGVIGSTSAPSLIFILPSIFYLRIVPSEVEPFLSWPKIQALCFGVLGVLFMAVSLGFMFANWATGQSRMSGH

SEQ ID NO: 35838 - protein, 563 aa, Homo sapiens
MRLDLASLMSAPKSLGSAFKSWRLDKAPSPQHTFPSTSIPGMAFALLASVPPVFGLYTSFFPVLIYSLLGTGRHLSTGTFAILSLMTGSAVERLVPEPLVGNLSGIEKEQLDAQRVGVAAAVAFGSGALMLGMFVLQLGVLSTFLSEPVVKALTSGAALHVLLSQLPSLLGLSLPRQIGCFSLFKTLASLLTALPRSSPAELTISALSLALLVPVKELNVRFRDRLPTPIPGEVVLVLLASVLCFTSSVDTRYQVQIVGLLPGGFPQPLLPNLAELPRILADSLPIALVSFAVSASLASIHADKYSYTIDSNQEFLAHGASNLISSLFSCFPNSATLATTNLLVDAGGKTQLAGLFSCTVVLSVLLWLGPFFYYLPKAVLACINISSMRQVFCQMQELPQLWHISRVDFLLQVPGLCILSYPTPLYFGTRGQFRCNLEWHLGLGEGEKETSKPDGPMVAVAEPVRVVVLDFSGVTFADAAGAREVVQVRERLASRCRDARIRLLLAQCNALVQGTLTRVGLLDRVTPDQLFVSVQDAAAYALGSLLRGSSTRSGSQEALGCGK

SEQ ID NO: 35839 - protein, 454 aa, Homo sapiens
MRLDLASLMSAPKSLGSAFKSWRLDKAPSPQHTFPSTSIPGMAFALLASVPPVFGLYTSFFPVLIYSLLGTGRHLSTGTFAILSLMTGSAVERLVPEPLVGNLSGIEKEQLDAQRVGVAAAVAFGSGALMLGMFVLQLGVLSTFLSEPVVKALTSGAALHVLLSQLPSLLGLSLPRQIGCFSLFKTLASLLTALPRSSPAELTISALSLALLVPVKELNVRFRDRLPTPIPGEVVLVLLASVLCFTSSVDTRYQVQIVGLLPGGFPQPLLPNLAELPRILADSLPIALVSFAVSASLASIHADKYSYTIDSNQEFLAHGASNLISSLFSCFPNSATLATTNLLVDAGGKTQLAGLFSCTVVLSVLLWLGPFFYYLPKAVLACINISSMRQVFCQMQELPQLWHISRVDFAVWMVTWVAVVTLSVDLGLAVGVVFSMMTVVCRTRSSSRSRGSAS

SEQ ID NO: 35840 - protein, 547 aa, Homo sapiens
MDPMELRNVNIEPDDESSSGESAPDSYIGIGNSEKAAMSSQFANEDTESQKFLTNGFLGKKKLADYADEHHPGTTSFGMSSFNLSNAIMGSGILGLSYAMANTGIILFIIMLLAVAILSLYSVHLLLKTAKEGGSLIYEKLGEKAFGWPGKIGAFVSITMQNIGAMSSYLFIIKYELPEVIRAFMGLEENTGEWYLNGNYLIIFVSVGIILPLSLLKNLGYLGYTSGFSLTCMVFFVSVVIYKKFQIPCPLPVLDHSVGNLSFNNTLPMHVVMLPNNSESSDVNFMMDYTHRNPAGLDENQAKGSLHDSGVEYEAHSDDKCEPKYFVFNSRTAYAIPILVFAFVCHPEVLPIYSELKDRSRRKMQTVSNISITGMLVMYLLAALFGYLTFYGEVEDELLHAYSKVYTLDIPLLMVRLAVLVAVTLTVPIVLFPIRTSVITLLFPKRPFSWIRHFLIAAVLIALNNVLVILVPTIKYIFGFIGASSATMLIFILPAVFYLKLVKKETFRSPQKVGALIFLVVGIFFMIGSMALIIIDWIYDPPNSKHH

SEQ ID NO: 35841 - protein, 357 aa, Homo sapiens
MIEQQKRKGPELPLVPVKRQRHELLLGAGSGPGAGQQQATPGALLQAGPPRCSSLQAPIMLLSGHEGEVYCCKFHPNGSTLASAGFDRLILLWNVYGDCDNYATLKGHSGAVMELHYNTDGSMLFSASTDKTVAVWDSETGERVKRLKGHTSFVNSCYPARRGPQLVCTGSDDGTVKLWDIRKKAAIQTFQNTYQVLAVTFNDTSDQIISGGIDNDIKVWDLRQNKLTYTMRGHADSVTGLSLSSEGSYLLSNAMDNTVRVWDVRPFAPKERCVKIFQGNVHNFEKNLLRCSWSPDGSKIAAGSADRFVYVWDTTSRRILYKLPGHAGSINEVAFHPDEPIIISASSDKRLYMGEIQ

SEQ ID NO: 35842 - protein, 409 aa, Homo sapiens
MIEQQKRKGPELPLVPVKRQRHELLLGAGSGPGAGQQQATPGALLQAGPPRCSSLQAPIMLLSGHEGEVYCCKFHPNGSTLASAGFDRLILLWNVYGDCDNYATLKGHSGAVMELHYNTDGSMLFSASTDKTVAVWDSETGERVKRLKGHTSFVNSCYPARRGPQLVCTGSDDGTVKLWDIRKKAAIQTFQNTYQVLAVTFNDTSDQIISGGIDNDIKVWDLRQNKLTYTMRGHADSVTGLSLSSEGSYLLSNAMDNTVRVWDVRPFAPKERCVKIFQGNVHNFEKNLLRCSWSPDGSKIAAGSADRFVYVWDTTSRRILYKLPGHAGSINEVAFHPDEPIIETGFHRIGQGGHELLTSSNPPASASQSAGITGVSHCAQLQTVFMWVSMSVSPLLISGESKSNAPFSS

SEQ ID NO: 35843 - protein, 474 aa, Homo sapiens
MVQQTNNAENTEALLAGESSDSGAGLELGIASSPTPGSTASTGGKADDPSWCKTPSGHIKRPMNAFMVWSQIERRKIMEQSPDMHNAEISKRLGKRWKLLKDSDKIPFIREAERLRLKHMADYPDYKYRPRKKVKSGNANSSSSAAASSKPGEKGDKVGGSGGGGHGGGGGGGSSNAGGGGGGASGGGANSKPAQKKSCGSKVAGGAGGGVSKPHAKLILAGGGGGGKAAAAAAASFAAEQAGAAALLPLGAAADHHSLYKARTPSASASASSAASASAALAAPGKHLAEKKVKRVYLFGGLGTSSSPVGGVGAGADPSDPLGLYEEEGAGCSPDAPSLSGRSSAASSPAAGRSPADHRGYASLRAASPAPSSAPSHASSSASSHSSSSSSSGSSSSDDEFEDDLLDLNPSSNFESMSLGSFSSSSALDRDLDFNFEPGSGSHFEFPDYCTPEVSEMISGDWLESSISNLVFTY

SEQ ID NO: 35844 - protein, 380 aa, Homo sapiens
MASLAAANAEFCFNLFREMDDNQGNGNVFFSSLSLFAALALVRLGAQDDSLSQIDKLLHVNTASGYGNSSNSQSGLQSQLKRVFSDINASHKDYDLSIVNGLFAEKVYGFHKDYIECAEKLYDAKVERVDFTNHLEDTRRNINKWVENETHGKIKNVIGEGGISSSAVMVLVNAVYFKGKWQSAFTKSETINCHFKSPKCSGKAVAMMHQERKFNLSVIEDPSMKILELRYNGGINMYVLLPENDLSEIENKLTFQNLMEWTNPRRMTSKYVEVFFPQFKIEKNYEMKQYLRALGLKDIFDESKADLSGIASGGRLYISRMMHKSYIEVTEEGTEATAATGSNIVEKQLPQSTLFRADHPFLFVIRKDDIILFSGKVSCP

SEQ ID NO: 35845 - protein, 363 aa, Homo sapiens
MASLAAANAEFCFNLFREMDDNQGNGNVFFSSLSLFAALALVRLGAQDDSLSQIDKSGLQSQLKRVFSDINASHKDYDLSIVNGLFAEKVYGFHKDYIECAEKLYDAKVERVDFTNHLEDTRRNINKWVENETHGKIKNVIGEGGISSSAVMVLVNAVYFKGKWQSAFTKSETINCHFKSPKCSGKAVAMMHQERKFNLSVIEDPSMKILELRYNGGINMYVLLPENDLSEIENKLTFQNLMEWTNPRRMTSKYVEVFFPQFKIEKNYEMKQYLRALGLKDIFDESKADLSGIASGGRLYISRMMHKSYIEVTEEGTEATAATGSNIVEKQLPQSTLFRADHPFLFVIRKDDIILFSGKVSCP

SEQ ID NO: 35846 - protein, 549 aa, Homo sapiens
MDVVEVAGSWWAQEREDIIMKYEKGHRAGLPEDKGPKPFRSYNNNVDHLGIVHETELPPLTAREAKQIRREISRKSKWVDMLGDWEKYKSSRKLIDRAYKGMPMNIRGPMWSVLLNTEEMKLKNPGRYQIMKEKGKRSSEHIQRIDRDVSGTLRKHIFFRDRYGTKQRELLHILLAYEEYNPEVGYCRDLSHIAALFLLYLPEEDAFWALVQLLASERHSLQGFHSPNGGTVQGLQDQQEHVVATSQPKTMGHQDKKDLCGQCSPLGCLIRILIDGISLGLTLRLWDVYLVEGEQALMPITRIAFKVQQKRLTKTSRCGPWARFCNRFVDTWARDEDTVLKHLRASMKKLTRKKGDLPPPAKPEQGSSASRPVPASRGGKTLCKGDRQAPPGPPARFPRPIWSASPPRAPRSSTPCPGGAVREDTYPVGTQGVPSPALAQGGPQGSWRFLQWNSMPRLPTDLDVEGPWFRHYDFRQSCWVRAISQEDQLAPCWQAEHPAERVRSAFAAPSTDSDQGTPFRARDEQQCAPTSGPCLCGLHLESSQFPPGF

SEQ ID NO: 35847 - protein, 670 aa, Homo sapiens
MGETEKRIETHRIRCLSKLKMFLLAITCAFVSKTLSGSYMNSMLTQIERQFNIPTSLVGFINGSFEIGNLLLIIFVSYFGTKLHRPIMIGIGCVVMGLGCFLKSLPHFLMNQYEYESTVSVSGNLSSNSFLCMENGTQILRPTQDPSECTKEVKSLMWVYVLVGNIVRGMGETPILPLGISYIEDFAKFENSPLYIGLVETGAIIGPLIGLLLASFCANVYVDTGFVNTDDLIITPTDTRWVGAWWFGFLICAGVNVLTAIPFFFLPNTLPKEGLETNADIIKNENEDKQKEEVKKEKYGITKDFLPFMKSLSCNPIYMLFILVSVIQFNAFVNMISFMPKYLEQQYGISSSDAIFLMGIYNLPPICIGYIIGGLIMKKFKITVKQAAHIGCWLSLLEYLLYFLSFLMTCENSSVVGINTSYEGIPQDLYVENDIFADCNVDCNCPSKIWDPVCGNNGLSYLSACLAGCETSIGTGINMVFQNCSCIQTSGNSSAVLGLCDKGPDCSLMLQYFLILSAMSSFIYSLAAIPGYMVLLRCMKSEEKSLGVGLHTFCTRVFAGIPAPIYFGALMDSTCLHWGTLKCGESGACRIYDSTTFRYIYLGLPAALRGSSFVPALIILILLRKCHLPGENASSGTELIETKVKGKENECKDIYQKSTVLKDDELKTKL

SEQ ID NO: 35848 - protein, 579 aa, Homo sapiens
MFLTKNCKQEQERVESAKMFLLAITCAFVSKTLSGSYMNSMLTQIERQFNIPTSLVGFINGSFEIGNLLLIIFVSYFGTKLHRPIMIGIGCVVMGLGCFLKSLPHFLMNQYEYESTVSVSGNLSSNSFLCMENGTQILRPTQDPSECTKEVKSLMWVYVLVGNIVRGMGETPILPLGISYIEDFAKFENSPLYIGLVETGAIIGPLIGLLLASFCANVYVDTGFVNTDDLIITPTDTRWVGAWWFGFLICAGVNVLTAIPFFFLPNTLPKEGLETNADIIKNENEDKQKEEVKKEKYGITKDFLPFMKSLSCNPIYMLFILVSVIQFNAFVNMISFMPKYLEQQYGISSSDAIFLMGIYNLPPICIGYIIGGLIMKKFKITVKQAAHIGCWLSLLEYLLYFLSFLMTCENSSVVGINTSYEGIPQDLYVENDIFADCNVDCNCPSKIWDPVCGNNGLSYLSACLAGCETSIGTGINMVFQNCSCIQTSGNSSAVLGLCDKGPDCSLMLQYFLILSAMSSFIYSLAAIPGYMVLLRCMKSEEKSLGVGLHTFCTRVFGKNSYFFPHPIRTILLLLFFITL

SEQ ID NO: 35849 - protein, 763 aa, Homo sapiens [sequence omitted]

SEQ ID NO: 35850 - protein, 750 aa, Homo sapiens
MSSKRPASPYGEADGEVAMVTSRQKVEEEESDGLPAFHLPLHVSFPNKPHSEEFQPVSLLTQETCGHRTPTSQHNTMEVDGNKVMSSFAPHNSSTSPQKAEEGGRQSGESLSSTALGTPERRKGSLADVVDTLKQRKMEELIKNEPEETPSIEKLLSKDWKDKLLAMGSGNFGEIKGTPESLAEKERQLMGMINQLTSLREQLLAAHDEQKKLAASQIEKQRQQMELAKQQQEQIARQQQQLLQQQHKINLLQQQIQVQGQLPPLMIPVFPPDQRTLAAAAQQGFLLPPGFSYKAGCSDPYPVQLIPTTMAAAAAATPGLGPLQLQQLYAAQLAAMQVSPGGKLPGIPQGNLGAAVSPTSIHTDKSTNSPPPKSKDEVAQPLNLSAKPKTSDGKSPTSPTSPHMPALRINSGAGPLKASVPAALASPSARVSTIGYLNDHDAVTKAIQEARQMKEQLRREQQVLDGKVAVVNSLGLNNCRTEKEKTTLESLTQQLAVKQNEEGKFSHAMMDFNLSGDSDGSAGVSESRIYRESRGRGSNEPHIKRPMNAFMVWAKDERRKILQAFPDMHNSNISKILGSRWKAMTNLEKQPYYEEQARLSKQHLEKYPDYKYKPRPKRTCLVDGKKLRIGEYKAIMRNRRQEMRQYFNVGQQAQIPIATAGVVYPGAIAMAGMPSPHLPSEHSSVSSSPEPGMPVIQSTYGVKGEEPHIKEEIQAEDINGEIYDEYDEEEDDPDVDYGSDSENHIAGQAN

SEQ ID NO: 35851 - protein, 377 aa, Homo sapiens
MHDEVAQPLNLSAKPKTSDGKSPTSPTSPHMPALRINSGAGPLKASVPAALASPSARVSTIGYLNDHDAVTKAIQEARQMKEQLRREQQVLDGKVAVVNSLGLNNCRTEKEKTTLESLTQQLAVKQNEEGKFSHAMMDFNLSGDSDGSAGVSESRIYRESRGRGSNEPHIKRPMNAFMVWAKDERRKILQAFPDMHNSNISKILGSRWKAMTNLEKQPYYEEQARLSKQHLEKYPDYKYKPRPKRTCLVDGKKLRIGEYKAIMRNRRQEMRQYFNVGQQAQIPIATAGVVYPGAIAMAGMPSPHLPSEHSSVSSSPEPGMPVIQSTYGVKGEEPHIKEEIQAEDINGEIYDEYDEEEDDPDVDYGSDSENHIAGQAN

SEQ ID NO: 35852 - protein, 642 aa, Homo sapiens
MSSKRPASPYGEADGEVAMVTSRQKVEEEESDGLPAFHLPLHVSFPNKPHSEEFQPVSLLTQETCGHRTPTSQHNTMEVDGNKVMSSFAPHNSSTSPQKAEEGGRQSGESLSSTALGTPERRKGSLADVVDTLKQRKMEELIKNEPEETPSIEKLLSKDWKDKLLAMGSGNFGEIKGTPESLAEKERQLMGMINQLTSLREQLLAAHDEQKKLAASQIEKQRQQMELAKQQQEQIARQQQQLLQQQHKINLLQQQIQVQGQLPPLMIPVFPPDQRTLAAAAQQGFLLPPGFSYKAGCSDPYPVQLIPTTMAAAAAATPGLGPLQLQQLYAAQLAAMQVSPGGKLPGIPQGNLGAAVSPTSIHTDKSTNSPPPKSKEKTTLESLTQQLAVKQNEEGKFSHAMMDFNLSGDSDGSAGVSESRIYRESRGRGSNEPHIKRPMNAFMVWAKDERRKILQAFPDMHNSNISKILGSRWKAMTNLEKQPYYEEQARLSKQHLEKYPDYKYKPRPKRTCLVDGKKLRIGEYKAIMRNRRQEMRQYFNVGQQAQIPIATAGVVYPGAIAMAGMPSPHLPSEHSSVSSSPEPGMPVIQSTYGVKGEEPHIKEEIQAEDINGEIYDEYDEEEDDPDVDYGSDSENHIAGQAN

SEQ ID NO: 35853 - protein, 753 aa, Homo sapiens
MSVMSSKRPASPYGEADGEVAMVTSRQKVEEEESDGLPAFHLPLHVSFPNKPHSEEFQPVSLLTQETCGHRTPTSQHNTMEVDGNKVMSSFAPHNSSTSPQKAEEGGRQSGESLSSTALGTPERRKGSLADVVDTLKQRKMEELIKNEPEETPSIEKLLSKDWKDKLLAMGSGNFGEIKGTPESLAEKERQLMGMINQLTSLREQLLAAHDEQKKLAASQIEKQRQQMELAKQQQEQIARQQQQLLQQQHKINLLQQQIQVQGQLPPLMIPVFPPDQRTLAAAAQQGFLLPPGFSYKAGCSDPYPVQLIPTTMAAAAAATPGLGPLQLQQLYAAQLAAMQVSPGGKLPGIPQGNLGAAVSPTSIHTDKSTNSPPPKSKDEVAQPLNLSAKPKTSDGKSPTSPTSPHMPALRINSGAGPLKASVPAALASPSARVSTIGYLNDHDAVTKAIQEARQMKEQLRREQQVLDGKVAVVNSLGLNNCRTEKEKTTLESLTQQLAVKQNEEGKFSHAMMDFNLSGDSDGSAGVSESRIYRESRGRGSNEPHIKRPMNAFMVWAKDERRKILQAFPDMHNSNISKILGSRWKAMTNLEKQPYYEEQARLSKQHLEKYPDYKYKPRPKRTCLVDGKKLRIGEYKAIMRNRRQEMRQYFNVGQQAQIPIATAGVVYPGAIAMAGMPSPHLPSEHSSVSSSPEPGMPVIQSTYGVKGEEPHIKEEIQAEDINGEIYDEYDEEEDDPDVDYGSDSENHIAGQAN

SEQ ID NO: 35854 - protein, 85 aa, Homo sapiens
MEAGERIDASQLPHRVLETRGHAISILFGFWTSFICDTYIVLAWISKIKGSPDVSASSDEPYARIQQSRRQCHAEEDQSQVPEAG

SEQ ID NO: 35855 - protein, 205 aa, Homo sapiens
MATPLGWSKAGSGSVCLALDQLRDVIESQEELIHQLRNVMVLQDENFVSKEEFQAVEKKLVEEKAAHAKTKVLLAKEEEKLQFALGEVEVLSKQLEKEKLAFEKALSSVKSKVLQESSKKDQLITKCNEIESHIIKQEDILNGKENEIKELQQVISQQKQIFRNHMSDFRIQKQQESYMAQVLDQKHKKASGTRQARSHQHPREK

SEQ ID NO: 35856 - protein, 188 aa, Homo sapiens
MATPLGWSKAGSGSVCLALDQLRDVIESQEELIHQLRNVMVLQDENFVSKEEFQAVEKKLVEEKAAHAKTKVLLAKEEEKLQFALGEVEVLSKQLEKEKLAFEKALSSVKSKVLQESSKKDQLITKCNGRREARALHHGYINGLFPNHPVPVSKAGFHSNTCPQLRIQAGPGGPHLRKGLKGPGRPRK

SEQ ID NO: 35857 - protein, 1048 aa, Homo sapiens
MGPPRHPQAGEIEAGGAGGGRRLQVEMSSQQFPRLGAPSTGLSQAPSQIANSGSAGLINPAATVNDESGRDSEVSAREHMSSSSSLQSREEKQEPVVVRPYPQVQMLSTHHAVASATPVAVTAPPAHLTPAVPLSFSEGLMKPPPKPTMPSRPIAPAPPSTLSLPPKVPGQVTVTMESSIPQASAIPVATISGQQGHPSNLHHIMTTNVQMSIIRSNAPGPPLHIGASHLPRGAAAAAVMSSSKVTTVLRPTSQLPNAATAQPAVQHIIHQPIQSRPPVTTSNAIPPAVVATVSATRAQSPVITTTAAHATDSALSRPTLSIQHPPSAAISIQRPAQSRDVTTRITLPSHPALGTPKQQLHTMAQKTIFSTGTPVAAATVAPILATNTIPSATTAGSVSHTQAPTSTIVTMTVPSHSSHATAVTTSNIPVAKVVPQQITHTSPRIQPDYPAERSSLIPISGHRASPNPVAMETRSDNRPSVPVQFQYFLPTYPPSAYPLAAHTYTPITSSVSTIRQYPVSAQAPNSAITAQTGVGVASTVHLNPMQLMTVDASHARHIQGIQPAPISTQGIQPAPIGTPGIQPAPLGTQGIHSATPINTQGLQPAPMGTQQPQPEGKTSAVVLADGATIVANPISNPFSAAPAATTVVQTHSQSASTNAPAQGSSPRPSILRKKPATDGAKPKSEIHVSMATPVTVSMETVSNQNNDQPTIAVPPTAQQPPPTIPTMIAAASPPSQPAVALSTIPGAVPITPPITTIAAAPPPSVTVGGSLSSVLGPPVPEIKVKEEVEPMDIMRPVSAVPPLATNTVSPSLALLANNLSMPTSDLPPGASPRKKPRKQQHVISTEEGDMMETNSTDDEKSTAKSLLVKAEKRKSPPKEYIDEEGVRYVPVRPRPPITLLRHYRNPWKAAYHHFQRYSDVRVKEEKKAMLQEIANQKGVSCRAQGWKVHLCAAQLLQLTNLEHDVYERLTNLQEGIIPKKKAATDDDLHRINELIQGNMQRCKLVMDQISEARDSMLKVLDHKDRVLKLLNKNGTVKKVSKLKRKEKV

SEQ ID NO: 35858 - protein, 613 aa, Homo sapiens
METRSDNRPSVPVQFQYFLPTYPPSAYPLAAHTYTPITSSVSTIRQYPVSAQAPNSAITAQTGVGVASTVHLNPMQLMTVDASHARHIQGIQPAPISTQGIQPAPIGTPGIQPAPLGTQGIHSATPINTQGLQPAPMGTQQPQPEGKTSAVVLADGATIVANPISNPFSAAPAATTVVQTHSQSASTNAPAQGSSPRPSILRKKPATDGMAVRKTLIPPQPPDVASPRVESSMRSTSGSPRPAGAKPKSEIHVSMATPVTVSMETVSNQNNDQPTIAVPPTAQQPPPTIPTMIAAASPPSQPAVALSTIPGAVPITPPITTIAAAPPPSVTVGGSLSSVLGPPVPEIKVKEEVEPMDIMRPVSAVPPLATNTVSPSLALLANNLSMPTSDLPPGASPRKKPRKQQHVISTEEGDMMETNSTDDEKSTAKSLLVKAEKRKSPPKEYIDEEGVRYVPVRPRPPITLLRHYRNPWKAAYHHFQRYSDVRVKEEKKAMLQEIANQKGVSCRAQGWKVHLCAAQLLQLTNLEHDVYERLTNLQEGIIPKKKAATDDDLHRINELIQGNMQRCKLVMDQISEARDSMLKVLDHKDRVLKLLNKNGTVKKVSKLKRKEKV

SEQ ID NO: 35859 - protein, 1083 aa, Homo sapiens
MGPPRHPQAGEIEAGGAGGGRRLQVEMSSQQFPRLGAPSTGLSQAPSQIANSGSAGLINPAATVNDESGRDSEVSAREHMSSSSSLQSREEKQEPVVVRPYPQVQMLSTHHAVASATPVAVTAPPAHLTPAVPLSFSEGLMKPPPKPTMPSRPIAPAPPSTLSLPPKVPGQVTVTMESSIPQASAIPVATISGQQGHPSNLHHIMTTNVQMSIIRSNAPGPPLHIGASHLPRGAAAAAVMSSSKVTTVLRPTSQLPNAATAQPAVQHIIHQPIQSRPPVTTSNAIPPAVVATVSATRAQSPVITTTAAHATDSALSRPTLSIQHPPSAAISIQRPAQSRDVTTRITLPSHPALGTPKQQLHTMAQKTIFSTGTPVAAATVAPILATNTIPSATTAGSVSHTQAPTSTIVTMTVPSHSSHATAVTTSNIPVAKVVPQQITHTSPRIQPDYPAERSSLIPISGHRASPNPVAMETRSDNRPSVPVQFQYFLPTYPPSAYPLAAHTYTPITSSVSTIRQYPVSAQAPNSAITAQTGVGVASTVHLNPMQLMTVDASHARHIQGIQPAPISTQGIQPAPIGTPGIQPAPLGTQGIHSATPINTQGLQPAPMGTQQPQPEGKTSAVVLADGATIVANPISNPFSAAPAATTVVQTHSQSASTNAPAQGSSPRPSILRKKPATDGMAVRKTLIPPQPPDVASPRVESSMRSTSGSPRPAGAKPKSEIHVSMATPVTVSMETVSNQNNDQPTIAVPPTAQQPPPTIPTMIAAASPPSQPAVALSTIPGAVPITPPITTIAAAPPPSVTVGGSLSSVLGPPVPEIKVKEEVEPMDIMRPVSAVPPLATNTVSPSLALLANNLSMPTSDLPPGASPRKKPRKQQHVISTEEGDMMETNSTDDEKSTAKSLLVKAEKRKSPPKEYIDEEGVRYVPVRPRPPITLLRHYRNPWKAAYHHFQRYSDVRVKEEKKAMLQEIANQKGVSCRAQGWKVHLCAAQLLQLTNLEHDVYERLTNLQEGIIPKKKAATDDDLHRINELIQGNMQRCKLVMDQISEARDSMLKVLDHKDRVLKLLNKNGTVKKVSKLKRKEKV

SEQ ID NO: 35860 - protein, 555 aa, Homo sapiens
MQSCESSGDSADDPLSRGLRRRGQPRVVVIGAGLAGLAAAKALLEQGFTDVTVLEASSHIGGRVQSVKLGHATFELGATWIHGSHGNPIYHLAEANGLLEETTDGERSVGRISLYSKNGVACYLTNHGRRIPKDVVEEFSDLYNEVYNLTQEFFRHDKPVNAESQNSVGVFTREEVRNRIRNDPDDPEATKRLKLAMIQQYLKVESCESSSHSMDEVSLSAFGEWTEIPGAHHIIPSGFMRVVELLAEGIPAHVIQLGKPVRCIHWDQASARPRGPEIEPRGEGDHNHDTGEGGQGGEEPRGGRWDEDEQWSVVVECEDCELIPADHVIVTVSLGVLKRQYTSFFRPGLPTEKVAAIHRLGIGTTDKIFLEFEEPFWGPECNSLQFVWEDEAESHTLTYPPELWYRKICGFDVLYPPERYGHVLSGWICGEEALVMEKCDDEAVAEICTEMLRQFTGNPNIPKPRRILRSAWGSNPYFRGSYSYTQVGSSGADVEKLAKPLPYTESSKTAPMQVLFSGEATHRKYYSTTHGALLSGQREAARLIEMYRDLFQQGT

SEQ ID NO: 35861 - protein, 502 aa, Homo sapiens
MQSCESSGDSADDPLSRGLRRRGQPRVVVIGAGLAGLAAAKALLEQGFTDVTVLEASSHIGGRVQSVKLGHATFELGATWIHGSHGNPIYHLAEANGLLEETTDGERSVGRISLYSKNGVACYLTNHGRRIPKDVVEEFSDLYNEVYNLTQEFFRHDKPVNAESQNSVGVFTREEVRNRIRNDPDDPEATKRLKLAMIQQYLKVESCESSSHSMDEVSLSAFGEWTEIPGAHHIIPSGFMRVVELLAEGIPAHVIQLGKPVRCIHWDQASARPRGPEIEPRGVLKRQYTSFFRPGLPTEKVAAIHRLGIGTTDKIFLEFEEPFWGPECNSLQFVWEDEAESHTLTYPPELWYRKICGFDVLYPPERYGHVLSGWICGEEALVMEKCDDEAVAEICTEMLRQFTGNPNIPKPRRILRSAWGSNPYFRGSYSYTQVGSSGADVEKLAKPLPYTESSKTAPMQVLFSGEATHRKYYSTTHGALLSGQREAARLIEMYRDLFQQGT

SEQ ID NO: 35862 - protein, 190 aa, Homo sapiens
MQSCESSGDSADDPLSRGLRRRGQPRVVVIGAGLAGLAAAKALLEQGFTDVTVLEASSHIGGRVQSVKLGHATFELGATWIHGSHGNPIYHLAEANGLLEETTDGERSVGRISLYSKNGVACYLTNHGRRIPKDVVEEFSDLYNEPMQVLFSGEATHRKYYSTTHGALLSGQREAARLIEMYRDLFQQGT

SEQ ID NO: 35863 - protein, 532 aa, Homo sapiens
MQSCESSGDSADDPLSRGLRRRGQPRVVVIGAGLAGLAAAKALLEQGFTDVTVLEASSHIGGRVQSVKLGHATFELGATWIHGSHGNPIYHLAEANGLLEETTDGERSVGRISLYSKNGVACYLTNHGRRIPKDVVEEFSDLYNEVYNLTQEFFRHDKPVNAESQNSVGVFTREEVRNRIRNDPDDPEATKRLKLAMIQQYLKVESCESSSHSMDEVSLSAFGEWTEIPGAHHIIPSGFMRVVELLAEGIPAHVIQLGKPVRCIHWDQASARPRGPEIEPRGVLKRQYTSFFRPGLPTEKVAAIHRLGIGTTDKIFLEFEEPFWGPECNSLQFVWEDEAESHTLTYPPELWYRKICGFDVLYPPERYGHVLSGWICGEEALVMEKCDDEAVAEICTEMLRQFTGNPNIPKPRRILRSAWGSNPYFRGSYSYTQVGSSGADVEKLAKPLPYTESSKTAHGSSTKQQPGHLFSSKCPEQPLDANRGAVKPMQVLFSGEATHRKYYSTTHGALLSGQREAARLIEMYRDLFQQGT

SEQ ID NO: 35864 - protein, 389 aa, Homo sapiens
MIQQYLKVESCESSSHSMDEVSLSAFGEWTEIPGAHHIIPSGFMRVVELLAEGIPAHVIQLGKPVRCIHWDQASARPRGPEIEPRGEGDHNHDTGEGGQGGEEPRGGRWDEDEQWSVVVECEDCELIPADHVIVTVSLGVLKRQYTSFFRPGLPTEKVAAIHRLGIGTTDKIFLEFEEPFWGPECNSLQFVWEDEAESHTLTYPPELWYRKICGFDVLYPPERYGHVLSGWICGEEALVMEKCDDEAVAEICTEMLRQFTGNPNIPKPRRILRSAWGSNPYFRGSYSYTQVGSSGADVEKLAKPLPYTESSKTAHGSSTKQQPGHLFSSKCPEQPLDANRGAVKPMQVLFSGEATHRKYYSTTHGALLSGQREAARLIEMYRDLFQQGT

SEQ ID NO: 35865 - protein, 585 aa, Homo sapiens
MQSCESSGDSADDPLSRGLRRRGQPRVVVIGAGLAGLAAAKALLEQGFTDVTVLEASSHIGGRVQSVKLGHATFELGATWIHGSHGNPIYHLAEANGLLEETTDGERSVGRISLYSKNGVACYLTNHGRRIPKDVVEEFSDLYNEVYNLTQEFFRHDKPVNAESQNSVGVFTREEVRNRIRNDPDDPEATKRLKLAMIQQYLKVESCESSSHSMDEVSLSAFGEWTEIPGAHHIIPSGFMRVVELLAEGIPAHVIQLGKPVRCIHWDQASARPRGPEIEPRGEGDHNHDTGEGGQGGEEPRGGRWDEDEQWSVVVECEDCELIPADHVIVTVSLGVLKRQYTSFFRPGLPTEKVAAIHRLGIGTTDKIFLEFEEPFWGPECNSLQFVWEDEAESHTLTYPPELWYRKICGFDVLYPPERYGHVLSGWICGEEALVMEKCDDEAVAEICTEMLRQFTGNPNIPKPRRILRSAWGSNPYFRGSYSYTQVGSSGADVEKLAKPLPYTESSKTAHGSSTKQQPGHLFSSKCPEQPLDANRGAVKPMQVLFSGEATHRKYYSTTHGALLSGQREAARLIEMYRDLFQQGT

SEQ ID NO: 35866 - protein, 211 aa, Homo sapiens; identical to SEQ ID NO: 264

SEQ ID NO: 35867 - protein, 536 aa, Homo sapiens
MALTSFLPAPTQLSQDQLEAEEKARSQRSRQTSLVSSRREPPPYGYRKGWIPRLLEDFGDGGAFPEIHVAQYPLDMGRKKKMSNALAIQVDSEGKIKYDAIARQGQSKDKVIYSKYTDLVPKEVMNADDPDLQRPDEEAIKEITEKTRVALEKSVSQKVAAAMPVRAADKLAPAQYIRYTPSQQGVAFNSGAKQRVIRMVEMQKDPMEPPRFKINKKIPRGPPSPPAPVMHSPSRKMTVKEQQEWKIPPCISNWKNAKGYTIPLDKRLAADGRGLQTVHINENFAKLAEALYIADRKAREAVEMRAQVERKMAQKEKEKHEEKLREMAQKARERRAGIKTHVEKEDGEARERDEIRHDRRKERQHDRNLSRAAPDKRSKLQRNENRDISEVIALGVPNPRTSNEVQYDQRLFNQSKGMDSGFAGGEDEIYNVYDQAWRGGKDMAQSIYRPSKNLDKDMYGDDLEARIKTNRFVPDKEFSGSDRRQRGREGPVQFEEDPFGLDKFLEEAKQHGGSKRPSDSSRPKEHEHEGKKRRKE

SEQ ID NO: 35868 - protein, 459 aa, Homo sapiens
MKKDKKRNKIPIDNYPIQTLVNMSLNPSRPSSSELVELHVFYVPEGSWNYKLNTISTEVVNKFISAGFLRVSPQLTLRALRERLGEFLGEDAIAEKFLFLKCIGNNLAVVKEKQESELKLKSFAPPYALQPELYLLPVMDHLGNVYSPSTVILDERQTNNGVNEADGTIHRPISVTLFKEELGRDPSLLENTLKELPNKNQEEAGGKATAEKSQIAKNQIGNSELPGSLEDSNNDCFGTKKSQCLWENEDDTAISRRQDNQTAEKEYITLPDHPSLPCQPVLSSGITDISLLQTEREKIIKQMKQVKEERRYLERNREELVKTVEKLFEQSKLKRYHAYNGWKKKYLETKKVTASMEEVLTKLREDLELYYKKLLMQLEAREIKMRPKNLANITDSKNYLIIQITEVQHAIDQLKRKLDTDKMKLIVEVKMRKQAVSDLRTLKTELAQKKKIIHLYNLN

SEQ ID NO: 35869 - protein, 284 aa, Homo sapiens
MKKDKKRNKIPIDNYPIQTLVNMSLNPSRPSSSELVELHVFYVPEGSWNYKLNTISTEVVNKFISAGFLRVSPQLTLRALRERLGEFLGEDAIAEKFLFLKCIGNNLAVVKEKQESELKLKSFAPPYALQPELYLLPVMDHLGNVYSPSTVILDERQTNNGVNEADGTIHRPISVTLFKEELGRDPSLLENTLKELPNKNQEEAGGKATAEKSQIAKNQIGNSELPGSLEDSNNDCFGTKKSVFGKMKMIQLSVEDRTIRQLKKSTSPYQITLHFLVNLFFLQE

SEQ ID NO: 35870 - protein, 358 aa, Homo sapiens
MKKDKKRNKIPIDNYPIQTLVNMSLNPSRPSSSELVELHVFYVPEGSWNYKLNTISTEVVNKFISAGFLRVSPQLTLRALRERLGEFLGEDAIAEKFLFLKCIGNNLAVVKEKQESELKLKSFAPPYALQPELYLLPVMDHLGNVYSPSTVILDERQTNNGVNEADGTIHRPISVTLFKEELGRDPSLLENTLKELPNKNQEEAGGKATAEKSQIAKNQIGNSELPGSLEDSNNDCFGTKKSQCLWENEDDTAISRRQDNQTAEKEYITLPDHPSLPCQPVLSSGITDISLLQTEREKIIKQMKQVKEERRYLERNREELVKTVEKLFEQSKLKRYHAYNGWKKKYLETKKVTASMEE

SEQ ID NO: 35871 - protein, 343 aa, Homo sapiens
MALTPTNLNNKMSLQMKMDCQEQQLTKKNNGFFQKLNVTEGAMQDLLKEIIKVDHILDRSDDEDDISSENPQTDFLHKGMLELEAEHDQDLSKQDKQETDVDEDPQASTSLQFSKKNLLELCLKGMFLKLNYWNTKIGLQVKELGADYIDGTEKIDNIIKKINVTENTVKSLLKDMLTLKGQIEKLEDRGLDLDQGTSTEVNTCNEVYELKKKVIERLEDLCKNVELLSAKLRMYQMEAEDTDSHSSEEIDTEEMEALLPQAPASFLVQKSPPRNTAWKRALRIFIMFDVLTVTGLLCYILFFGATFLFERVLLRMLGCRTTWDLREMREPFLNLEVEALLPS

SEQ ID NO: 35872 - protein, 1217 aa, Homo sapiens
MYIKQVIIQGFRSYRDQTIVDPFSSKHNVIVGRNGSGKSNFFYAIQFVLSDEFSHLRPEQRLALLHEGTGPRVISAFVEIIFDNSDNRLPIDKEEVSLRRVIGAKKDQYFLDKKMVTKNDVMNLLESAGFSRSNPYYIVKQGKINQMATAPDSQRLKLLREVAGTRVYDERKEESISLMKETEGKREKINELLKYIEERLHTLEEEKEELAQYQKWDKMRRALEYTIYNQELNETRAKLDELSAKRETSGEKSRQLRDAQQDARDKMEDIERQVRELKTKISAMKEEKEQLSAERQEQIKQRTKLELKAKDLQDELAGNSEQRKRLLKERQKLLEKIEEKQKELAETEPKFNSVKEKEERGIARLAQATQERTDLYAKQGRGSQFTSKEERDKWIKKELKSLDQAINDKKRQIAAIHKDLEDTEANKEKNLEQYNKLDQDLNEVKARVEELDRKYYEVKNKKDELQSERNYLWREENAEQQALAAKREDLEKKQQLLRAATGKAILNGIDSINKVLDHFRRKGINQHVQNGYHGIVMNNFECEPAFYTCVEVTAGNRLFYHIVDSDEVSTKILMEFNKMNLPGEVTFLPLNKLDVRDTAYPETNDAIPMISKLRYNPRFDKAFKHVFGKTLICRSMEVSTQLARAFTMDCITLEGDQVSHRGALTGGYYDTRKSRLELQKDVRKAEEELGELEAKLNENLRRNIERINNEIDQLMNQMQQIETQQRKFKASRDSILSEMKMLKEKRQQSEKTFMPKQRSLQSLEASLHAMESTRESLKAELGTDLLSQLSLEDQKRVDALNDEIRQLQQENRQLLNERIKLEGIITRVETYLNENLRKRLDQVEQELNELRETEGGTVLTATTSELEAINKRVKDTMARSEDLDNSIDKTEAGIKELQKSMERWKNMEKEHMDAINHDTKELEKMTNRQGMLLKKKEECMKKIRELGSLPQEAFEKYQTLSLKQLFRKLEQCNTELKKYSHVNKKALDQFVNFSEQKEKLIKRQEELDRGYKSIMELMNVLELRKYEAIQLTFKQVSKNFSEVFQKLVPGGKATLVMKKGDVEGSQSQDEGEGSGESERGSGSQSSVPSVDQFTGVGIRVSFTGKQGEMREMQQLSGGQKSLVALALIFAIQKCDPAPFYLFDEIDQALDAQHRKAVSDMIMELAVHAQFITTTFRPELLESADKFYGVKFRNKVSHIDVITAEMAKDFVEDDTTHG

SEQ ID NO: 35873 - protein, 908 aa, Homo sapiens
MGDLKSGFEEVDGVRLGYLIIKGKQMFALSQVFTDLLKNIPRTTVHKRMDHLKVKKHHCDLEELRKLKAINSIAFHAAKCTLISREDVEALYTSCKTERVLKTKRRRVGRALATKAPPPERAAAASPRPGFWKDKHQLWRGLSGAARPLPISAQSQRPGAAAARPAAHLPQIFSKYPGSHYPEIVRSPCKPPLNYETAPLQGNYVAFPSDPAYFRSLLCSKHPAAAAAAAAAAAAAAAAAAAAAYYQVSAAGPQPKAAAGAGGPGSLSYRCKRKRGGAKDCLLAPHAGARRLLLLPRSYKAKAAAAAAAAAAAAAAAAGATCLERFHLVNGFCPPPHHHHHHHHHHHHHHHRAQPPQQSHHPPHHHRPQPHLGSFPESCSSDSESSSYSDHAANDSDFGSSLSSSSNSVSSEEEEEEGEEEEEEEEEEGGSGASDSSEVSSEEEDSSTESDSSSGSSQVSVQSIRFRRTSFCKPPSVQAQANFLYHLASAAAATKPAAFEDAGRLPDLKSSVKAESPAEWNLQSWAPKASPVYCPASLGSCFAEIRNDRVSEITFPHSEISNAVKRTDLTINCLAEGASSPSPKTNNAFPQQRILREARKCLQTTPTTHCADNNTIAARFLNNDSSGAEANSEKYSKILHCPEFATDLPSSQTDPEVNAAGAAATKAENPCTDTGDKTLPFLHNIKIKVEDSSANEEYEPHLFTNKLKCECNDTKGEFYSVTESKEEDALLTTAKEGFACPEKETPSLNPLAQSQGLSCTLGSPKPEDGEYKFGARVRKNYRTLVLGKRPVLQTPPVKPNLKSARSPRPTGKTETNEGTLDDFTVINRRKKVASNVASAVKRPFHFMANFPCPPSLIIGRDGDLWPAYSLNTTKDSQTPHKAHPIWKWQLGGSAIPLPPSHKFRKFNS

SEQ ID NO: 35874 - protein, 829 aa, Homo sapiens
MGDLKSGFEEVDGVRLGYLIIKGKQMFALSQVFTDLLKNIPRTTVHKRMDHLKVKKHHCDLEELRKLKAINSIAFHAAKCTLISREDVEALYTSCKTERVLKTKRRRVGRALATKAPPPERAAAASPRPGFWKDKHQLWRGLSGAARPLPISAQSQRPGAAAARPAAHLPQIFSKYPGSHYPEIVRSPCKPPLNYETAPLQGNYVAFPSDPAYFRSLLCSKHPAAAAAAAAAAAAAAAAGATCLERFHLVNGFCPPPHHHHHHHHHHHHHHHRAQPPQQSHHPPHHHRPQPHLGSFPESCSSDSESSSYSDHAANDSDFGSSLSSSSNSVSSEEEEEEGEEEEEEEEEEGGSGASDSSEVSSEEEDSSTESDSSSGSSQVSVQSIRFRRTSFCKPPSVQAQANFLYHLASAAAATKPAAFEDAGRLPDLKSSVKAESPAEWNLQSWAPKASPVYCPASLGSCFAEIRNDRVSEITFPHSEISNAVKRTDLTINCLAEGASSPSPKTNNAFPQQRILREARKCLQTTPTTHCADNNTIAARFLNNDSSGAEANSEKYSKILHCPEFATDLPSSQTDPEVNAAGAAATKAENPCTDTGDKTLPFLHNIKIKVEDSSANEEYEPHLFTNKLKCECNDTKGEFYSVTESKEEDALLTTAKEGFACPEKETPSLNPLAQSQGLSCTLGSPKPEDGEYKFGARVRKNYRTLVLGKRPVLQTPPVKPNLKSARSPRPTGKTETNEGTLDDFTVINRRKKVASNVASAVKRPFHFMANFPCPPSLIIGRDGDLWPAYSLNTTKDSQTPHKAHPIWKWQLGGSAIPLPPSHKFRKFNS

SEQ ID NO: 35875 - protein, 109 aa, Homo sapiens
MAASAARGAAALRRSINQPVAFVRRIPWTAASSQLKEHFAQFGHVRRCILPFDKETGFHRGLGWVQFSSEEGLRNALQQENHIIDGVKVQVHTRRPKLPQTSDDEKKDF

SEQ ID NO: 35876 - protein, 107 aa, Homo sapiens
MAASAARGAAALRRSINQPVAFVRRIPWTAASSQLKEHFAQFGHVRRCILPFDKETGFHRGLGWVQFSSEEGLRNALQQENHIIDGVKVHTRRPKLPQTSDDEKKDF

SEQ ID NO: 35877 - protein, 229 aa, Homo sapiens
MEGASFGAGRAGAALDPVSFARRPQTLLRVASWVFSIAVFGPIVNEGYVNTDSGPELRCVFNGNAGACRFGVALGLGAFLACAAFLLLDVRFQQISSVRDRRRAVLLDLGFSGLWSFLWFVGFCFLTNQWQRTAPGPATTQAGDAARAAIAFSFFSILSWVALTVKALQRFRLGTDMSLFATEQLSTGASQAYPGYPVGSGVEGTETYQSPPFTETLDTSPKGYQVPAY

SEQ ID NO: 35878 - protein, 265 aa, Homo sapiens; identical to SEQ ID NO: 4138

SEQ ID NO: 35879 - protein, 1523 aa, Homo sapiens
MAPGWAGVGAAVRARLALALALASVLSGPPAVACPTKCTCSAASVDCHGLGLRAVPRGIPRNAERLDLDRNNITRITKMDFAGLKNLRVLHLEDNQVSVIERGAFQDLKQLERLRLNKNKLQVLPELLFQSTPKLTRLDLSENQIQGIPRKAFRGITDVKNLQLDNNHISCIEDGAFRALRDLEILTLNNNNISRILVTSFNHMPKIRTLRLHSNHLYCDCHLAWLSDWLRQRRTVGQFTLCMAPVHLRGFNVADVQKKEYVCPAPHSEPPSCNANSISCPSPCTCSNNIVDCRGKGLMEIPANLPEGIVEIRLEQNSIKAIPAGAFTQYKKLKRIDISKNQISDIAPDAFQGLKSLTSLVLYGNKITEIVKGLFDGLVSLQLLLLNANKINCLRVNTFQDLQNLNLLSLYDNKLQTISKGLFAPLQSIQTLHLAQNPFVCDCHLKWLADYLQDNPIETSGARCSSPRRLANKRISQIKSKKFRCSGSEDYRSRFSSECFMDLVCPEKCRCEGTIVDCSNQKLVRIPSHLPEYVTDLRLNDNEVSVLEATGIFKKLPNLRKINLSNNKIKEVREGAFDGAASVQELMLTGNQLETVHGRVFRGLSGLKTLMLRSNLIGCVSNDTFAGLSSVRLLSLYDNRITTITPGAFTTLVSLSTINLLSNPFNCNCHLAWLGKWLRKRRIVSGNPRCQKPFFLKEIPIQDVAIQDFTCDGNEESSCQLSPRCPEQCTCMETVVRCSNKGLRALPRGMPKDVTELYLEGNHLTAVPRELSALRHLTLIDLSNNSISMLTNYTFSNMSHLSTLILSYNRLRCIPVHAFNGLRSLRVLTLHGNDISSVPEGSFNDLTSLSHLALGTNPLHCDCSLRWLSEWVKAGYKEPGIARCSSPEPMADRLLLTTPTHRFQCKGPVDINIVAKCNACLSSPCKNNGTCTQDPVELYRCACPYSYKGKDCTVPINTCIQNPCQHGGTCHLSDSHKDGFSCSCPLGFEGQRCEINPDDCEDNDCENNATCVDGINNYVCICPPNYTGELCDEVIDHCVPELNLCQHEAKCIPLDKGFSCECVPGYSGKLCETDNDDCVAHKCRHGAQCVDTINGYTCTCPQGFSGPFCEHPPPMVLLQTSPCDQYECQNGAQCIVVQQEPTCRCPPGFAGPRCEKLITVNFVGKDSYVELASAKVRPQANISLQVATDKDNGILLYKGDNDPLALELYQGHVRLVYDSLSSPPTTVYSVETVNDGQFHSVELVTLNQTLNLVVDKGTPKSLGKLQKQPAVGINSPLYLGGIPTSTGLSALRQGTDRPLGGFHGCIHEVRINNELQDFKALPPQSLGVSPGCKSCTVCKHGLCRSVEKDSVVCECRPGWTGPLCDQEARDPCLGHRCHHGKCVATGTSYMCKCAEGYGGDLCDNKNDSANACSAFKCHHGQCHISDQGEPYCLCQPGFSGEHCQQENPCLGQVVREVIRRQKGYASCATASKVPIMECRGGCGPQCCQPTRSKRRKYVFQCTDGSSFVEEVERHLECGCLACS

SEQ ID NO: 35880 - protein, 1423 aa, Homo sapiens
MAPGWAGVGAAVRARLALALALASVLSGPPAVACPTKCTCSAASVDCHGLGLRAVPRGIPRNAERLDLDRNNITRITKMDFAGLKNLRVLHLEDNQVSVIERGAFQDLKQLERLRLNKNKLQVLPELLFQSTPKLTRLDLSENQIQGIPRKAFRGITDVKNLQLDNNHISCIEDGAFRALRDLEILTLNNNNISRILVTSFNHMPKIRTLRLHSNHLYCDCHLAWLSDWLRQRRTVGQFTLCMAPVHLRGFNVADVQKKEYVCPAPHSEPPSCNANSISCPSPCTCSNNIVDCRGKGLMEIPANLPEGIVEIRLEQNSIKAIPAGAFTQYKKLKRIDISKNQISDIAPDAFQGLKSLTSLVLYGNKITEIVKGLFDGLVSLQLLLLNANKINCLRVNTFQDLQNLNLLSLYDNKLQTISKGLFAPLQSIQTLHLAQNPFVCDCHLKWLADYLQDNPIETSGARCSSPRRLANKRISQIKSKKFRCSGSEDYRSRFSSECFMDLVCPEKCRCEGTIVDCSNQKLVRIPSHLPEYVTDLRLNDNEVSVLEATGIFKKLPNLRKINLSNNKIKEVREGAFDGAASVQELMLTGNQLETVHGRVFRGLSGLKTLMLRSNLIGCVSNDTFAGLSSVRLLSLYDNRITTITPGAFTTLVSLSTINLLSNPFNCNCHLAWLGKWLRKRRIVSGNPRCQKPFFLKEIPIQDVAIQDFTCDGNEESSCQLSPRCPEQCTCMETVVRCSNKGLRALPRGMPKDVTELYLEGNHLTAVPRELSALRHLTLIDLSNNSISMLTNYTFSNMSHLSTLILSYNRLRCIPVHAFNGLRSLRVLTLHGNDISSVPEGSFNDLTSLSHLALGTNPLHCDCSLRWLSEWVKAGYKEPGIARCSSPEPMADRLLLTTPTHRFQCKGPVDINIVAKCNACLSSPCKNNGTCTQDPVELYRCACPYSYKGKDCTVPINTCIQNPCQHGGTCHLSDSHKDGFSCSCPLGFEGQRCEINPDDCEDNDCENNATCVDGINNYVCICPPNYTGELCDEVIDHCVPELNLCQHEAKCIPLDKGFSCECVPGYSGKLCETDNDDCVAHKCRHGAQCVDTINGYTCTCPQGFSGPFCEHPPPMVYDSLSSPPTTVYSVETVNDGQFHSVELVTLNQTLNLVVDKGTPKSLGKLQKQPAVGINSPLYLGGIPTSTGLSALRQGTDRPLGGFHGCIHEVRINNELQDFKALPPQSLGVSPGCKSCTVCKHGLCRSVEKDSVVCECRPGWTGPLCDQEARDPCLGHRCHHGKCVATGTSYMCKCAEGYGGDLCDNKNDSANACSAFKCHHGQCHISDQGEPYCLCQPGFSGEHCQQENPCLGQVVREVIRRQKGYASCATASKVPIMECRGGCGPQCCQPTRSKRRKYVFQCTDGSSFVEEVERHLECGCLACS

SEQ ID NO: 35881 - protein, 1472 aa, Homo sapiens
MAPGWAGVGAAVRARLALALALASVLSGPPAVACPTKCTCSAASVDCHGLGLRAVPRGIPRNAERLDLDRNNITRITKMDFAGLKNLRVLHLEDNQVSVIERGAFQDLKQLERLRLNKNKLQVLPELLFQSTPKLTRLDLSENQIQGIPRKAFRGITDVKNLQLDNNHISCIEDGAFRALRDLEILTLNNNNISRILVTSFNHMPKIRTLRLHSNHLYCDCHLAWLSDWLRQRRTVGQFTLCMAPVHLRGFNVADVQKKEYVCPAPHSEPPSCNANSISCPSPCTCSNNIVDCRGKGLMEIPANLPEGIVEIRLEQNSIKAIPAGAFTQYKKLKRIDISKNQISDIAPDAFQGLKSLTSLVLYGNKITEIVKGLFDGLVSLQLLLLNANKINCLRVNTFQDLQNLNLLSLYDNKLQTISKGLFAPLQSIQTLHLAQNPFVCDCHLKWLADYLQDNPIETSGARCSSPRRLANKRISQIKSKKFRCSGSEDYRSRFSSECFMDLVCPEKCRCEGTIVDCSNQKLVRIPSHLPEYVTDLRLNDNEVSVLEATGIFKKLPNLRKINLSNNKIKEVREGAFDGAASVQELMLTGNQLETVHGRVFRGLSGLKTLMLRSNLIGCVSNDTFAGLSSVRLLSLYDNRITTITPGAFTTLVSLSTINLLSNPFNCNCHLAWLGKWLRKRRIVSGNPRCQKPFFLKEIPIQDVAIQDFTCDGNEESSCQLSPRCPEQCTCMETVVRCSNKGLRALPRGMPKDVTELYLEGNHLTAVPRELSALRHLTLIDLSNNSISMLTNYTFSNMSHLSTLILSYNRLRCIPVHAFNGLRSLRVLTLHGNDISSVPEGSFNDLTSLSHLALGTNPLHCDCSLRWLSEWVKAGYKEPGIARCSSPEPMADRLLLTTPTHRFQCKGPVDINIVAKCNACLSSPCKNNGTCTQDPVELYRCACPYSYKGKDCTVPINTCIQNPCQHGGTCHLSDSHKDGFSCSCPLGFEGQRCEINPDDCEDNDCENNATCVDGINNYVCICPPNYTGELCDEVIDHCVPELNLCQHEAKCIPLDKGFSCECVPGYSGKLCETDNDDCVAHKCRHGAQCVDTINGYTCTCPQGFSGPFCEHPPPMVLLQTSPCDQYECQNGAQCIVVQQEPTCRCPPGFAGPRCEKLITVNFVGKDSYVELASAKVRPQANISLQVATDKDNGILLYKGDNDPLALELYQGHVRLVYDSLSSPPTTVYSVETVNDGQFHSVELVTLNQTLNLVVDKGTPKSLGKLQKQPAVGINSPLYLGGIPTSTGLSALRQGTDRPLGGFHGCIHEVRINNELQDFKALPPQSLGVSPGCKSCTVCKHGLCRSVEKDSVVCECRPGWTGPLCDQEARDPCLGHRCHHGKCVATGTSYMCKCAEGYGGDLCDNKNDSANACSAFKCHHGQCHISDQGEPYCLCQPGFSGEHCQQVFRAQVFQSSLPGNCSWSCWPPRPPMP

SEQ ID NO: 35882 - protein, 1530 aa, Homo sapiens
MAPGWAGVGAAVRARLALALALASVLSGPPAVACPTKCTCSAASVDCHGLGLRAVPRGIPRNAERLDLDRNNITRITKMDFAGLKNLRVLHLEDNQVSVIERGAFQDLKQLERLRLNKNKLQVLPELLFQSTPKLTRLDLSENQIQGIPRKAFRGITDVKNLQLDNNHISCIEDGAFRALRDLEILTLNNNNISRILVTSFNHMPKIRTLRLHSNHLYCDCHLAWLSDWLRQRRTVGQFTLCMAPVHLRGFNVADVQKKEYVCPAPHSEPPSCNANSISCPSPCTCSNNIVDCRGKGLMEIPANLPEGIVEIRLEQNSIKAIPAGAFTQYKKLKRIDISKNQISDIAPDAFQGLKSLTSLVLYGNKITEIVKGLFDGLVSLQLLLLNANKINCLRVNTFQDLQNLNLLSLYDNKLQTISKGLFAPLQSIQTLHLAQNPFVCDCHLKWLADYLQDNPIETSGARCSSPRRLANKRISQIKSKKFRCSGSEDYRSRFSSECFMDLVCPEKCRCEGTIVDCSNQKLVRIPSHLPEYVTDLRLNDNEVSVLEATGIFKKLPNLRKINLSNNKIKEVREGAFDGAASVQELMLTGNQLETVHGRVFRGLSGLKTLMLRSNLIGCVSNDTFAGLSSVRLLSLYDNRITTITPGAFTTLVSLSTINLLSNPFNCNCHLAWLGKWLRKRRIVSGNPRCQKPFFLKEIPIQDVAIQDFTCDGNEESSCQLSPRCPEQCTCMETVVRCSNKGLRALPRGMPKDVTELYLEGNHLTAVPRELSALRHLTLIDLSNNSISMLTNYTFSNMSHLSTLILSYNRLRCIPVHAFNGLRSLRVLTLHGNDISSVPEGSFNDLTSLSHLALGTNPLHCDCSLRWLSEWVKAGYKEPGIARCSSPEPMADRLLLTTPTHRFQCKVLWFCCPGPVDINIVAKCNACLSSPCKNNGTCTQDPVELYRCACPYSYKGKDCTVPINTCIQNPCQHGGTCHLSDSHKDGFSCSCPLGFEGQRCEINPDDCEDNDCENNATCVDGINNYVCICPPNYTGELCDEVIDHCVPELNLCQHEAKCIPLDKGFSCECVPGYSGKLCETDNDDCVAHKCRHGAQCVDTINGYTCTCPQGFSGPFCEHPPPMVLLQTSPCDQYECQNGAQCIVVQQEPTCRCPPGFAGPRCEKLITVNFVGKDSYVELASAKVRPQANISLQVATDKDNGILLYKGDNDPLALELYQGHVRLVYDSLSSPPTTVYSVETVNDGQFHSVELVTLNQTLNLVVDKGTPKSLGKLQKQPAVGINSPLYLGGIPTSTGLSALRQGTDRPLGGFHGCIHEVRINNELQDFKALPPQSLGVSPGCKSCTVCKHGLCRSVEKDSVVCECRPGWTGPLCDQEARDPCLGHRCHHGKCVATGTSYMCKCAEGYGGDLCDNKNDSANACSAFKCHHGQCHISDQGEPYCLCQPGFSGEHCQQENPCLGQVVREVIRRQKGYASCATASKVPIMECRGGCGPQCCQPTRSKRRKYVFQCTDGSSFVEEVERHLECGCLACS

SEQ ID NO: 35883 - protein, 293 aa, Homo sapiens
MLWAIPELGSPCPISISYEMSDSQDPTTSPVVTTQVELGGCSRQGGGNGFLRFRQHQEVQAFLSLLEDSFVQEFLSKDPCFQISDKYLLAMVLVYFQRAHLKLSEYTHSSLFLALYLANDMEEDLEGPKCEIFPWALGKDWCLRVGKFLHQRDKLWARMGFRAVVSRQCCEEVMAKEPFHWAWTRDRRPHHGGVQRVCPQVPVRLPRGPGLSPPHCSPCGLPQHCSSHLLKPVSSKCPSLTSECHRPPSQNYLSRVKNAWGGDFLIVLPPQMQLEPGTYSLRIFPKPPARPGH

SEQ ID NO: 35884 - protein, 549 aa, Homo sapiens
MTSHQPQPQEEQSPQRSTSGYPLQEVVDDEVSGPSAPGVDPSPPRRSLGCKRKRECLDESDDEPEKELAPEPEETWVAETLCGLKMKAKRRRVSLVLPEYYEAFNRLLAPGVDPSPPRRSLGCKRKRECLDESDDEPEKELAPEPEETWVAETLCGLKMKAKRRRVSLVLPEYYEAFNRLLAPGVDPSPPRRSLGCKRKRECLDESDDEPEKELAPEPEETWVAETLCGLKMKAKRRRVSLVLPEYYEAFNRLLAPGVDPSPPRRSLGCKRKRECLDESDDEPEKELAPEPEETWVAETLCGLKMKAKRRRVSLVLPEYYEAFNRLLAPGVDPSPPRRSLGCKRKRECLDESDDEPEKELAPEPEETWVAETLCGLKMKAKRRRVSLVLPEYYEAFNRLLEDPVIKRFLAWDKDLRVSDKYLLAMVIAYFSRAGLPSWQYQRIHFFLALYLANDMEEDDEAPKQKIFYFLYGKTHSHIPLRPKHWFQLCRPMNPRARKNCSQIALFQKRRFQFFCSMRCRAWVSPEELEEIQAYDPEHWVWARDRAHLS

SEQ ID NO: 35885 - protein, 172 aa, Homo sapiens
MKAKRRRVSLVLPEYYEAFNRLLEDPVIKRFLAWDKDLRVSDKYLLAMVIAYFSRAGLPSWQYQRIHFFLALYLANDMEEDDEAPKQKIFYFLYGKTHSHIPLRPKHWFQLCRPMNPRARKNCSQIALFQKRRFQFFCSMRCRAWVSPEELEEIQAYDPEHWVWARDRAHLS

SEQ ID NO: 35886 - protein, 555 aa, Homo sapiens
MVAACRSVAGLLPRRRRCFPARAPLLRVALCLLCWTPAAVRAVPELGLWLETVNDKSGPLIFRKTMFNSTDIKLSVKSFHCSGPVKFTIVWHLKYHTCHNEHSNLEELFQKHKLSVDEDFCHYLKNDNCWTTKNENLDCNSDSQVFPSLNNKELINIRNVSNQERSMDVVARTQKDGFHIFIVSIKTENTDASWNLNVSLSMIGPHGYISASDWPLMIFYMVMCIVYILYGILWLTWSACYWKDILRIQFWIAAVIFLGMLEKAVFYSEYQNISNTGLSTQGLLIFAELISAIKRTLARLLVIIVSLGYGIVKPRLGTVMHRVIGLGLLYLIFAAVEGVMRVIGGSNHLAVVLDDIILAVIDSIFVWFIFISLAQTMKTLRLRKNTVKFSLYRHFKNTLIFAVLASIVFMGWTTKTFRIAKCQSDWMERWVDDAFWSFLFSLILIVIMFLWRPSANNQRYAFMPLIDDSDDEIEEFMVTSENLTEGIKLRASKSVSNGTAKPATSENFDEDLKWVEENIPSSFTDVALPVLVDSDEEIMTRSEMAEKMFSSEKIM

SEQ ID NO: 35887 - protein, 554 aa, Homo sapiens
MVAACRSVAGLLPRRRRCFPARAPLLRVALCLLCWTPAAVRAVPELGLWLETVNDKSGPLIFRKTMFNSTDIKLSVKSFHCSGPVKFTIVWHLKYHTCHNEHSNLEELFQKHKLSVDEDFCHYLKNDNCWTTKNENLDCNSDSQVFPSLNNKELINIRNVSNQERSDVVARTQKDGFHIFIVSIKTENTDASWNLNVSLSMIGPHGYISASDWPLMIFYMVMCIVYILYGILWLTWSACYWKDILRIQFWIAAVIFLGMLEKAVFYSEYQNISNTGLSTQGLLIFAELISAIKRTLARLLVIIVSLGYGIVKPRLGTVMHRVIGLGLLYLIFAAVEGVMRVIGGSNHLAVVLDDIILAVIDSIFVWFIFISLAQTMKTLRLRKNTVKFSLYRHFKNTLIFAVLASIVFMGWTTKTFRIAKCQSDWMERWVDDAFWSFLFSLILIVIMFLWRPSANNQRYAFMPLIDDSDDEIEEFMVTSENLTEGIKLRASKSVSNGTAKPATSENFDEDLKWVEENIPSSFTDVALPVLVDSDEEIMTRSEMAEKMFSSEKIM

SEQ ID NO: 35888 - protein, 126 aa, Homo sapiens
MSIGVPIKVLHEAEGHIVTCETNTGEVYRGKLIEAEDNMNCQMSNITVTYRDGRVAQLEQVYIRGSKIRFLILPDMLKNAPMLKSMKNKNQGSGAGRGKAAILKAQVAARGRGRGMGRGNIFQKRR

SEQ ID NO: 35889 - protein, 120 aa, Homo sapiens
MSIGVPIKVLHEAEGHIVTCETNTGEVYRGKLIEAEDNMNCQMSNITVTYRDGRVAQLEQVYIRGSKIRFLILPDMLKNAPMLKSMKNKNQGSGAGRGKAAILKAQGYLSSLEWVLVHIC

SEQ ID NO: 35890 - protein, 323 aa, Homo sapiens
MAAPKGSLWVRTQLGLPPLLLLTMALAGGSGTASAEAFDSVLGDTASCHRACQLTYPLHTYPKEEELYACQRGCRLFSICQFVDDGIDLNRTKLECESACTEAYSQSDEQYACHLGCQNQLPFAELRQEQLMSLMPKMHLLFPLTLVRSFWSDMMDSAQSFITSSWTFYLQADDGKIVIFQSKPEIQYAPHLEQEPTNLRESSLSKMSYLQMRNSQAHRNFLEDGESDGFLRCLSLNSGWILTTTLVLSVMVLLWICCATVATAVEQYVPSEKLSIYGDLEFMNEQKLNRYPASSLVVVRSKTEDHEEAGPLPTKVNLAHSEI

SEQ ID NO: 35891 - protein, 288 aa, Homo sapiens
MEISRLAQSKRNIISLNMDLERDTQRIDEANQKLLLKIQEREDKIQRLESEIIQTRGLVEDEEWEKENRTTMERERALQELEEETARLERKNKTLVHSITELQQKLTRKSQKITNCEQSSPDGALEETKVKLQQLEASYACQEKELLKVMKEYAFVTQLCEDQALYIKKYQETLKKIEEELEALFLEREVSKLVSMNPVEKEHTSQNNEGTPTQKTARLFSKKIFCCLFFITLFFIRLLSYMFFHVRFINPDLLVNVLPKVLGRSTLWKLRCFFFPSLTLETEDMLPH

SEQ ID NO: 35892 - protein, 228 aa, Homo sapiens
MEISRLAQSKRNIISLNMDLERDTQRIDEANQKLLLKIQEREDKIQRLESEIIQTRGLVEDEEWEKENRTTMERERALQELEEETARLERKNKTLVHSITELQQKLTRKSQKITNCEQSSPDGALEETKVKLQQLEASYACQEKELLKVMKEYAFVTQLCEDQALYIKKYQETLKKIEEELEALFLEREVSKLVSMNPVEKEHTSQNNEGTPTQKTARLFSKKWASSF

SEQ ID NO: 35893 - protein, 1259 aa, Homo sapiens
MDASEEPLPPVIYTMENKPIVTCAGDQNLFTSVYPTLSQQLPREPMEWRRSYGRAPKMIHLESNFVQFKEELLPKEGNKALLTFPFLHIYWTECCDTEVYKATVKDDLTKWQNVLKAHSSVDWLIVIVENDAKKKNKTNILPRTSIVDKIRNDFCNKQSDRCVVLSDPLKDSSRTQESWNAFLTKLRTLLLMSFTKNLGKFEDDMRTLREKRTEPGWSFCEYFMVQEELAFVFEMLQQFEDALVQYDELDALFSQYVVNFGAGDGANWLTFFCQPVKSWNGLILRKPIDMEKRESIQRREATLLDLRSYLFSRQCTLLLFLQRPWEVAQRALELLHNCVQELKLLEVSVPPGALDCWVFLSCLEVLQRIEGCCDRAQIDSNIAHTVGLWSYATEKLKSLGYLCGLVSEKGPNSEDLNRTVDLLAGLGAERPETANTAQSPYKKLKEALSSVEAFEKHYLDLSHATIEMYTSIGRIRSAKFVGKDLAEFYMRKKAPQKAEIYLQGALKNYLAEGWALPITHTRKQLAECQKHLGQIENYLQTSSLLASDHHLTEEERKHFCQEILDFASQPSDSPGHKIVLPMHSFAQLRDLHFDPSNAVVHVGGVLCVEITMYSQMPVPVHVEQIVVNVHFSIEKNSYRKTAEWLTKHKTSNGIINFPPETAPFPVSQNSLPALELYEMFERSPSDNSLNTTGIICRNVHMLLRRQESSSSLEMPSGVALEEGAHVLRCSHVTLEPGANQITFRTQAKEPGTYTLRQLCASVGSVWFVLPHIYPIVQYDVYSQEPQLHVEPLADSLLAGIPQRVKFTVTTGHYTIKNGDSLQLSNAEAMLILCQAESRAVVYSNTREQSSEAALRIQSSDKVTSISLPVAPAYHVIEFELEVLSLPSAPALGGESDMLGMAEPHRKHKDKQRTGRCMVTTDHKVSIDCPWSIYSTVIALTFSVPFRTTHSLLSSGTRKYVQVCVQNLSELDFQLSDSYLVDTGDSTDLQLVPLNTQSQQPIYSKQSVFFVWELKWTEEPPPSLHCRFSVGFSPASEEQLSISLKPYTYEFKVENFFTLYNVKAEIFPPSGMEYCRTGSLCSLEVLITRLSDLLEVDKDEALTESDEHFSTKLMYEVVDNSSNWAVCGKSCGVISMPVAARATHRVHMEVMPLFAGYLPLPDVRLFKYLPHHSAHSSQLDADSWIENDSLSVDKHGDDQPDSSSLKSRGSVHSACSSEHKGLPMPRLQALPAGQVFNSSSGTQVLVIPSQDDHVLEVSVT

SEQ ID NO: 35894 - protein, 276 aa, Homo sapiens
MDASEEPLPPVIYTMENKPIVTCAGDQNLFTSVYPTLSQQLPREPMEWRRSYGRAPKMIHLESNFVQFKEELLPKEGNKALLTFPFLHIYWTECCDTEVYKATVKDDLTKWQNVLKAHSSVDWLIVIVENDAKKKNKTNILPRTSIVDKIRNDFCNKQSDRCVVLSDPLKDSSRTQESWNAFLTKLRTLLLMSFTKNLGKFEDDMRTLREKRTEPGWSFCEYFMVQEELAFVFEMLQQFEDALVQYDELDALFSQYVVNFGAGGIKCPFHNSVACW

SEQ ID NO: 35895 - protein, 133 aa, Homo sapiens
MRMSLAQRVLLTWLFTLLFLIMLVLKLDEKAPWNWFLIFIPVWIFDTILLVLLIVKMAGRCKSGFDPRHGSHNIKKKAWYLIAMLLKLAFCLALCAKLEQFTTMNLSYVFIPLWALLAGALTELGYNVFFVRD

SEQ ID NO: 35896 - protein, 210 aa, Homo sapiens
MALPQMCDGSHLASTLRYCMTVSGTVVLVAGTLCFAWWSEGDATAQPGQLAPPTEYPVPEGPSPLLRSVSFVCCGAGGLLLLIGLLWSVKASIPGPPRWDPYHLSRDLYYLTVESSEKESCRTPKVVDIPTYEEAVSFPVAEGPPTPPAYPTEEALEPSGSRDALLSTQPAWPPPSYESISLALDAVSAETTPSATRSCSGLVQTARGGS

SEQ ID NO: 35897 - protein, 643 aa, Homo sapiens
MAAVLALRVVAGLAAAALVAMLLEHYGLAGQPSPLPRPAPPRRPHPAPGPGDSNIFWGLQISDIHLSRFRDPGRAVDLEKFCSETIDIIQPALVLATGDLTDAKTKEQLGSRQHEVEWQTYQGILKKTRVMEKTKWLDIKGNHDAFNIPSLDSIKNYYRKYSAVRRDGSFHYVHSTPFGNYSFICVDATVNPGPKRPYNFFGILDKKKMEELLLLAKESSRSNHTIWFGHFTTSTILSPSPGIRSIMSSAIAYLCGHLHTLGGLMPVLHTRHFQGTLELEVGDWKDNRRYRIFAFDHDLFSFADLIFGKWPVVLITNPKSLLYSCGEHEPLERLLHSTHIRVLAFSLSSITSVTVKIDGVHLGQAVHVSGPIFVLKWNPRNYSSGTHNIEVIVQDSAGRSKSVHHIFSVQENNHLSFDPLASFILRTDHYIMARVLFVLIVLSQLTILIIFRYRGYPELKEPSGFINLTSFSLHVLSKINIFYYSVLLLTLYTVLGPWFFGEIIDGKFGCCFSFGIFVNGHFLQGSITFIIGILQLAFFNIPLMAYMCWSLLQRCFGHNFRSHLHQRKYLKIMPVHLLMLLLYIWQVYSCYFLYATYGTLAFLFSPLRTWLTLLTPVLIRYVWTLNSTKFGIFMVQLKSHLSS

SEQ ID NO: 35898 - protein, 282 aa, Homo sapiens
MSDVEENNFEGRESRSQSKSPTGTPARVKSESRSGSRSPSRVSKHSESHSRSRSKSRSRSRRHSHRRYTRSRSHSHSHRRRSRSRSYTPEYRRRRSRSHSPMSNRRRHTGSRANPDPNTCLGVFGLSLYTTERDLREVFSRYGPLSGVNVVYDQRTGRSRGFAFVYFERIDDSKEAMERANGMELDGRRIRVDYSITKRAHTPTPGIYMGRPTHSGGGGGGGGGGGGGGGGRRRDSYYDRGYDRGYDRYEDYDYRYRRRSPSPYYSRYRSRSRSRSYSPRRY

SEQ ID NO: 35899 - protein, 113 aa, Homo sapiens
MSNRRRHTGSRANPDPNTCLGVFGLSLYTTERDLREVFSRYGPLSGVNVVYDQRTGRSRGFAFVYFERIDDSKEAMERANGMELDGRRIRVDYSITKRAHTPTPGIYMGRPTQ

SEQ ID NO: 35900 - protein, 181 aa, Homo sapiens
MSNRRRHTGSRANPDPNTCLGVFGLSLYTTERDLREVFSRYGPLSGVNVVYDQRTGRSRGFAFVYFERIDDSKEAMERANGMELDGRRIRVDYSITKRAHTPTPGIYMGRPTHSGGGGGGGGGGGGGGGGRRRDSYYDRGYDRGYDRYEDYDYRYRRRSPSPYYSRYRSRSRSRSYSPRRY

SEQ ID NO: 35901 - protein, 180 aa, Homo sapiens
MSNRRRHTGSRANPDPNTCLGVFGLSLYTTERDLREVFSRYGPLSGVNVVYDQRTGRSRGFAFVYFERIDDSKEAMERANGMELDGRRIRVDYSITKRAHTPTPGIYMGRPTHSGGGGGGGGGGGGGGGGRRRDSYYDRGYDRGYDRYEDYDYRYRRSPSPYYSRYRSRSRSRSYSPRRY

SEQ ID NO: 35902 - protein, 805 aa, Homo sapiens
MAQPLAFILDVPETPGDQGQGPSPYDESEVHDSFQQLIQEQSQCTAQEGLELQQREREVTGSSQQTLWRPEGTQSTATLRILASMPSRTIGRSRGAIISQYYNRTVQLRCRSSRPLLGNFVRSAWPSLRLYDLELDPTALEEEEKQSLLVKELQSLAVAQRDHMLRGMPLSLAEKRSLREKSRTPRGKWRGQPGSGGVCSCCGRLRYACVLALHSLGLALLSALQALMPWRYALKRIGGQFGSSVLSYFLFLKTLLAFNALLLLLLVAFIMGPQVAFPPALPGPAPVCTGLELLTGAGCFTHTVMYYGHYSNATLNQPCGSPLDGSQCTPRVGGLPYNMPLAYLSTVGVSFFITCITLVYSMAHSFGESYRVGSTSGIHAITVFCSWDYKVTQKRASRLQQDNIRTRLKELLAEWQLRHSPRSVCGRLRQAAVLGLVWLLCLGTALGCAVAVHVFSEFMIQSPEAAGQEAVLLVLPLVVGLLNLGAPYLCRVLAALEPHDSPVLEVYVAICRNLILKLAILGTLCYHWLGRRVGVLQGQCWEDFVGQELYRFLVMDFVLMLLDTLFGELVWRIISEKKLKRRRKPEFDIARNVLELIYGQTLTWLGVLFSPLLPAVQIIKLLLVFYVKKTSLLANCQAPRRPWLASHMSTVFLTLLCFPAFLGAAVFLCYAVWQVKPSSTCGPFRTLDTMYEAGRVWVRHLEAAGPRVSWLPWVHRYLMENTFFVFLVSALLLAVIYLNIQVVRGQRKVICLLKEQISNEGEDKIFLINKLHSIYERKEREERSRVGTTEEAAAPPALLTDEQDA

SEQ ID NO: 35903 - protein, 454 aa, Homo sapiens
MAQPLAFILDVPETPGDQGQGPSPYDESEVHDSFQQLIQEQSQCTAQEGLELQQREREVTGSSQQTLWRPEGTQSTATLRILASMPSRTIGRSRGAIISQYYNRTVQLRCRSSRPLLGNFVRSAWPSLRLYDLELDPTALEEEEKQSLLVKELQSLAVAQRDHMLRGMPLSLAEKRSLREKSRTPRGKWRGQPGSGGVCSCCGRLRYACVLALHSLGLALLSALQALMPWRYALKRIGGQFGSSVLSYFLFLKTLLAFNALLLLLLVAFIMGPQVAFPPALPGPAPVCTGLELLTGAGCFTHTVMYYGHYSNATLNQPCGSPLDGSQCTPRVGGLPYNMPLAYLSTVGVSFFITCITLVYSMAHSFGESYRVGSTSGIHAITVFCSWDYKVTQKRASRLQQDNIRTRLKGEDKIFLINKLHSIYERKEREERSRVGTTEEAAAPPALLTDEQDA

SEQ ID NO: 35904 - protein, 384 aa, Homo sapiens
MAHSFGESYRVGSTSGIHAITVFCSWDYKVTQKRASRLQQDNIRTRLKELLAEWQLRHSPRSVCGRLRQAAVLGLVWLLCLGTALGCAVAVHVFSEFMIQSPEAAGQEAVLLVLPLVVGLLNLGAPYLCRVLAALEPHDSPVLEVYVAICRIISEKKLKRRRKPEFDIARNVLELIYGQTLTWLGVLFSPLLPAVQIIKLLLVFYVKKTSLLANCQAPRRPWLASHMSTVFLTLLCFPAFLGAAVFLCYAVWQVKPSSTCGPFRTLDTMYEAGRVWVRHLEAAGPRVSWLPWVHRYLMENTFFVFLVSALLLAVIYLNIQVVRGQRKVICLLKEQISNEGEDKIFLINKLHSIYERKEREERSRVGTTEEAAAPPALLTDEQDA

SEQ ID NO: 35905 - protein, 298 aa, Homo sapiens
MPWRYALKRIGGQFGSSVLSYFLFLKTLLAFNALLLLLLVAFIMGPQVAFPPALPGPAPVCTGLELLTGAGCFTHTVMYYGHYSNATLNQPCGSPLDGSQCTPRVGGLPYNMPLAYLSTVGVSFFITCITLVYSMAHSFGESYRVGSTSGIHAITVFCSWDYKVTQKRASRLQQDNIRTRLKELLAEWQLRHSPRSVCGRLRQAAVLGLVWLLCLGTALGCAVAVHVFSEFMIQSPEAAGQEAVLLVLPLVVGLLNLGAPYLCRVLAALEPHDSPVLEVYVAICRCVAAHENIIWCWS

SEQ ID NO: 35906 - protein, 1133 aa, Homo sapiens
MSPTQWDFPVELCCRPMAFVTLTGLDVVYNAVHRAVWDAFCANRRADRVPISFKVLPGDHEYPKCRPKRTSYEWYIPKGILKTGWMNKHLNLVPALVVVFYELDWDEPQWKEKQSECATRVEIVRQSLQGRNTKVAVVLIQKKTPLPPGEDVIASERAAALCNACELSGKSLFVLPHTDHLVGYIIRLENAFYEHAQTYYYTEIRRVKSHKEFLNKTTHQLLFVRHQFKIAFFSELKQDTQNALKNYRTAYNLVHELRAHETNILEIKTMAGFINYKICRLCFQHNTPLDAIAQFRKHIDLCKKKIGSAELSFEHDAWMSKQFQAFGDLFDEAIKLGLTAIQTQNPGFYYQQAAYYAQERKQLAKTLCNHEASVMYPNPDPLETQTGVLDFYGQRSWRQGILSFDLSDPEKEKVGILAIQLKERNVVHSEIIITLLSNAVAQFKKYKCPRMKSHLMVQMGEEYYYAKDYTKALKLLDYVMCDYRSEGWWTLLTSVLTTALKCSYLMAQLKDYITYSLELLGRASTLKDDQKSRIEKNLINVLMNESPDPEPDCDILAVKTAQKLWADRISLAGSNIFTIGVQDFVPFVQCKAKFHAPSFHVDVPVQFDIYLKADCPHPIRFSKLCVSFNNQEYNQFCVIEEASKANEVLENLTQGKMCLVPGKTRKLLFKFVAKTEDVGKKIEITSVDLALGNETGRCVVLNWQGGGGDAASSQEALQAARSFKRRPKLPDNEVHWDSIIIQASTMIISRVPNISVHLLHEPPALTNEMYCLVVTVQSHEKTQIRDVKLTAGLKPGQDANLTQKTHVTLHGTELCDESYPALLTDIPVGDLHPGEQLEKMLYVRCGTVGSRMFLVYVSYLINTTVEEKEIVCKCHKDETVTIETVFPFDVAVKFVSTKFEHLERVYADIPFLLMTDLLSASPWALTIVSSELQLAPSMTTVDQLESQVDNVILQTGESASECFCLQCPSLGNIEGGVATGHYIISWKRTSAMENIPIITTVITLPHVIVENIPLHVNADLPSFGRVRESLPVKYHLQNKTDLVQDVEISVEPSDAFMFSGLKQIRLRILPGTEQEMLYNFYPLMAGYQQLPSLNINLLRFPNFTNQLLRRFIPTSIFVKPQGRLMDDTSIAAA

SEQ ID NO: 35907 - protein, 430 aa, Homo sapiens
MCLVPGKTRKLLFKFVAKTEDVGKKIEITSVDLALGNETGRCVVLNWQGGGGDAASSQEALQAARSFKRRPKLPDNEVHWDSIIIQASTMIISRVPNISVHLLHEPPALTNEMYCLVVTVQSHEKTQIRDVKLTAGLKPGQDANLTQKTHVTLHGTELCDESYPALLTDIPVGDLHPGEQLEKMLYVRCGTVGSRMFLVYVSYLINTTVEEKEIVCKCHKDETVTIETVFPFDVAVKFVSTKFEHLERVYADIPFLLMTDLLSASPWALTIVSSELQLAPSMTTVDQLESQVDNVILQTGESASECFCLQCPSLGNIEGGVATGHYIISWKRTSAMENIPIITTVITLPHVIVENIPLHVNADLPSFGRVRESLPVKYHLQNKTDLVQDVEISVEPSDAFMFSGLKQIRLPAQAFYTYQYFCQATGSTHG

SEQ ID NO: 35908 - protein, 1086 aa, Homo sapiens
MSPTQWDFPVELCCRPMAFVTLTGLDVVYNAVHRAVWDAFCANRRADRVPISFKVLPGDHEYPKCRPKRTSYEWYIPKGILKTGWMNKHLNLVPALVVVFYELDWDEPQWKEKQSECATRVEIVRQSLQGRNTKVAVVLIQKKTPLPPGEDVIASERAAALCNACELSGKSLFVLPHTDHLVGYIIRLENAFYEHAQTYYYTEIRRVKSHKEFLNKTTHQLLFVRHQFKIAFFSELKQDTQNALKNYRTAYNLVHELRAHETNILEIKTMAGFINYKICRLCFQHNTPLDAIAQFRKHIDLCKKKIGSAELSFEHDAWMSKQFQAFGDLFDEAIKLGLTAIQTQNPGFYYQQAAYYAQERKQLAKTLCNHEASVMYPNPDPLETQTGVLDFYGQRSWRQGILSFDLSDPEKEKVGILAIQLKERNVVHSEIIITLLSNAVAQFKKYKCPRMKSHLMVQMGEEYYYAKDYTKALKLLDYVMCDYRSEGWWTLLTSVLTTALKCSYLMAQLKDYITYSLELLGRASTLKDDQKSRIEKNLINVLMNESPDPEPDCDILAVKTAQKLWADRISLAGSNIFTIGVQDFVPFVQCKAKFHAPSFHVDVPVQFDIYLKADCPHPIRFSKLCVSFNNQEYNQFCVIEEASKANEVLENLTQGKMCLVPGKTRKLLFKFVAKTEDVGKKIEITSVDLALGNETGRCVVLNWQGGGGDAASSQEALQAARSFKRRPKLPDNEVHWDSIIIQASTMIISRVPNISVHLLHEPPALTNEMYCLVVTVQSHEKTQIRDVKLTAGLKPGQDANLTQKTHVTLHGTELCDESYPALLTDIPVGDLHPGEQLEKMLYVRCGTVGSRMFLVYVSYLINTTVEEKEIVCKCHKDETVTIETVFPFDVAVKFVSTKFEHLERVYADIPFLLMTDLLSASPWALTIVSSELQLAPSMTTVDQLESQVDNVILQTGESASECFCLQCPSLGNIEGGVATGHYIISWKRTSAMENIPIITTVITLPHVIVENIPLHVNADLPSFGRVRESLPVKYHLQNKTDLVQDVEISVEPSDAFMFSGLKQIRLPAQAFYTYQYFCQATGSTHG

SEQ ID NO: 35909 - protein, 1018 aa, Homo sapiens
MSPTQWDFPVELCCRPMAFVTLTGLDVVYNAVHRAVWDAFCANRRADRVPISFKVLPGDHEYPKCRPKRTSYEWYIPKGILKTGWMNKHLNLVPALVVVFYELDWDEPQWKEKQSECATRVEIVRQSLQGRNTKVAVVLIQKKTPLPPGEDVIASERAAALCNACELSGKSLFVLPHTDHLVGYIIRLENAFYEHAQTYYYTEIRRVKSHKEFLNKTTHQLLFVRHQFKIAFFSELKQDTQNALKNYRTAYNLVHELRAHETNILEIKTMAGFINYKICRLCFQHNTPLDAIAQFRKHIDLCKKKIGSAELSFEHDAWMSKQFQAFGDLFDEAIKLGLTAIQTQNPGFYYQQAAYYAQERKQLAKTLCNHEASVMYPNPDPLETQTGVLDFYGQRSWRQGILSFDLSDPEKEKVGILAIQLKERNVVHSEIIITLLSNAVAQFKKYKCPRMKSHLMVQMGEEYYYAKDYTKALKLLDYVMCDYRSEGWWTLLTSVLTTALKCSYLMAQLKDYITYSLELLGRASTLKDDQKSRIEKNLINVLMNESPDPEPDCDILAVKTAQKLWADRISLAGSNIFTIGVQDFVPFVQCKAKFHAPSFHVDVPVQFDIYLKADCPHPIRFSKLCVSFNNQEYNQFCVIEEASKANEVLENLTQGKMCLVPGKTRKLLFKFVAKTEDVGKKIEITSVDLALGNETGRCVVLNWQGGGGDAASSQEALQAARSFKRRPKLPDNEVHWDSIIIQASTMIISRVPNISVHLLHEPPALTNEMYCLVVTVQSHEKTQIRDVKLTAGLKPGQDANLTQKTHVTLHGTELCDESYPALLTDIPVGDLHPGEQLEKMLYVRCGTVGSRMFLVYVSYLINTTVEEKEIVCKCHKDETVTIETVFPFDVAVKFVSTKFEHLERVYADIPFLLMTDLLSASPWALTIVSSELQLAPSMTTVDQLESQVDNVILQTGESASELYYLLEKDLSNGEYPHHHNCHHSAARDCGEYPSPCECRSAVIWACQRVVTCQVSPTE

SEQ ID NO: 35910 - protein, 380 aa, Homo sapiens
MRSPGGILLQALPRLLQHAALPGLAELPARWALPRGAGGDGPADRLPRGGGASAAAAAAAASGALLGAYLERHGPPEASELPEPGGALAGGPGSGGGGVVVGVAEVRNWRCCCLGSTCWCRSLVLVCVLAALCFASLALVRRYLHHLLLWVESLDSLLGVLLFVVGFIVVSFPCGWGYIVLNVAAGYLYGFVLGMGLMMVGVLIGTFIAHVVCKRLLTAWVAARIQSSEKLSAVIRVVEGGSGLKVVALARLTPIPFGLQNAVFSITDLSLPNYLMASSVGLLPTQLLNSYLGTTLRTMEDVIAEQSVSGYFVFCLQIIISIGLMFYVVHRAQVELNAAIVACEMELKSSLVKGNQPNTSGSSFYNKRTLTFSGGGINVV

SEQ ID NO: 35911 - protein, 119 aa, Homo sapiens
MPPRITDLSLPNYLMASSVGLLPTQLLNSYLGTTLRTMEDVIAEQSVSGYFVFCLQIIISIGLMFYVVHRAQVELNAAIVACEMELKSSLVKGNQPNTSGSSFYNKRTLTFSGGGINVV

SEQ ID NO: 35912 - protein, 134 aa, Homo sapiens
MGLMMVGVLIGTFIAHVVCKRLLTAWVAARIQSSEKLSAVIRVVEGGSGLKVVALARLTPIPFGLQNAVFSIIISIGLMFYVVHRAQVELNAAIVACEMELKSSLVKGNQPNTSGSSFYNKRTLTFSGGGINVV

SEQ ID NO: 35913 - protein, 328 aa, Homo sapiens
MRSPGGILLQALPRLLQHAALPGLAELPARWALPRGAGGDGPADRLPRGGGASAAAAAAAASGALLGAYLERHGPPEASELPEPGGALAGGPGSGGGGVVVGVAEVRNWRCCCLGSTCWCRSLVLVCVLAALCFASLALVRRYLHHLLLWVESLDSLLGVLLFVVGFIVVSFPCGWGYIVLNVAAGYLYGFVLGMGLMMVGVLIGTFIAHVVCKRLLTAWVAARIQSSEKLSAVIRVVEGGSGLKVVALARLTPIPFGLQNAVFSIIISIGLMFYVVHRAQVELNAAIVACEMELKSSLVKGNQPNTSGSSFYNKRTLTFSGGGINVV

SEQ ID NO: 35914 - protein, 735 aa, Homo sapiens
MEDAGGGEETPAPEAPHPPQLAPPEEQGLLFQEETIDLGGDEFGSEENETASEGSSPLADKLNEHMMESVLISDSPNSEGDAGDLGRVRDEAEPGGEGDPGPEPAGTPSPSGEADGDCAPEDAAPSSGGAPRQDAAREVPGSEAARPEQEPPVAEPVPVCTIFSQRAPPASGDGFEPQMVKSPSFGGASEASARTPPQVVQPSPSLSTFFGDTAASHSLASDFFDSFTTSAFISVSNPGAGSPAPASPPPLAVPGTEGRPEPVAMRGPQAAAPPASPEPFAHIQAVFAGSDDPFATALSMSEMDRRNDAWLPGEATRGVLRAVATQQRGAVFVDKENLTMPGLRFDNIQGDAVKDLMLRFLGEKAAAKRQVLNADSVEQSFVGLKQLISCRNWRAAVDLCGRLLTAHGQGYGKSGLLTSHTTDSLQLWFVRLALLVKLGLFQNAEMEFEPFGNLDQPDLYYEYYPHVYPGRRGSMVPFSMRILHAELQQYLGNPQESLDRLHKVKTVCSKILANLEQGLAEDGGMSSVTQEGRQASIRLWRSRLGRVMYSMANCLLLMKDYVLAVEAYHSVIKYYPEQEPQLLSGIGRISLQIGDIKTAEKYFQDVEKVTQKLDGLQGKIMVLMNSAFLHLGQNNFAEAHRFFTEILRMDPRNAVANNNAAVCLLYLGKLKDSLRQLEAMVQQDPRHYLHESVLFNLTTMYELESSRSMQKKQALLEAVAGKEGDSFNTQCLKLA

SEQ ID NO: 35915 - protein, 305 aa, Homo sapiens
MELHYLAKKSNQADLCDARDWSSRGLPGDQADTAATRAALCCQKQCASTPRATEMEGSKLSSSPASPSSSLQNSTLQPDAFPPGLLHSGNNQITAERKVCNCCSQELETSFTYVDKNINLEQRNRSSPSAKGHNHPGELGWENPNEWSQEAAISLISEEEDDTSSEATSSGKSIDYGFISAILFLVTGILLVIISYIVPREVTVDPNTVAAREMERLEKESARLGAHLDRCVIAGLCLLTLGGVILSCLLMMSMWKGELYRRNRFASSKESAKLYGSFNFRMKTSTNENTLELSLVEEDALAVQS

SEQ ID NO: 35916 - protein, 446 aa, Homo sapiens [sequence omitted]

SEQ ID NO: 35917 - protein, 107 aa, Homo sapiens
MLSKGRSPRRKQVQTQRKAALVLSVTPMVPVGSVWLAMSSVLSAFMRELPGWFLFFGVFLPVTLLLLLLIAYFRIKLIEVNEELSQNCDRQHNPKDGSSLYQRMKWT

SEQ ID NO: 35918 - protein, 138 aa, Homo sapiens
MRPTADSFRLKKGNVFPNFDPCAQALQKSCHFALSFLIGKMGIIILSVCLICTRLLQEGIAQSKCLINVSFSLYSCFIVFVTISQDSETLSLDCDHRLFFSLPFTDPASGGQSQHSWPCPERSKNLPQVSKQLRNRAG

SEQ ID NO: 35919 - protein, 136 aa, Homo sapiens
MWLDTRNLGIVISCWKGVCVPQTTTLEMFYNDNDRVEESSNSYQIRREFLLPACLPAFLSFSTSFSFFLSFLPLSLSLFLPFFPSFFLSLSLSPSFLPSFLRQGLALSPRLECDGAIMIHCSLNIPGSSDPPTSAS

SEQ ID NO: 35920 - protein, 394 aa, Homo sapiens
MTEQETLALLEVKRSDSPEKSSPQALVPNGRQPEGEGGAESPGAESLRVGSSAGSPTAIEGAEDGLDSTVSEAATLPWGTGPQPSAPFPDPPGWRDIEPEPPESEPLTKLEELPEDDANLLPEKAARAFVPIDLQCIERQPQEDLIVRCEAGEGECRTFMPPRVTHPDPTERKWAEAVVRPPGCSCGGCGSCGDREWLRAVASVGAALILFPCLLYGAYAFLPFDVPRLPTMSSRLIYTLRCGVFATFPIVLGILVYGLSLLCFSALRPFGEPRREVEIHRRYVAQSVQLFILYFFNLAVLSTYLPQDTLKLLPLLTGLFAVSRLIYWLTFAVGRSFRGFGYGLTFLPLLSMLMWNLYYMFVVEPERMLTATESRLDYPDHARSASDYRPRPWG

SEQ ID NO: 35921 - protein, 816 aa, Homo sapiens
MAVSLDDDVPLILTLDEGGSAPLAPSNGLGQEELPSKNGGSYAIHDSQAPSLSSGGESSPSSPAHNWEMNYQEAAIYLQEGENNDKFFTHPKDAKALAAYLFAHNHLFYLMELATALLLLLLSLCEAPAVPALRLGIYVHATLELFALMVVVFELCMKLRWLGLHTFIRHKRTMVKTSVLVVQFVEAIVVLVRQMSHVRVTRALRCIFLVDCRYCGGVRRNLRQIFQSLPPFMDILLLLLFFMIIFAILGFYLFSPNPSDPYFSTLENSIVSLFVLLTTANFPDVMMPSYSRNPWSCVFFIVYLSIELYFIMNLLLAVVFDTFNDIEKRKFKSLLLHKRTAIQHAYRLLISQRRPAGISYRQFEGLMRFYKPRMSARERYLTFKALNQNNTPLLSLKDFYDIYEVAALKWKAKKNREHWFDELPRTALLIFKGINILVKSKAFQYFMYLVVAVNGVWILVETFMLKGGNFFSKHVPWSYLVFLTIYGVELFLKVAGLGPVEYLSSGWNLFDFSVTVFAFLGLLALALNMEPFYFIVVLRPLQLLRLFKLKERYRNVLDTMFELLPRMASLGLTLLIFYYSFAIVGMEFFCGIVFPNCCNTSTVADAYRWRNHTVGNRTVVEEGYYYLNNFDNILNSFVTLFELTVVNNWYIIMEGVTSQTSHWSRLYFMTFYIVTMVVMTIIVAFILEAFVFRMNYSRKNQDSEVDGGITLEKEISKEELVAVLELYREARGASSDVTRLLETLSQMERYQQHSMVFLGRRSRTKSDLSLKMYQEEIQEWYEEHAREQEQQRQLSSSAAPAAQQPPGSRQRSQTVT

SEQ ID NO: 35922 - protein, 252 aa, Homo sapiens
MRFYKPRMSARERYLTFKALNQNNTPLLSLKDFYDIYEVAALKWKAKKNREHWFDELPRTALLIFKGINILVKSKAFQYFMYLVVAVNGVWILVETFMLKGGNFFSKHVPWSYLVFLTIYGVELFLKVAGLGPVEYLSSGWNLFDFSVTVFAFLGLLALALNMEPFYFIVVLRPLQLLRLFKLKERYRNVLDTMFELLPRMARYCQPPPWPAGPGAVWQCPVGAGAEWQSGERSSTKDCNRGPDGAPRSLES

SEQ ID NO: 35923 - protein, 888 aa, Homo sapiens
MESCYIAQAGLELLGSSSSPTLTSQSAEITEDASNGGVSEQHPWPSGFERELKPETISSPGYHILRATGEENMAVSLDDDVPLILTLDEGGSAPLAPSNGLGQEELPSKNGGSYAIHDSQAPSLSSGGESSPSSPAHNWEMNYQEAAIYLQEGENNDKFFTHPKDAKALAAYLFAHNHLFYLMELATALLLLLLSLCEAPAVPALRLGIYVHATLELFALMVVVFELCMKLRWLGLHTFIRHKRTMVKTSVLVVQFVEAIVVLVRQMSHVRVTRALRCIFLVDCRYCGGVRRNLRQIFQSLPPFMDILLLLLFFMIIFAILGFYLFSPNPSDPYFSTLENSIVSLFVLLTTANFPDVMMPSYSRNPWSCVFFIVYLSIELYFIMNLLLAVVFDTFNDIEKRKFKSLLLHKRTAIQHAYRLLISQRRPAGISYRQFEGLMRFYKPRMSARERYLTFKALNQNNTPLLSLKDFYDIYEVAALKWKAKKNREHWFDELPRTALLIFKGINILVKSKAFQYFMYLVVAVNGVWILVETFMLKGGNFFSKHVPWSYLVFLTIYGVELFLKVAGLGPVEYLSSGWNLFDFSVTVFAFLGLLALALNMEPFYFIVVLRPLQLLRLFKLKERYRNVLDTMFELLPRMASLGLTLLIFYYSFAIVGMEFFCGIVFPNCCNTSTVADAYRWRNHTVGNRTVVEEGYYYLNNFDNILNSFVTLFELTVVNNWYIIMEGVTSQTSHWSRLYFMTFYIVTMVVMTIIVAFILEAFVFRMNYSRKNQDSEVDGGITLEKEISKEELVAVLELYREARGASSDVTRLLETLSQMERYQQHSMVFLGRRSRTKSDLSLKMYQEEIQEWYEEHAREQEQQRQLSSSAAPAAQQPPGSRQRSQTVT

SEQ ID NO: 35924 - protein, 216 aa, Homo sapiens
MLPNVGSPPLPFRKCPSGAGRTNRASAVARTSAPETRRGRAPSSGDAKMAEGARARGPRGCRDRDGPAGGAGKMAAPRRGRGSSTVLSSVPLQMLFYLSGTYYALYFLATLLMITYKSQVFSYPHRYLVLDLALLFLMGILEAVRLYLGTRGNLTEAERPLAASLALTAGTALLSAHFLLWQALVLWADWALSATLLALHGLEAVLQVVAIAAFTR

SEQ ID NO: 35925 - protein, 160 aa, Homo sapiens
MAEGARARGPRGCRDRDGPAGGAGRGSSTVLSSVPLQMLFYLSGTYYALYFLATLLMITYKSQVFSYPHRYLVLDLALLFLMGILEAVRLYLGTRGNLTEAERPLAASLALTAGTALLSAHFLLWQALVLWADWALSATLLALHGLEAVLQVVAIAAFTR

SEQ ID NO: 35926 - protein, 255 aa, Homo sapiens
MKVLATSFVLGSLGLAFYLPLVVTTPKTLAIPEKLQEAVGKVIINATTCTVTCGLGYKEETVCEVGPDGVRRKCQTRRLECLTNWICGMLHFTILIGKEFELSCLSSDILEFGQEAFRFTWRLARGVISTDDEVFKPFQANSHFVKFKYAQEYDSGTYRCDVQLVKNLRLVKRLYFGLRVLPPNLVNLNFHQSLTEDQKLIDEGLEVNLDSYSKPHHPKWKKKVASALGIGIAIGVVGGVLVRIVLCALRGGLQQ

SEQ ID NO: 35927 - protein, 343 aa, Homo sapiens
MFSLPSLPSWLPGLPSLEWGSSLLDSLLQGLIGALGVLVLNSLLKVYFFVGCANDPQRRPEKERLRAQWASLETVHLAGLALFLTVVGSRVAALVVLEFSLRAVSTLLSLGKGSQGAAERLQLYLLCQYSLGCGLTCGLSFLQEGAPHRTLNLLLSLGLATLLGLGARRLHRHVCRLYELHSSQRYCGVCLGLLAHAHGLPQLLGRALAIAFAVGDLAAVALINQDFLTTSEAMRFWTPLTICYTLLVIYMQEEQRQHPGLQSQVQTVLVRMGGLFVLLLTVGRWLDLLGILVSLLGELWCLVGVRTLLDLCQIQDFPSQRPPVSTPSQPLPSAPQSQSSAPS

SEQ ID NO: 35928 - protein, 136 aa, Homo sapiens
MNCDALLHHSAIPEDFLHIFLLLQKISVSLPLSLSQSVCLFYSISLCVSLLLHISLCVSVYVSLSLSSFPCFSLTHTHTHSQLSKDTSVLTFTFCFKQHTHFTLNYTSHAHELSAPSVHPTCVFTFKAAPSPRPAT

SEQ ID NO: 35929 - protein, 376 aa, Homo sapiens
MDGEEQQPPHEANVEPVVPSEASEPVPRVLSGDPQNLSDVDAFNLLLEMKLKRRRQRPNLPRTVTQLVAEDGSRVYVVGTAHFSDDSKRDVVKTIREVQPDVVVVELCQYRVSMLKMDESTLLREAQELSLEKLQQAVRQNGLMSGLMQMLLLKVSAHITEQLGMAPGGEFREAFKEASKVPFCKFHLGDRPIPVTFKRAIAALSFWQKVRLAWGLCFLSDPISKDDVERCKQKDLLEQMMAEMIGEFPDLHRTIVSERDVYLTYMLRQAARRLELPRASDAEPRKCVPSVVVGVVGMGHVPGIEKNWSTDLNIQEIMTVPPPSVSGRVSRLAVKAAFFGLLGYSLYWMGRRTASLVLSLPAAQYCLQRVTEARHK

SEQ ID NO: 35930 - protein, 330 aa, Homo sapiens
MDGEEQQPPHEANVEPVVPSEASEPVPRVYVVGTAHFSDDSKRDVVKTIREVQPDVVVVELCQYRVSMLKMDESTLLREAQELSLEKLQQAVRQNGLMSGLMQMLLLKVSAHITEQLGMAPGGEFREAFKEASKVPFCKFHLGDRPIPVTFKRAIAALSFWQKVRLAWGLCFLSDPISKDDVERCKQKDLLEQMMAEMIGEFPDLHRTIVSERDVYLTYMLRQAARRLELPRASDAEPRKCVPSVVVGVVGMGHVPGIEKNWSTDLNIQEIMTVPPPSVSGRVSRLAVKAAFFGLLGYSLYWMGRRTASLVLSLPAAQYCLQRVTEARHK

SEQ ID NO: 35931 - protein, 159 aa, Homo sapiens
MADVPGAQRAVPGDGPEPRDPLDCWACAVLVTAQNLLVAAFNLLLLVLVLGTILLPAVTMLGFGFLCHSQFLRSQAPPCTAHLRDPGFTALLVTGFLLLVPLLVLALASYRRLCLRLRLADCLVPYSRALYRRRRAPQPRQIRASPGSQAVPTSGKVWV

SEQ ID NO: 35932 - protein, 159 aa, Homo sapiens
MLHVLASLPLLLLLVTSASTHAWSRPLWYQVGLDLQPWGCQPKSVEGCRGGLSCPGYWLGPGASRIYPVAAVMITTTMLMICRKILQGRRRSQATKGEHPQVTTEPCGPWKRRAPISDHTLLRGVLHMLDALLVHIEGHLRHLATQRQIQIKGTSTQSG

SEQ ID NO: 35933 - protein, 140 aa, Homo sapiens [sequence omitted]

SEQ ID NO: 35934 - protein, 124 aa, Homo sapiens
MSSWKQDRSGLRSTELNVLEYQPLCAVRSHILKTMSGSFYFVIVGHHDNPVFEMEFLPAGKAESKDDHRHLNQFIAHAALDLVDENMWLSNNMYLKTVDKFNEWFVSAFVTAGHILTFLVKVTN

SEQ ID NO: 35935 - protein, 174 aa, Homo sapiens
MSSWKQDRSGLRSTELNVLEYQPLCAVRSHILKTMSGSFYFVIVGHHDNPVFEMEFLPAGKAESKDDHRHLNQFIAHAALDLVDENMWLSNNMYLKTVDKFNEWFVSAFVTAGHMRFIMLHDIRQEDGIKNFFTDVYDLYIKFSMNPFYEPNSPIRSSAFDRKVQFLGKKHLLS

SEQ ID NO: 35936 - protein, 472 aa, Homo sapiens
MNMPQSLGNQPLPPEPPSLGTPAEGPGTTSPPEHCWPVRPTLRNELDTFSVHFYIFFGPSVALPPERPAVFAMRLLPVLDSGGVLSLELQLNASSVRQENVTVFGCLTHEVPLSLGDAAVTCSKESLAGFLLSVSATTRVARLRIPFPQTGTWFLALRSLCGVGPRFVRCRNATAEVRMRTFLSPCVDDCGPYGQCKLLRTHNYLYAACECKAGWRGWGCTDSADALTYGFQLLSTLLLCLSNLMFLPPVVLAIRSRYVLEAAVYTFTMFFSTFYHACDQPGIVVFCIMDYDVLQFCDFLGSLMSVWVTVIAMARLQPVVKQVLYLLGAMLLSMALQLDRHGLWNLLGPSLFALGILATAWTVRSVRRRHCYPPTWRRWLFYLCPGSLIAGSAVLLYAFVETRDNYFYIHSIWHMLIAGSVGFLLPPRAKTDHGVPSGARARGCGYQLCINEQEELGLVGPGGATVSSICAS

SEQ ID NO: 35937 - protein, 338 aa, Homo sapiens
MNMPQSLGNQPLPPEPPSLGTPAEGPGTTSPPEHCWPVRPTLRNELDTFSVHFYIFFGPSVALPPERPAVFAMRLLPVLDSGGVLSLELQLNASSVRQENVTVFGCLTHEVPLSLGDAAVTCSKESLAGFLLSVSATTRVARLRIPFPQTGTWFLALRSLCGVGPRFVRCRNATAEVRMRTFLSPCVDDCGPYGQCKLLRTHNYLYAACECKAGWRGWGCTDSADALTYGFQLLSTLLLCLSNLMFLPPVVLAIRSRYVLEAAVYTFTMFFSTVCGGVCILSLGACAWWWVTVCISTTFSEGLGMSVPSLCLLQTETAVLPKLSCIDNGHFCKTHWSK

SEQ ID NO: 35938 - protein, 257 aa, Homo sapiens
MWRPHFHTCPPQSSVRQENVTVFGCLTHEVPLSLGDAAVTCSKESLAGFLLSVSATTRVARLRIPFPQTGTWFLALRSLCGVGPRFVRCRNATAEVRMRTFLSPCVDDCGPYGQCKLLRTHNYLYAACECKAGWRGWGCTDSADALTYGFQLLSTLLLCLSNLMFLPPVVLAIRSRYVLEAAVYTFTMFFSTVCGGVCILSLGACAWWWVTVCISTTFSEGLGMSVPSLCLLQTETAVLPKLSCIDNGHFCKTHWSK

SEQ ID NO: 35939 - protein, 140 aa, Homo sapiens [sequence omitted]

SEQ ID NO: 35940 - protein, 1531 aa, Homo sapiens
MEVSPLQPVNENMQVNKIKKNEDAKKRLSVERIYQKKTQLEHILLRPDTYIGSVELVTQQMWVYDEDVGINYREVTFVPGLYKIFDEILVNAADNKQRDPKMSCIRVTIDPENNLISIWNNGKGIPVVEHKVEKMYVPALIFGQLLTSSNYDDDEKKVTGGRNGYGAKLCNIFSTKFTVETASREYKKMFKQTWMDNMGRAGEMELKPFNGEDYTCITFQPDLSKFKMQSLDKDIVALMVRRAYDIAGSTKDVKVFLNGNKLPVKGFRSYVDMYLKDKLDETGNSLKVIHEQVNHRWEVCLTMSEKGFQQISFVNSIATSKGGRHVDYVADQIVTKLVDVVKKKNKGGVAVKAHQVKNHMWIFVNALIENPTFDSQTKENMTLQPKSFGSTCQLSEKFIKAAIGCGIVESILNWVKFKAQVQLNKKCSAVKHNRIKGIPKLDDANDAGGRNSTECTLILTEGDSAKTLAVSGLGVVGRDKYGVFPLRGKILNVREASHKQIMENAEINNIIKIVGLQYKKNYEDEDSLKTLRYGKIMIMTDQDQDGSHIKGLLINFIHHNWPSLLRHRFLEEFITPIVKVSKNKQEMAFYSLPEFEEWKSSTPNHKKWKVKYYKGLGTSTSKEAKEYFADMKRHRIQFKYSGPEDDAAISLAFSKKQIDDRKEWLTNFMEDRRQRKLLGLPEDYLYGQTTTYLTYNDFINKELILFSNSDNERSIPSMVDGLKPGQRKVLFTCFKRNDKREVKVAQLAGSVAEMSSYHHGEMSLMMTIINLAQNFVGSNNLNLLQPIGQFGTRLHGGKDSASPRYIFTMLSSLARLLFPPKDDHTLKFLYDDNQRVEPEWYIPIIPMVLINGAEGIGTGWSCKIPNFDVREIVNNIRRLMDGEEPLPMLPSYKNFKGTIEELAPNQYVISGEVAILNSTTIEISELPVRTWTQTYKEQVLEPMLNGTEKTPPLITDYREYHTDTTVKFVVKMTEEKLAEAERVGLHKVFKLQTSLTCNSMVLFDHVGCLKKYDTVLDILRDFFELRLKYYGLRKEWLLGMLGAESAKLNNQARFILEKIDGKIIIENKPKKELIKVLIQRGYDSDPVKAWKEAQQKVPDEEENEESDNEKETEKSDSVTDSGPTFNYLLDMPLWYLTKEKKDELCRLRNEKEQELDTLKRKSPSDLWKEDLATFIEELEAVEAKEKQDEQVGLPGKGGKAKGKKTQMAEVLPSPRGQRVIPRITIEMKAEAEKKNKKKIKNENTEGSPQEDGVELEGLKQRLEKKQKREPGTKTKKQTTLAFKPIKKGKKRNPWSDSESDRSSDESNFDVPPRETEPRRAATKTKFTMDLDSDEDFSDFDEKTDDEDFVPSDASPPKTKTSPKLSNKELKPQKSVVSDLEADDVKGSVPLSSSPPATHFPDETEITNPVPKKNVTVKKTAAKSQSSTSTTGAKKRAAPKGTKRDPALNSGVSQKPDPAKTKNRRKRKPSTSDDSDSNFEKIVSKAVTSKKSKGESDDFHMDFDSAVAPRAKSVRAKKPIKYLEESDEDDLF

SEQ ID NO: 35941 - protein, 1557 aa, Homo sapiens
MEVSPLQPVNENMQVNKIKKNEDAKKRLSVERIYQKKTQLEHILLRPDTYIGSVELVTQQMWVYDEDVGINYREVTFVPGLYKIFDEILVNAADNKQRDPKMSCIRVTIDPENNLISIWNNGKGIPVVEHKVEKMYVPALIFGQLLTSSNYDDDEKKVTGGRNGYGAKLCNIFSTKFTVETASREYKKMFKQTWMDNMGRAGEMELKPFNGEDYTCITFQPDLSKFKMQSLDKDIVALMVRRAYDIAGSTKDVKVFLNGNKLPVKGFRSYVDMYLKDKLDETGNSLKVIHEQVNHRWEVCLTMSEKGFQQISFVNSIATSKGGRHVDYVADQIVTKLVDVVKKKNKGGVAVKAHQVKNHMWIFVNALIENPTFDSQTKENMTLQPKSFGSTCQLSEKFIKAHLYSRFLIDPFFPNMIPNMIFSFSKAAIGCGIVESILNWVKFKAQVQLNKKCSAVKHNRIKGIPKLDDANDAGGRNSTECTLILTEGDSAKTLAVSGLGVVGRDKYGVFPLRGKILNVREASHKQIMENAEINNIIKIVGLQYKKNYEDEDSLKTLRYGKIMIMTDQDQDGSHIKGLLINFIHHNWPSLLRHRFLEEFITPIVKVSKNKQEMAFYSLPEFEEWKSSTPNHKKWKVKYYKGLGTSTSKEAKEYFADMKRHRIQFKYSGPEDDAAISLAFSKKQIDDRKEWLTNFMEDRRQRKLLGLPEDYLYGQTTTYLTYNDFINKELILFSNSDNERSIPSMVDGLKPGQRKVLFTCFKRNDKREVKVAQLAGSVAEMSSYHHGEMSLMMTIINLAQNFVGSNNLNLLQPIGQFGTRLHGGKDSASPRYIFTMLSSLARLLFPPKDDHTLKFLYDDNQRVEPEWYIPIIPMVLINGAEGIGTGWSCKIPNFDVREIVNNIRRLMDGEEPLPMLPSYKNFKGTIEELAPNQYVISGEVAILNSTTIEISELPVRTWTQTYKEQVLEPMLNGTEKTPPLITDYREYHTDTTVKFVVKMTEEKLAEAERVGLHKVFKLQTSLTCNSMVLFDHVGCLKKYDTVLDILRDFFELRLKYYGLRKEWLLGMLGAESAKLNNQARFILEKIDGKIIIENKPKKELIKVLIQRGYDSDPVKAWKEAQQKVPDEEENEESDNEKETEKSDSVTDSGPTFNYLLDMPLWYLTKEKKDELCRLRNEKEQELDTLKRKSPSDLWKEDLATFIEELEAVEAKEKQDEQVGLPGKGGKAKGKKTQMAEVLPSPRGQRVIPRITIEMKAEAEKKNKKKIKNENTEGSPQEDGVELEGLKQRLEKKQKREPGTKTKKQTTLAFKPIKKGKKRNPWSDSESDRSSDESNFDVPPRETEPRRAATKTKFTMDLDSDEDFSDFDEKTDDEDFVPSDASPPKTKTSPKLSNKELKPQKSVVSDLEADDVKGSVPLSSSPPATHFPDETEITNPVPKKNVTVKKTAAKSQSSTSTTGAKKRAAPKGTKRDPALNSGVSQKPDPAKTKNRRKRKPSTSDDSDSNFEKIVSKAVTSKKSKGESDDFHMDFDSAVAPRAKSVRAKKPIKYLEESDEDDLF

SEQ ID NO: 35942 - protein, 1567 aa, Homo sapiens
MEVSPLQPVNENMQVNKIKKNEDAKKRLSVERIYQKKTQLEHILLRPDTYIGSVELVTQQMWVYDEDVGINYREVTFVPGLYKIFDEILVNAADNKQRDPKMSCIRVTIDPENNLISIWNNGKGIPVVEHKVEKMYVPALIFGQLLTSSNYDDDEKKVTGGRNGYGAKLCNIFSTKFTVETASREYKKMFKQTWMDNMGRAGEMELKPFNGEDYTCITFQPDLSKFKMQSLDKDIVALMVRRAYDIAGSTKDVKVFLNGNKLPVKGFRSYVDMYLKDKLDETGNSLKVIHEQVNHRWEVCLTMSEKGFQQISFVNSIATSKSSKYWSSRKSKQHILLNFFVLFKFINDAFFGICPFKGGRHVDYVADQIVTKLVDVVKKKNKGGVAVKAHQVKNHMWIFVNALIENPTFDSQTKENMTLQPKSFGSTCQLSEKFIKAAIGCGIVESILNWVKFKAQVQLNKKCSAVKHNRIKGIPKLDDANDAGGRNSTECTLILTEGDSAKTLAVSGLGVVGRDKYGVFPLRGKILNVREASHKQIMENAEINNIIKIVGLQYKKNYEDEDSLKTLRYGKIMIMTDQDQDGSHIKGLLINFIHHNWPSLLRHRFLEEFITPIVKVSKNKQEMAFYSLPEFEEWKSSTPNHKKWKVKYYKGLGTSTSKEAKEYFADMKRHRIQFKYSGPEDDAAISLAFSKKQIDDRKEWLTNFMEDRRQRKLLGLPEDYLYGQTTTYLTYNDFINKELILFSNSDNERSIPSMVDGLKPGQRKVLFTCFKRNDKREVKVAQLAGSVAEMSSYHHGEMSLMMTIINLAQNFVGSNNLNLLQPIGQFGTRLHGGKDSASPRYIFTMLSSLARLLFPPKDDHTLKFLYDDNQRVEPEWYIPIIPMVLINGAEGIGTGWSCKIPNFDVREIVNNIRRLMDGEEPLPMLPSYKNFKGTIEELAPNQYVISGEVAILNSTTIEISELPVRTWTQTYKEQVLEPMLNGTEKTPPLITDYREYHTDTTVKFVVKMTEEKLAEAERVGLHKVFKLQTSLTCNSMVLFDHVGCLKKYDTVLDILRDFFELRLKYYGLRKEWLLGMLGAESAKLNNQARFILEKIDGKIIIENKPKKELIKVLIQRGYDSDPVKAWKEAQQKVPDEEENEESDNEKETEKSDSVTDSGPTFNYLLDMPLWYLTKEKKDELCRLRNEKEQELDTLKRKSPSDLWKEDLATFIEELEAVEAKEKQDEQVGLPGKGGKAKGKKTQMAEVLPSPRGQRVIPRITIEMKAEAEKKNKKKIKNENTEGSPQEDGVELEGLKQRLEKKQKREPGTKTKKQTTLAFKPIKKGKKRNPWSDSESDRSSDESNFDVPPRETEPRRAATKTKFTMDLDSDEDFSDFDEKTDDEDFVPSDASPPKTKTSPKLSNKELKPQKSVVSDLEADDVKGSVPLSSSPPATHFPDETEITNPVPKKNVTVKKTAAKSQSSTSTTGAKKRAAPKGTKRDPALNSGVSQKPDPAKTKNRRKRKPSTSDDSDSNFEKIVSKAVTSKKSKGESDDFHMDFDSAVAPRAKSVRAKKPIKYLEESDEDDLF

SEQ ID NO: 35943 - protein, 1612 aa, Homo sapiens
MEVSPLQPVNENMQVNKIKKNEDAKKRLSVERIYQKKTQLEHILLRPDTYIGSVELVTQQMWVYDEDVGINYREVTFVPGLYKIFDEILVNAADNKQRDPKMSCIRVTIDPENNLISIWNNGKGIPVVEHKVEKMYVPALIFGQLLTSSNYDDDEKKVTGGRNGYGAKLCNIFSTKFTVETASREYKKMFKQTWMDNMGRAGEMELKPFNGEDYTCITFQPDLSKFKMQSLDKDIVALMVRRAYDIAGSTKDVKVFLNGNKLPVKGFRSYVDMYLKDKLDETGNSLKVIHEQVNHRWEVCLTMSEKGFQQISFVNSIATSKGGRHVDYVADQIVTKLVDVVKKKNKGGVAVKAHQRELCNGAILAHCNLRLMGSSDSPASASRVAGIAGGCHHTQLIFVFLVETGFHHVGQAGLERLTSGDPPASASQSSGITDVKVKNHMWIFVNALIENPTFDSQTKENMTLQPKSFGSTCQLSEKFIKAAIGCGIVESILNWVKFKAQVQLNKKCSAVKHNRIKGIPKLDDANDAGGRNSTECTLILTEGDSAKTLAVSGLGVVGRDKYGVFPLRGKILNVREASHKQIMENAEINNIIKIVGLQYKKNYEDEDSLKTLRYGKIMIMTDQDQDGSHIKGLLINFIHHNWPSLLRHRFLEEFITPIVKVSKNKQEMAFYSLPEFEEWKSSTPNHKKWKVKYYKGLGTSTSKEAKEYFADMKRHRIQFKYSGPEDDAAISLAFSKKQIDDRKEWLTNFMEDRRQRKLLGLPEDYLYGQTTTYLTYNDFINKELILFSNSDNERSIPSMVDGLKPGQRKVLFTCFKRNDKREVKVAQLAGSVAEMSSYHHGEMSLMMTIINLAQNFVGSNNLNLLQPIGQFGTRLHGGKDSASPRYIFTMLSSLARLLFPPKDDHTLKFLYDDNQRVEPEWYIPIIPMVLINGAEGIGTGWSCKIPNFDVREIVNNIRRLMDGEEPLPMLPSYKNFKGTIEELAPNQYVISGEVAILNSTTIEISELPVRTWTQTYKEQVLEPMLNGTEKTPPLITDYREYHTDTTVKFVVKMTEEKLAEAERVGLHKVFKLQTSLTCNSMVLFDHVGCLKKYDTVLDILRDFFELRLKYYGLRKEWLLGMLGAESAKLNNQARFILEKIDGKIIIENKPKKELIKVLIQRGYDSDPVKAWKEAQQKVPDEEENEESDNEKETEKSDSVTDSGPTFNYLLDMPLWYLTKEKKDELCRLRNEKEQELDTLKRKSPSDLWKEDLATFIEELEAVEAKEKQDEQVGLPGKGGKAKGKKTQMAEVLPSPRGQRVIPRITIEMKAEAEKKNKKKIKNENTEGSPQEDGVELEGLKQRLEKKQKREPGTKTKKQTTLAFKPIKKGKKRNPWSDSESDRSSDESNFDVPPRETEPRRAATKTKFTMDLDSDEDFSDFDEKTDDEDFVPSDASPPKTKTSPKLSNKELKPQKSVVSDLEADDVKGSVPLSSSPPATHFPDETEITNPVPKKNVTVKKTAAKSQSSTSTTGAKKRAAPKGTKRDPALNSGVSQKPDPAKTKNRRKRKPSTSDDSDSNFEKIVSKAVTSKKSKGESDDFHMDFDSAVAPRAKSVRAKKPIKYLEESDEDDLF

SEQ ID NO: 35944 - protein, 172 aa, Homo sapiens
MDSPSLRELQQPLLEGTECETPAQKPGRHELGSPLREIAFAESLRGLQFLSPPLPSVSAGLGEPRPPDVEDMSSSDSDSDWDGGSRLSPFLPHDHLGLAVFSMLCCFWPVGIAAFCLAQKTNKAWAKGDIQGAGAASRRAFLLGVLAVGLGVCTYAAALVTLAAYLASRDPP

SEQ ID NO: 35945 - protein, 139 aa, Homo sapiens
MDSPSLRELQQPLLEGTECETPAQKPGRHELGSPLREIAFAESLRGLQFLSPPLPSVSAGLGEPRPPDVEDMSSSDSDSDWDGGSRLSPFLPHDHLGLAVFSMLCCFWPVGIAAFCLAQKHPQCLTYSRCYVSAFGIHA

SEQ ID NO: 35946 - protein, 127 aa, Homo sapiens
MDSPSLRELQQPLLEGTECETPAQKPGRHELGSPLREIAFAESLRGLQFLSPPLPSVSAGLGEPRPPDVEDMSSSDSDSDWDGGSRLSPFLPHDHLGLAVFSMLCCFWPVGIAAFCLAQKLPLQPSL

SEQ ID NO: 35947 - protein, 123 aa, Homo sapiens
MDSPSLRELQQPLLEGTECETPAQKPGRHELGSPLREIAFAESLRGLQFLSPPLPSVSAGLGEPRPPDVEDMSSSDSDSDWDGGSRLSPFLPHDHLGLAVFSMLCCFWPVGIAAFCLAQKPSL

SEQ ID NO: 35948 - protein, 133 aa, Homo sapiens
MDSPSLRELQQPLLEGTECETPAQKPGRHELGSPLREIAFAESLRGLQFLSPPLPSVSAGLGEPRPPDVEDMSSSDSDSDWDGGSRLSPFLPHDHLGLAVFSMLCCFWPVGIAAFCLAQKTRPSCPYSPHCEP

SEQ ID NO: 35949 - protein, 140 aa, Homo sapiens
MAVCIAVIAKENYPLYIRSTPTENELKFHYMVHTSLDVVDEKISAMGKALVDQRELYLGLLYPTEDYKVYGYVTNSKVKFVMVVDSSNTALRDNEIRSMFRKLHNSYTDVMCNPFYNPGDRIQSSRAFDNMVTSMMIQVC

SEQ ID NO: 35950 - protein, 139 aa, Homo sapiens
MAVCIAVIAKENYPLYIRSTPTENELKFHYMVHTSLDVVDEKISAMGKALVDQRELYLGLLYPTEDYKVYGYVTNSKVKFVMVVDSSNTALRDNEIRSMFRKLHNSYTDVMCNPFYNPGDRIQSRAFDNMVTSMMIQVC

SEQ ID NO: 35951 - protein, 159 aa, Homo sapiens
MSQAWVPGLAPTLLFSLLAGPQKIAAKCGLILACPKGFKCCGDSCCQENELFPGPVRIFVIIFLVILSVFCICGLAKCFCRNCREPEPDSPVDCRGPLELPSIIPPERVRVSLSAPPPPYSEVILKPSLGPTPTEPPPPYSFRPEEYTGDQRGIDNPAF

SEQ ID NO: 35952 - protein, 140 aa, Homo sapiens
IQNPDPAVYQLRDSKSSDKSVCLFTDFDSQTNVSQSKDSDVYITDKTVLDMRSMDFKSNSAVAWSNKSDFACANAFNNSIIPEDTFFPSPESSCDVKLVEKSFETDTNLNFQNLSVIGFRILLLKVAGFNLLMTLRLWSS

SEQ ID NO: 35953 - protein, 1356 aa, Homo sapiens
MDLKEKHLGEPPSALGLSTRKALSVLKEQLEAVLEGHLRERKKCLTWKEVWRSSFLHHSNRCSCFHWPGASLMLLAVLLLLGCCGGQPAGSRGVGLVNASALFLLLLLNLVLIGRQDRLKRREVERRLRGIIDQIQDALRDGREIQWPSAMYPDLHMPFAPSWSLHWAYRDGHLVNLPVSLLVEGDIIALRPGQESFASLRGIKDDEHIVLEPGDLFPPFSPPPSPRGEVERGPQSPQQHRLFRVLETPVIDNIRWCLDMALSRPVTALDNERFTVQSVMLHYAVPVVLAGFLITNALRFIFSAPGVTSWQYTLLQLQVNGVLPILPLLFPVLWVLATACGEARVLAQMSKASPSSLLAKFSEDTLSSYTEAVSSQEMLRCIWGHFLRVLGGTSPTLSHSSSLLHSLGSVTVLCCVDKQGILSWPNPSPETVLFFSGKVEPPHSSHEDLTDGLSTRSFCHPEPHERDALLAGSLNNTLHLSNEQERGDWPGEAPKPPEPYSHHKAHGRSKHPSGSNVSFSRDTEGGEEEPSKTQPGMESDPYEAEDFVCDYHLEMLSLSQDQQNPSCIQFDDSNWQLHLTSLKPLGLNVLLNLCDASVTERLCRFSDHLCNIALQESHSAVLPVHVPWGLCELARLIGFTPGAKELFKQENHLALYRLPSAETMKETSLGRLSCVTKRRPPLSHMISLFIKDTTTSTEQMLSHGTADVVLEACTDFWDGADIYPLSGSDRKKVLDFYQRACLSGYCSAFAYKPMNCALSSQLNGKCIELVQVPGQSSIFTMCELPSTIPIKQNARRSSWSSDEGIGEVLEKEDCMQALSGQIFMGMVSSQYQARLDIVRLIDGLVNACIRFVYFSLEDELKSKVFAEKMGLETGWNCHISLTPNGDMPGSEIPPSSPSHAGSLHDDLNQVSRDDAEGLLLMEEEGHSDLISFQPTDSDIPSFLEDSNRAKLPRGIHQVRPHLQNIDNVPLLVPLFTDCTPETMCEMIKIMQEYGEVTCCLGSSANLRNSCLFLQSDISIALDPLYPSRCSWETFGYATSISMAQASDGLSPLQLSGQLNSLPCSLTFRQEETISIIRLIEQARHATYGIRKCFLFLLQCQLTLVVIQFLSCLVQLPPLLSTTDILWLSCFCYPLLSISLLGKPPHSSIMSMATGKNLQSIPKKTQHYFLLCFLLKFSLTISSCLICFGFTLQSFCDSSRDRNLTNCSSVMLPSNDDRAPAWFEDFANGLLSAQKLTAALIVLHTVFISITHVHRTKPLWRKSPLTNLWWAVTVPVVLLGQVVQTAVDLQLWTHRDSHVHFGLEDVPLLTWLLGCLSLVLVVVTNEIVKLHEIRVRVRYQKRQKLQFETKLGMNSPF

SEQ ID NO: 35954 - protein, 1386 aa, Homo sapiens
MDLKEKHLGEPPSALGLSTRKALSVLKEQLEAVLEGHLRERKKCLTWKEVWRSSFLHHSNRCSCFHWPGASLMLLAVLLLLGCCGGQPAGSRGVGLVNASALFLLLLLNLVLIGRQDRLKRREVERRLRGIIDQIQDALRDGREIQWPSAMYPDLHMPFAPSWSLHWAYRDGHLVNLPVSLLVEGDIIALRPGQESFASLRGIKDDEHIVLEPGDLFPPFSPPPSPRGEVERGPQSPQQHRLFRVLETPVIDNIRWCLDMALSRPVTALDNERFTVQSVMLHYAVPVVLAGFLITNALRFIFSAPGVTSWQYTLLQLQVNGVLPILPLLFPVLWVLATACGEARVLAQMSKASPSSLLAKFSEDTLSSYTEAVSSQEMLRCIWGHFLRVLGGTSPTLSHSSSLLHSLGSVTVLCCVDKQGILSWPNPSPETVLFFSGKVEPPHSSHEDLTDGLSTRSFCHPEPHERDALLAGSLNNTLHLSNEQERGDWPGEAPKPPEPYSHHKAHGRSKHPSGSNVSFSRDTEGGEEEPSKTQPGMESDPYEAEDFVCDYHLEMLSLSQDQQNPSCIQFDDSNWQLHLTSLKPLGLNVLLNLCDASVTERLCRFSDHLCNIALQESHSAVLPVHVPWGLCELARLIGFTPGAKELFKQENHLALYRLPSAETMKETSLGRLSCVTKRRPPLSHMISLFIKDTTTSTEQMLSHGTADVVLEACTDFWDGADIYPLSGSDRKKVLDFYQRACLSGYCSAFAYKPMNCALSSQLNGKCIELVQVPGQSSIFTMCELPSTIPIKQNARRSSWSSDEGIGEVLEKEDCMQALSGQIFMGMVSSQYQARLDIVRLIDGLVNACIRFVYFSLEDELKSKVFAEKMGLETGWNCHISLTPNGDMPGSEIPPSSPSHAGSLHDDLNQVSRDDAEGLLLMEEEGHSDLISFQPTDSDIPSFLEDSNRAKLPRGIHQVRPHLQNIDNVPLLVPLFTDCTPETMCEMIKIMQEYGEVTCCLGSSANLRNSCLFLQSDISIALDPLYPSRCSWETFGYATSISMAQASDGLSPLQLSGQLNSLPCSLTFRQEETISIIRLIEQARHATYGIRKCFLFLLQCQLTLVVIQFLSCLVQLPPLLSTTDILWLSCFCYPLLSISLLGKPPHSSIMSMATGKNLQSIPKKTQHYFLLCFLLKFSLTISSCLICFGFTLQSFCDSSRDRNLTNCSSVMLPSNDDRAPAWFEDFANGLLSAQKLTAALIVLHTGERAPWEGVDDGGKGAPLWKSDPHIAPPSPVFISITHVHRTKPLWRKSPLTNLWWAVTVPVVLLGQVVQTAVDLQLWTHRDSHVHFGLEDVPLLTWLLGCLSLVLVVVTNEIVKLHEIRVRVRYQKRQKLQFETKLGMNSPF

SEQ ID NO: 35955 - protein, 1366 aa, Homo sapiens
MLFKQAELWMPHQGKGNKGEPPSALGLSTRKALSVLKEQLEAVLEGHLRERKKCLTWKEVWRSSFLHHSNRCSCFHWPGASLMLLAVLLLLGCCGGQPAGSRGVGLVNASALFLLLLLNLVLIGRQDRLKRREVERRLRGIIDQIQDALRDGREIQWPSAMYPDLHMPFAPSWSLHWAYRDGHLVNLPVSLLVEGDIIALRPGQESFASLRGIKDDEHIVLEPGDLFPPFSPPPSPRGEVERGPQSPQQHRLFRVLETPVIDNIRWCLDMALSRPVTALDNERFTVQSVMLHYAVPVVLAGFLITNALRFIFSAPGVTSWQYTLLQLQVNGVLPILPLLFPVLWVLATACGEARVLAQMSKASPSSLLAKFSEDTLSSYTEAVSSQEMLRCIWGHFLRVLGGTSPTLSHSSSLLHSLGSVTVLCCVDKQGILSWPNPSPETVLFFSGKVEPPHSSHEDLTDGLSTRSFCHPEPHERDALLAGSLNNTLHLSNEQERGDWPGEAPKPPEPYSHHKAHGRSKHPSGSNVSFSRDTEGGEEEPSKTQPGMESDPYEAEDFVCDYHLEMLSLSQDQQNPSCIQFDDSNWQLHLTSLKPLGLNVLLNLCDASVTERLCRFSDHLCNIALQESHSAVLPVHVPWGLCELARLIGFTPGAKELFKQENHLALYRLPSAETMKETSLGRLSCVTKRRPPLSHMISLFIKDTTTSTEQMLSHGTADVVLEACTDFWDGADIYPLSGSDRKKVLDFYQRACLSGYCSAFAYKPMNCALSSQLNGKCIELVQVPGQSSIFTMCELPSTIPIKQNARRSSWSSDEGIGEVLEKEDCMQALSGQIFMGMVSSQYQARLDIVRLIDGLVNACIRFVYFSLEDELKSKVFAEKMGLETGWNCHISLTPNGDMPGSEIPPSSPSHAGSLHDDLNQVSRDDAEGLLLMEEEGHSDLISFQPTDSDIPSFLEDSNRAKLPRGIHQVRPHLQNIDNVPLLVPLFTDCTPETMCEMIKIMQEYGEVTCCLGSSANLRNSCLFLQSDISIALDPLYPSRCSWETFGYATSISMAQASDGLSPLQLSGQLNSLPCSLTFRQEETISIIRLIEQARHATYGIRKCFLFLLQCQLTLVVIQFLSCLVQLPPLLSTTDILWLSCFCYPLLSISLLGKPPHSSIMSMATGKNLQSIPKKTQHYFLLCFLLKFSLTISSCLICFGFTLQSFCDSSRDRNLTNCSSVMLPSNDDRAPAWFEDFANGLLSAQKLTAALIVLHTVFISITHVHRTKPLWRKSPLTNLWWAVTVPVVLLGQVVQTAVDLQLWTHRDSHVHFGLEDVPLLTWLLGCLSLVLVVVTNEIVKLHEIRVRVRYQKRQKLQFETKLGMNSPF

SEQ ID NO: 35956 - protein, 176 aa, Homo sapiens
MWRLALGGVFLAAAQACVFCRLPAHDLSGRLARLCSQMEARQKECGASPDFSAFALDEVSMNKVTEKTHRVLRVMEIKEAVSSLPSYWSWLRKTKLPEYTREALCPPACRGSTTLYNCSTCKGTEVSCWPRKRCFPGSQDLWEAKILLLSIFGAFLLLGVLSLLVESHHLQAKSGL

SEQ ID NO: 35957 - protein, 184 aa, Homo sapiens
MWRLALGGVFLAAAQACVFCRLPAHDLSGRLARLCSQMEARQKECGASPDFSAFALDEVSMNKVTEKTHRVLRVMEIKEAVSSLPSYWSWLRKTKLPEYTREALCPPACPLPLLSPAGGSTTLYNCSTCKGTEVSCWPRKRCFPGSQDLWEAKILLLSIFGAFLLLGVLSLLVESHHLQAKSGL

SEQ ID NO: 35958 - protein, 203 aa, Homo sapiens
MWRLALGGVFLAAAQACVFCRLPAHDLSGRLARLCSQMEARQKECGASPDFSAFALDEVSMNKVTEKTHRVLRVMEIKEAVSSLPSYWSWLRKTKLPEYTREALCPPACRGSTTLYNCSTCKGTEVSCWPRKRCFPGSLGSQDSAPLHLRSFPASGCSEPPGGVPPPPSKKWLVKTLKTSQPPALRGMHSQLPHPLEGNQSAP

SEQ ID NO: 35959 - protein, 752 aa, Homo sapiens
MAEPQAESEPLLGGARGGGGDWPAGLTTYRSIQVGPGAAARWDLCIDQAVVFIEDAIQYRSINHRVDASSMWLYRRYYSNVCQRTLSFTIFLILFLAFIETPSSLTSTADVRYRAAPWEPPCGLTESVEVLCLLVFAADLSVKGYLFGWAHFQKNLWLLGYLVVLVVSLVDWTVSLSLVCHEPLRIRRLLRPFFLLQNSSMMKKTLKCIRWSLPEMASVGLLLAIHLCLFTMFGMLLFAGGKQDDGQDRERLTYFQNLPESLTSLLVLLTTANNPDVMIPAYSKNRAYAIFFIVFTVIGSLFLMNLLTAIIYSQFRGYLMKSLQTSLFRRRLGTRAAFEVLSSMVGEGGAFPQAVGVKPQNLLQVLQKVQLDSSHKQAMMEKVRSYGSVLLSAEEFQKLFNELDRSVVKEHPPRPEYQSPFLQSAQFLFGHYYFDYLGNLIALANLVSICVFLVLDADVLPAERDDFILGILNCVFIVYYLLEMLLKVFALGLRGYLSYPSNVFDGLLTVVLLVLEISTLAVYRLPHPGWRPEMVGLLSLWDMTRMLNMLIVFRFLRIIPSMKLMAVVASTVLGLVQNMRAFGGILVVVYYVFAIIGINLFRGVIVALPGNSSLAPANGSAPCGSFEQLEYWANNFDDFAAALVTLWNLMVVNNWQVFLDAYRRYSGPWSKIYFVLWWLVSSVIWVNLFLALILENFLHKWDPRSHLQPLAGTPEATYQMTVELLFRDILEEPGEDELTERLSQHPHLWLCR

SEQ ID NO: 35960 - protein, 582 aa, Homo sapiens
MAEFLDDQETRLCDNCKKEIPVFNFTIHEIHCQRNIGMCPTCKEPFPKSDMETHMAAEHCQVTCKCNKKLEKRLLKKHEETECPLRLAVCQHCDLELSILKLKEHEDYCGARTELCGNCGRNVLVKDLKTHPEVCGREGEEKRNEVAIPPNAYDESWGQDGIWIASQLLRQIEALDPPMRLPRRPLRAFESDVFHNRTTNQRNITAQVSIQNNLFEEQERQERNRGQQPPKEGGEESANLDFMLALSLQNEGQASSVAEQDFWRAVCEADQSHGGPRSLSDIKGAADEIMLPCEFCEELYPEELLIDHQTSCNPSRALPSLNTGSSSPRGVEEPDVIFQNFLQQAASNQLDSLMGLSNSHPVEESIIIPCEFCGVQLEEEVLFHHQDQCDQRPATATNHVTEGIPRLDSQPQETSPELPRRRVRHQGDLSSGYLDDTKQETANGPTSCLPPSRPINNMTATYNQLSRSTSGPRPGCQPSSPCVPKLSNSDSQDIQGRNRDSQNGAIAPGHVSVIRPPQNLYPENIVPSFSPGPSGRYGASGRSEGGRNSRVTPAAANYRSRTAKAKPSKQQGAGDAEEEEEE

SEQ ID NO: 35961 - protein, 164 aa, Homo sapiens
MAEFLDDQETRLCDNCKKEIPVFNFTIHEIHCQRNIGMCPTCKEPFPKSDMETHMAAEHCQVTCKCNKKLEKRLLKKHEETECPLRLAVCQHCDLELSILKLKEHEDYCGARTELCGNCGRNVLVKDLKTHPELKNKRGRKGIEANSPPKRVVKRVQTWTSCWP

SEQ ID NO: 35962 - protein, 226 aa, Homo sapiens
METVVIVAIGVLATIFLASFAALVLVCRQRYCRPRDLLQRYDSKPIVDLIGAMETQSEPSELELDDVVITNPHIEAILENEDWIEDASGLMSHCIAILKICHTLTEKLVAMTMGSGAKMKTSASVSDIIVVAKRISPRVDDVVKSMYPPLDPKLLDARTTALLLSVSHLVLVTRNACHLTGGLDWIDQSLSAAEEHLEVLREAALASEPDKGLPGPEGFLQEQSAI

SEQ ID NO: 35963 - protein, 1626 aa, Homo sapiens
MAKSGGCGAGAGVGGGNGALTWVTLFDQNNAAKKEESETANKNDSSKKLSVERVYQKKTQLEHILLRPDTYIGSVEPLTQFMWVYDEDVGMNCREVTFVPGLYKIFDEILVNAADNKQRDKNMTCIKVSIDPESNIISIWNNGKGIPVVEHKVEKVYVPALIFGQLLTSSNYDDDEKKVTGGRNGYGAKLCNIFSTKFTVETACKEYKHSFKQTWMNNMMKTSEAKIKHFDGEDYTCITFQPDLSKFKMEKLDKDIVALMTRRAYDLAGSCRGVKVMFNGKKLPVNGFRSYVDLYVKDKLDETGVALKVIHELANERWDVCLTLSEKGFQQISFVNSIATTKGGRHVDYVVDQVVGKLIEVVKKKNKAGVSVKPFQVKNHIWVFINCLIENPTFDSQTKENMTLQPKSFGSKCQLSEKFFKAASNCGIVESILNWVKFKAQTQLNKKCSSVKYSKIKGIPKLDDANDAGGKHSLECTLILTEGDSAKSLAVSGLGVIGRDRYGVFPLRGKILNVREASHKQIMENAEINNIIKIVGLQYKKSYDDAESLKTLRYGKIMIMTDQDQDGSHIKGLLINFIHHNWPSLLKHGFLEEFITPIVKASKNKQELSFYSIPEFDEWKKHIENQKAWKIKYYKGLGTSTAKEAKEYFADMERHRILFRYAGPEDDAAITLAFSKKKIDDRKEWLTNFMEDRRQRRLHGLPEQFLYGTATKHLTYNDFINKELILFSNSDNERSIPSLVDGFKPGQRKVLFTCFKRNDKREVKVAQLAGSVAEMSAYHHGEQALMMTIVNLAQNFVGSNNINLLQPIGQFGTRLHGGKDAASPRYIFTMLSTLARLLFPAVDDNLLKFLYDDNQRVEPEWYIPIIPMVLINGAEGIGTGWACKLPNYDAREIVNNVRRMLDGLDPHPMLPNYKNFKGTIQELGQNQYAVSGEIFVVDRNTVEITELPVRTWTQVYKEQVLEPMLNGTDKTPALISDYKEYHTDTTVKFVVKMTEEKLAQAEAAGLHKVFKLQTTLTCNSMVLFDHMGCLKKYETVQDILKEFFDLRLSYYGLRKEWLVGMLGAESTKLNNQARFILEKIQGKITIENRSKKDLIQMLVQRGYESDPVKAWKEAQEKAAEEDETQNQHDDSSSDSGTPSGPDFNYILNMSLWSLTKEKVEELIKQRDAKGREVNDLKRKSPSDLWKEDLAAFVEELDKVESQEREDVLAGMSGKAIKGKVGKPKVKKLQLEETMPSPYGRRIIPEITAMKADASKKLLKKKKGDLDTAAVKVEFDEEFSGAPVEGAGEEALTPSVPINKGPKPKREKKEPGTRVRKTPTSSGKPSAKKVKKRNPWSDDESKSESDLEETEPVVIPRDSLLRRAAAERPKYTFDFSEEEDDDADDDDDDNNDLEELKVKASPITNDGEDEFVPSDGLDKDEYTFSPGKSKATPEKSLHDKKSQDFGNLFSFPSYSQKSEDDSAKFDSNEEDSASVFSPSFGLKQTDKVPSKTVAAKKGKPSSDTVPKPKRAPKQKKVVEAVNSDSDSEFGIPKKTTTPKGKGRGAKKRKASGSENEGDYNPGRKTSKTTSKKPKKTSFDQDSDVDIFPSDFPTEPPSLPRTGRARKEVKYFAESDEEEDDVDFAMFN

SEQ ID NO: 35964 - protein, 1621 aa, Homo sapiens
MAKSGGCGAGAGVGGGNGALTWVNNAAKKEESETANKNDSSKKLSVERVYQKKTQLEHILLRPDTYIGSVEPLTQFMWVYDEDVGMNCREVTFVPGLYKIFDEILVNAADNKQRDKNMTCIKVSIDPESNIISIWNNGKGIPVVEHKVEKVYVPALIFGQLLTSSNYDDDEKKVTGGRNGYGAKLCNIFSTKFTVETACKEYKHSFKQTWMNNMMKTSEAKIKHFDGEDYTCITFQPDLSKFKMEKLDKDIVALMTRRAYDLAGSCRGVKVMFNGKKLPVNGFRSYVDLYVKDKLDETGVALKVIHELANERWDVCLTLSEKGFQQISFVNSIATTKGGRHVDYVVDQVVGKLIEVVKKKNKAGVSVKPFQVKNHIWVFINCLIENPTFDSQTKENMTLQPKSFGSKCQLSEKFFKAASNCGIVESILNWVKFKAQTQLNKKCSSVKYSKIKGIPKLDDANDAGGKHSLECTLILTEGDSAKSLAVSGLGVIGRDRYGVFPLRGKILNVREASHKQIMENAEINNIIKIVGLQYKKSYDDAESLKTLRYGKIMIMTDQDQDGSHIKGLLINFIHHNWPSLLKHGFLEEFITPIVKASKNKQELSFYSIPEFDEWKKHIENQKAWKIKYYKGLGTSTAKEAKEYFADMERHRILFRYAGPEDDAAITLAFSKKKIDDRKEWLTNFMEDRRQRRLHGLPEQFLYGTATKHLTYNDFINKELILFSNSDNERSIPSLVDGFKPGQRKVLFTCFKRNDKREVKVAQLAGSVAEMSAYHHGEQALMMTIVNLAQNFVGSNNINLLQPIGQFGTRLHGGKDAASPRYIFTMLSTLARLLFPAVDDNLLKFLYDDNQRVEPEWYIPIIPMVLINGAEGIGTGWACKLPNYDAREIVNNVRRMLDGLDPHPMLPNYKNFKGTIQELGQNQYAVSGEIFVVDRNTVEITELPVRTWTQVYKEQVLEPMLNGTDKTPALISDYKEYHTDTTVKFVVKMTEEKLAQAEAAGLHKVFKLQTTLTCNSMVLFDHMGCLKKYETVQDILKEFFDLRLSYYGLRKEWLVGMLGAESTKLNNQARFILEKIQGKITIENRSKKDLIQMLVQRGYESDPVKAWKEAQEKAAEEDETQNQHDDSSSDSGTPSGPDFNYILNMSLWSLTKEKVEELIKQRDAKGREVNDLKRKSPSDLWKEDLAAFVEELDKVESQEREDVLAGMSGKAIKGKVGKPKVKKLQLEETMPSPYGRRIIPEITAMKADASKKLLKKKKGDLDTAAVKVEFDEEFSGAPVEGAGEEALTPSVPINKGPKPKREKKEPGTRVRKTPTSSGKPSAKKVKKRNPWSDDESKSESDLEETEPVVIPRDSLLRRAAAERPKYTFDFSEEEDDDADDDDDDNNDLEELKVKASPITNDGEDEFVPSDGLDKDEYTFSPGKSKATPEKSLHDKKSQDFGNLFSFPSYSQKSEDDSAKFDSNEEDSASVFSPSFGLKQTDKVPSKTVAAKKGKPSSDTVPKPKRAPKQKKVVEAVNSDSDSEFGIPKKTTTPKGKGRGAKKRKASGSENEGDYNPGRKTSKTTSKKPKKTSFDQDSDVDIFPSDFPTEPPSLPRTGRARKEVKYFAESDEEEDDVDFAMFN

SEQ ID NO: 35965 - protein, 181 aa, Homo sapiens
MSRPAHRRPEYHKINKDLFVLTYGALVAQLCKDYEKDEDVNQYLDKMGYGIGTRLVEDFLARSCVGRCHSYSEIIDIIAQVAFKMYLGITPSVTCNNSSKNEFSLILEKNPLVEFVEELPAGRSSLCYCNLLCGIIRGALEMVHLAADVTFLQDRLKGDSVTEIGITFLKKRDEKKYRGKK

SEQ ID NO: 35966 - protein, 97 aa, Homo sapiens
MYLGITPSVTCNNSSKNEFSLILEKNPLVEFVEELPAGRSSLCYCNLLCGIIRGALEMVHLAADVTFLQDRLKGDSVTEIGITFLKKRDEKKYRGKK

SEQ ID NO: 35967 - protein, 258 aa, Homo sapiens
MVGILPLCCSGCVPSLCCSSYVPSVAPTAAHSVRVPHSAGHCGQRVLACSLPQVFLKPWIFVEHFSSWLSLELFSFLRYLGTLLCACGHRLREGLLLPCLLGVGSWLLFNNWTGGSWFSLHLQQVSLSQGSHVAAFLPEAIGPGVPVPVSGESTSAQQSHAGWQLSAEADACPSVLYSEVLEWNKNINTYTSFHDFCLILGIFLFCFVLAVIGLPYIKPGLSLSVALLWQSLILLSSLVQQDSQVHTWGCLFSTFTST

SEQ ID NO: 35968 - protein, 189 aa, Homo sapiens
MVGILPLCCSGCVPSLCCSSYVPSVAPTAAHSVRVPHSAGHCGQRVLACSLPQVFLKPWIFVEHFSSWLSLELFSFLRYLGTLLCACGHRLREGLLLPCLLGVGSWLLFNNWTGGSWFSLHLQQVSLSQGSHVAAFLPEAIGPGVPVPVSGESTSAQQSHAGWQLSAEADACPSVLYSEVLEWNKNINT

SEQ ID NO: 35969 - protein, 159 aa, Homo sapiens
MADTVLFEFLHTEMVAELWAHDPDPGPGGQKMSLSVLEGMGFRVGQALGERLPRETLAFREELDVLKFLCKDLWVAVFQKQMDSLRTNHQGTYVLQDNSFPLLLPMASGLQYLEEAPKFLAFTCGLLRGALYTLGIESVVTASVAALPVCKFQVVIPKS

SEQ ID NO: 35970 - protein, 173 aa, Homo sapiens
MADTVLFEFLHTEMVAELWAHDPDPGPGVSAGLRGEEAGATKGQKMSLSVLEGMGFRVGQALGERLPRETLAFREELDVLKFLCKDLWVAVFQKQMDSLRTNHQGTYVLQDNSFPLLLPMASGLQYLEEAPKFLAFTCGLLRGALYTLGIESVVTASVAALPVCKFQVVIPKS

SEQ ID NO: 35971 - protein, 113 aa, Homo sapiens
MADTVLFEFLHTEMVAELWAHDPDPGPGAAPGDAGLQGGAGCPQVLVQRPVGGGVPEADGQPAHQSPGDLRPARQQLPPPPPDGLWPAVSGGSTQVPGLHLRPPARRPLYPGH

SEQ ID NO: 35972 - protein, 127 aa, Homo sapiens
MADTVLFEFLHTEMVAELWAHDPDPGPGVSAGLRGEEAGATKAAPGDAGLQGGAGCPQVLVQRPVGGGVPEADGQPAHQSPGDLRPARQQLPPPPPDGLWPAVSGGSTQVPGLHLRPPARRPLYPGH

SEQ ID NO: 35973 - protein, 198 aa, Homo sapiens
MATLWGGLLRLGSLLSLSCLALSVLLLAQLSDAAKNFEDVRCKCICPPYKENSGHIYNKNISQKDCDCLHVVEPMPVRGPDVEAYCLRCECKYEERSSVTIKVTIIIYLSILGLLLLYMVYLTLVEPILKRRLFGHAQLIQSDDDIGDHQPFANAHDVLARSRSRANVLNKVEYAQQRWKLQVQEQRKSVFDRHVVLS

SEQ ID NO: 35974 - protein, 124 aa, Homo sapiens
MPVRGPDVEAYCLRCECKYEERSSVTIKVTIIIYLSILGLLLLYMVYLTLVEPILKRRLFGHAQLIQSDDDIGDHQPFANAHDVLARSRSRANVLNKVEYAQQRWKLQVQEQRKSVFDRHVVLS

SEQ ID NO: 35975 - protein, 274 aa, Homo sapiens
MATTVSTQRGPVYIGELPQDFLRITPTQQQRQVQLDAQAAQQLQYGGAVGTVGRLNITVVQAKLAKNYGMTRMDPYCRLRLGYAVYETPTAHNGAKNPRWNKVIHCTVPPGVDSFYLEIFDERAFSMDDRIAWTHITIPESLRQGKVEDKWYSLSGRQGDDKEGMINLVMSYALLPAAMVMPPQPVVLMPTVYQQGVGYVPITGMPAVCSPGMVPVALPPAAVNAQPRCSEEDLKAIQDMFPNMDQEVIRSVLEAQRGNKDAAINSLLQMGEEP

SEQ ID NO: 35976 - protein, 205 aa, Homo sapiens
MTRMDPYCRLRLGYAVYETPTAHNGAKNPRWNKVIHCTVPPGVDSFYLEIFDERAFSMDDRIAWTHITIPESLRQGKVEDKWYSLSGRQGDDKEGMINLVMSYALLPAAMVMPPQPVVLMPTVYQQGVGYVPITGMPAVCSPGMVPVALPPAAVNAQPRCSEEDLKAIQDMFPNMDQEVIRSVLEAQRGNKDAAINSLLQMGEEP

SEQ ID NO: 35977 - protein, 312 aa, Homo sapiens
MAAGQNGHEEWVGSAYLFVESSLDKVVLSDAYAHPQQKVAVYRALQAALAESGGSPDVLQMLKIHRSDPQLIVQLRFCGRQPCGRFLRAYREGALRAALQRSLAAALAQHSVPLQLELRAGAERLDALLADEERCLSCILAQQPDRLRDEELAELEDALRNLKCGSGARGGDGEVASAPLQPPVPSLSEVKPPPPPPPAQTFLFQGQPVVNRPLSLKDQQTFARSVGLKWRKVGRSLQRGCRALRDPALDSLAYEYEREGLYEQAFQLLRRFVQAEGRRATLQRLVEALEENELTSLAEDLLGLTDPNGGLA

SEQ ID NO: 35978 - protein, 252 aa, Homo sapiens
MLKIHRSDPQLIVQLRFCGRQPCGRFLRAYREGALRAALQRSLAAALAQHSVPLQLELRAGAERLDALLADEERCLSCILAQQPDRLRDEELAELEDALRNLKCGSGARGGDGEVASAPLQPPVPSLSEVKPPPPPPPAQTFLFQGQPVVNRPLSLKDQQTFARSVGLKWRKVGRSLQRGCRALRDPALDSLAYEYEREGLYEQAFQLLRRFVQAEGRRATLQRLVEALEENELTSLAEDLLGLTDPNGGLA

SEQ ID NO: 35979 - protein, 158 aa, Homo sapiens
MADEALFLLLHNEMVSGVYKSAEQGEVENGRCITKLENMGFRVGQGLIERFTKDTARFKDELDIMKFICKDFWTTVFKKQIDNLRTNHQGIYVLQDNKFRLLTQMSAGKQYLEHASKYLAFTCGLIRGGLSNLGIKSIVTAEVSSMPACKFQVMIQKL

SEQ ID NO: 35980 - protein, 130 aa, Homo sapiens
MADEALFLLLHNEMVSGVYKSAEQGEVENGRCITKLENMGFRVGQGLIERFTKDTARFKDELDIMKFICKDFWTTVFKKQIDNLRTNHQYLAFTCGLIRGGLSNLGIKSIVTAEVSSMPACKFQVMIQKL

SEQ ID NO: 35981 - protein, 291 aa, Homo sapiens
MARSYGGRVLAAMTLLGIAAAVLAALGAQLLFQLQAGRAELRGLRAEGLGQELGAGPGLPEDAAGTLLPLAAALAALVLVLGFTCLLLAALCGHLGAELARGPGPRRSDWFLYDCRLLRHVALGLFCCGISVYLAALSIYALLLFEIETGAAAASILGSGTLVLVAVLTHTLLRAARAARRGLHELSPPSFEDDLARPAEVSKASPRAQPQQGIHRRTPYSTCPEPGDPFGSMATATAPAALEGGWESSLPASRMHRTLSAGLGHWDGVTHEMRRMLGHRPGSMGKDSTLV

SEQ ID NO: 35982 - protein, 208 aa, Homo sapiens
MAEAEGSSLLLLPPPPPPPRMAEVEAPTAAETDMKQYQGSGGVAMDVERSRFPYCVVWTPIPVLTWFFPIIGHMGICTSTGVIRDFAGPYFVSEDNMAFGKPAKYWKLDPAQVYASGPNAWDTAVHDASEEYKHRMHNLCCDNCHSHVALALNLMRYNNSTNWNMVTLCFFCLLYGKYVSVGAFVKTWLPFILLLGIILTVSLVFNLR

SEQ ID NO: 35983 - protein, 112 aa, Homo sapiens
MAFGKPAKYWKLDPAQVYASGPNAWDTAVHDASEEYKHRMHNLCCDNCHSHVALALNLMRYNNSTNWNMVTLCFFCLLYGKYVSVGAFVKTWLPFILLLGIILTVSLVFNLR

SEQ ID NO: 35984 - protein, 202 aa, Homo sapiens
MAAPWRRWPTGLLAVLRPLLTCRPLQGTTLQRDVLLFEHDRGRFFTILGLFCAGQGVFWASMAVAAVSRPPVPVQPLDAEVPNRGPFDLRSALWRYGLAVGCGAIGALVLGAGLLFSLRSVRSVVLRAGGQQVTLTTHAPFGLGAHFTVPLKQVSCMAHRGEVPAMLPLKVKGRRFYFLLDKTGHFPNTKLFDNTVGAYRSL

SEQ ID NO: 35985 - protein, 225 aa, Homo sapiens
MVHVSNRSIQGMNILFSSWAVVLMVMGITLDKWVELISEDERAKMNHSPWMMCCPALWPEDDLKVVRIMMTSSLGLSFLLNLILGMKFTYLIPQNKYIQLFTTILSFFSGISLLWALILYHNKLKQGQSMHFSNYRITWIMYTAYLNVFFLSVCGVLSLLECKLSTSSCTCLNIHKSDNECKESENSIEDISLPECTAMPRSIVRAHTVNSLNKKVQTRHVTWAL

SEQ ID NO: 35986 - protein, 320 aa, Homo sapiens
MVGYDPKPDGRNNTKFQVAVAGSVSGLVTRALISPFDVIKIRFQLQHERLSRSDPSAKYHGILQASRQILQEEGPTAFWKGHVPAQILSIGYGAVQFLSFEMLTELVHRGSVYDAREFSVHFVCGGLAACMATLTVHPVDVLRTRFAAQGEPKVYNTLRHAVGTMYRSEGPQVFYKGLAPTLIAIFPYAGLQFSCYSSLKHLYKWAIPAEGKKNENLQNLLCGSGAGVISKTLTYPLDLFKKRLQVGGFEHARAAFGQVRRYKGLMDCAKQVLQKEGALGFFKGLSPSLLKAALSTGFMFFSYEFFCNVFHCMNRTASQR

SEQ ID NO: 35987 - protein, 263 aa, Homo sapiens
MVGYDPKPDGRNNTKFQVAVAGSVSGLVTRALISPFDVIKIRFQLQHERLSRSDPSAKYHGILQASRQILQEEGPTAFWKGHVPAQILSIGYGAVQVYNTLRHAVGTMYRSEGPQVFYKGLAPTLIAIFPYAGLQFSCYSSLKHLYKWAIPAEGKKNENLQNLLCGSGAGVISKTLTYPLDLFKKRLQVGGFEHARAAFGQVRRYKGLMDCAKQVLQKEGALGFFKGLSPSLLKAALSTGFMFFSYEFFCNVFHCMNRTASQR

SEQ ID NO: 35988 - protein, 492 aa, Homo sapiens
MDFLLGNPFSSPVGQRIEKATDGSLQSEDWALNMEICDIINETEEGPKDALRAVKKRIVGNKNFHEVMLALTVLETCVKNCGHRFHVLVASQDFVESVLVRTILPKNNPPTIVHDKVLNLIQSWADAFRSSPDLTGVVTIYEDLRRKGLEFPMTDLDMLSPIHTPQRTVFNSETQSGQDSVGTDSSQQEDSGQHAAPLPAPPILSGDTPIAPTPEQIGKLRSELEMVSGNVRVMSEMLTELVPTQAEPADLELLQELNRTCRAMQQRVLELIPQIANEQLTEELLIVNDNLNNVFLRHERFERFRTGQTTKAPSEAEPAADLIDMGPDPAATGNLSSQLAGMNLGSSSVRAGLQSLEASGRLEDEFDMFALTRGSSLADQRKEVKYEAPQATDGLAGALDARQQSTGAIPVTQACLMEDIEQWLSTDVGNDAEEPKGVTSEEFDKFLEERAKAADRLPNLSSPSAEGPPGPPSGPAPRKKTQEKDDDMLFAL

SEQ ID NO: 35989 - protein, 493 aa, Homo sapiens
MDFLLGNPFSSPVGQRIEKATDGSLQSEDWALNMEICDIINETEEGPKDALRAVKKRIVGNKNFHEVMLALTVLETCVKNCGHRFHVLVASQDFVESVLVRTILPKNNPPTIVHDKVLNLIQSWADAFRSSPDLTGVVTIYEDLRRKGLEFPMTDLDMLSPIHTPQRTVFNSETQSGQDSVGTDSSQQEDSGQHAAPLPAPPILSGDTPIAPTPEQIGKLRSELEMVSGNVRVMSEMLTELVPTQAEPADLELLQELNRTCRAMQQRVLELIPQIANEQLTEELLIVNDNLNNVFLRHERFERFRTGQTTKAPSEAEPAADLIDMGPDPAATGNLSSQLAGMNLGSSSVRAGLQSLEASGRLEDEFDMFALTRGSSLADQRKEVKYEAPQATDGLAGALDARQQSTGAIPVTQACLMEDIEQWLSTDVGNDAEEPKGVTSEGKFDKFLEERAKAADRLPNLSSPSAEGPPGPPSGPAPRKKTQEKDDDMLFAL

SEQ ID NO: 35990 - protein, 447 aa, Homo sapiens
MDFLLGNPFSSPVGQRIEKATDGSLQSEDWALNMEICDIINETEEGPKDALRAVKKRIVGNKNFHEVMLALTVLETCVKNCGHRFHVLVASQDFVESVLVRTILPKNNPPTIVHDKVLNLIQTVFNSETQSGQDSVGTDSSQQEDSGQHAAPLPAPPILSGDTPIAPTPEQIGKLRSELEMVSGNVRVMSEMLTELVPTQAEPADLELLQELNRTCRAMQQRVLELIPQIANEQLTEELLIVNDNLNNVFLRHERFERFRTGQTTKAPSEAEPAADLIDMGPDPAATGNLSSQLAGMNLGSSSVRAGLQSLEASGRLEDEFDMFALTRGSSLADQRKEVKYEAPQATDGLAGALDARQQSTGAIPVTQACLMEDIEQWLSTDVGNDAEEPKGVTSEEFDKFLEERAKAADRLPNLSSPSAEGPPGPPSGPAPRKKTQEKDDDMLFAL

SEQ ID NO: 35991 - protein, 460 aa, Homo sapiens
MEICDIINETEEGPKDALRAVKKRIVGNKNFHEVMLALTVLETCVKNCGHRFHVLVASQDFVESVLVRTILPKNNPPTIVHDKVLNLIQSWADAFRSSPDLTGVVTIYEDLRRKGLEFPMTDLDMLSPIHTPQRTVFNSETQSGQDSVGTDSSQQEDSGQHAAPLPAPPILSGDTPIAPTPEQIGKLRSELEMVSGNVRVMSEMLTELVPTQAEPADLELLQELNRTCRAMQQRVLELIPQIANEQLTEELLIVNDNLNNVFLRHERFERFRTGQTTKAPSEAEPAADLIDMGPDPAATGNLSSQLAGMNLGSSSVRAGLQSLEASGRLEDEFDMFALTRGSSLADQRKEVKYEAPQATDGLAGALDARQQSTGAIPVTQACLMEDIEQWLSTDVGNDAEEPKGVTSEGKFDKFLEERAKAADRLPNLSSPSAEGPPGPPSGPAPRKKTQEKDDDMLFAL

SEQ ID NO: 35992 - protein, 1001 aa, Homo sapiens
MIFPVARYALRWLRRPEDRAFSRAAMEMALRGVRKVLCVAEKNDAAKGIADLLSNGRMRRREGLSKFNKIYEFDYHLYGQNVTMVMTSVSGHLLAHDFQMQFRKWQSCNPLVLFEAEIEKYCPENFVDIKKTLERETRQCQALVIWTDCDREGENIGFEIIHVCKAVKPNLQVLRARFSEITPHAVRTACENLTEPDQRVSDAVDVRQELDLRIGAAFTRFQTLRLQRIFPEVLAEQLISYGSCQFPTLGFVVERFKAIQAFVPEIFHRIKVTHDHKDGIVEFNWKRHRLFNHTACLVLYQLCVEDPMATVVEVRSKPKSKWRPQALDTVELEKLASRKLRINAKETMRIAEKLYTQGYISYPRTETNIFPRDLNLTVLVEQQTPDPRWGAFAQSILERGGPTPRNGNKSDQAHPPIHPTKYTNNLQGDEQRLYEFIVRHFLACCSQDAQGQETTVEIDIAQERFVAHGLMILARNYLDVYPYDHWSDKILPVYEQGSHFQPSTVEMVDGETSPPKLLTEADLIALMEKHGIGTDATHAEHIETIKARMYVGLTPDKRFLPGHLGMGLVEGYDSMGYEMSKPDLRAELEADLKLICDGKKDKFVVLRQQVQKYKQVFIEAVAKAKKLDEALAQYFGNGTELAQQEDIYPAMPEPIRKCPQCNKDMVLKTKKNGGFYLSCMGFPECRSAVWLPDSVLEASRDSSVCPVCQPHPVYRLKLKFKRGSLPPTMPLEFVCCIGGCDDTLREILDLRFSGGPPRASQPSGRLQANQSLNRMDNSQHPQPADSRQTGSSKALAQTLPPPTAAGESNSVTCNCGQEAVLLTVRKEGPNRGRQFFKCNGGSCNFFLWADSPNPGAGGPPALAYRPLGASLGCPPGPGIHLGGFGNPGDGSGSGTSCLCSQPSVTRTVQKDGPNKGRQFHTCAKPREQQCGFFQWVDENTAPGTSGAPSWTGDRGRTLESEARSKRPRASSSDMGSTAKKPRKCSLCHQPGHTRPFCPQNR

SEQ ID NO: 35993 - protein, 976 aa, Homo sapiens
MEMALRGVRKVLCVAEKNDAAKGIADLLSNGRMRRREGLSKFNKIYEFDYHLYGQNVTMVMTSVSGHLLAHDFQMQFRKWQSCNPLVLFEAEIEKYCPENFVDIKKTLERETRQCQALVIWTDCDREGENIGFEIIHVCKAVKPNLQVLRARFSEITPHAVRTACENLTEPDQRVSDAVDVRQELDLRIGAAFTRFQTLRLQRIFPEVLAEQLISYGSCQFPTLGFVVERFKAIQAFVPEIFHRIKVTHDHKDGIVEFNWKRHRLFNHTACLVLYQLCVEDPMATVVEVRSKPKSKWRPQALDTVELEKLASRKLRINAKETMRIAEKLYTQGYISYPRTETNIFPRDLNLTVLVEQQTPDPRWGAFAQSILERGGPTPRNGNKSDQAHPPIHPTKYTNNLQGDEQRLYEFIVRHFLACCSQDAQGQETTVEIDIAQERFVAHGLMILARNYLDVYPYDHWSDKILPVYEQGSHFQPSTVEMVDGETSPPKLLTEADLIALMEKHGIGTDATHAEHIETIKARMYVGLTPDKRFLPGHLGMGLVEGYDSMGYEMSKPDLRAELEADLKLICDGKKDKFVVLRQQVQKYKQVFIEAVAKAKKLDEALAQYFGNGTELAQQEDIYPAMPEPIRKCPQCNKDMVLKTKKNGGFYLSCMGFPECRSAVWLPDSVLEASRDSSVCPVCQPHPVYRLKLKFKRGSLPPTMPLEFVCCIGGCDDTLREILDLRFSGGPPRASQPSGRLQANQSLNRMDNSQHPQPADSRQTGSSKALAQTLPPPTAAGESNSVTCNCGQEAVLLTVRKEGPNRGRQFFKCNGGSCNFFLWADSPNPGAGGPPALAYRPLGASLGCPPGPGIHLGGFGNPGDGSGSGTSCLCSQPSVTRTVQKDGPNKGRQFHTCAKPREQQCGFFQWVDENTAPGTSGAPSWTGDRGRTLESEARSKRPRASSSDMGSTAKKPRKCSLCHQPGHTRPFCPQNR

SEQ ID NO: 35994 - protein, 906 aa, Homo sapiens
MNLIIICMARQSCNPLVLFEAEIEKYCPENFVDIKKTLERETRQCQALVIWTDCDREGENIGFEIIHVCKAVKPNLQVLRARFSEITPHAVRTACENLTEPDQRVSDAVDVRQELDLRIGAAFTRFQTLRLQRIFPEVLAEQLISYGSCQFPTLGFVVERFKAIQAFVPEIFHRIKVTHDHKDGIVEFNWKRHRLFNHTACLVLYQLCVEDPMATVVEVRSKPKSKWRPQALDTVELEKLASRKLRINAKETMRIAEKLYTQGYISYPRTETNIFPRDLNLTVLVEQQTPDPRWGAFAQSILERGGPTPRNGNKSDQAHPPIHPTKYTNNLQGDEQRLYEFIVRHFLACCSQDAQGQETTVEIDIAQERFVAHGLMILARNYLDVYPYDHWSDKILPVYEQGSHFQPSTVEMVDGETSPPKLLTEADLIALMEKHGIGTDATHAEHIETIKARMYVGLTPDKRFLPGHLGMGLVEGYDSMGYEMSKPDLRAELEADLKLICDGKKDKFVVLRQQVQKYKQVFIEAVAKAKKLDEALAQYFGNGTELAQQEDIYPAMPEPIRKCPQCNKDMVLKTKKNGGFYLSCMGFPECRSAVWLPDSVLEASRDSSVCPVCQPHPVYRLKLKFKRGSLPPTMPLEFVCCIGGCDDTLREILDLRFSGGPPRASQPSGRLQANQSLNRMDNSQHPQPADSRQTGSSKALAQTLPPPTAAGESNSVTCNCGQEAVLLTVRKEGPNRGRQFFKCNGGSCNFFLWADSPNPGAGGPPALAYRPLGASLGCPPGPGIHLGGFGNPGDGSGSGTSCLCSQPSVTRTVQKDGPNKGRQFHTCAKPREQQCGFFQWVDENTAPGTSGAPSWTGDRGRTLESEARSKRPRASSSDMGSTAKKPRKCSLCHQPGHTRPFCPQNR

SEQ ID NO: 35995 - protein, 120 aa, Homo sapiens
MMPSRTNLATGIPSSKVKYSRLSSTDDGYIDLQFKKTPPKIPYKAIALATVLFLIGAFLIIIGSLLLSGYISKGGADRAVPVLIIGILVFLPGFYHLRIAYYASKGYRGYSYDDIPDFDD

SEQ ID NO: 35996 - protein, 183 aa, Homo sapiens
MQPWALPTVGELWVCGRPGAALRWSLVLSPRLEPSGVISAHCNLHLLASSDSSASASRLCQRVMMPSRTNLATGIPSSKVKYSRLSSTDDGYIDLQFKKTPPKIPYKAIALATVLFLIGAFLIIIGSLLLSGYISKGGADRAVPVLIIGILVFLPGFYHLRIAYYASKGYRGYSYDDIPDFDD

SEQ ID NO: 35997 - protein, 359 aa, Homo sapiens
MSYRRELEKYRDLDEDEILGALTEEELRTLENELDELDPDNALLPAGLRQKDQTTKAPTGPFKREELLDHLEKQAKEFKDREDLVPYTGEKRGKVWVPKQKPLDPVLESVTLEPELEEALANASDAELCDIAAILGMHTLMSNQQYYQALSSSSIMNKEGLNSVIKPTQYKPVPDEEPNSTDVEETLERIKNNDPKLEEVNLNNIRNIPIPTLKAYAEALKENSYVKKFSIVGTRSNDPVAYALAEMLKENKVLKTLNVESNFISGAGILRLVEALPYNTSLVEMKIDNQSQPLGNKVEMEIVSMLEKNATLLKFGYHFTQQGPRLRASNAMMNNNDLVRKRRLADLTGPIIPKCRSGV

SEQ ID NO: 35998 - protein, 232 aa, Homo sapiens
MSQVLSILGMHTLMSNQQYYQALSSSSIMNKEGLNSVIKPTQYKPVPDEEPNSTDVEETLERIKNNDPKLEEVNLNNIRNIPIPTLKAYAEALKENSYVKKFSIVGTRSNDPVAYALAEMLKENKVLKTLNVESNFISGAGILRLVEALPYNTSLVEMKIDNQSQPLGNKVEMEIVSMLEKNATLLKFGYHFTQQGPRLRASNAMMNNNDLVRKRRLADLTGPIIPKCRSGV

SEQ ID NO: 35999 - protein, 223 aa, Homo sapiens
MARLGALLLAAALGALLSFALLAAAVASDYWYILEVADAGNGSAWPGRAELLSSHSGLWRICEGQNGCIPLVDPFASESLDVSTSVQHLILLHRAVIVVLPLSLVLLVCGWICGLLSSLAQSVSLLLFTGCYFLLGSVLTLAGVSIYISYSHLAFAETVQQYGPQHMQGVRVSFGWSMALAWGSCALEAFSGTLLLSAAWTLSLSPPICGHLSPQQVGGRGGD

SEQ ID NO: 36000 - protein, 196 aa, Homo sapiens
MARLGALLLAAALGALLSFALLAAAVASDYWYILEVADAGNGSAWPGRAELLSSHSGLWRICEVLHRAVIVVLPLSLVLLVCGWICGLLSSLAQSVSLLLFTGCYFLLGSVLTLAGVSIYISYSHLAFAETVQQYGPQHMQGVRVSFGWSMALAWGSCALEAFSGTLLLSAAWTLSLSPPICGHLSPQQVGGRGGD

SEQ ID NO: 36001 - protein, 150 aa, Homo sapiens
MARLGALLLAAALGALLSFALLAAAVASDYWYILEVADAGNGSAWPGRAELLSSHSGLWRICEGVLTLAGVSIYISYSHLAFAETVQQYGPQHMQGVRVSFGWSMALAWGSCALEAFSGTLLLSAAWTLSLSPPICGHLSPQQVGGRGGD

SEQ ID NO: 36002 - protein, 15 aa, Homo sapiens
NTEAFFGQGTRLTVV

SEQ ID NO: 36003 - protein, 492 aa, Homo sapiens
MALNSGSPPAIGPYYENHGYQPENPYPAQPTVVPTVYEVHPAQYYPSPVPQYAPRVLTQASNPVVCTQPKSPSGTVCTSKTKKALCITLTLGTFLVGAALAAGLLWKFMGSKCSNSGIECDSSGTCINPSNWCDGVSHCPGGEDENRCVRLYGPNFILQVYSSQRKSWHPVCQDDWNENYGRAACRDMGYKNNFYSSQGIVDDSGSTSFMKLNTSAGNVDIYKKLYHSDACSSKAVVSLRCIACGVNLNSSRQSRIVGGESALPGAWPWQVSLHVQNVHVCGGSIITPEWIVTAAHCVEKPLNNPWHWTAFAGILRQSFMFYGAGYQVEKVISHPNYDSKTKNNDIALMKLQKPLTFNDLVKPVCLPNPGMMLQPEQLCWISGWGATEEKGKTSEVLNAAKVLLIETQRCNSRYVYDNLITPAMICAGFLQGNVDSCQGDSGGPLVTSKNNIWWLIGDTSWGSGCAKAYRPGVYGNVMVFTDWIYRQMRADG

SEQ ID NO: 36004 - protein, 529 aa, Homo sapiens
MPPAPPGGESGCEERGAAGHIEHSRYLSLLDAVDNSKMALNSGSPPAIGPYYENHGYQPENPYPAQPTVVPTVYEVHPAQYYPSPVPQYAPRVLTQASNPVVCTQPKSPSGTVCTSKTKKALCITLTLGTFLVGAALAAGLLWKFMGSKCSNSGIECDSSGTCINPSNWCDGVSHCPGGEDENRCVRLYGPNFILQVYSSQRKSWHPVCQDDWNENYGRAACRDMGYKNNFYSSQGIVDDSGSTSFMKLNTSAGNVDIYKKLYHSDACSSKAVVSLRCIACGVNLNSSRQSRIVGGESALPGAWPWQVSLHVQNVHVCGGSIITPEWIVTAAHCVEKPLNNPWHWTAFAGILRQSFMFYGAGYQVEKVISHPNYDSKTKNNDIALMKLQKPLTFNDLVKPVCLPNPGMMLQPEQLCWISGWGATEEKGKTSEVLNAAKVLLIETQRCNSRYVYDNLITPAMICAGFLQGNVDSCQGDSGGPLVTSKNNIWWLIGDTSWGSGCAKAYRPGVYGNVMVFTDWIYRQMRADG

SEQ ID NO: 36005 - protein, 15 aa, Homo sapiens
NYGYTFGSGTRLTVV

SEQ ID NO: 36006 - protein, 16 aa, Homo sapiens
SGNTIYFGEGSWLTVV

SEQ ID NO: 36007 - protein, 16 aa, Homo sapiens
TNEKLFFGSGTQLSVL

SEQ ID NO: 36008 - protein, 309 aa, Homo sapiens
MAPKFPDSVEELRAAGNESFRNGQYAEASALYGRALRVLQAQGSSDPEEESVLYSNRAACHLKDGNCRDCIKDCTSALALVPFSIKPLLRRASAYEALEKYPMAYVDYKTVLQIDDNVTSAVEGINRMTRALMDSLGPEWRLKLPSIPLVPVSAQKRWNSLPSENHKEMAKSKSKETTATKNRVPSAGDVEKARVLKEEGNELVKKGNHKKAIEKYSESLLCSNLESATYSNRALCYLVLKQYTEAVKDCTEALKLDGKNVKAFYRRAQAHKALKDYKSSFADISNLLQIEPRNGPAQKLRQEVKQNLH

SEQ ID NO: 36009 - protein, 351 aa, Homo sapiens
MASGRLIKFVVFELLEFAAFSIPTLVITEQFATAYQGTRARSDNTHYWLIISCSIAYVALVTLLIWVPVKVILHKKRYIYRKIKGWRPVLMMCVVLTTLPCLTFSIAVTEVQKSINGSADVLPDMLPDLPVSLVLLSLIMVDIIEKLRIYPLRGSQKSSENGHIHSTSLQHIKTVTEQVRQSPENAASPQATNSTQVSQPSGAMTRSQESVFMGPQEPSCDSGILRMMSRRDVRAELFLWSFLLWSDTIEMVRVAGHPNVYKSSWLYPVYIFSFISLLRITFTPQNPLLNSLSVLLQDLPFVFVRLGLIIALGTITPVLGLCKNILVTLSYIYFNYLTRIRIFSAFEMSPF

SEQ ID NO: 36010 - protein, 16 aa, Homo sapiens
SNQPQHFGDGTRLSIL

SEQ ID NO: 36011 - protein, 16 aa, Homo sapiens
NTGELFFGEGSRLTVL

SEQ ID NO: 36012 - protein, 16 aa, Homo sapiens
STDTQYFGPGTRLTVL

SEQ ID NO: 36013 - protein, 139 aa, Homo sapiens
MPVMPIPRRVRSFHGPHTTCLHAACGPVRASHLARTKYNNFDVYIKTRWLYGFIRFLLYFSCSLFTAALWGALAALFCLQYLGVRVLLRFQRKLSVLLLLLGRRRVDFRLVNELLVYGIHVTMLLVGGLGWCFMVFVDM

SEQ ID NO: 36014 - protein, 495 aa, Homo sapiens
MQWSPTPGASACLGWASSLACSTAPTLLGRAGRGPLMAAKWFKEFPLNLKTVSERAKPGGGGGKLRKNSEAGGAGPGPGKGRKNSAAELGSGRAGVGPKDSRLSRDSLQGLIQAAAGKGRKNSRATEEEPHRGATKSSGCSTYINRLIKVDTQEKNGKSNYPSSSSSSSSSSSSASSSPSSLGPELDKGKIIKQQETVIILEDYADPYDAKRTKGQRDAERVGENDGYMEPYDAQQMITEIRRRGSKDPLVKALQLLDSPCEPADGGLKSETLAKRRSSKDLLGKPPQLYDTPYEPAEGGPRAEGKARPPDSRLPENDERPAAEYEQPWEWKKEQIVRALSVQFEGAERPSFREETVRQHHRQKSWTQKILKPALSDHSEGEKVDPGLPLEKQPWYHGAISRAEAESRLQPCKEAGYLVRNSESGNSRYSIALKTSQGCVHIIVAQTKDNKYTLNQTSAVFDSIPEVVHYYSNEKLPFKGAEHMTLLYPVHSKLH

SEQ ID NO: 36015 - protein, 1200 aa, Homo sapiens
MGDQQLYKTNHVAHGSENLFYQQPPLGVHSGLNHNYGNAVTGGGMDAPQASPISPHFPQDTRDGLGLPVGSKNLGQMDTSRQGGWGSHAGPGNHVQLRGNLANSNMMWGAPAQAEPTDGYQYTYSQASEIRTQKLTSGVLHKLDSFTQVFANQNLRIQVNNMAQVLHTQSAVMDGAPDSALRQLLSQKPMEPPAPAIPSRYQQVPQQPHPGFTGGLSKPALQVGQHPTQGHLYYDYQQPLAQVPVQGGQPLQAPQMLSQHMQQMQQHQYYPPQQQQQAGQQRISMQEIQTQPQQIRPSQPQPPPQQQQPQQLQLQQRQGSMQIPQYYQPQPMMQHLQEQQQQQMHLQPPSYHRDPHQYTPEQAHTVQLIPLGSMSQYYYQEPQQPYSHPLYQQSHLSQHQQREDSQLKTYSSDRQAQAMLSSHGDLGPPDTGMGDPASSDLTRVSSTLPHRPLLSPSGIHLNNMGPQHQQLSPSAMWPQMHLPDGRAQPGSPESSGQPKGAFGEQFDAKNKLTCSICLKEFKNLPALNGHMRSHGGMRASPNLKQEEGEKVLPPQPQPPLPPPPPPPPPPQLPPEAESLTPMVMPVSVPVKLLPPKPSSQGFTNSTVAAPSARDKPASSMSDDEMPVLEIPRKHQPSVPKAEEPLKTVQEKKKFRHRPEPLFIPPPPSYNPNPAASYSGATLYQSQLRSPRVLGDHLLLDPTHELPPYTPPPMLSPVRQGSGLFSNVLISGHGPGAHPQLPLTPLTPTPRVLLCRSNSIDGSNVTVTPGPGEQTVDVEPRINIGLRFQAEIPELQDISALAQDTHKATLVWKPWPELENHDLQQRVENLLNLCCSSALPGGGTNSEFALHSLFEAKGDVMVALEMLLLRKPVRLKCHPLANYHYAGSDKWTSLERKLFNKALATYSKDFIFVQKMVKSKTVAQCVEYYYTWKKIMRLGRKHRTRLAEIIDDCVTSEEEEELEEEEEEDPEEDRKSTKEEESEVPKSPEPPPVPVLAPTEGPPLQALGQPSGSFICEMPNCGAVFSSRQALNGHARIHGGTNQVTKARGAIPSGKQKPGGTQSGYCSVKSSPSHSTTSGETDPTTIFPCKECGKVFFKIKSRNAHMKTHRQQEEQQRQKAQKAAFAAEMAATIERTTGPVGAPGLLPLDQLSLIKPIKDVDILDDDVVQQLGGVMEEAEVVDTDLLLDDQDSVLLQGDAEL

SEQ ID NO: 36016 - protein, 956 aa, Homo sapiens
MAQVLHTQSAVMDGAPDSALRQLLSQKPMEPPAPAIPSRYQQVPQQPHPGFTGGLSKPALQVGQHPTQGHLYYDYQQPLAQVPVQGGQPLQAPQMLSQHMQQMQQHQYYPPQQQQQAGQQRISMQEIQTQPQQIRPSQPQPPPQQQQPQQLQLQQRQGSMQIPQYYQPQPMMQHLQEQQQQQMHLQPPSYHRDPHQYTPEQAHTVQLIPLGSMSQYYYQEPQQPYSHPLYQQSHLSQHQQREDSQLKTYSSDRQAQAMLSSHGDLGPPDTGMGDPASSDLTRVSSTLPHRPLLSPSGIHLNNMGPQHQQLSPSAMWPQMHLPDGRAQPGSPESSGQPKGAFGEQFDAKNKLTCSICLKEFKNLPALNGHMRSHGGMRASPNLKQEIPRKHQPSVPKAEEPLKTVQEKKKFRHRPEPLFIPPPPSYNPNPAASYSGATLYQSQLRSPRVLGDHLLLDPTHELPPYTPPPMLSPVRQGSGLFSNVLISGHGPGAHPQLPLTPLTPTPRVLLCRSNSIDGSNVTVTPGPGEQTVDVEPRINIGLRFQAEIPELQDISALAQDTHKATLVWKPWPELENHDLQQRVENLLNLCCSSALPGGGTNSEFALHSLFEAKGDVMVALEMLLLRKPVRLKCHPLANYHYAGSDKWTSLERKLFNKALATYSKDFIFVQKMVKSKTVAQCVEYYYTWKKIMRLGRKHRTRLAEIIDDCVTSEEEEELEEEEEEDPEEDRKSTKEEESEVPKSPEPPPVPVLAPTEGPPLQALGQPSGSFICEMPNCGAVFSSRQALNGHARIHGGTNQVTKARGAIPSGKQKPGGTQSGYCSVKSSPSHSTTSGETDPTTIFPCKECGKVFFKIKSRNAHMKTHRQQEEQQRQKAQKAAFAAEMAATIERTTGPVGAPGLLPLDQLSLIKPIKDVDILDDDVVQQLGGVMEEAEVVDTDLLLDDQDSVLLQGDAEL

SEQ ID NO: 36017 - protein, 968 aa, Homo sapiens
MAQVLHTQSAVMDGAPDSALRQLLSQKPMEPPAPAIPSRYQQVPQQPHPGFTGGLSKPALQVGQHPTQGHLYYDYQQPLAQVPVQGGQPLQAPQMLSQHMQQMQQHQYYPPQQQQQAGQQRISMQEIQTQPQQIRPSQPQPPPQQQQPQQLQLQQRQGSMQIPQYYQPQPMMQHLQEQQQQQMHLQPPSYHRDPHQYTPEQAHTVQLIPLGSMSQYYYQEPQQPYSHPLYQQSHLSQHQQREDSQLKTYSSDRQAQAMLSSHGDLGPPDTGMGDPASSDLTRVSSTLPHRPLLSPSGIHLNNMGPQHQQLSPSAMWPQMHLPDGRAQPGSPESSGQPKGAFGEQFDAKNKLTCSICLKEFKNLPALNGHMRSHGGMRASPNLKQEIPRKHQPSVPKAEEPLKTVQEKKKFRHRPEPLFIPPPPSYNPNPAASYSGATLYQSQLRSPRVLGDHLLLDPTHELPPYTPPPMLSPVRQGSGLFSNVLISGHGPGAHPQLPLTPLTPTPRVLLCRSNSIDGSNVTVTPGPGEQTVDVEPRINIGLRFQAEIPELQDISALAQDTHKATLVWKPWPELENHDLQQRVENLLNLCCSSALPGGGTNSEFALHSLFEAKGDVMVALEMLLLRKPVRLKCHPLANYHYAGSDKWTSLERKLFNKALATYSKDFIFVQKMVKSKTVAQCVEYYYTWKKIMRLGRKHRTRLAEIIDDCVTSEEEEELEEEEEEDPEEDRKSTKEEESEVPKSPEPPPVPVLAPTEGPPLQALGQPSGSFICEMPNCGADCRCHVTPFLPQVFSSRQALNGHARIHGGTNQVTKARGAIPSGKQKPGGTQSGYCSVKSSPSHSTTSGETDPTTIFPCKECGKVFFKIKSRNAHMKTHRQQEEQQRQKAQKAAFAAEMAATIERTTGPVGAPGLLPLDQLSLIKPIKDVDILDDDVVQQLGGVMEEAEVVDTDLLLDDQDSVLLQGDAEL

SEQ ID NO: 36018 - protein, 1117 aa, Homo sapiens
MGDQQLYKTNHVAHGSENLFYQQPPLGVHSGLNHNYGNAVTGGGMDAPQASPISPHFPQDTRDGLGLPVGSKNLGQMDTSRQGGWGSHAGPGNHVQLRGNLANSNMMWGAPAQAEPTDGYQYTYSQASEIRTQKLTSGVLHKLDSFTQVFANQNLRIQVNNMAQVLHTQSAVMDGAPDSALRQLLSQKPMEPPAPAIPSRYQQVPQQPHPGFTGGLSKPALQVGQHPTQGHLYYDYQQPLAQVPVQGGQPLQAPQMLSQHMQQMQQHQYYPPQQQQQAGQQRISMQEIQTQPQQIRPSQPQPPPQQQQPQQLQLQQRQGSMQIPQYYQPQPMMQHLQEQQQQQMHLQPPSYHRDPHQYTPEQAHTVQLIPLGSMSQYYYQEPQQPYSHPLYQQSHLSQHQQREDSQLKTYSSDRQAQAMLSSHGDLGPPDTGMGDPASSDLTRVSSTLPHRPLLSPSGIHLNNMGPQHQQLSPSAMWPQMHLPDGRAQPGSPESSGQPKGAFGEQFDAKNKLTCSICLKEFKNLPALNGHMRSHGGMRASPNLKQEIPRKHQPSVPKAEEPLKTVQEKKKFRHRPEPLFIPPPPSYNPNPAASYSGATLYQSQLRSPRVLGDHLLLDPTHELPPYTPPPMLSPVRQGSGLFSNVLISGHGPGAHPQLPLTPLTPTPRVLLCRSNSIDGSNVTVTPGPGEQTVDVEPRINIGLRFQAEIPELQDISALAQDTHKATLVWKPWPELENHDLQQRVENLLNLCCSSALPGGGTNSEFALHSLFEAKGDVMVALEMLLLRKPVRLKCHPLANYHYAGSDKWTSLERKLFNKALATYSKDFIFVQKMVKSKTVAQCVEYYYTWKKIMRLGRKHRTRLAEIIDDCVTSEEEEELEEEEEEDPEEDRKSTKEEESEVPKSPEPPPVPVLAPTEGPPLQALGQPSGSFICEMPNCGAVFSSRQALNGHARIHGGTNQVTKARGAIPSGKQKPGGTQSGYCSVKSSPSHSTTSGETDPTTIFPCKECGKVFFKIKSRNAHMKTHRQQEEQQRQKAQKAAFAAEMAATIERTTGPVGAPGLLPLDQLSLIKPIKDVDILDDDVVQQLGGVMEEAEVVDTDLLLDDQDSVLLQGDAEL

SEQ ID NO: 36019 - protein, 1129 aa, Homo sapiens
MGDQQLYKTNHVAHGSENLFYQQPPLGVHSGLNHNYGNAVTGGGMDAPQASPISPHFPQDTRDGLGLPVGSKNLGQMDTSRQGGWGSHAGPGNHVQLRGNLANSNMMWGAPAQAEPTDGYQYTYSQASEIRTQKLTSGVLHKLDSFTQVFANQNLRIQVNNMAQVLHTQSAVMDGAPDSALRQLLSQKPMEPPAPAIPSRYQQVPQQPHPGFTGGLSKPALQVGQHPTQGHLYYDYQQPLAQVPVQGGQPLQAPQMLSQHMQQMQQHQYYPPQQQQQAGQQRISMQEIQTQPQQIRPSQPQPPPQQQQPQQLQLQQRQGSMQIPQYYQPQPMMQHLQEQQQQQMHLQPPSYHRDPHQYTPEQAHTVQLIPLGSMSQYYYQEPQQPYSHPLYQQSHLSQHQQREDSQLKTYSSDRQAQAMLSSHGDLGPPDTGMGDPASSDLTRVSSTLPHRPLLSPSGIHLNNMGPQHQQLSPSAMWPQMHLPDGRAQPGSPESSGQPKGAFGEQFDAKNKLTCSICLKEFKNLPALNGHMRSHGGMRASPNLKQEIPRKHQPSVPKAEEPLKTVQEKKKFRHRPEPLFIPPPPSYNPNPAASYSGATLYQSQLRSPRVLGDHLLLDPTHELPPYTPPPMLSPVRQGSGLFSNVLISGHGPGAHPQLPLTPLTPTPRVLLCRSNSIDGSNVTVTPGPGEQTVDVEPRINIGLRFQAEIPELQDISALAQDTHKATLVWKPWPELENHDLQQRVENLLNLCCSSALPGGGTNSEFALHSLFEAKGDVMVALEMLLLRKPVRLKCHPLANYHYAGSDKWTSLERKLFNKALATYSKDFIFVQKMVKSKTVAQCVEYYYTWKKIMRLGRKHRTRLAEIIDDCVTSEEEEELEEEEEEDPEEDRKSTKEEESEVPKSPEPPPVPVLAPTEGPPLQALGQPSGSFICEMPNCGADCRCHVTPFLPQVFSSRQALNGHARIHGGTNQVTKARGAIPSGKQKPGGTQSGYCSVKSSPSHSTTSGETDPTTIFPCKECGKVFFKIKSRNAHMKTHRQQEEQQRQKAQKAAFAAEMAATIERTTGPVGAPGLLPLDQLSLIKPIKDVDILDDDVVQQLGGVMEEAEVVDTDLLLDDQDSVLLQGDAEL

SEQ ID NO: 36020 - protein, 163 aa, Homo sapiens
MPKPPDYSELSDSLTLAVGTGRFSGPLHRAWRMMNFRQRMGWIGVGLYLLASAAAFYYVFEISETYNRLALEHIQQHPEEPLEGTTWTHSLKAQLLSLPFWVWTVIFLVPYLQMFLFLYSCTRADPKTVGYCIIPICLAVICNRHQAFVKASNQISRLQLIDT

SEQ ID NO: 36021 - protein, 131 aa, Homo sapiens
MMNFRQRMGWIGVGLYLLASAAAFYYVFEISETYNRLALEHIQQHPEEPLEGTTWTHSLKAQLLSLPFWVWTVIFLVPYLQMFLFLYSCTRADPKTVGYCIIPICLAVICNRHQAFVKASNQISRLQLIDT

SEQ ID NO: 36022 - protein, 169 aa, Homo sapiens
MLAFSEMPKPPDYSELSDSLTLAVGTGRFSGPLHRAWRMMNFRQRMGWIGVGLYLLASAAAFYYVFEISETYNRLALEHIQQHPEEPLEGTTWTHSLKAQLLSLPFWVWTVIFLVPYLQMFLFLYSCTRADPKTVGYCIIPICLAVICNRHQAFVKASNQISRLQLIDT

SEQ ID NO: 36023 - protein, 621 aa, Homo sapiens
MEFPGGNDNYLTITGPSHPFLSGAETFHTPSLGDEEFEIPPISLDSDPSLAVSDVVGHFDDLADPSSSQDGSFSAQYGVQTLDMPVGMTHGLMEQGGGLLSGGLTMDLDHSIGTQYSANPPVTIDVPMTDMTSGLMGHSQLTTIDQSELSSQLGLSLGGGTILPPAQSPEDRLSTTPSPTSSLHEDGVEDFRRQLPSQKTVVVEAGKKQKAPKKRKKKDPNEPQKPVSAYALFFRDTQAAIKGQNPNATFGEVSKIVASMWDSLGEEQKQVYKRKTEAAKKEYLKALAAYKDNQECQATVETVELDPAPPSQTPSPPPMATVDPASPAPASIEPPALSPSIVVNSTLSSYVANQASSGAGGQPNITKLIITKQMLPSSITMSQGGMVTVIPATVVTSRGLQLGQTSTATIQPSQQAQIVTRSVLQAAAAAAAAASMQLPPPRLQPPPLQQMPQPPTQQQVTILQQPPPLQAMQQPPPQKVRINLQQQPPPLQIKSVPLPTLKMQTTLVPPTVESSPERPMNNSPEAHTVEAPSPETICEMITDVVPEVESPSQMDVELVSGSPVALSPQPRCVRSGCENPPIVSKDWDNEYCSNECVVKHCRDVFLAWVASRNSNTVVFVK

SEQ ID NO: 36024 - protein, 598 aa, Homo sapiens
METFHTPSLGDEEFEIPPISLDSDPSLAVSDVVGHFDDLADPSSSQDGSFSAQYGVQTLDMPVGMTHGLMEQGGGLLSGGLTMDLDHSIGTQYSANPPVTIDVPMTDMTSGLMGHSQLTTIDQSELSSQLGLSLGGGTILPPAQSPEDRLSTTPSPTSSLHEDGVEDFRRQLPSQKTVVVEAGKKQKAPKKRKKKDPNEPQKPVSAYALFFRDTQAAIKGQNPNATFGEVSKIVASMWDSLGEEQKQVYKRKTEAAKKEYLKALAAYKDNQECQATVETVELDPAPPSQTPSPPPMATVDPASPAPASIEPPALSPSIVVNSTLSSYVANQASSGAGGQPNITKLIITKQMLPSSITMSQGGMVTVIPATVVTSRGLQLGQTSTATIQPSQQAQIVTRSVLQAAAAAAAAASMQLPPPRLQPPPLQQMPQPPTQQQVTILQQPPPLQAMQQPPPQKVRINLQQQPPPLQIKSVPLPTLKMQTTLVPPTVESSPERPMNNSPEAHTVEAPSPETICEMITDVVPEVESPSQMDVELVSGSPVALSPQPRCVRSGCENPPIVSKDWDNEYCSNECVVKHCRDVFLAWVASRNSNTVVFVK

SEQ ID NO: 36025 - protein, 595 aa, Homo sapiens
MEFPGGNDNYLTITGPSHPFLSGAETFHTPSLGDEEFEIPPISLDSDPSLAVSDVVGHFDDLADPSSSQDGSFSAQYGVQTLDHSIGTQYSANPPVTIDVPMTDMTSGLMGHSQLTTIDQSELSSQLGLSLGGGTILPPAQSPEDRLSTTPSPTSSLHEDGVEDFRRQLPSQKTVVVEAGKKQKAPKKRKKKDPNEPQKPVSAYALFFRDTQAAIKGQNPNATFGEVSKIVASMWDSLGEEQKQVYKRKTEAAKKEYLKALAAYKDNQECQATVETVELDPAPPSQTPSPPPMATVDPASPAPASIEPPALSPSIVVNSTLSSYVANQASSGAGGQPNITKLIITKQMLPSSITMSQGGMVTVIPATVVTSRGLQLGQTSTATIQPSQQAQIVTRSVLQAAAAAAAAASMQLPPPRLQPPPLQQMPQPPTQQQVTILQQPPPLQAMQQPPPQKVRINLQQQPPPLQIKSVPLPTLKMQTTLVPPTVESSPERPMNNSPEAHTVEAPSPETICEMITDVVPEVESPSQMDVELVSGSPVALSPQPRCVRSGCENPPIVSKDWDNEYCSNECVVKHCRDVFLAWVASRNSNTVVFVK

SEQ ID NO: 36026 - protein, 170 aa, Homo sapiens
MQNRTGLILCALALLMGFLMVCLGAFFISWGSIFDCQGSLIAAYLLLPLGFVILLSGIFWSNYRQVTESKGVLRHMLRQHLAHGALPVATVDRPDFYPPAYEESLEVEKQSCPAEREASGIPPPLYTETGLEFQDGNDSHPEAPPSYRESIAGLVVTAISEDAQRRGQEC

SEQ ID NO: 36027 - protein, 915 aa, Homo sapiens
MANINLKEITLIVGVVTACYWNSLFCGFVFDDVSAILDNKDLHPSTPLKTLFQNDFWGTPMSEERSHKSYRPLTVLTFRLNYLLSELKPMSYHLLNMIFHAVVSVIFLKVCKLFLDNKSSVIASLLFAVHPIHTEAVTGVVGRAELLSSIFFLAAFLSYTRSKGPDNSIIWTPIALTVFLVAVATLCKEQGITVVGICCVYEVFIAQGYTLPLLCTTAGQFLRGKGSIPFSMLQTLVKLIVLMFSTLLLVVIRVQVIQSQLPVFTRFDNPAAVSPTPTRQLTFNYLLPVNAWLLLNPSELCCDWTMGTIPLIESLLDIRNLATFTFFCFLGMLGVFSIRYSGDSSKTVLMALCLMALPFIPASNLFFPVGFVVAERVLYVPSMGFCILVAHGWQKISTKSVFKKLSWICLSMVILTHSLKTFHRNWDWESEYTLFMSALKVNKNNAKLWNNVGHALENEKNFERALKYFLQATHVQPDDIGAHMNVGRTYKNLNRTKEAEESYMMAKSLMPQIIPGKKYAARIAPNHLNVYINLANLIRANESRLEEADQLYRQAISMRPDFKQAYISRGELLLKMNKPLKAKEAYLKALELDRNNADLWYNLAIVHIELKEPNEALKKNFNRALELNPKHKLALFNSAIVMQESGEVKLRPEARKRLLSYINEEPLDANGYFNLGMLAMDDKKDNEAEIWMKKAIKLQADFRSALFNLALLYSQTAKELKALPILEELLRYYPDHIKGLILKGDILMNQKKDILGAKKCFERILEMDPSNVQGKHNLCVVYFEEKDLLKAERCLLETLALAPHEEYIQRHLNIVRDKISSSSFIEPIFPTSKISSVEGKKIPTESVKEIRGESRQTQIVKTSDNKSQSKSNKQLGKNGDEETPHKTTKDIKEIEKKRVAALKRLEEIERILNGE

SEQ ID NO: 36028 - protein, 914 aa, Homo sapiens
MANINLKEITLIVGVVTACYWNSLFCGFVFDDVSAILDNKDLHPSTPLKTLFQNDFWGTPMSEERSHKSYRPLTVLTFRLNYLLSELKPMSYHLLNMIFHAVVSVIFLKVCKLFLDNKSSVIASLLFAVHPIHTEAVTGVVGRAELLSSIFFLAAFLSYTRSKGPDNSIIWTPIALTVFLVAVATLCKEQGITVVGICCVYEVFIAQGYTLPLLCTTAGQFLRGKGSIPFSMLQTLVKLIVLMFSTLLLVVIRVQVIQSQLPVFTRFDNPAAVSPTPTRQLTFNYLLPVNAWLLLNPSELCCDWTMGTIPLIESLLDIRNLATFTFFCFLGMLGVFSIRYSGDSSKTVLMALCLMALPFIPASNLFFPVGFVVAERVLYVPSMGFCILVAHGWQKISTKSVFKKLSWICLSMVILTHSLKTFHRNWDWESEYTLFMSALKVNKNNAKLWNNVGHALENEKNFERALKYFLQATHVQPDDIGAHMNVGRTYKNLNRTKEAEESYMMAKSLMPQIIPGKKYAARIAPNHLNVYINLANLIRANESRLEEADQLYRQAISMRPDFKQAYISRGELLLKMNKPLKAKEAYLKALELDRNNADLWYNLAIVHIELKEPNEALKNFNRALELNPKHKLALFNSAIVMQESGEVKLRPEARKRLLSYINEEPLDANGYFNLGMLAMDDKKDNEAEIWMKKAIKLQADFRSALFNLALLYSQTAKELKALPILEELLRYYPDHIKGLILKGDILMNQKKDILGAKKCFERILEMDPSNVQGKHNLCVVYFEEKDLLKAERCLLETLALAPHEEYIQRHLNIVRDKISSSSFIEPIFPTSKISSVEGKKIPTESVKEIRGESRQTQIVKTSDNKSQSKSNKQLGKNGDEETPHKTTKDIKEIEKKRVAALKRLEEIERILNGE

SEQ ID NO: 36029 - protein, 581 aa, Homo sapiens
MGEKMAEEERFPNTTHEGFNVTLHTTLVVTTKLVLPTPGKPILPVQTGEQAQQEEQSSGMTIFFSLLVLAICIILVHLLIRYRLHFLPESVAVVSLGILMGAVIKIIEFKKLANWKEEEMFRPNMFFLLLLPPIIFESGYSLHKGNFFQNIGSITLFAVFGTAISAFVVGGGIYFLGQADVISKLNMTDSFAFGSLISAVDPVATIAIFNALHVDPVLNMLVFGESILNDAVSIVLTNTAEGLTRKNMSDVSGWQTFLQALDYFLKMFFGSAALGTLTGLISALVLKHIDLRKTPSLEFGMMIIFAYLPYGLAEGISLSGIMAILFSGIVMSHYTHHNLSPVTQILMQQTLRTVAFLCETCVFAFLGLSIFSFPHKFEISFVIWCIVLVLFGRAVNIFPLSYLLNFFRDHKITPKMMFIMWFSGLRGAIPYALSLHLDLEPMEKRQLIGTTTIVIVLFTILLLGGSTMPLIRLMDIEDAKAHRRNKKDVNLSKTEKMGNTVESEHLSELTEEEYEAHYIRRQDLKGFVWLDAKYLNPFFTRRLTQEDLHHGRIQMKTLTNKWYEEVRQGPSGSEDDEQELL

SEQ ID NO: 36030 - protein, 597 aa, Homo sapiens
MGEKMAEEERFPNTTHEGFNVTLHTTLVVTTKLVLPTPGKPILPVQTGEQAQQEEQSSGMTIFFSLLVLAICIILVHLLIRYRLHFLPESVAVVSLGILMGAVIKIIEFKKLANWKEEEMFRPNMFFLLLLPPIIFESGYSLHKGNFFQNIGSITLFAVFGTAISAFVVGGGIYFLGQGFFFVCVCVFVCFILQADVISKLNMTDSFAFGSLISAVDPVATIAIFNALHVDPVLNMLVFGESILNDAVSIVLTNTAEGLTRKNMSDVSGWQTFLQALDYFLKMFFGSAALGTLTGLISALVLKHIDLRKTPSLEFGMMIIFAYLPYGLAEGISLSGIMAILFSGIVMSHYTHHNLSPVTQILMQQTLRTVAFLCETCVFAFLGLSIFSFPHKFEISFVIWCIVLVLFGRAVNIFPLSYLLNFFRDHKITPKMMFIMWFSGLRGAIPYALSLHLDLEPMEKRQLIGTTTIVIVLFTILLLGGSTMPLIRLMDIEDAKAHRRNKKDVNLSKTEKMGNTVESEHLSELTEEEYEAHYIRRQDLKGFVWLDAKYLNPFFTRRLTQEDLHHGRIQMKTLTNKWYEEVRQGPSGSEDDEQELL

SEQ ID NO: 36031 - protein, 205 aa, Homo sapiens
MAARDATSGSLSEESSALDLPSACDIRDYVLQGPSQEANSEAFSSLEFHSFPYSSDVDPDTSNLNIEQNNSWTAENFWLDPAVKGQSEKEEDDGLRKSLDRFYEMFGHPQPGSANSLSASVCKCLSQKITQLRGQESQKYALRSFQMARVIFNRDGCSVLQRHSRDTHFYPLEEGSTSLDDEKPNPGLSKDITHFLLQQNVMKDL

SEQ ID NO: 36032 - protein, 151 aa, Homo sapiens
MAARDATSGSLSEESSALDLPSACDIRDYVLQGPSQEANSEAFSSLEFHSFPYSSDVDPDTSNLNIEQNNSWTAENFWLDPAVKGQSEKEEDDGLRKSLDRFYEMFGHPQPGSANSLSASVCKCLSQKITQLRGQESQKYALLQQNVMKDL

SEQ ID NO: 36033 - protein, 835 aa, Homo sapiens
MSGGSQVHIFWGAPIAPLKITVSEDTASLMSVADPWKKIQLLYSQHSLYLKDEKQHKNLENYKVPESIGSPDLSGHFLANCMNRHVHVKDDFVRSVSETQNIESQKIHSSRLSDITSSNMQICGFKSTVPHFTEEEKYQKLLSENKIRDEQPKHQPDICGKNFNTNLFQLGHKCAAVLDLVCSTEKINIGPEVVQRECVPTEYHEIQNQCLGLFSSNAVDKSRSEAAVRKVSDLKISTDTEFLSIITSSQVAFLAQKKDKRRSPVNKGNVNMETEPKASYGEIRIPEENSIQLDGFTEAYESGQNQAYSLELFSPVCPKTENSRIHINSDKGLEEHTGSQELFSSEDELPPNEIRIELCSSGILCSQLNTFHKSAIKRSCTSEDKVGQSEALSRVLQVAKKMKLISNGGDSAVEMDRRNVSEFKSIKKTSLIKNCDSKSQKYNCLVMVLSPCHVKEINIKFGPNSGSKVPLATVTVIDQSETKKKVFLWRTAAFWAFTVFLGDIILLTDVVIHEDQWIGETVLQSTFSSQLLNLGSYSSIQPEEYSSVVSEVVLQDLLAYVSSKHSYLRDLPPRQPQRVNSIDFVELEHLQPDVLVHAVLRVVDFTILTEAVYSYRGQKQKKVMLTVEQAQDQHYALVLWGPGAAWYPQLQRKKGVVLIKAQISELAFPITASQKIALNAHSSLKSIFSSLPNIVYTGCAKCGLELETDENRIYKQCFSCLPFTMKKIYYRPALMTAIDGRHDVCIRVESKLIEKILLNISADCLNRVIVPSSEITYGMVVADLFHSLLAVSAEPCVLKIQSLFVLDENSYPLQQDFSLLDFYPDIVKHGANARL

SEQ ID NO: 36034 - protein, 904 aa, Homo sapiens
MSGGSQVHIFWGAPIAPLKITVSEDTASLMSVADPWKKIQLLYSQHSLYLKDEKQHKNLENYKVPESIGSPDLSGHFLANCMNRHVHVKDDFVRSVSETQNIESQKIHSSRLSDITSSNMQICGFKSTVPHFTEEEKYQKLLSENKIRDEQPKHQPDICGKNFNTNLFQLGHKCAAVLDLVCSTEKINIGPEVVQRECVPTEYHEIQNQCLGLFSSNAVDKSRSEAAVRKVSDLKISTDTEFLSIITSSQVAFLAQKKDKRRSPVNKGNVNMETEPKASYGEIRIPEENSIQLDGFTEAYESGQNQAYSLELFSPVCPKTENSRIHINSDKGLEEHTGSQELFSSEDELPPNEIRIELCSSGILCSQLNTFHKSAIKRSCTSEDKVGQSEALSRVLQVAKKMKLISNGGDSAVEMDRRNVSEFKSIKKTSLIKNCDSKSQKYNCLVMVLSPCHVKEINIKFGPNSGSKVPLATVTVIDQSETKKKVFLWRTAAFWAFTVFLGDIILLTDVVIHEDQWIGETVLQSTFSSQLLNLGSYSSIQPEEYSSVVSEVVLQDLLAYVSSKHSYLRDLPPRQPQRVNSIDFVELEHLQPDVLVHAVLRVVDFTILTEAVYSYRGQKQKKVMLTVEQAQDQHYALVLWGPGAAWYPQLQRKKGYIWEFKYLFVQCNYTLENLELHTTPWSSCECLFDDDIRAITFKAKFQKSAPSFVKISDLATHLEDKCSGVVLIKAQISELAFPITASQKIALNAHSSLKSIFSSLPNIVYTGCAKCGLELETDENRIYKQCFSCLPFTMKKIYYRPALMTAIDGRHDVCIRVESKLIEKILLNISADCLNRVIVPSSEITYGMVVADLFHSLLAVSAEPCVLKIQSLFVLDENSYPLQQDFSLLDFYPDIVKHGANARL

SEQ ID NO: 36035 - protein, 798 aa, Homo sapiens
MALQMFVTYSPWNCLLLLVALECSEASSDLNESANSTAQYASNAWFAAASSEPEEGISVFELDYDYVQIPYEVTLWILLASLAKIGFHLYHRLPGLMPESCLLILVGALVGGIIFGTDHKSPPVMDSSIYFLYLLPPIVLEGGYFMPTRPFFENIGSILWWAVLGALINALGIGLSLYLICQVKAFGLGDVNLLQNLLFGSLISAVDPVAVLAVFEEARVNEQLYMMIFGEALLNDGITVVLYNMLIAFTKMHKFEDIETVDILAGCARFIVVGLGGVLFGIVFGFISAFITRFTQNISAIEPLIVFMFSYLSYLAAETLYLSGILAITACAVTMKKYVEENVSQTSYTTIKYFMKMLSSVSETLIFIFMGVSTVGKNHEWNWAFICFTLAFCQIWRAISVFALFYISNQFRTFPFSIKDQCIIFYSGVRGAGSFSLAFLLPLSLFPRKKMFVTATLVVIYFTVFIQGITVGPLVRYLDVKKTNKKESINEELHIRLMDHLKAGIEDVCGHWSHYQVRDKFKKFDHRYLRKILIRKNLPKSSIVSLYKKLEMKQAIEMVETGILSSTAFSIPHQAQRIQGIKRLSPEDVESIRDILTSNMYQVRQRTLSYNKYNLKPQTSEKQAKEILIRRQNTLRESMRKGHSLPWGKPAGTKNIRYLSYPYGNPQSAGRDTRAAGFSDDDSSDPGSPSITFSACSRIGSLQKQEAQEIIPMKSLHRGRKAFSFGYQRNTSQEEYLGGVRRVALRPKPLFHAVDEEGESGGESEGKASLVEVRSRWTADHGHGRDHHRSHSPLLQKK

SEQ ID NO: 36036 - protein, 896 aa, Homo sapiens
MLRAALSLLALPLAGAAEEPTQKPESPGEPPPGLELFRWQWHEVEAPYLVALWILVASLAKIVFHLSRKVTSLVPESCLLILLGLVLGGIVLAVAKKAEYQLEPGTFFLFLLPPIVLDSGYFMPSRLFFDNLGAILTYAVVGTLWNAFTTGAALWGLQQAGLVAPRVQAGLLDFLLFGSLISAVDPVAVLAVFEEVHVNETLFIIVFGESLLNDAVTVVLYKVCNSFVEMGSANVQATDYLKGVASLFVVSLGGAAVGLVFAFLLALTTRFTKRVRIIEPLLVFLLAYAAYLTAEMASLSAILAVTMCGLGCKKYVEANISHKSRTTVKYTMKTLASCAETVIFMLLGISAVDSSKWAWDSGLVLGTLIFILFFRALGVVLQTWVLNQFRLVPLDKIDQVVMSYGGLRGAVAFALVILLDRTKVPAKDYFVATTIVVVFFTVIVQGLTIKPLVKWLKVKRSEHHKPTLNQELHEHTFDHILAAVEDVVGHHGYHYWRDRWEQFDKKYLSQLLMRRSAYRIRDQIWDVYYRLNIRDAISFVDQGGHVLSSTGLTLPSMPSRNSVAETSVTNLLRESGSGACLDLQVIDTVRSGRDREDAVMHHLLCGGLYKPRRRYKASCSRHFISEDAQERQDKEVFQQNMKRRLESFKSTKHNICFTKSKPRPRKTGRRKKDGVANAEATNGKHRGLGFQDTAAVILTVESEEEEEESDSSETEKEDDEGIIFVARATSEVLQEGKVSGSLEVCPSPRIIPPSPTCAEKELPWKSGQGDLAVYVSSETTKIVPVDMQTGWNQSISSLESLASPPCNQAPILTCLPPHPRGTEEPQVPLHLPSDPRSSFAFPPSLAKAGRSRSESSADLPQQQELQPLMGHKDHTHLSPGTATSHWCIQFNRGSRL

SEQ ID NO: 36037 - protein, 725 aa, Homo sapiens
MEPGDAARPGSGRATGAPPPRLLLLPLLLGWGLRVAAAASASSSGAAAEDSSAMEELATEKEAEESHRQDSVSLLTFILLLTLTILTIWLFKHRRVRFLHETGLAMIYGLIVGVILRYGTPATSGRDKSLSCTQEDRAFSTLLVNVSGKFFEYTLKGEISPGKINSVEQNDMLRKVTFDPEVFFNILLPPIIFHAGYSLKKRHFFRNLGSILAYAFLGTAVSCFIIGNLMYGVVKLMKIMGQLSDKFYYTDCLFFGAIISATDPVTVLAIFNELHADVDLYALLFGESVLNDAVAIVLSSSIVAYQPAGLNTHAFDAAAFFKSVGIFLGIFSGSFTMGAVTGVNANVTKFTKLHCFPLLETALFFLMSWSTFLLAEACGFTGVVAVLFCGITQAHYTYNNLSVESRSRTKQLFEVLHFLAENFIFSYMGLALFTFQKHVFSPIFIIGAFVAIFLGRAAHIYPLSFFLNLGRRHKIGWNFQHMMMFSGLRGAMAFALAIRDTASYARQMMFTTTLLIVFFTVWIIGGGTTPMLSWLNIRVGVEEPSEEDQNEHHWQYFRVGVDPDQDPPPNNDSFQVLQGDGPDSARGNRTKQESAWIFRLWYSFDHNYLKPILTHSGPPLTTTLPAWCGLLARCLTSPQVYDNQEPLREEDSDFILTEGDLTLTYGDSTVTANGSSSSHTASTSLEGSRRTKSSSEEVLERDLGMGDQKVSSRGTRLVFPLEDNA

SEQ ID NO: 36038 - protein, 385 aa, Homo sapiens
MKWSVRGACAALSSCLLLACALSAAAVGLKCFSLGSELRGEPFRLGAAAGAFYSGLLLAAGLSLLGAALLCCGPRDAPLAGSEPGPGLGVPAAPAGAPEATPGESGAAAGAPGPVSSQNLLLLGVLVFMLGVLSAFAGAVIDGDTVSLVERKYSHYCLPPRAPGSSPGSAPGSTPGSAPGSAPGSAPGSAPGAPRARSTLDSATSAKCRQLKDYQRGLVLSTVFNSLECLLGLLSLLLVKNYKSSQARRGRRGRRRGGRALARPRGGSGLRAQPPASRARRGRRGRRGRRLQQRPSEASILSPEESDLAAPGDCAGFAAHHAVSYINVGVLHALDEAGAEVRCGGHPSVELPGYAPSDPDLNASYPYCCRPPCETPRPWETHRAC

SEQ ID NO: 36039 - protein, 418 aa, Homo sapiens
MRSLLLLSAFCLLEAALAAEVKKPAAAAAPGTAEKLSPKAATLAERSAGLAFSLYQAMAKDQAVENILVSPVVVASSLGLVSLGGKATTASQAKAVLSAEQLRDEEVHAGLGELLRSLSNSTARNVTWKLGSRLYGPSSVSFADDFVRSSKQHYNCEHSKINFRDKRSALQSINEWAAQTTDGKLPEVTKDVERTDGALLVNAMFFKPHWDEKFHHKMVDNRGFMVTRSYTVGVMMMHRTGLYNYYDDEKEKLQIVEMPLAHKLSSLIILMPHHVEPLERLEKLLTKEQLKIWMGKMQKKAVAISLPKGVVEVTHDLQKHLAGLGLTEAIDKNKADLSRMSGKKDLYLASVFHATAFELDTDGNPFDQDIYGREELRSPKLFYADHPFIFLVRDTQSGSLLFIGRLVRPKGDKMRDEL

SEQ ID NO: 36040 - protein, 492 aa, Homo sapiens
MNRGGGSPSAAANYLLCTNCRKVLRKDKRIRVSQPLTRGPSAFIPEKEVVQANTVDERTNFLVEEYSTSGRLDNITQVMSLHTQYLESFLRSQFYMLRMDGPLPLPYRHYIAIMAAARHQCSYLINMHVDEFLKTGGIAEWLNGLEYVPQRLKNLNEINKLLAHRPWLITKEHIQKLVKTGENNWSLPELVHAVVLLAHYHALASFVFGSGINPERDPEISNGFRLISVNNFCVCDLANDNNIENASLSGSNFGIVDSLSELEALMERMKRLQEEREDEEASQEEMSTRFEKEKKESLFVVSGDTFHSFPHSDFEDDMIITSDVSRYIEDPGFGYEDFARRGEEHLPTFRAQDYTWENHGFSLVNRLYSDIGHLLDEKFRMVYNLTYNTMATHEDVDTTMLRRALFNYVHCMFGIRYDDYDYGEVNQLLERSLKVYIKTVTCYPERTTKRMYDSYWRQFKHSEKVHVNLLLMEARMQAELLYALRAITRHLT

SEQ ID NO: 36041 - protein, 321 aa, Homo sapiens
MNRGGGSPSAAANYLLCTNCRKVLRKDKRIRVSQPLTRGPSAFIPEKEVVQANTVDERTNFLVEEYSTSGRLDNITQVMSLHTQYLESFLRSQFYMLRMDGPLPLPYRHYIAIMAAARHQCSYLINMHVDEFLKTGGIAEWLNGLEYVPQRLKNLNEINKLLAHRPWLITKEHIQKLVKTGENNWSLPELVHAVVLLAHYHALASFVFGSGINPERDPEISNGFRLISVNNFCVCDLANDNNIENASLSGSNFGIVDSLSELEALMERMKRLQEEREDEEASQEEMSTRFEKEKKESLFVVSGDTFHSFPHSGAFLHFFAF

SEQ ID NO: 36042 - protein, 353 aa, Homo sapiens
MSLHTQYLESFLRSQFYMLRMDGPLPLPYRHYIAIMKLVKTGENNWSLPELVHAVVLLAHYHALASFVFGSGINPERDPEISNGFRLISVNNFCVCDLANDNNIENASLSGSNFGIVDSLSELEALMERMKRLQEEREDEEASQEEMSTRFEKEKKESLFVVSGDTFHSFPHSDFEDDMIITSDVSRYIEDPGFGYEDFARRGEEHLPTFRAQDYTWENHGFSLVNRLYSDIGHLLDEKFRMVYNLTYNTMATHEDVDTTMLRRALFNYVHCMFGIRYDDYDYGEVNQLLERSLKVYIKTVTCYPERTTKRMYDSYWRQFKHSEKVHVNLLLMEARMQAELLYALRAITRHLT

SEQ ID NO: 36043 - protein, 1124 aa, Homo sapiens
MSSYFWAQNESNRPDLLCGQPADYLVEEKHFTTLVCFIVVLGGLLKMCLKNCEVIVLTILSLSGFVIGHMAYNSVEVHQIVYPLLRTSSFSLYSYFSPLIIFMVALDVEFYTLKKMFWQVLLTGLISFSTASIIIGYVVIKFNKDSWDLQSCLLFSITLGIIDPLRSVNSLKTIGISKIYIDLIRGESLIICSIASIFFGNFRGNRIHFSIFRDLHVGIELSYDILGSIIFGYWCAKIIQCILADVFSNMLTNIILCFSMVYMTFYIVEFLGMSGTLALAAVGLNLDSLTFKPKIELVITKFLRIFSSVYEHLIYAFFGIVIGCGELSHYEFHTIPFIFILFTTVNLVRLLTILLVSPILMHSNYEYNWRWGVVITWSGIKGVFNLLWAPDVYNLAERKVEVPQMFILYVQVISLLTMGINSYVMTQSARKLDLCVLSLPRQMILQNATQHIQEIVQNTITLFKTEKILTNVNWTLVEDKTRIEYIPFSHVSHNDMKTESTTDEALMEEARLHVAAIQMSSFEKQRNNGILEIEAARILIGAAKCYYSIQGKFMSIYDVSTYMRTRSWLIKFKNVLTFLEYCIEKIHFIPPESNTFLTFIFHIVFSEEFEYTGQIINLIYIYPMIIHLWPMARGLNVSALISINYYFMFLYVLESTLKIIILKRKYFQQCWNTLEFFILVIGIIDIFCVYFVKLRPDNLALIQLTVIMGYLRIIRFLPLFKIIVPILIRIADVQIKKRLSLMYSITKGYIKSQEDAKLLIKQIAVCESIYQKLCEILETNKQDAVKELVLMEHEGRDVVIALKTKQAIRNVIAKALKNLTFLCSRGIIDKHEVIEINKVLLKKLKALNNFPKAIPPPTPDIYLHNIIWLEGKDVLIDFFKERAKLACFDSGDTICKGGEMPQGIYLIISGMAILHSLSPTFGIESNQRCDRGSRDMFTEFCTTGDIIGELSCLLKREIEYTVICETSLQACFISLEDLYEGFDAFWPSLEYKIWLKLALSTAYQYFESSLIDEDLRFQNCVMFNQAYVETLSSYSDMIIDNMTMKFVIIVYGSVIDTKTEEPYFAPCIIPTTCEQVQGTSDLSKLLIIQASELTQRNSNTNVMASVNTVFEQPGKNINGRQKMS

SEQ ID NO: 36044 - protein, 1966 aa, Homo sapiens
MENSHPPHHHHQQPPPQPGPSGERRNHHWRSYKLMIDPALKKGHHKLYRYDGQHFSLAMSSNRPVEIVEDPRVVGIWTKNKELELSVPKFKIDEFYVGPVPPKQVTFAKLNDNIRENFLRDMCKKYGEVEEVEILYNPKTKKHLGIAKVVFATVRGAKDAVQHLHSTSVMGNIIHVELDTKGETRMRFYELLVTGRYTPQTLPVGELDAVSPIVNETLQLSDALKRLKDGGLSAGCGSGSSSVTPNSGGTPFSQDTAYSSCRLDTPNSYGQGTPLTPRLGTPFSQDSSYSSRQPTPSYLFSQDPAVTFKARRHESKFTDAYNRRHEHHYVHNSPAVTAVAGATAAFRGSSDLPFGAVGGTGGSSGPPFKAQPQDSATFAHTPPPAQATPAPGFKSAFSPYQTPVAHFPPPPEEPTATAAFGARDSGEFRRAPAPPPLPPAEPLAKEKPGTPPGPPPPDTNSMELGGRPTFGWSPEPCDSPGTPTLESSPAGPEKPHDSLDSRIEMLLKEQRTKLLFLREPDSDTELQMEGSPISSSSSQLSPLAPFGTNSQPGFRGPTPPSSRPSSTGLEDISPTPLPDSDEDEELDLGLGPRPPPEPGPPDPAGLLSQTAEVALDLVGDRTPTSEKMDEGQQSSGEDMEISDDEMPSAPITSADCPKPMVVTPGAAAVAAPSVLAPTLPLPPPPGFPPLPPPPPPPPPQPGFPMPPPLPPPPPPPPPAHPAVTVPPPPLPAPPGVPPPPILPPLPPFPPGLFPVMQVDMSHVLGGQWGGMPMSFQMQTQVLSRLMTGQGACPYPPFMAAAAAAASAGLQFVNLPPYRGPFSLSNSGPGRGQHWPPLPKFDPSVPPPGYMPRQEDPHKATVDGVLLVVLKELKAIMKRDLNRKMVEVVAFRAFDEWWDKKERMAKASLTPVKSGEHKDEDRPKPKDRIASCLLESWGKGEGLGYEGLGLGIGLRGAIRLPSFKVKRKEPPDTTSSGDQKRLRPSTSVDEEDEESERERDRDMADTPCELAKRDPKGVGVRRRPARPLELDSGGEEDEKESLSASSSSSASSSSGSSTTSPSSSASDKEEEQESTEEEEEAEEEEEEEVPRSQLSSSSTSSTSDKDDDDDDSDDRDESENDDEDTALSEASEKDEGDSDEEETVSIVTSKAEATSSSESSESSEFESSSESSPSSSEDEEEVVAREEEEEEEEEEMVAEESMASAGPEDFEQDGEEAALAPGAPAVDSLGMEEEVDIETEAVAPEERPSMLDEPPLPVGVEEPADSREPPEEPGLSQEGAMLLSPEPPAKEVEARPPLSPERAPEHDLEVEPEPPMMLPLPLQPPLPPPRPPRPPSPPPEPETTDASHPSVPPEPLAEDHPPHTPGLCGSLAKSQSTETVPATPGGEPPLSGGSSGLSLSSPQVPGSPFSYPAPSPSLSSGGLPRTPGRDFSFTPTFSEPSGPLLLPVCPLPTGRRDERSGPLASPVLLETGLPLPLPLPLPLPLALPAVLRAQARAPTPLPPLLPAPLASCPPPMKRKPGRPRRSPPSMLSLDGPLVRPPAGAALGRELLLLPGQPQTPVFPSTHDPRTVTLDFRNAGIPAPPPPLPPQPPPPPPPPPVEPTKLPFKELDNQWPSEAIPPGPRGRDEVTEEYMELAKSRGPWRRPPKKRHEDLVPPAGSPELSPPQPLFRPRSEFEEMTILYDIWNGGIDEEDIRFLCVTYERLLQQDNGMDWLNDTLWVYHPSTSLSSAKKKKRDDGIREHVTGCARSEGFYTIDKKDKLRYLNSSRASTDEPPADTQGMSIPAQPHASTRAGSERRSEQRRLLSSFTGSCDSDLLKFNQLKFRKKKLKFCKSHIHDWGLFAMEPIAADEMVIEYVGQNIRQVIADMREKRYEDEGIGSSYMFRVDHDTIIDATKCGNFARFINHSCNPNCYAKVITVESQKKIVIYSKQHINVNEEITYDYKFPIEDVKIPCLCGSENCRGTLN

SEQ ID NO: 36045 - protein, 1923 aa, Homo sapiens
MENSHPPHHHHQQPPPQPGPSGERRNHHWRSYKLMIDPALKKGHHKLYRYDGQHFSLAMSSNRPVEIVEDPRVVGIWTKNKELELSVPKFKIDEFYVGPVPPKQVTFAKLNDNIRENFLRDMCKKYGEVEEVEILYNPKTKKHLGIAKVVFATVRGAKDAVQHLHSTSVMGNIIHVELDTKGETRMRFYELLVTGRYTPQTLPVGELDAVSPIVNETLQLSDALKRLKDGGLSAGCGSGSSSVTPNSGGTPFSQDTAYSSCRLDTPNSYGQGTPLTPRLGTPFSQDSSYSSRQPTPSYLFSQDPAVTFKARRHESKFTDAYNRRHEHHYVHNSPAVTAVAGATAAFRGSSDLPFGAVGGTGGSSGPPFKAQPQDSATFAHTPPPAQATPAPGFKSAFSPYQTPVAHFPPPPEEPTATAAFGARDSGEFRRAPAPPPLPPAEPLAKEKPGTPPGPPPPDTNSMELGGRPTFGWSPEPCDSPGTPTLESSPAGPEKPHDSLDSRIEMLLKEQRTKLLFLREPDSDTELQMEGSPISSSSSQLSPLAPFGTNSQPGFRGPTPPSSRPSSTGLEDISPTPLPDSDEDEELDLGLGPRPPPEPGPPDPAGLLSQTAEVALDLVGDRTPTSEKMDEGQQSSGEDMEISDDEMPSAPITSADCPKPMVVTPGAAAVAAPSVLAPTLPLPPPPGFPPLPPPPPPPPPQPGFPMPPPLPPPPPPPPPAHPAVTVPPPPLPAPPGVPPPPILPPLPPFPPGLFPVMQVDMSHVLGGQWGGMPMSFQMQTQVLSRLMTGQGACPYPPFMAAAAAAASAGLQFVNLPPYRGPFSLSNSGPGRGQHWPPLPKFDPSVPPPGYMPRQEDPHKATVDGVLLVVLKELKAIMKRDLNRKMVEVVAFRAFDEWWDKKERMAKASLTPVKSGEHKDEDRPKPKDRIASCLLESWGKGEGLGYEGLGLGIGLRGAIRLPSFKVKRKEPPDTTSSGDQKRLRPSTSVDEEDEESERERDRDMADTPCELAKRDPKGVGVRRRPARPLELDSGGEEDEKESLSEEQESTEEEEEAEEEEEEEDDDDDDSDDRDESENDDEDTALSEASEKDEGDSDEEETVSIVTSKAEATSSSESSESSEFESSSESSPSSSEDEEEVVAREEEEEEEEEEMVAEESMASAGPEDFEQDGEEAALAPGAPAVDSLGMEEEVDIETEAVAPEERPSMLDEPPLPVGVEEPADSREPPEEPGLSQEGAMLLSPEPPAKEVEARPPLSPERAPEHDLEVEPEPPMMLPLPLQPPLPPPRPPRPPSPPPEPETTDASHPSVPPEPLAEDHPPHTPGLCGSLAKSQSTETVPATPGGEPPLSGGSSGLSLSSPQVPGSPFSYPAPSPSLSSGGLPRTPGRDFSFTPTFSEPSGPLLLPVCPLPTGRRDERSGPLASPVLLETGLPLPLPLPLPLPLALPAVLRAQARAPTPLPPLLPAPLASCPPPMKRKPGRPRRSPPSMLSLDGPLVRPPAGAALGRELLLLPGQPQTPVFPSTHDPRTVTLDFRNAGIPAPPPPLPPQPPPPPPPPPVEPTKLPFKELDNQWPSEAIPPGPRGRDEVTEEYMELAKSRGPWRRPPKKRHEDLVPPAGSPELSPPQPLFRPRSEFEEMTILYDIWNGGIDEEDIRFLCVTYERLLQQDNGMDWLNDTLWVYHPSTSLSSAKKKKRDDGIREHVTGCARSEGFYTIDKKDKLRYLNSSRASTDEPPADTQGMSIPAQPHASTRAGSERRSEQRRLLSSFTGSCDSDLLKFNQLKFRKKKLKFCKSHIHDWGLFAMEPIAADEMVIEYVGQNIRQVIADMREKRYEDEGIGSSYMFRVDHDTIIDATKCGNFARFINHSCNPNCYAKVITVESQKKIVIYSKQHINVNEEITYDYKFPIEDVKIPCLCGSENCRGTLN

SEQ ID NO: 36046 - protein, 289 aa, Homo sapiens
MCAFPWLLLLLLLQEGSQRRLWRWCGSEEVVAVLQESISLPLEIPPDEEVENIIWSSHKSLATVVPGKEGHPATIMVTNPHYQGQVSFLDPSYSLHISNLSWEDSGLYQAQVNLRTSQISTMQQYNICVYRWLSEPQITVNFESSGEGACSMSLVCSVEKAGMDMTYSWLSRGDSTYTFHEGPVLSTSWRPGDSALSYTCRANNPISNVSSCPIPDGPFYADPNYASEKPSTAFCLLAKGLLIFLLLVILAMGLWVIRVQKRHKMPRMKKLMRNRMKLRKEAKPGSSPA

SEQ ID NO: 36047 - protein, 198 aa, Homo sapiens
MCAFPWLLLLLLLQEGSQRRLWRWCGSEEVVAVLQESISLPLEIPPDEEVENIIWSSHKSLATVVPGKEGHPATIMVTNPHYQGQVSFLDPSYSLHISNLSWEDSGLYQAQVNLRTSQISTMQQYNICVYHPNYASEKPSTAFCLLAKGLLIFLLLVILAMGLWVIRVQKRHKMPRMKKLMRNRMKLRKEAKPGSSPA

SEQ ID NO: 36048 - protein, 709 aa, Homo sapiens
MKRCRSDELQQQQGEEDGAGLEDAASHLPGADLRPGETTGANSAGGPTSDAGAAAAPNPGPRSKPPDLKKIQQLSEGSMFGHGLKHLFHSRRRSREREHQTSQDSQQHQQQQGMSDHDSPDEKERSPEMHRVSYAMSLHDLPARPTAFNRVLQQIRSRPSIKRGASLHSSSGGGSSGSSSRRTKSSSLEPQRGSPHLLRKAPQDSSLAAILHQHQCRPRSSSTTDTALLLADGSNVYLLAEEAEGIGDKVDKGDLVALSLPAGHGDTDGPISLDVPDGAPDPQRTKAAIDHLHQKILKITEQIKIEQEARDDNVAEYLKLANNADKQQVSRIKQVFEKKNQKSAQTIAQLHKKLEHYRRRLKEIEQNGPSRQPKDVLRDMQQGLKDVGANVRAGISGFGGGVVEGVKGSLSGLSQATHTAVVSKPREFASLIRNKFGSADNIAHLKDPLEDGPPEEAARALSGSATLVSSPKYGSDDECSSASASSAGAGSNSGAGPGGALGSPKSNALYGAPGNLDALLEELREIKEGQSHLEDSMEDLKTQLQRDYTYMTQCLQEERYRYERLEEQLNDLTELHQNEMTNLKQELASMEEKVAYQSYERARDIQEAVESCLTRVTKLELQQQQQQVVQLEGVENANARALLGKFINVILALMAVLLVFVSTIANFITPLMKTRLRITSTTLLVLVLFLLWKHWDSLTYLLEHVLLPS

SEQ ID NO: 36049 - protein, 631 aa, Homo sapiens
MFGHGLKHLFHSRRRSREREHQTSQDSQQHQQQQGMSDHDSPDEKERSPEMHRVSYAMSLHDLPARPTAFNRVLQQIRSRPSIKRGASLHSSSGGGSSGSSSRRTKSSSLEPQRGSPHLLRKAPQDSSLAAILHQHQCRPRSSSTTDTALLLADGSNVYLLAEEAEGIGDKVDKGDLVALSLPAGHGDTDGPISLDVPDGAPDPQRTKAAIDHLHQKILKITEQIKIEQEARDDNVAEYLKLANNADKQQVSRIKQVFEKKNQKSAQTIAQLHKKLEHYRRRLKEIEQNGPSRQPKDVLRDMQQGLKDVGANVRAGISGFGGGVVEGVKGSLSGLSQATHTAVVSKPREFASLIRNKFGSADNIAHLKDPLEDGPPEEAARALSGSATLVSSPKYGSDDECSSASASSAGAGSNSGAGPGGALGSPKSNALYGAPGNLDALLEELREIKEGQSHLEDSMEDLKTQLQRDYTYMTQCLQEERYRYERLEEQLNDLTELHQNEMTNLKQELASMEEKVAYQSYERARDIQEAVESCLTRVTKLELQQQQQQVVQLEGVENANARALLGKFINVILALMAVLLVFVSTIANFITPLMKTRLRITSTTLLVLVLFLLWKHWDSLTYLLEHVLLPS

SEQ ID NO: 36050 - protein, 469 aa, Homo sapiens
MKSKEEETAVDKGDLVALSLPAGHGDTDGPISLDVPDGAPDPQRTKAAIDHLHQKILKITEQIKIEQEARDDNVAEYLKLANNADKQQVSRIKQVFEKKNQKSAQTIAQLHKKLEHYRRRLKEIEQNGPSRQPKDVLRDMQQGLKDVGANVRAGISGFGGGVVEGVKGSLSGLSQATHTAVVSKPREFASLIRNKFGSADNIAHLKDPLEDGPPEEAARALSGSATLVSSPKYGSDDECSSASASSAGAGSNSGAGPGGALGSPKSNALYGAPGNLDALLEELREIKEGQSHLEDSMEDLKTQLQRDYTYMTQCLQEERYRYERLEEQLNDLTELHQNEMTNLKQELASMEEKVAYQSYERARDIQEAVESCLTRVTKLELQQQQQQVVQLEGVENANARALLGKFINVILALMAVLLVFVSTIANFITPLMKTRLRITSTTLLVLVLFLLWKHWDSLTYLLEHVLLPS

SEQ ID NO: 36051 - protein, 484 aa, Homo sapiens
MNQVVQPLMSRHSACRGSQAHLSWVDKGDLVALSLPAGHGDTDGPISLDVPDGAPDPQRTKAAIDHLHQKILKITEQIKIEQEARDDNVAEYLKLANNADKQQVSRIKQVFEKKNQKSAQTIAQLHKKLEHYRRRLKEIEQNGPSRQPKDVLRDMQQGLKDVGANVRAGISGFGGGVVEGVKGSLSGLSQATHTAVVSKPREFASLIRNKFGSADNIAHLKDPLEDGPPEEAARALSGSATLVSSPKYGSDDECSSASASSAGAGSNSGAGPGGALGSPKSNALYGAPGNLDALLEELREIKEGQSHLEDSMEDLKTQLQRDYTYMTQCLQEERYRYERLEEQLNDLTELHQNEMTNLKQELASMEEKVAYQSYERARDIQEAVESCLTRVTKLELQQQQQQVVQLEGVENANARALLGKFINVILALMAVLLVFVSTIANFITPLMKTRLRITSTTLLVLVLFLLWKHWDSLTYLLEHVLLPS

SEQ ID NO: 36052 - protein, 1291 aa, Homo sapiens
MSSLPGCIGLDAATATVESEEIAELQQAVVEELGISMEELRHFIDEELEKMDCVQQRKKQLAELETWVIQKESEVAHVDQLFDDASRAVTNCESLVKDFYSKLGLQYRDSSSEDESSRPTEIIEIPDEDDDVLSIDSGDAGSRTPKDQKLREAMAALRKSAQDVQKFMDAVNKKSSSQDLHKGTLSQMSGELSKDGDLIVSMRILGKKRTKTWHKGTLIAIQTVGPGKKYKVKFDNKGKSLLSGNHIAYDYHPPADKLYVGSRVVAKYKDGNQVWLYAGIVAETPNVKNKLRFLIFFDDGYASYVTQSELYPICRPLKKTWEDIEDISCRDFIEEYVTAYPNRPMVLLKSGQLIKTEWEGTWWKSRVEEVDGSLVRILFLDDKRCEWIYRGSTRLEPMFSMKTSSASALEKKQGQLRTRPNMGAVRSKGPVVQYTQDLTGTGTQFKPVEPPQPTAPPAPPFPPAPPLSPQAGDSDLESQLAQSRKQVAKKSTSFRPGSVGSGHSSPTSPALSENVSGGKPGINQTYRSPLGSTASAPAPSALPAPPAPPVFHGMLERAPAEPSYRAPMEKLFYLPHVCSYTCLSRVRPMRNEQYRGKNPLLVPLLYDFRRMTARRRVNRKMGFHVIYKTPCGLCLRTMQEIERYLFETGCDFLFLEMFCLDPYVLVDRKFQPYKPFYYILDITYGKEDVPLSCVNEIDTTPPPQVAYSKERIPGKGVFINTGPEFLVGCDCKDGCRDKSKCACHQLTIQATACTPGGQINPNSGYQYKRLEECLPTGVYECNKRCKCDPNMCTNRLVQHGLQVRLQLFKTQNKGWGIRCLDDIAKGSFVCIYAGKILTDDFADKEGLEMGDEYFANLDHIESVENFKEGYESDAPCSSDSSGVDLKDQEDGNSGTEDPEESNDDSSDDNFCKDEDFSTSSVWRSYATRRQTRGQKENGLSETTSKDSHPPDLGPPHIPVPPSIPVGGCNPPSSEETPKNKVASWLSCNSVSEGGFADSDSHSSFKTNEGGEGRAGGSRMEAEKASTSGLGIKDEGDIKQAKKEDTDDRNKMSVVTESSRNYGYNPSPVKPEGLRRPPSKTSMHQSRRLMASAQSNPDDVLTLSSSTESEGESGTSRKPTAGQTSATAVDSDDIQTISSGSEGDDFEDKKNMTGPMKRQVAVKSTRGFALKSTHGIAIKSTNMASVDKGESAPVRKNTRQFYDGEESCYIIDAKLEGNLGRYLNHSCSPNLFVQNVFVDTHDLRFPWVAFFASKRIRAGTELTWDYNYEVGSVEGKELLCCCGAIECRGRLL

SEQ ID NO: 36053 - protein, 397 aa, Homo sapiens
MSSLPGCIGLDAATATVESEEIAELQQAVVEELGISMEELRHFIDEELEKMDCVQQRKKQLAELETWVIQKESEVAHVDQLFDDASRAVTNCESLVKDFYSKLGLQYRDSSSEDESSRPTEIIEIPDEDDDVLSIDSGDAGSRTPKDQKLREAMAALRKSAQDVQKFMDAVNKKSSSQDLHKGTLSQMSGELSKDGDLIVSMRILGKKRTKTWHKGTLIAIQTVGPGKKYKVKFDNKGKSLLSGNHIAYDYHPPADKLYVGSRVVAKYKDGNQVWLYAGIVAETPNVKNKLRFLIFFDDGYASYVTQSELYPICRPLKKTWEDIEDISCRDFIEEYVTAYPNRPMVLLKSGQLIKTEWEGTWWKSRVEEVDGSLVRILFLVLFFSTILEAEVGGGGT

SEQ ID NO: 36054 - protein, 1290 aa, Homo sapiens
MSSLPGCIGLDAATATVESEEIAELQQAVVEELGISMEELRHFIDEELEKMDCVQQRKKQLAELETWVIQKESEVAHVDQLFDDASRAVTNCESLVKDFYSKLGLQYRDSSSEDESSRPTEIIEIPDEDDDVLSIDSGDAGSRTPKDQKLREAMAALRKSAQDVQKFMDAVNKKSSSQDLHKGTLSQMSGELSKDGDLIVSMRILGKKRTKTWHKGTLIAIQTVGPGKKYKVKFDNKGKSLLSGNHIAYDYHPPADKLYVGSRVVAKYKDGNQVWLYAGIVAETPNVKNKLRFLIFFDDGYASYVTQSELYPICRPLKKTWEDIEDISCRDFIEEYVTAYPNRPMVLLKSGQLIKTEWEGTWWKSRVEEVDGSLVRILFLDDKRCEWIYRGSTRLEPMFSMKTSSASALEKKQGQLRTRPNMGAVRSKGPVVQYTQDLTGTGTQFKPVEPPQPTAPPAPPFPPAPPLSPQAGDSDLESQLAQSRKQVAKKSTSFRPGSVGSGHSSPTSPALSENVSGGKPGINQTYRSPLGSTASAPAPSALPAPPAPPVFHGMLERAPAEPSYRAPMEKLFYLPHVCSYTCLSRVRPMRNEQYRGKNPLLVPLLYDFRRMTARRRVNRKMGFHVIYKTPCGLCLRTMQEIERYLFETGCDFLFLEMFCLDPYVLVDRKFQPYKPFYYILDITYGKEDVPLSCVNEIDTTPPPQVAYSKERIPGKGVFINTGPEFLVGCDCKDGCRDKSKCACHQLTIQATACTPGGQINPNSGYQYKRLEECLPTGVYECNKRCKCDPNMCTNRLVQHGLQVRLQLFKTQNKGWGIRCLDDIAKGSFVCIYAGKILTDDFADKEGLEMGDEYFANLDHIESVENFKEGYESDAPCSSDSSGVDLKDQEDGNSGTEDPEESNDDSSDDNFCKDEDFSTSSVWRSYATRRQTRGQKENGLSETTSKDSHPPDLGPPHIPVPPSIPVGGCNPPSSEETPKNKVASWLSCNSVSEGGFADSDSHSSFKTNEGGEGRAGGSRMEAEKASTSGLGIKDEGDIKQAKKEDTDDRNKMSVVTESSRNYGYNPSPVKPEGLRRPPSKTSMHQSRRLMASAQSNPDDVLTLSSSTESEGESGTSRKPTAGQTSATAVDSDDIQTISSGSEGDDFEDKKNMTGPMKRQVAVKSTRGFALKSTHGIAIKSTNMASVDKGESAPVRKNTRQFYDGEESCYIIDAKLEGNLGRYLNHSCSPNLFVQNVFVDTHDLRFPWVAFFASKIRAGTELTWDYNYEVGSVEGKELLCCCGAIECRGRLL

SEQ ID NO: 36055 - protein, 568 aa, Homo sapiens
MMAEQVKCASAGVSSGAGSGPVVNAELEVKKLQELVRKLEKQNEQLRSRAASAAAAPHLLLLPPPPPAAPPPAGLQPLGPRSPPAATATAAASGGLGPAFPGTFCLPSPAPSLLCSLAQPPEAPFVYFKPAAGFFGAGGGGPEPGGAGTPPGAAAAPPSPPPTLLDEVELLDLESVAAWRDEDDYTWLYIGSSKTFTSSEKSLTPLQWCRHVLDNPTPEMEAARRSLCFRLEQGYTSRGSPLSPQSSIDSELSTSELEDDSISMGYKLQDLTDVQIMARLQEESLRQDYASTSASVSRHSSSVSLSSGKKGTCSDQEYDQYSLEDEEEFDHLPPPQPRLPRCSPFQRGIPHSQTFSSIRECRRSPSSQYFPSNNYQQQQYYSPQAQTPDQQPNRTNGDKLRRSMPNLARMPSTTAISSNISSPVTVRNSQSFDSSLHGAGNGISRIQSCIPSPGQLQHRVHSVGHFPVSIRQPLKATAYVSPTVQGSSNMPLSNGLQLYSNTGIPTPNKAAASGIMGRSALPRPSLAINGSNLPRSKIAQPVRSFLQPPKPLSSLSTLRDGNWRDGCY

SEQ ID NO: 36056 - protein, 305 aa, Homo sapiens
MGYKLQDLTDVQIMARLQEESLRQDYASTSASVSRHSSSVSLSSGKKGTCSDQEYDQYSLEDEEEFDHLPPPQPRLPRCSPFQRGIPHSQTFSSIRECRRSPSSQYFPSNNYQQQQYYSPQAQTPDQQPNRTNGDKLRRSMPNLARMPSTTAISSNISSPVTVRNSQSFDSSLHGAGNGISRIQSCIPSPGQLQHRVHSVGHFPVSIRQPLKATAYVSPTVQGSSNMPLSNGLQLYSNTGIPTPNKAAASGIMGRSALPRPSLAINGSNLPRSKIAQPVRSFLQPPKPLSSLSTLRDGNWRDGCY

SEQ ID NO: 36057 - protein, 191 aa, Homo sapiens
MGYKLQDLTDVQIMARLQEENKLRRSMPNLARMPSTTAISSNISSPVTVRNSQSFDSSLHGAGNGISRIQSCIPSPGQLQHRVHSVGHFPVSIRQPLKATAYVSPTVQGSSNMPLSNGLQLYSNTGIPTPNKAAASGIMGRSALPRPSLAINGSNLPRSKIAQPVRSFLQPPKPLSSLSTLRDGNWRDGCY

SEQ ID NO: 36058 - protein, 426 aa, Homo sapiens
MVGVGLCLRLLLFFRFKRTLDRICVLFLLGWHRKPRSDGSLFIERLYIGSSKTFTSSEKSLTPLQWCRHVLDNPTPEMEAARRSLCFRLEQGYTSRGSPLSPQSSIDSELSTSELEDDSISMGYKLQDLTDVQIMARLQEESLRQDYASTSASVSRHSSSVSLSSGKKGTCSDQEYDQYSLEDEEEFDHLPPPQPRLPRCSPFQRGIPHSQTFSSIRECRRSPSSQYFPSNNYQQQQYYSPQAQTPDQQPNRTNGDKLRRSMPNLARMPSTTAISSNISSPVTVRNSQSFDSSLHGAGNGISRIQSCIPSPGQLQHRVHSVGHFPVSIRQPLKATAYVSPTVQGSSNMPLSNGLQLYSNTGIPTPNKAAASGIMGRSALPRPSLAINGSNLPRSKIAQPVRSFLQPPKPLSSLSTLRDGNWRDGCY

SEQ ID NO: 36059 - protein, 207 aa, Homo sapiens
MAAAWPSGPSAPEAVTARLVGVLWFVSVTTGPWGAVATSAGGEESLKCEDLKVGQYICKDPKINDATQEPVNCTNYTAHVSCFPAPNITCKDSSGNETHFTGNEVGFFKPISCRNVNGYSYKVAVALSLFLGWLGADRFYLGYPALGLLKFCTVGFCGIGSLIDFILISMQIVGPSDGSSYIIDYYGTRLTRLSITNETFRKTQLYP

SEQ ID NO: 36060 - protein, 1596 aa, Homo sapiens
MESRETLSSSRQRGGESDFLPVSSAKPPAAPGCAGEPLLSTPGPGKGIPVGGERMEPEEEDELGSGRDVDSNSNADSEKWVAGDGLEEQEFSIKEANFTEGSLKLKIQTTKRAKKPPKNLENYICPPEIKITIKQSGDQKVSRAGKNSKATKEEERSHSKKKLLTASDLAASDLKGFQPQAYERPQKHSTLHYDTGLPQDFTGDTLKPKHQQKSSSQNHMDWSTNSDSGPVTQNCFISPESGRETASTSKIPALEPVASFAKAQGKKGSAGNTWSQLSNNNKDLLLGGVAPSPSSHSSPAPPSSSAECNGLQPLVDQDGGGTKEPPEPPTVGSKKKSSKKDVISQTIPNPDLDWVKNAQKAFDNTEGKREGYSADSAQEASPARQNVSSASNPENDSSHVRITIPIKAPSLDPTNHKRKKRQSIKAVVEKIMPEKALASGITMSSEVVNRILSNSEGNKKDPRVPKLSKMIENESPSVGLETGGNAEKVIPGGVSKPRKPPMVMTPPTCTDHSPSRKLPEIQHPKFAAKRRWTCSKPKPSTMLREAVMATSDKLMLEPPSAYPITPSSPLYTNTDSLTVITPVKKKRGRPKKQPLLTVETIHEGTSTSPVSPISREFPGTKKRKRRRNLAKLAQLVPGEDKPMSEMKFHKKVGKLGVLDKKTIKTINKMKTLKRKNILNQILSCSSSVALKAKAPPETSPGAAAIESKLGKQINVSKRGTIYIGKKRGRKPRAELPPPSEEPKTAIKHPRPVSSQPDVPAVPSNFQSLVASSPAAMHPLSTQLGGSNGNLSPASTETNFSELKTMPNLQPISALPTKTQKGIHSGTWKLSPPRLMANSPSHLCEIGSLKEITLSPVSESHSEETIPSDSGIGTDNNSTSDQAEKSSESRRRYSFDFCSLDNPEAIPSDTSTKNRHGHRQKHLIVDNFLAHESLKKPKHKRKRKSLQNRDDLQFLADLEELITKFQVFRISHRSYTFYHENPYPSIFRINFDHYYPVPYIQYDPLLYLRRTSDLKSKKKRGRPAKTNDTMTKVPFLQGFSYPIPSGSYYAPYGMPYTSMPMMNLGYYGQYPAPLYLSHTLGAASPFMRPTVPPPQFHTNSHVKMSGAAKHKAKHGVHLQGPVSMGLGDMQPSLNPPKVGSASLSSGRLHKRKHKHKHKHKEDRILGTHDNLSGLFAGKATGFSSHILSERLSSADKELPLVSEKNKHKEKQKHQHSEAGHKASKNNFEVDTLSTLSLSDAQHWTQAKEKGDLSSEPVDSCTKRYSGSGGDGGSTRSENLDVFSEMNPSNDKWDSDVSGSKRRSYEGFGTYREKDIQAFKMNRKERSSYDSSMSPGMPSPHLKVDQTAVHSKNEGSVPTMMTRKKPAAVDSVTIPPAPVLSLLAASAATSDAVGSSLKKRFKRREIEAIQCEVRKMCNYTKILSTKKNLDHVNKILKAKRLQRQSKTGNNFVKKRRGRPRKQPTQFDEDSRDQMPVLEKCIDLPSKRGQKPSLSPLVLEPAASQDTIMATIEAVIHMAREAPPLPPPPPPPLPPPPPPPLPPPPPLPKTPRGGKRKHKPQAPAQPPQQSPPQQPLPQEEEVKAKRQRKSRGSESEVLP

SEQ ID NO: 36061 - protein, 242 aa, Homo sapiens
MESRETLSSSRQRGGESDFLPVSSAKPPAAPGCAGEPLLSTPGPGKGIPVGGERMEPEEEDELGSGRDVDSNSNADSEKWVAGDGLEEQEFSIKEANFTEGSLKLKIQTTKRAKKPPKNLENYICPPEIKITIKQSGDQKVSRAGKNSKATKEEERSHSKKKLLTASDLAASDLKGFQPQIKDSSKEEVWKRRGGQGIPFKKQFLSQERAMCFSCPRNPFPAKPGSLTLPFHSEPAVWAQEV

SEQ ID NO: 36062 - protein, 222 aa, Homo sapiens
MPKVVSRSVVCSDTRDREEYDDGEKPLHVYYCLCGQMVLVLDCQLEKLPMRPRDRSRVIDAAKHAHKFCNTEDEETMYLRRPEGIERQYRKKCAKCGLPLFYQSQPKNAPVTFIVDGAVVKFGQGFGKTNIYTQKQEPPKKVMMTKRTKDMGKFSSVTVSTIDEEEEEIEAREVADSYAQNAKVIEKQLERKGMSKRRLQELAELEAKKAKMKGTLIDNQFK

SEQ ID NO: 36063 - protein, 173 aa, Homo sapiens
MRPRDRSRVIDAAKHAHKFCNTEDEETMYLRRPEGIERQYRKKCAKCGLPLFYQSQPKNAPVTFIVDGAVVKFGQGFGKTNIYTQKQEPPKKVMMTKRTKDMGKFSSVTVSTIDEEEEEIEAREVADSYAQNAKVIEKQLERKGMSKRRLQELAELEAKKAKMKGTLIDNQFK

SEQ ID NO: 36064 - protein, 208 aa, Homo sapiens
MPKVVSRSVVCSDTRDREEYDDGEKPLHVYYCLCGQMVLVLDCQLEKLPMRPRDRSRVIDAAKHAHKFCNTEDEETMYLRRCGLPLFYQSQPKNAPVTFIVDGAVVKFGQGFGKTNIYTQKQEPPKKVMMTKRTKDMGKFSSVTVSTIDEEEEEIEAREVADSYAQNAKVIEKQLERKGMSKRRLQELAELEAKKAKMKGTLIDNQFK

SEQ ID NO: 36065 - protein, 484 aa, Homo sapiens
MSNTTVVPSTAGPGPSGGPGGGGGGGGGGGGTEVIQVTNVSPSASSEQMRTLFGFLGKIDELRLFPPDDSPLPVSSRVCFVKFHDPDSAVVAQHLTNTVFVDRALIVVPYAEGVIPDEAKALSLLAPANAVAGLLPGGGLLPTPNPLTQIGAVPLAALGAPTLDPALAALGLPGANLNSQSLAADQLLKLMSTVDPKLNHVAAGLVSPSLKSDTSSKEIEEAMKRVREAQSLISAAIEPDKKEEKRRHSRSRSRSRRRRTPSSSRHRRSRSRSRRRSHSKSRSRRRSKSPRRRRSHSRERGRRSRSTSKTRDKKKEDKEKKRSKTPPKSYSTARRSRSASRERRRRRSRSGTRSPKKPRSPKRKLSRSPSPRRHKKEKKKDKDKERSRDERERSTSKKKKSKDKEKDRERKSESDKDVKQVTRDYDEEEQGYDSEKEKKEEKKPIETGSPKTKECSVEKGTGDSLRESKVNGDDHHEEDMDMSD

SEQ ID NO: 36066 - protein, 483 aa, Homo sapiens
MSNTTVVPSTAGPGPSGGPGGGGGGGGGGGGTEVIQVTNVSPSASSEQMRTLFGFLGKIDELRLFPPDDSPLPVSSRVCFVKFHDPDSAVVAQHLTNTVFVDRALIVVPYAEGVIPDEAKALSLLAPANAVAGLLPGGGLLPTPNPLTQIGAVPLAALGAPTLDPALAALGLPGANLNSQSLAADQLLKLMSTVDPKLNHVAAGLVSPSLKSDTSSKEIEEAMKRVREAQSLISAAIEPDKKEEKRRHSRSRSRSRRRRTPSSSRHRRSRSRSRRRSHSKSRSRRRSKSPRRRRSHSRERGRRSRSTSKTRDKKKEDKEKKRSKTPPKSYSTARRSRSASRERRRRRSRSGTRSPKKPRSPKRKLSRSPSPRRHKKEKKKDKDKERSRDERERSTSKKKKSKDKEKDRERKSESDKDVKVTRDYDEEEQGYDSEKEKKEEKKPIETGSPKTKECSVEKGTGDSLRESKVNGDDHHEEDMDMSD

SEQ ID NO: 36067 - protein, 436 aa, Homo sapiens
MDQPFTVNSLKKLAAMPDHTDVSLSPEERVRALSKLGCNITISEDITPRRYFRSGVEMERMASVYLEEGNLENAFVLYNKFITLFVEKLPNHRDYQQCAVPEKQDIMKKLKEIAFPRTDELKNDLLKKYNVEYQEYLQSKNKYKAEILKKLEHQRLIEAERKRIAQMRQQQLESEQFLFFEDQLKKQELARGQMRSQQTSGLSEQIDGSALSCFSTHQNNSLLNVFADQPNKSDATNYASHSPPVNRALTPAATLSAVQNLVVEGLRCVVLPEDLCHKFLQLAESNTVRGIETCGILCGKLTHNEFTITHVIVPKQSAGPDYCDMENVEELFNVQDQHDLLTLGWIHTHPTQTAFLSSVDLHTHCSYQLMLPEAIAIVCSPKHKDTGIFRLTNAGMLEVSACKKKGFHPHTKEPRLFSICKHVLVKDIKIIVLDLR

SEQ ID NO: 36068 - protein, 461 aa, Homo sapiens
MDQPFTVNSLKKLAAMPDHTDVSLSPEERVRALSKLGCNITISEDITPRRYFRSGVEMERMASVYLEEGNLENAFVLYNKFITLFVEKLPNHRDYQQCAVPEKQDIMKKLKEIAFPRTDELKNDLLKKYNVEYQEYLQSKNKYKAEILKKLEHQRLIEAERKRIAQMRQQQLESEQFLFFEDQLKKQELARGQMRSQQTSGLSEQIDGSALSCFSTHQNNSLLNVFADQPNKSDATNYASHSPPVNRALTPAATLSAVQNLVVEGLRCVVLPEDLCHKFLQLAESNTVRGIETCGILCGKLTHNEFTITHVIVPKQSAGPDYCDMENVEELFNVQDQHDLLTLGWIHTHPTQTAFLSSVDLHTHCSYQLMLPEAIAIVCSPKHKDTGIFRLTNAGMLEVSACKKKGFHPHTKEPRLFSIQKFLSGIISGTALEMEPLKIGYGPNGFPLLGISRSSSPSEQL

SEQ ID NO: 36069 - protein, 188 aa, Homo sapiens
MNGDDAFARRPTVGAQIPEKIQKAFDDIAKYFSKEEWEKMKASEKIFYVYMKRKYEAMTKLGFKATLPPFMCNKRAEDFQGNDLDNDPNRGNQVERPQMTFGRLQGISPKIMPKKPAEEGNDSEEVPEASGPQNDGKELCPPGKPTTSEKIHERSGPKRGEHAWTHRLRERKQLVIYEEISDPEEDDE

SEQ ID NO: 36070 - protein, 223 aa, Homo sapiens
MNGDDAFARRPTVGAQIPEKIQKAFDDIAKYFSKEEWEKMKASEKIFYVYMKRKYEAMTKLGFKATLPPFMCNKRAEDFQGNDLDNDPNRGNQVERPQMTFGRLQGISPKIMPKKPAEEGNDSEEVPEASGPQNDGKELCPPGKPTTSEKIHERSGNREAQEKEERRGTAHRWSSQNTHNIGRFSLSTSMGAVHGTPKTITHNRDPKGGNMPGPTDCVRENSW

SEQ ID NO: 36071 - protein, 188 aa, Homo sapiens
MNGDDAFARRPRAGAQIPEKIQKSFDDIAKYFSKKEWEKMKSLEKISYVYMKRKYEAMTKLGFKATLPPFMHNTGATDLQGNDFDNDRNQGNQVERPQMTFCRLQRIFPKIMPKKPAEEGNDSKGVPEASGSQNDGKHLCPPGKPSTSEKINKTSGPKRGKHAWTHRLRERKQLVIYEEISDPEEDDE

SEQ ID NO: 36072 - protein, 314 aa, Homo sapiens
MGSQALPPGPMQTLIFFDMEATGLPFSQPKVTELCLLAVHRCALESPPTSQGPPPTVPPPPRVVDKLSLCVAPGKACSPAASEITGLSTAVLAAHGRQCFDDNLANLLLAFLRRQPQPWCLVAHNGDRYDFPLLQAELAMLGLTSALDGAFCVDSITALKALERASSPSEHGPRKSYSLGSIYTRLYGQSPPDSHTAEGDVLALLSICQWRPQALLRWVDAHARPFGTIRPMYGVTASARTKPRPSAVTTTAHLATTRNTSPSLGESRGTKDLPPVKDPGALSREGLLAPLGLLAILTLAVATLYGLSLATPGE

SEQ ID NO: 36073 - protein, 369 aa, Homo sapiens
MGPGARRQGRIVQGRPEMCFCPPPTPLPPLRILTLGTHTPTPCSSPGSAAGTYPTMGSQALPPGPMQTLIFFDMEATGLPFSQPKVTELCLLAVHRCALESPPTSQGPPPTVPPPPRVVDKLSLCVAPGKACSPAASEITGLSTAVLAAHGRQCFDDNLANLLLAFLRRQPQPWCLVAHNGDRYDFPLLQAELAMLGLTSALDGAFCVDSITALKALERASSPSEHGPRKSYSLGSIYTRLYGQSPPDSHTAEGDVLALLSICQWRPQALLRWVDAHARPFGTIRPMYGVTASARTKPRPSAVTTTAHLATTRNTSPSLGESRGTKDLPPVKDPGALSREGLLAPLGLLAILTLAVATLYGLSLATPGE

SEQ ID NO: 36074 - protein, 304 aa, Homo sapiens
MQTLIFFDMEATGLPFSQPKVTELCLLAVHRCALESPPTSQGPPPTVPPPPRVVDKLSLCVAPGKACSPAASEITGLSTAVLAAHGRQCFDDNLANLLLAFLRRQPQPWCLVAHNGDRYDFPLLQAELAMLGLTSALDGAFCVDSITALKALERASSPSEHGPRKSYSLGSIYTRLYGQSPPDSHTAEGDVLALLSICQWRPQALLRWVDAHARPFGTIRPMYGVTASARTKPRPSAVTTTAHLATTRNTSPSLGESRGTKDLPPVKDPGALSREGLLAPLGLLAILTLAVATLYGLSLATPGE

SEQ ID NO: 36075 - protein, 493 aa, Homo sapiens
MWSRRQGRLRPTVCGVEELRRRRREREAALRKARREQQLVSKRLLRNDAPEEAGEGCVAAILGETEVQQFLRQAQRGTEEKEREGALVSLRRGLQHPETQQTFIRLEGSMRTLVGLLTSNQALLQLEAARCLHELSHSEQSTVAEACLPATSYLLTYLSSHSSDFIELCLYTLGNLIVESEAVRRQLLPQGIVPALAACIQSPHVAVLEALGYALSQLLQAEEAPEKIIPSILASTLPQHMLQMLQPGPKLNPGVAVEFAWCLHYIICSQVSNPLLIGHGALSTLGLLLLDLAGAVQKTEDAGLELLACPVLRCLSNLLTEAAVETVGGQMQLRDERVVAALFILLQFFFQKQPSLLPEGLWLLNNLTANSPSFCTSLLSLDLIEPLLQLLPVSNVVSVMVLTVLCNVAEKGPAYCQRLWPGPLLPALLHTLAFSDTEVVGQSLELLHLLFLYQPEAVQVFLQQSGLQALERHQEEAQLQDRVYALQQTALQG

SEQ ID NO: 36076 - protein, 499 aa, Homo sapiens
MWSRRQGRLRPTVCGVEELRRRRREREAALRKARREQQLVSKRLLRNDAPEEAGEGCVAAILGETEVQQFLRQAQRGTEEKEREGALVSLRRGLQHPETQQTFIRLEGSMRTLVGLLTSNQALLQLEAARCLHELSHSEQSTVAEACLPATSYLLTYLSSHSSDFIELCLYTLGNLIVESEAVRRQLLPQGIVPALAACIQSPHVAVLEALGYALSQLLQAEEAPEKIIPPASASSSILASTLPQHMLQMLQPGPKLNPGVAVEFAWCLHYIICSQVSNPLLIGHGALSTLGLLLLDLAGAVQKTEDAGLELLACPVLRCLSNLLTEAAVETVGGQMQLRDERVVAALFILLQFFFQKQPSLLPEGLWLLNNLTANSPSFCTSLLSLDLIEPLLQLLPVSNVVSVMVLTVLCNVAEKGPAYCQRLWPGPLLPALLHTLAFSDTEVVGQSLELLHLLFLYQPEAVQVFLQQSGLQALERHQEEAQLQDRVYALQQTALQG

SEQ ID NO: 36077 - protein, 423 aa, Homo sapiens
MDRGQPSLEPAAAAPRASGRCVIAPVRAVLRLRRRVCVLRKRRLLQPGGGPDVGTGAPRPGCSPRAPRADLDQPKFFTFDSPAELPSRTPRKKRRRSRLVLYPETSRKYRPRVEHRSRAQRCLLLLVAIVGFQVLNAIENLDDNAQRYDLDGLEKALQRAVFGQPAAVSRIVALMRDYLATHVHSRPLLLALHGPSGVGKSHVGRLLARHFRSVLEDSALVLQYHARHHCPEARAAQDCREELARRVADVVARAEAEEKTPLLVLDDVELMPRPLLDELHGFLQPQRSHHFHNAIYVLLSGAGGAEVTRFVLQNASRALPLRPDGFRSAEAAAAQAEEDLRASLLAVLSREHPLWQAAAIVPFLLLDKRDVVSCFRDEMAGEGFFPDQARAENLAAQLSFYRVAGREFAVTGCKQVVATVNLL

SEQ ID NO: 36078 - protein, 227 aa, Homo sapiens
MMAAGAALALALWLLMPPVEVGGAGPPPIQDGEFTFLLPAGRKQCFYQSAPANASLETEYQVIGGAGLDVDFTLESPQGVLLVSESRKADGVHTVEPTEAGDYKLCFDNSFSTISEKLVFFELIFDSLQDDEEVEGWAEAVEPEEMLDVKMEDIKESIETMRTRLERSIQMLTLLRAFEARDRNLQEGNLERVNFWSAVNVAVLLLVAVLQVCTLKRFFQDKRPVPT

SEQ ID NO: 36079 - protein, 680 aa, Homo sapiens
MLGPGSNRRRPTQGERGPGSPGEPMEKYQVLYQLNPGALGVNLVVEEMETKVKHVIKQVECMDDHYASQALEELMPLLKLRHAHISVYQELFITWNGEISSLYLCLVMEFNELSFQEVIEDKRKAKKIIDSEWMQNVLGQVLDALEYLHHLDIIHRNLKPSNIILISSDHCKLQDLSSNVLMTDKAKWNIRAEEDPFRKSWMAPEALNFSFSQKSDIWSLGCIILDMTSCSFMDGTEAMHLRKSLRQSPGSLKAVLKTMEEKQIPDVETFRNLLPLMLQIDPSDRITIKDVVHITFLRGSFKSSCVSLTLHRQMVPASITDMLLEGNVASILEVMQKFSGWPEVQLRAMKRLLKMPADQLGLPWPPELVEVVVTTMELHDRVLDVQLCACSLLLHLLGQALVHHPEAKAPCNQAITSTLLSALQSHPEEEPLLVMVYSLLAITTTQESESLSEELQNAGLLEHILEHLNSSLESRDVCASGLGLLWALLLDGIIVNKAPLEKVPDLISQVLATYPADGEMAEASCGVFWLLSLLGCIKEQQFEQVVALLLQSIRLCQDRALLVNNAYRGLASLVKVSELAAFKVVVQEEGGSGLSLIKETYQLHRDDPEVVENVGMLLVHLASYEEILPELVSSSMKALLQEIKERFTSSLVSDSSAFSKPGLPPGGSPQLGCTTSGGLE

SEQ ID NO: 36080 - protein, 213 aa, Homo sapiens
MELHDRVLDVQLCACSLLLHLLGQGIIVNKAPLEKVPDLISQVLATYPADGEMAEASCGVFWLLSLLGCIKEQQFEQVVALLLQSIRLCQDRALLVNNAYRGLASLVKVSELAAFKVVVQEEGGSGLSLIKETYQLHRDDPEVVENVGMLLVHLASYEEILPELVSSSMKALLQEIKERFTSSLVSDSSAFSKPGLPPGGSPQLGCTTSGGLE

SEQ ID NO: 36081 - protein, 225 aa, Homo sapiens
MLGPGSNRRRPTQGERGPGSPGEPMEKYQVLYQLNPGALGVNLVVEEMETKVKHVIKQVECMDDHYASQALEELMPLLKLRHAHISVYQELFITWNGEISSLYLCLVMEFNELSFQEVIEDKRKAKKIIDSEIKTEGVPNTRRFPVGDHDSRLFCRSLKFLMDSSGMLPLLSGLLPSACCCEPRGAAACTSKSCVHCLLPLCCLIALQAVYLVSFGLLPVWGYCE

SEQ ID NO: 36082 - protein, 188 aa, Homo sapiens
MNGDDAFARRPRDDAQISEKLRKAFDDIAKYFSKKEWEKMKSSEKIVYVYMKLNYEVMTKLGFKVTLPPFMRSKRAADFHGNDFGNDRNHRNQVERPQMTFGSLQRIFPKIMPKKPAEEENGLKEVPEASGPQNDGKQLCPPGNPSTLEKINKTSGPKRGKHAWTHRLRERKQLVVYEEISDPEEDDE

SEQ ID NO: 36083 - protein, 153 aa, Homo sapiens
MNGDDAFARRPRDDAQISEKLRKAFDDIAKYFSKKEWEKMKSSEKIVYVYMKLNYEVMTKLGFKVTLPPFMRSKRAADFHGNDFGNDRNHRNQVERPQMTFGSLQRIFPKDPKGGNMPGPTDCVRESSWWFMKRSATLRKMTSNSPRGYDTCP

SEQ ID NO: 36084 - protein, 855 aa, Homo sapiens [sequence omitted]

SEQ ID NO: 36085 - protein, 288 aa, Homo sapiens
MRDRLPDLTACRKNDDGDTVVVVEKDHFMDDFFHQVEEIRNSIDKITQYVEEVKKNHSIILSAPNPEGKIKEELEDLNKEIKKTANKIRAKLKAIEQSFDQDESGNRTSVDLRIRRTQHSVLSRKFVEAMAEYNEAQTLFRERSKGRIQRQLEITGRTTTDDELEEMLESGKPSIFTSDIISDSQITRQALNEIESRHKDIMKLETSIRELHEMFMDMAMFVETQGEMINNIERNVMNATDYVEHAKEETKKAIKYQSKARRKKWIIIAVSVVLVAIIALIIGLSVGK

SEQ ID NO: 36086 - protein, 287 aa, Homo sapiens
MRDRLPDLTACRKNDDGDTVVVVEKDHFMDDFFHQVEEIRNSIDKITQYVEEVKKNHSIILSAPNPEGKIKEELEDLNKEIKKTANKIRAKLKAIEQSFDQDESGNRTSVDLRIRRTQHSVLSRKFVEAMAEYNEAQTLFRERSKGRIQRQLEITGRTTTDDELEEMLESGKPSIFTSDIISDSQITRQALNEIESRHKDIMKLETSIRELHEMFMDMAMFVETQGEMINNIERNVMNATDYVEHAKEETKKAIKYQSKARRKLMFIIICVIVLLVILGIILATTLS

SEQ ID NO: 36087 - protein, 277 aa, Homo sapiens
MRDRLPDLTACRKNDDGDTVVVVEKDHFMDDFFHQVEEIRNSIDKITQYVEEVKKNHSIILSAPNPEGKIKEELEDLNKEIKKTANKIRAKLKAIEQSFDQDESGNRTSVDLRIRRTQHSVLSRKFVEAMAEYNEAQTLFRERSKGRIQRQLEITGRTTTDDELEEMLESGKPSIFTSDIISDSQITRQALNEIESRHKDIMKLETSIRELHEMFMDMAMFVETQGEMINNIERNVMNATDYVEHAKEETKKAIKYQSKARRQQHCHSNHIPRAIYP

SEQ ID NO: 36088 - protein, 414 aa, Homo sapiens
MIPLEKPGSGGSSPGATSGSGRAGRGLSGPCRPPPPPQARGLLTEIRAVVRTEPFQDGYSLCPGRELGRGKFAVVRKCIKKDSGKEFAAKFMRKRRKGQDCRMEIIHEIAVLELAQDNPWVINLHEVYETASEMILVLEYAAGGEIFDQCVADREEAFKEKDVQRLMRQILEGVHFLHTRDVVHLDLKPQNILLTSESPLGDIKIVDFGLSRILKNSEELREIMGTPEYVAPEILSYDPISMATDMWSIGVLTYVMLTGISPFLGNDKQETFLNISQMNLSYSEEEFDVLSESAVDFIRTLLVKKPEDRATAEECLKHPWLTQSSIQEPSFRMEKALEEANALQEGHSVPEINSDTDKSETKESIVTEELIVVTSYTLGQCRQSEKEKMEQKAISKRFKFEEPLLQEIPGEFIY

SEQ ID NO: 36089 - protein, 295 aa, Homo sapiens
MELIQDTSRPPLEYVKGVPLIKYFAEALGPLQSFQARPDDLLISTYPKSGTTWVSQILDMIYQGGDLEKCHRAPIFMRVPFLEFKAPGIPSGMETLKDTPAPRLLKTHLPLALLPQTLLDQKVKVVYVARNAKDVAVSYYHFYHMAKVHPEPGTWDSFLEKFMVGEVSYGSWYQHVQEWWELSRTHPVLYLFYEDMKENPKREIQKILEFVGRSLPEETVDFVVQHTSFKEMKKNPMTNYTTVPQEFMDHSISPFMRKGMAGDWKTTFTVAQNERFDADYAEKMAGCSLSFRSEL

SEQ ID NO: 36090 - protein, 217 aa, Homo sapiens
MLAKLLCDQVVGAPIAVSAFYAGMSILQGKDDIFLDLKQKFWNTYMVVYVARNAKDVAVSYYHFYHMAKVHPEPGTWDSFLEKFMVGEVSYGSWYQHVQEWWELSRTHPVLYLFYEDMKENPKREIQKILEFVGRSLPEETVDFVVQHTSFKEMKKNPMTNYTTVPQEFMDHSISPFMRKGMAGDWKTTFTVAQNERFDADYAEKMAGCSLSFRSEL

SEQ ID NO: 36091 - protein, 398 aa, Homo sapiens
MLGRSGYRALPLGDFDRFQQSSFGFLGSQKGCLSPERGGVGTGADVPQSWPSCLCHGLISFLGFLLLLVTFPISGWFALKIVPTYERMIVFRLGRIRTPQGPGMVLLLPFIDSFQRVDLRTRAFNVPPCKLASKDGAVLSVGADVQFRIWDPVLSVMTVKDLNTATRMTAQNAMTKALLKRPLREIQMEKLKISDQLLLEINDVTRAWGLEVDRVELAVEAVLQPPQDSPAGPNLDSTLQQLALHFLGGSMNSMAGGAPSPGPADTVEMVSEVEPPAPQVGARSSPKQPLAEGLLTALQPFLSEALVSQVGACYQFNVVLPSGTQSAYFLDLTTGRGRVGHGVPDGIPDVVVEMAEADLRALLCRELRPLGAYMSGRLKVKGDLAMAMKLEAVLRALK

SEQ ID NO: 36092 - protein, 348 aa, Homo sapiens
MLGRSGYRALPLGDFDRFQQSSFGFLGSQKGCLSPERGGVGTGADVPQSWPSCLCHGLISFLGFLLLLVTFPISGWFALKLASKDGAVLSVGADVQFRIWDPVLSVMTVKDLNTATRMTAQNAMTKALLKRPLREIQMEKLKISDQLLLEINDVTRAWGLEVDRVELAVEAVLQPPQDSPAGPNLDSTLQQLALHFLGGSMNSMAGGAPSPGPADTVEMVSEVEPPAPQVGARSSPKQPLAEGLLTALQPFLSEALVSQVGACYQFNVVLPSGTQSAYFLDLTTGRGRVGHGVPDGIPDVVVEMAEADLRALLCRELRPLGAYMSGRLKVKGDLAMAMKLEAVLRALK

SEQ ID NO: 36093 - protein, 397 aa, Homo sapiens
MLGRSGYRALPLGDFDRFQQSSFGFLGSQKGCLSPERGGVGTGADVPQSWPSCLCHGLISFLGFLLLLVTFPISGWFALKIVPTYERMIVFRLGRIRTPQGPGMVLLLPFIDSFQRVDLRTRAFNVPPCKLASKDGAVLSVGADVQFRIWDPVLSVMTVKDLNTATRMTAQNAMTKALLKRPLREIQMEKLKISDQLLLEINDVTRAWGLEVDRVELAVEAVLQPPQDSPAGPNLDSTLQQLALHFLGGSMNSMAGGAPSPGPDTVEMVSEVEPPAPQVGARSSPKQPLAEGLLTALQPFLSEALVSQVGACYQFNVVLPSGTQSAYFLDLTTGRGRVGHGVPDGIPDVVVEMAEADLRALLCRELRPLGAYMSGRLKVKGDLAMAMKLEAVLRALK

SEQ ID NO: 36094 - protein, 347 aa, Homo sapiens
MLGRSGYRALPLGDFDRFQQSSFGFLGSQKGCLSPERGGVGTGADVPQSWPSCLCHGLISFLGFLLLLVTFPISGWFALKLASKDGAVLSVGADVQFRIWDPVLSVMTVKDLNTATRMTAQNAMTKALLKRPLREIQMEKLKISDQLLLEINDVTRAWGLEVDRVELAVEAVLQPPQDSPAGPNLDSTLQQLALHFLGGSMNSMAGGAPSPGPDTVEMVSEVEPPAPQVGARSSPKQPLAEGLLTALQPFLSEALVSQVGACYQFNVVLPSGTQSAYFLDLTTGRGRVGHGVPDGIPDVVVEMAEADLRALLCRELRPLGAYMSGRLKVKGDLAMAMKLEAVLRALK

SEQ ID NO: 36095 - protein, 355 aa, Homo sapiens
MPDVPQSWPSCLCHGLISFLGFLLLLVTFPISGWFALKIVPTYERMIVFRLGRIRTPQGPGMVLLLPFIDSFQRVDLRTRAFNVPPCKLASKDGAVLSVGADVQFRIWDPVLSVMTVKDLNTATRMTAQNAMTKALLKRPLREIQMEKLKISDQLLLEINDVTRAWGLEVDRVELAVEAVLQPPQDSPAGPNLDSTLQQLALHFLGGSMNSMAGGAPSPGPDTVEMVSEVEPPAPQVGARSSPKQPLAEGLLTALQPFLSEALVSQVGACYQFNVVLPSGTQSAYFLDLTTGRGRVGHGVPDGIPDVVVEMAEADLRALLCRELRPLGAYMSGRLKVKGDLAMAMKLEAVLRALK

SEQ ID NO: 36096 - protein, 327 aa, Homo sapiens
MLGRSGYRALPLGDFDRFQQSSFGFLGSQKGCLSPERGGVGTGADVPQSWPSCLCHGLISFLGFLLLLVTFPISGWFALKIVPTYERMIVFRLGRIRTPQGPGMVLLLPFIDSFQRVDLRTRAFNVPPCKLASKDGAVLSVGADVQFRIWDPVLSVMTVKDLNTATRMTAQNAMTKALLKRPLREIQMEKLKISDQLLLEINDVTRAWGLEVDRVELAVEAVLQPPQDSPAGPNLDSTLQQLALHFLGGSMNSMAGGAPSPGPGRGRVGHGVPDGIPDVVVEMAEADLRALLCRELRPLGAYMSGRLKVKGDLAMAMKLEAVLRALK

SEQ ID NO: 36097 - protein, 107 aa, Homo sapiens
MSEPDTSSGFSGSVENGTFLELFPTSLSTSVDPSSGHLSNVYIYVSIFLSLLAFLLLLLIIALQRLKNIISSSSSYPEYPSDAGSSFTNLEVCSISSQRSTFSNLSS

SEQ ID NO: 36098 - protein, 204 aa, Homo sapiens
MQSYASAMLSVFNSDDYSPAVQENIPALRRSSSFLCTESCNSKYQCETGENSKGNVQDRVKRPMNAFIVWSRDQRRKMALENPRMRNSEISKQLGYQWKMLTEAEKWPFFQEAQKLQAMHREKYPNYKYRPRRKAKMLPKNCSLLPADPASVLCSEVQLDNRLYRDDCTKATHSRMEHQLGHLPPINAASSPQQRDRYSHWTKL

SEQ ID NO: 36099 - protein, 374 aa, Homo sapiens
MAAPALGLVCGRCPELGLVLLLLLLSLLCGAAGSQEAGTGAGAGSLAGSCGCGTPQRPGAHGSSAAAHRYSREANAPGPVPGERQLAHSKMVPIPAGVFTMGTDDPQIKQDGEAPARRVTIDAFYMDAYEVSNTEFEKFVNSTGYLTEAEKFGDSFVFEGMLSEQVKTNIQQAVAAAPWWLPVKGANWRHPEGPDSTILHRPDHPVLHVSWNDAVAYCTWAGKRLPTEAEWEYSCRGGLHNRLFPWGNKLQPKGQHYANIWQGEFPVTNTGEDGFQGTAPVDAFPPNGYGLYNIVGNAWEWTSDWWTVHHSVEETLNPKGPPSGKDRVKKGGSYMCHRSYCYRYRCAARSQNTPDSSASNLGFRCAADRLPTMD

SEQ ID NO: 36100 - protein, 284 aa, Homo sapiens
MVPIPAGVFTMGTDDPQIKQDGEAPARRVTIDAFYMDAYEVSNTEFEKFVNSTGYLTEAEKFGDSFVFEGMLSEQVKTNIQQAVAAAPWWLPVKGANWRHPEGPDSTILHRPDHPVLHVSWNDAVAYCTWAGKRLPTEAEWEYSCRGGLHNRLFPWGNKLQPKGQHYANIWQGEFPVTNTGEDGFQGTAPVDAFPPNGYGLYNIVGNAWEWTSDWWTVHHSVEETLNPKGPPSGKDRVKKGGSYMCHRSYCYRYRCAARSQNTPDSSASNLGFRCAADRLPTMD

SEQ ID NO: 36101 - protein, 426 aa, Homo sapiens
MAAPALGLVCGRCPELGLVLLLLLLSLLCGAAGSQEAGTGAGAGSLAGSCGCGTPQRPGAHGSSAAAHRYSREANAPGPVPGERQLAHSKMVPIPAGVFTMGTDDPQIKQDGEAPARRVTIDAFYMDAYEVSNTEFEKFVNSTGYLTEAEKFGDSFVFEGMLSEQVKTNIQQAVAAAPWWLPVKGANWRHPEGPDSTILHRPDHPVLHVSWNDAVAYCTWAGKRLPTEAEWEYSCRGGLHNRLFPWGNKLQPKGQHYANIWQGEFPVTNTGEDGFQGTAPVDAFPPNGYGLYNIVGNAWEWTSDWWTVHHSVEETLNPKGPPSGKDRVKKGGSYMCHRSQEYYDPYFQDVASEMLRRHTASRWKAFSSLEPCCSIRRHQQYAAIERLTCGKFELRCASLRKIDCLNTNIACSYSMRQHGPRLHCVD

SEQ ID NO: 36102 - protein, 349 aa, Homo sapiens
MAAPALGLVCGRCPELGLVLLLLLLSLLCGAAGSQEAGTGAGAGSLAGSCGCGTPQRPGAHGSSAAAHRYSREANAPGPVPGERQLAHSKMVPIPAGVFTMGTDDPQIKQDGEAPARRVTIDAFYMDAYEVSNTEFEKFVNSTGYLTEVAAAPWWLPVKGANWRHPEGPDSTILHRPDHPVLHVSWNDAVAYCTWAGKRLPTEAEWEYSCRGGLHNRLFPWGNKLQPKGQHYANIWQGEFPVTNTGEDGFQGTAPVDAFPPNGYGLYNIVGNAWEWTSDWWTVHHSVEETLNPKGPPSGKDRVKKGGSYMCHRSYCYRYRCAARSQNTPDSSASNLGFRCAADRLPTMD

SEQ ID NO: 36103 - protein, 354 aa, Homo sapiens
MAAPALGLVCGRCPELGLVLLLLLLSLLCGAAGSQEAGTGAGAGSLAGSCGCGTPQRPGAHGSSAAAHRYSREANAPGPVPGERQLAHSKMVPIPAGVFTMGTDDPQIKQDGEAPARRVTIDAFYMDAYEVSNTEFEKFVNSTGYLTEAEKFGDSFVFEGMLSEQVKTNIQQAVAAAPWWLPVKGANWRHPEGPDSTILHRPDHPVLHVSWNDAVAYCTWAGKRLPTEAEWEYSCRGGLHNRLFPWGNKLQPKGQHYANIWQGEFPVTNTGEDGFQGTAPVDAFPPNGYGLYNIVGNAWEWTSDWWTVHHSVEETLNPSYCYRYRCAARSQNTPDSSASNLGFRCAADRLPTMD

SEQ ID NO: 36104 - protein, 735 aa, Homo sapiens
MCSTNPGKWVTFDDDPAVQSSQKSKNFPLENQGVCRPNGLKLNLPGLREFPSGSSSTSSTPLSSPIVDFYFSPGPPSNSPLSTPTKDFPGFPGIPKAGTHVLYPIPESSSDSPLAISGGESSLLPTRPTCLSHALLPSDHSCTHPTPKVGLPDEVNPQQAESLGFQSDDLPQFQYFREDCAFSSPFWKDEGSDSHFTLDPPGSKKMFSSRNKEMPIDQKSLNKCSLNYICEKLEHLQSAENQDSLRSLSMHCLCAEENASSFVPHTLFRSQPKSGWSFMLRIPEKKNMMSSRQWGPIFLKVLPGGILQMYYEQGLEKPFKEIQLDPYCRLSEPKVENFSVAGKIHTVKIEHVSYTEKRKYHSKTEVVHEPDIEQMLKLGSTSYHDFLDFLTTVEEELMKLPAVSKPKKNYEEQEISLEIVDNFWGKVTKEGKFVESAVITQIYCLCFVNGNLECFLTLNDLELPKRDESYYEKDSEKKGIDILDYHFHKCVNVQEFEQSRIIKFVPLDACRFELMRFKTLYNGDNLPFSLKSVVVVQGAYVELQAFVNMASLAQRSSYAGSLRSCDNIRIHFPVPSQWIKALWTMNLQRQKSLKAKMNRRACLGSLQELESEPVIQVTVGSAKYESAYQAVVWKIDRLPDKNSSLDHPHCLSYKLELGSDQEIPSDWYPFATVQFSVPDTCASRTEVRSLGVESDVQPQKHVQQRACYNIQVEIEKKWIKIDGEDPDKIGDCITQ

SEQ ID NO: 36105 - protein, 1158 aa, Homo sapiens
MCSTNPGKWVTFDDDPAVQSSQKSKNFPLENQGVCRPNGLKLNLPGLREFPSGSSSTSSTPLSSPIVDFYFSPGPPSNSPLSTPTKDFPGFPGIPKAGTHVLYPIPESSSDSPLAISGGESSLLPTRPTCLSHALLPSDHSCTHPTPKVGLPDEVNPQQAESLGFQSDDLPQFQYFREDCAFSSPFWKDEGSDSHFTLDPPGSKKMFSSRNKEMPIDQKSLNKCSLNYICEKLEHLQSAENQDSLRSLSMHCLCAEENASSFVPHTLFRSQPKSGWSFMLRIPEKKNMMSSRQWGPIFLKVLPGGILQMYYEQGLEKPFKEIQLDPYCRLSEPKVENFSVAGKIHTVKIEHVSYTEKRKYHSKTEVVHEPDIEQMLKLGSTSYHDFLDFLTTVEEELMKLPAVSKPKKNYEEQEISLEIVDNFWGKVTKEGKFVESAVITQIYCLCFVNGNLECFLTLNDLELPKRDESYYEKDSEKKGIDILDYHFHKCVNVQEFEQSRIIKFVPLDACRFELMRFKTLYNGDNLPFSLKSVVVVQGAYVELQAFVNMASLAQRSSYAGSLRSCDNIRIHFPVPSQWIKALWTMNLQRQKSLKAKMNRRACLGSLQELESEPVIQVTVGSAKYESAYQAVVWKIDRLPDKNSSLDHPHCLSYKLELGSDQEIPSDWYPFATVQFSVPDTCASRTEVRSLGVESDVQPQKHVQQRACYNIQPKLYRSVIEDVIEGVRNLFAEEGIEEQVLKDLKQLWETKVLQSKATEDFFRNSIQSPLFTLQLPHSLHQTLQSSTASLVIPAGRTLPSFTTAELGTSNSSANFTFPGYPIHVPAGVTLQTVSGHLYKVNVPIMVTETSGRAGILQHPIQQVFQQLGQPSVIQTSVPQLNPWSLQATTEKSQRIETVLQQPAILPSGPVDRKHLENATSDILVSPGNEHKIVPEALLCHQESSHYISLPGVVFSPQVSQTNSNVESVLSGSASMAQNLHDESLSTSPHGALHQHVTDIQLHILKNRMYGCDSVKQPRNIEEPSNIPVSEKDSNSQVDLSIRVTDDDIGEIIQVDGSGDTSSNEEIGSTRDADENEFLGNIDGGDLKVPEEEADSISNEDSATNSSDNEDPQVNIVEEDPLNSGDDVSEQDVPDLFDTDNVIVCQYDKQGDTRVRHGQQ

SEQ ID NO: 36106 - protein, 1135 aa, Homo sapiens
MCSTNPGKWVTFDDDPAVQSSQKSKNFPLENQGVCRPNGLKLNLPGLREFPSGSSSTSSTPLSSPIVDFYFSPGPPSNSPLSTPTKDFPGFPGIPKAGTHVLYPIPESSSDSPLAISGGESSLLPTRPTCLSHALLPSDHSCTHPTPKVGLPDEVNPQQAESLGFQSDDLPQFQYFREDCAFSSPFWKDEGSDSHFTLDPPGSKKMFSSRNKEMPIDQKSLNKCSLNYICEKLEHLQSAENQDSLRSLSMHCLCAEENASSFVPHTLFRSQPKSGWSFMLRIPEKKNMMSSRQWGPIFLKVLPGGILQMYYEQGLEKPFKEIQLDPYCRLSEPKVENFSVAGKIHTVKIEHVSYTEKRKYHSKTEVVHEPDIEQMLKLGSTSYHDFLDFLTTVEEELMKLPAVSKPKKNYEEQEISLEIVDNFWGKVTKEGKFVESAVITQIYCLCFVNGNLECFLTLNDLELPKRDESYYEKDSEKKGIDILDYHFHKCVNVQEFEQSRIIKFVPLDACRFELMRFKTLYNGDNLPFSLKSVVVVQGAYVELQAFVNMASLAQRSSYAGSLRSCDNIRIHFPVPSQWIKALWTMNLQRQKSLKAKMNRRACLGSLQELESEPVIQVTVGSAKYESAYQAVVWKIDRLPDKNSSLDHPHCLSYKLELGSDQEIPSDWYPFATVQFSVPDTCASRTEVRSLGVESDVQPQKHVQQRACYNIQPKLYRSVIEDVIEGVRNLFAEEGIEEQVLKDLKQLWETKVLQSKATEDFFRNSIQSPLFTLQLPHSLHQTLQSSTGHLYKVNVPIMVTETSGRAGILQHPIQQVFQQLGQPSVIQTSVPQLNPWSLQATTEKSQRIETVLQQPAILPSGPVDRKHLENATSDILVSPGNEHKIVPEALLCHQESSHYISLPGVVFSPQVSQTNSNVESVLSGSASMAQNLHDESLSTSPHGALHQHVTDIQLHILKNRMYGCDSVKQPRNIEEPSNIPVSEKDSNSQVDLSIRVTDDDIGEIIQVDGSGDTSSNEEIGSTRDADENEFLGNIDGGDLKVPEEEADSISNEDSATNSSDNEDPQVNIVEEDPLNSGDDVSEQDVPDLFDTDNVIVCQYDKIHRSKNKWKFYLKDGVMCFGGRDYVFAKAIGDAEW

SEQ ID NO: 36107 - protein, 291 aa, Homo sapiens
MAKGRVAERSQLGAHHTTPVGDGAAGTRGLAAPGSRDHQKEKSWVEAGSARMSLLILVSIFLSAAFVMFLVYKNFPQLSEEERVNMKVPRDMDDAKALGKVLSKYKDTFYVQVLVAYFATYIFLQTFAIPGSIFLSILSGFLYPFPLALFLVCLCSGLGASFCYMLSYLVGRPVVYKYLTEKAVKWSQQVERHREHLINYIIFLRITPFLPNWFINITSPVINVPLKVFFIGTFLGVAPPSFVAIKAGTTLYQLTTAGEAVSWNSIFILMILAVLSILPAIFQKKLKQKFE

SEQ ID NO: 36108 - protein, 192 aa, Homo sapiens
MAKGRVAERSQLGAHHTTPVGDGAAGTRGLAAPGSRDHQKEKSWVEAGSARMSLLILVSIFLSAAFVMFLVYKNFPQLSEEERVNMKVPRDMDDAKALGKVLSKYKDTFYVQVLVAYFATYIFYQLANICYSRLYISQYTLRVSLSLSTSLISCLFVFWTWCLFLLYAFLFSWETSCIQIPNRESSKMVTAG

SEQ ID NO: 36109 - protein, 127 aa, Homo sapiens
MAKGRVAERSQLGAHHTTPVGDGAAGTRGLAAPGSRDHQKEKSWVEAGSARMSLLILVSIFLSAAFVMFLVYKNFPQLSEEERVNMKVPRDMDDAKALGKVLSKYKDTFYVQVLVAYFATYILYPFN

SEQ ID NO: 36110 - protein, 645 aa, Homo sapiens
MSLKMDNRDVAGKANRWFGVAPPKSGKMNMNILHQEELIAQKKREIEAKMEQKAKQNQVASPQPPHPGEITNAHNSSCISNKFANDGSFLQQFLKLQKAQTSTDAPTSAPSAPPSTPTPSAGKRSLLISRRTGLGLASLPGPVKSYSHAKQLPVAHRPSVFQSPDEDEEEDYEQWLEIKVSPPEGAETRKVIEKLARFVAEGGPELEKVAMEDYKDNPAFAFLHDKNSREFLYYRKKVAEIRKEAQKSQAASQKVSPPEDEEVKNLAEKLARFIADGGPEVETIALQNNRENQAFSFLYEPNSQGYKYYRQKLEEFRKAKASSTGSFTAPDPGLKRKSPPEALSGSLPPATTCPASSTPAPTIIPAPAAPGKPASAATVKRKRKSRWGPEEDKVELPPAELVQRDVDASPSPLSVQDLKGLGYEKGKPVGLVGVTELSDAQKKQLKEQQEMQQMYDMIMQHKRAMQDMQLLWEKAVQQHQHGYDSDEEVDSELGTWEHQLRRMEMDKTREWAEQLTKMGRGKHFIGDFLPPDELEKFMETFKALKEGREPDYSEYKEFKLTVENIGYQMLMKMGWKEGEGLGSEGQGIKNPVNKGTTTVDGAGFGIDRPAELSKEDDEYEAFRKRMMLAYRFRPNPLNNPRRPYY

SEQ ID NO: 36111 - protein, 222 aa, Homo sapiens
MSLKMDNRDVAGKANRWFGVAPPKSGKMNMNILHQEELIAQKKREIEAKMEQKAKQNQVASPQPPHPGEITNAHNSSCISNKFANDGSFLQQFLKLQKAQTSTDAPTSAPSAPPSTPTPSAGKRSLLISRRTGLGLASLPGPVKSYSHAKQLPVAHRPSVFQSPDEDEEEDYEQWLEIKVCLTKTVRPTPPSSWCFVPGLGTPDSLLHLTLFSPHPLCRCGP

SEQ ID NO: 36112 - protein, 500 aa, Homo sapiens
MDHTEGSPAEEPPAHAPSPGKFGERPPPKRLTREAMRNYLKERGDQTVLILHAKVAQKSYGNEKRFFCPPPCVYLMGSGWKKKKEQMERDGCSEQESQPCAFIGIGNSDQEMQQLNLEGKNYCTAKTLYISDSDKRKHFMLSVKMFYGNSDDIGVFLSKRIKVISKPSKKKQSLKNADLCIASGTKVALFNRLRSQTVSTRYLHVEGGNFHASSQQWGAFFIHLLDDDESEGEEFTVRDGYIHYGQTVKLVCSVTGMALPRLIIRKVDKQTALLDADDPVSQLHKCAFYLKDTERMYLCLSQERIIQFQATPCPKEPNKEMINDGASWTIISTDKAEYTFYEGMGPVLAPVTPVPVVESLQLNGGGDVAMLELTGQNFTPNLRVWFGDVEAETMYRCGESMLCVVPDISAFREGWRWVRQPVQVPVTLVRNDGIIYSTSLTFTYTPEPGPRPHCSAAGAILRANSSQVPPNESNTNSEGSYTNASTNSTSVTSSTATVVS

SEQ ID NO: 36113 - protein, 425 aa, Homo sapiens
MGSGWKKKKEQMERDGCSEQESQPCAFIGIGNSDQEMQQLNLEGKNYCTAKTLYISDSDKRKHFMLSVKMFYGNSDDIGVFLSKRIKVISKPSKKKQSLKNADLCIASGTKVALFNRLRSQTVSTRYLHVEGGNFHASSQQWGAFFIHLLDDDESEGEEFTVRDGYIHYGQTVKLVCSVTGMALPRLIIRKVDKQTALLDADDPVSQLHKCAFYLKDTERMYLCLSQERIIQFQATPCPKEPNKEMINDGASWTIISTDKAEYTFYEGMGPVLAPVTPVPVVESLQLNGGGDVAMLELTGQNFTPNLRVWFGDVEAETMYRCGESMLCVVPDISAFREGWRWVRQPVQVPVTLVRNDGIIYSTSLTFTYTPEPGPRPHCSAAGAILRANSSQVPPNESNTNSEGSYTNASTNSTSVTSSTATVVS

SEQ ID NO: 36114 - protein, 411 aa, Homo sapiens
MAWIKRESQPCAFIGIGNSDQEMQQLNLEGKNYCTAKTLYISDSDKRKHFMLSVKMFYGNSDDIGVFLSKRIKVISKPSKKKQSLKNADLCIASGTKVALFNRLRSQTVSTRYLHVEGGNFHASSQQWGAFFIHLLDDDESEGEEFTVRDGYIHYGQTVKLVCSVTGMALPRLIIRKVDKQTALLDADDPVSQLHKCAFYLKDTERMYLCLSQERIIQFQATPCPKEPNKEMINDGASWTIISTDKAEYTFYEGMGPVLAPVTPVPVVESLQLNGGGDVAMLELTGQNFTPNLRVWFGDVEAETMYRCGESMLCVVPDISAFREGWRWVRQPVQVPVTLVRNDGIIYSTSLTFTYTPEPGPRPHCSAAGAILRANSSQVPPNESNTNSEGSYTNASTNSTSVTSSTATVVS

SEQ ID NO: 36115 - protein, 485 aa, Homo sapiens
MGGCRKFGERPPPKRLTREAMRNYLKERGDQTVLILHAKVAQKSYGNEKRFFCPPPCVYLMGSGWKKKKEQMERDGCSEQESQPCAFIGIGNSDQEMQQLNLEGKNYCTAKTLYISDSDKRKHFMLSVKMFYGNSDDIGVFLSKRIKVISKPSKKKQSLKNADLCIASGTKVALFNRLRSQTVSTRYLHVEGGNFHASSQQWGAFFIHLLDDDESEGEEFTVRDGYIHYGQTVKLVCSVTGMALPRLIIRKVDKQTALLDADDPVSQLHKCAFYLKDTERMYLCLSQERIIQFQATPCPKEPNKEMINDGASWTIISTDKAEYTFYEGMGPVLAPVTPVPVVESLQLNGGGDVAMLELTGQNFTPNLRVWFGDVEAETMYRCGESMLCVVPDISAFREGWRWVRQPVQVPVTLVRNDGIIYSTSLTFTYTPEPGPRPHCSAAGAILRANSSQVPPNESNTNSEGSYTNASTNSTSVTSSTATVVS

SEQ ID NO: 36116 - protein, 465 aa, Homo sapiens
MRNYLKERGDQTVLILHAKVAQKSYGNEKRFFCPPPCVYLMGSGWKKKKEQMERDGCSEQESQPCAFIGIGNSDQEMQQLNLEGKNYCTAKTLYISDSDKRKHFMLSVKMFYGNSDDIGVFLSKRIKVISKPSKKKQSLKNADLCIASGTKVALFNRLRSQTVSTRYLHVEGGNFHASSQQWGAFFIHLLDDDESEGEEFTVRDGYIHYGQTVKLVCSVTGMALPRLIIRKVDKQTALLDADDPVSQLHKCAFYLKDTERMYLCLSQERIIQFQATPCPKEPNKEMINDGASWTIISTDKAEYTFYEGMGPVLAPVTPVPVVESLQLNGGGDVAMLELTGQNFTPNLRVWFGDVEAETMYRCGESMLCVVPDISAFREGWRWVRQPVQVPVTLVRNDGIIYSTSLTFTYTPEPGPRPHCSAAGAILRANSSQVPPNESNTNSEGSYTNASTNSTSVTSSTATVVS

SEQ ID NO: 36117 - protein, 486 aa, Homo sapiens
MAWIKRKFGERPPPKRLTREAMRNYLKERGDQTVLILHAKVAQKSYGNEKRFFCPPPCVYLMGSGWKKKKEQMERDGCSEQESQPCAFIGIGNSDQEMQQLNLEGKNYCTAKTLYISDSDKRKHFMLSVKMFYGNSDDIGVFLSKRIKVISKPSKKKQSLKNADLCIASGTKVALFNRLRSQTVSTRYLHVEGGNFHASSQQWGAFFIHLLDDDESEGEEFTVRDGYIHYGQTVKLVCSVTGMALPRLIIRKVDKQTALLDADDPVSQLHKCAFYLKDTERMYLCLSQERIIQFQATPCPKEPNKEMINDGASWTIISTDKAEYTFYEGMGPVLAPVTPVPVVESLQLNGGGDVAMLELTGQNFTPNLRVWFGDVEAETMYRCGESMLCVVPDISAFREGWRWVRQPVQVPVTLVRNDGIIYSTSLTFTYTPEPGPRPHCSAAGAILRANSSQVPPNESNTNSEGSYTNASTNSTSVTSSTATVVS

SEQ ID NO: 36118 - protein, 487 aa, Homo sapiens
MAPVVTGKFGERPPPKRLTREAMRNYLKERGDQTVLILHAKVAQKSYGNEKRFFCPPPCVYLMGSGWKKKKEQMERDGCSEQESQPCAFIGIGNSDQEMQQLNLEGKNYCTAKTLYISDSDKRKHFMLSVKMFYGNSDDIGVFLSKRIKVISKPSKKKQSLKNADLCIASGTKVALFNRLRSQTVSTRYLHVEGGNFHASSQQWGAFFIHLLDDDESEGEEFTVRDGYIHYGQTVKLVCSVTGMALPRLIIRKVDKQTALLDADDPVSQLHKCAFYLKDTERMYLCLSQERIIQFQATPCPKEPNKEMINDGASWTIISTDKAEYTFYEGMGPVLAPVTPVPVVESLQLNGGGDVAMLELTGQNFTPNLRVWFGDVEAETMYRCGESMLCVVPDISAFREGWRWVRQPVQVPVTLVRNDGIIYSTSLTFTYTPEPGPRPHCSAAGAILRANSSQVPPNESNTNSEGSYTNASTNSTSVTSSTATVVS

SEQ ID NO: 36119 - protein, 770 aa, Homo sapiens
MFPQSRHPTPHQAAGQPFKFTIPESLDRIKEEFQFLQAQYHSLKLECEKLASEKTEMQRHYVMYYEMSYGLNIEMHKQTEIAKRLNTICAQVIPFLSQEHQQQVAQAVERAKQVTMAELNAIIGQQQLQAQHLSHGHGPPVPLTPHPSGLQPPGIPPLGGSAGLLALSSALSGQSHLAIKDDKKHHDAEHHRDREPGTSNSLLVPDSLRGTDKRRNGPEFSNDIKKRKVDDKDSSHYDSDGDKSDDNLVVDVSNEDPSSPRASPAHSPRENGIDKNRLLKKDASSSPASTASSASSTSLKSKEMSLHEKASTPVLKSSTPTPRSDMPTPGTSATPGLRPGLGKPPAIDPLVNQAAAGLRTPLAVPGPYPAPFGMVPHAGMNGELTSPGAAYASLHNMSPQMSAAAAAAAVVAYGRSPMVGFDPPPHMRVPTIPPNLAGIPGGKPAYSFHVTADGQMQPVPFPPDALIGPGIPRHARQINTLNHGEVVCAVTISNPTRHVYTGGKGCVKVWDISHPGNKSPVSQLDCLNRDNYIRSCKLLPDGCTLIVGGEASTLSIWDLAAPTPRIKAELTSSAPACYALAISPDSKVCFSCCSDGNIAVWDLHNQTLVRQFQGHTDGASCIDISNDGTKLWTGGLDNTVRSWDLREGRQLQQHDFTSQIFSLGYCPTGEWLAVGMESSNVEVLHVNKPDKYQLHLHESCVLSLKFAYCGKWFVSTGKDNLLNAWRTPYGASIFQSKESSSVLSCDISVDDKYIVTGSGDKKATVYEVIY

SEQ ID NO: 36120 - protein, 219 aa, Homo sapiens
MSGLSGPPARRGPFPLALLLLFLLGPRLVLAISFHLPINSRKCLREEIHKDLLVTGAYEISDQSGGAGGLRSHLKITDSAGHILYSKEDATKGKFAFTTEDYDMFEVCFESKGTGRIPDQLVILDMKHGVEAKNYEEIAKVEKLKPLEVELRRLEDLSESIVNDFAYMKKREEEMRDTNESTNTRVLYFSIFSMFCLIGLATWQVFYLRRFFKAKKLIE

SEQ ID NO: 36121 - protein, 275 aa, Homo sapiens
MANFKGHALPGSFFLIIGLCWSVKYPLKYFSHTRKNSPLHYYQRLEIVEAAIRTLFSVTGILAEQFVPDGPHLHLYHENHWIKLMNWQHSTMYLFFAVSGIVDMLTYLVSHVPLGVDRLVMAVAVFMEGFLFYYHVHNRPPLDQHIHSLLLYALFGGCVSISLEVIFRDHIVLELFRTSLIILQGTWFWQIGFVLFPPFGTPEWDQKDDANLMFITMCFCWHYLAALSIVAVNYSLVYCLLTRMKRHGRGEIIGIQKLNSDDTYQTALLSGSDEE

SEQ ID NO: 36122 - protein, 99 aa, Homo sapiens
MKSAKLGFLLRFFIFCSLNTLLLGGVNKIAEKICGDLKDPCKLDMNFGSCYEVHFRYFYNRTSKRCETFVFSGCNGNLNNFKLKIEREVACVAKYKPPR

SEQ ID NO: 36123 - protein, 258 aa, Homo sapiens
MKTPFGKAAAGQRSRTGAGHGSVSVTMIKRKAAHKKHRSRPTSQPRGNIVGCRIQHGWKDGDEPLTQWKGTVLDQVPVNPSLYLIKYDGFDCVYGLELHRDERVSSLEVLPNRVASSRISDTHLAEIMVGKAVEHIFETEEGSKNEWRGMVLAQAPVMNTWFYITYEKDPVLYMYQLLDDYKDGDLRILQDSNDSPLAEREPGEVIDSLVGKQVEYAKDDGSKRTGMVIHQVEAKPSVYFIKFDDDFHIYVYDLVKTS

SEQ ID NO: 36124 - protein, 77 aa, Homo sapiens
MKTPFGKAAAGQRSRTGAGHGSVSVTMIKRKAAHKKHRSRPTSQPRGNIVGCRIQHGWKDGDEPLTQWKGTVLDQLL

SEQ ID NO: 36125 - protein, 117 aa, Homo sapiens
MALETVPKDLRHLRACLLCSLVKTIDQFEYDGCDNCDAYLQMKGNREMVYDCTSSSFDGIIAMMSPEDSWVSKWQRVSNFKPGVYAVSVTGRLPQGIVRELKSRGVAYKSRDTAIKT

SEQ ID NO: 36126 - protein, 384 aa, Homo sapiens
MGVTGAHGFPCCGKGSVEVAEMRDDLSQHQIQEEQELEADMLEQKPQLQVDLDLDPDPDPDPELEIGQVPALLESELYPALKLEAELDTEANSNEESDFEEPMQLVCKIESVHSNMGLPTPQTFRPWSLNSNCRSFTEENHVSACHHSISAQTSKHLFWANKLIQASEHSLQRAINMQLNNGSAGQPIRSPLREAIPTNALCSEEQLQIPDAHSAPPTTSSQAPSPLLSSDLPPPIDLTELITFASSLAMASSSRMDLPSLEHMMKAPPQEALEPSTEPLLTTVEEREPENHAETLPEKPREARAPLKSWSQEDKNFAQSYFDFSKPGIKRATIKGQIQLLQPPATSPLLQGSKEDSVPPGKEKENPLLVKIHFKLSAPTIPEK

SEQ ID NO: 36127 - protein, 826 aa, Homo sapiens
MAEPSAPESKHKSSLNSSPWSGLMALGNSRHGHHGPGAQCAHKAAGGAAPPKPAPAGLSGGLSQPAGWQSLLSFTILFLAWLAGFSSRLFAVIRFESIIHEFDPWFNYRSTHHLASHGFYEFLNWFDERAWYPLGRIVGGTVYPGLMITAGLIHWILNTLNITVHIRDVCVFLAPTFSGLTSISTFLLTRELWNQGAGLLAACFIAIVPGYISRSVAGSFDNEGIAIFALQFTYYLWVKSVKTGSVFWTMCCCLSYFYMVSAWGGYVFIINLIPLHVFVLLLMQRYSKRVYIAYSTFYIVGLILSMQIPFVGFQPIRTSEHMAAAGVFALLQAYAFLQYLRDRLTKQEFQTLFFLGVSLAAGAVFLSVIYLTYTGYIAPWSGRFYSLWDTGYAKIHIPIIASVSEHQPTTWVSFFFDLHILVCTFPAGLWFCIKNINDERVFVALYAISAVYFAGVMVRLMLTLTPVVCMLSAIAFSNVFEHYLGDDMKRENPPVEDSSDEDDKRNQGNLYDKAGKVRKHATEQEKTEEGLGPNIKSIVTMLMLMLLMMFAVHCTWVTSNAYSSPSVVLASYNHDGTRNILDDFREAYFWLRQNTDEHARVMSWWDYGYQIAGMANRTTLVDNNTWNNSHIALVGKAMSSNETAAYKIMRTLDVDYVLVIFGGVIGYSGDDINKFLWMVRIAEGEHPKDIRESDYFTPQGEFRVDKAGSPTLLNCLMYKMSYYRFGEMQLDFRTPPGFDRTRNAEIGNKDIKFKHLEEAFTSEHWLVRIYKVKAPDNRETLDHKPRVTNIFPKQKYLSKKTTKRKRGYIKNKLVFKKGKKISKKTV

SEQ ID NO: 36128 - protein, 412 aa, Homo sapiens
MAENLKGCSVCCKSSWNQLQDLCRLAKLSCPALGISKRNLYDFEVEYLCDYKKIREQEYYLVKWRGYPDSESTWEPRQNLKCVRILKQFHKDLERELLRRHHRSKTPRHLDPSLANYLVQKAKQRRALRRWEQELNAKRSHLGRITVENEVDLDGPPRAFVYINEYRVGEGITLNQVAVGCECQDCLWAPTGGCCPGASLHKFAYNDQGQVRLRAGLPIYECNSRCRCGYDCPNRVVQKGIRYDLCIFRTDDGRGWGVRTLEKIRKNSFVMEYVGEIITSEEAERRGQIYDRQGATYLFDLDYVEDVYTVDAAYYGNISHFVNHSCDPNLQVYNVFIDNLDERLPRIAFFATRTIRAGEELTFDYNMQVDPVDMESTRMDSNFGLAGLPGSPKKRVRIECKCGTESCRKYLF

SEQ ID NO: 36129 - protein, 423 aa, Homo sapiens
MVGMSRLRNDRLADPLTGCSVCCKSSWNQLQDLCRLAKLSCPALGISKRNLYDFEVEYLCDYKKIREQEYYLVKWRGYPDSESTWEPRQNLKCVRILKQFHKDLERELLRRHHRSKTPRHLDPSLANYLVQKAKQRRALRRWEQELNAKRSHLGRITVENEVDLDGPPRAFVYINEYRVGEGITLNQVAVGCECQDCLWAPTGGCCPGASLHKFAYNDQGQVRLRAGLPIYECNSRCRCGYDCPNRVVQKGIRYDLCIFRTDDGRGWGVRTLEKIRKNSFVMEYVGEIITSEEAERRGQIYDRQGATYLFDLDYVEDVYTVDAAYYGNISHFVNHSCDPNLQVYNVFIDNLDERLPRIAFFATRTIRAGEELTFDYNMQVDPVDMESTRMDSNFGLAGLPGSPKKRVRIECKCGTESCRKYLF

SEQ ID NO: 36130 - protein, 205 aa, Homo sapiens
MVNLAAMVWRRLLRKRWVLALVFGLSLVYFLSSTFKQEERAVRDRNLLQVHDHNQPIPWKVQFNLGNSSRPSNQCRNSIQGKHLITDELGYVCERKDLLVNGCCNVNVPSTKQYCCDGCWPNGCCSAYEYCVSCCLQPNKQLLLERFLNRAAVAFQNLFMAVEDHFELCLAKCRTSSQSVQHENTYRDPIAKYCYGESPPELFPA

SEQ ID NO: 36131 - protein, 2472 aa, Homo sapiens
MDPSGVKVLETAEDIQERRQQVLDRYHRFKELSTLRRQKLEDSYRFQFFQRDAEELEKWIQEKLQIASDENYKDPTNLQGKLQKHQAFEAEVQANSGAIVKLDETGNLMISEGHFASETIRTRLMELHRQWELLLEKMREKGIKLLQAQKLVQYLRECEDVMDWINDKEAIVTSEELGQDLEHVEVLQKKFEEFQTDMAAHEERVNEVNQFAAKLIQEQHPEEELIKTKQDEVNAAWQRLKGLALQRQGKLFGAAEVQRFNRDVDETISWIKEKEQLMASDDFGRDLASVQALLRKHEGLERDLAALEDKVKALCAEADRLQQSHPLSATQIQVKREELITNWEQIRTLAAERHARLNDSYRLQRFLADFRDLTSWVTEMKALINADELASDVAGAEALLDRHQEHKGEIDAHEDSFKSADESGQALLAAGHYASDEVREKLTVLSEERAALLELWELRRQQYEQCMDLQLFYRDTEQVDNWMSKQEAFLLNEDLGDSLDSVEALLKKHEDFEKSLSAQEEKITALDEFATKLIQNNHYAMEDVATRRDALLSRRNALHERAMRRRAQLADSFHLQQFFRDSDELKSWVNEKMKTATDEAYKDPSNLQGKVQKHQAFEAELSANQSRIDALEKAGQKLIDVNHYAKDEVAARMNEVISLWKKLLEATELKGIKLREANQQQQFNRNVEDIELWLYEVEGHLASDDYGKDLTNVQNLQKKHALLEADVAAHQDRIDGITIQARQFQDAGHFDAENIKKKQEALVARYEALKEPMVARKQKLADSLRLQQLFRDVEDEETWIREKEPIAASTNRGKDLIGVQNLLKKHQALQAEIAGHEPRIKAVTQKGNAMVEEGHFAAEDVKAKLHELNQKWEALKAKASQRRQDLEDSLQAQQYFADANEAESWMREKEPIVGSTDYGKDEDSAEALLKKHEALMSDLSAYGSSIQALREQAQSCRQQVAPTDDETGKELVLALYDYQEKSPREVTMKKGDILTLLNSTNKDWWKVEVNDRQGFVPAAYVKKLDPAQSASRENLLEEQGSIALRQEQIDNQTRITKEAGSVSLRMKQVEELYHSLLELGEKRKGMLEKSCKKFMLFREANELQQWINEKEAALTSEEVGADLEQVEVLQKKFDDFQKDLKANESRLKDINKVAEDLESEGLMAEEVQAVQQQEVYGMMPRDETDSKTASPWKSARLMVHTVATFNSIKELNERWRSLQQLAEERSQLLGSAHEVQRFHRDADETKEWIEEKNQALNTDNYGHDLASVQALQRKHEGFERDLAALGDKVNSLGETAERLIQSHPESAEDLQEKCTELNQAWSSLGKRADQRKAKLGDSHDLQRFLSDFRDLMSWINGIRGLVSSDELAKDVTGAEALLERHQEHRTEIDARAGTFQAFEQFGQQLLAHGHYASPEIKQKLDILDQERADLEKAWVQRRMMLDQCLELQLFHRDCEQAENWMAAREAFLNTEDKGDSLDSVEALIKKHEDFDKAINVQEEKIAALQAFADQLIAAGHYAKGDISSRRNEVLDRWRRLKAQMIEKRSKLGESQTLQQFSRDVDEIEAWISEKLQTASDESYKDPTNIQSKHQKHQAFEAELHANADRIRGVIDMGNSLIERGACAGSEDAVKARLAALADQWQFLVQKSAEKSQKLKEANKQQNFNTGIKDFDFWLSEVEALLASEDYGKDLASVNNLLKKHQLLEADISAHEDRLKDLNSQADSLMTSSAFDTSQVKDKRDTINGRFQKIKSMAASRRAKLNESHRLHQFFRDMDDEESWIKEKKLLVGSEDYGRDLTGVQNLRKKHKRLEAELAAHEPAIQGVLDTGKKLSDDNTIGKEEIQQRLAQFVEHWKELKQLAAARGQRLEESLEYQQFVANVEEEEAWINEKMTLVASEDYGDTLAAIQGLLKKHEAFETDFTVHKDRVNDVCTNGQDLIKKNNHHEENISSKMKGLNGKVSDLEKAAAQRKAKLDENSAFLQFNWKADVVESWIGEKENSLKTDDYGRDLSSVQTLLTKQETFDAGLQAFQQEGIANITALKDQLLAAKHVQSKAIEARHASLMKRWSQLLANSAARKKKLLEAQSHFRKVEDLFLTFAKKASAFNSWFENAEEDLTDPVRCNSLEEIKALREAHDAFRSSLSSAQADFNQLAELDRQIKSFRVASNPYTWFTMEALEETWRNLQKIIKERELELQKEQRRQEENDKLRQEFAQHANAFHQWIQETRTYLLDGSCMVEESGTLESQLEATKRKHQEIRAMRSQLKKIEDLGAAMEEALILDNKYTEHSTVGLAQQWDQLDQLGMRMQHNLEQQIQARNTTGVTEEALKEFSMMFKHFDKDKSGRLNHQEFKSCLRSLGYDLPMVEEGEPDPEFEAILDTVDPNRDGHVSLQEYMAFMISRETENVKSSEEIESAFRALSSEGKPYVTKEELYQNLTREQADYCVSHMKPYVDGKGRELPTAFDYVEFTRSLFVN

SEQ ID NO: 36132 - protein, 2477 aa, Homo sapiens
MDPSGVKVLETAEDIQERRQQVLDRYHRFKELSTLRRQKLEDSYRFQFFQRDAEELEKWIQEKLQIASDENYKDPTNLQGKLQKHQAFEAEVQANSGAIVKLDETGNLMISEGHFASETIRTRLMELHRQWELLLEKMREKGIKLLQAQKLVQYLRECEDVMDWINDKEAIVTSEELGQDLEHVEVLQKKFEEFQTDMAAHEERVNEVNQFAAKLIQEQHPEEELIKTKQDEVNAAWQRLKGLALQRQGKLFGAAEVQRFNRDVDETISWIKEKEQLMASDDFGRDLASVQALLRKHEGLERDLAALEDKVKALCAEADRLQQSHPLSATQIQVKREELITNWEQIRTLAAERHARLNDSYRLQRFLADFRDLTSWVTEMKALINADELASDVAGAEALLDRHQEHKGEIDAHEDSFKSADESGQALLAAGHYASDEVREKLTVLSEERAALLELWELRRQQYEQCMDLQLFYRDTEQVDNWMSKQEAFLLNEDLGDSLDSVEALLKKHEDFEKSLSAQEEKITALDEFATKLIQNNHYAMEDVATRRDALLSRRNALHERAMRRRAQLADSFHLQQFFRDSDELKSWVNEKMKTATDEAYKDPSNLQGKVQKHQAFEAELSANQSRIDALEKAGQKLIDVNHYAKDEVAARMNEVISLWKKLLEATELKGIKLREANQQQQFNRNVEDIELWLYEVEGHLASDDYGKDLTNVQNLQKKHALLEADVAAHQDRIDGITIQARQFQDAGHFDAENIKKKQEALVARYEALKEPMVARKQKLADSLRLQQLFRDVEDEETWIREKEPIAASTNRGKDLIGVQNLLKKHQALQAEIAGHEPRIKAVTQKGNAMVEEGHFAAEDVKAKLHELNQKWEALKAKASQRRQDLEDSLQAQQYFADANEAESWMREKEPIVGSTDYGKDEDSAEALLKKHEALMSDLSAYGSSIQALREQAQSCRQQVAPTDDETGKELVLALYDYQEKSPREVTMKKGDILTLLNSTNKDWWKVEVNDRQGFVPAAYVKKLDPAQSASRENLLEEQGSIALRQEQIDNQTRITKEAGSVSLRMKQVEELYHSLLELGEKRKGMLEKSCKKFMLFREANELQQWINEKEAALTSEEVGADLEQVEVLQKKFDDFQKDLKANESRLKDINKVAEDLESEGLMAEEVQAVQQQEVYGMMPRDETDSKTASPWKSARLMVHTVATFNSIKELNERWRSLQQLAEERSQLLGSAHEVQRFHRDADETKEWIEEKNQALNTDNYGHDLASVQALQRKHEGFERDLAALGDKVNSLGETAERLIQSHPESAEDLQEKCTELNQAWSSLGKRADQRKAKLGDSHDLQRFLSDFRDLMSWINGIRGLVSSDELAKDVTGAEALLERHQEHRTEIDARAGTFQAFEQFGQQLLAHGHYASPEIKQKLDILDQERADLEKAWVQRRMMLDQCLELQLFHRDCEQAENWMAAREAFLNTEDKGDSLDSVEALIKKHEDFDKAINVQEEKIAALQAFADQLIAAGHYAKGDISSRRNEVLDRWRRLKAQMIEKRSKLGESQTLQQFSRDVDEIEAWISEKLQTASDESYKDPTNIQLSKLLSKHQKHQAFEAELHANADRIRGVIDMGNSLIERGACAGSEDAVKARLAALADQWQFLVQKSAEKSQKLKEANKQQNFNTGIKDFDFWLSEVEALLASEDYGKDLASVNNLLKKHQLLEADISAHEDRLKDLNSQADSLMTSSAFDTSQVKDKRDTINGRFQKIKSMAASRRAKLNESHRLHQFFRDMDDEESWIKEKKLLVGSEDYGRDLTGVQNLRKKHKRLEAELAAHEPAIQGVLDTGKKLSDDNTIGKEEIQQRLAQFVEHWKELKQLAAARGQRLEESLEYQQFVANVEEEEAWINEKMTLVASEDYGDTLAAIQGLLKKHEAFETDFTVHKDRVNDVCTNGQDLIKKNNHHEENISSKMKGLNGKVSDLEKAAAQRKAKLDENSAFLQFNWKADVVESWIGEKENSLKTDDYGRDLSSVQTLLTKQETFDAGLQAFQQEGIANITALKDQLLAAKHVQSKAIEARHASLMKRWSQLLANSAARKKKLLEAQSHFRKVEDLFLTFAKKASAFNSWFENAEEDLTDPVRCNSLEEIKALREAHDAFRSSLSSAQADFNQLAELDRQIKSFRVASNPYTWFTMEALEETWRNLQKIIKERELELQKEQRRQEENDKLRQEFAQHANAFHQWIQETRTYLLDGSCMVEESGTLESQLEATKRKHQEIRAMRSQLKKIEDLGAAMEEALILDNKYTEHSTVGLAQQWDQLDQLGMRMQHNLEQQIQARNTTGVTEEALKEFSMMFKHFDKDKSGRLNHQEFKSCLRSLGYDLPMVEEGEPDPEFEAILDTVDPNRDGHVSLQEYMAFMISRETENVKSSEEIESAFRALSSEGKPYVTKEELYQNLTREQADYCVSHMKPYVDGKGRELPTAFDYVEFTRSLFVN

SEQ ID NO: 36133 - protein, 2452 aa, Homo sapiens
MDPSGVKVLETAEDIQERRQQVLDRYHRFKELSTLRRQKLEDSYRFQFFQRDAEELEKWIQEKLQIASDENYKDPTNLQGKLQKHQAFEAEVQANSGAIVKLDETGNLMISEGHFASETIRTRLMELHRQWELLLEKMREKGIKLLQAQKLVQYLRECEDVMDWINDKEAIVTSEELGQDLEHVEVLQKKFEEFQTDMAAHEERVNEVNQFAAKLIQEQHPEEELIKTKQDEVNAAWQRLKGLALQRQGKLFGAAEVQRFNRDVDETISWIKEKEQLMASDDFGRDLASVQALLRKHEGLERDLAALEDKVKALCAEADRLQQSHPLSATQIQVKREELITNWEQIRTLAAERHARLNDSYRLQRFLADFRDLTSWVTEMKALINADELASDVAGAEALLDRHQEHKGEIDAHEDSFKSADESGQALLAAGHYASDEVREKLTVLSEERAALLELWELRRQQYEQCMDLQLFYRDTEQVDNWMSKQEAFLLNEDLGDSLDSVEALLKKHEDFEKSLSAQEEKITALDEFATKLIQNNHYAMEDVATRRDALLSRRNALHERAMRRRAQLADSFHLQQFFRDSDELKSWVNEKMKTATDEAYKDPSNLQGKVQKHQAFEAELSANQSRIDALEKAGQKLIDVNHYAKDEVAARMNEVISLWKKLLEATELKGIKLREANQQQQFNRNVEDIELWLYEVEGHLASDDYGKDLTNVQNLQKKHALLEADVAAHQDRIDGITIQARQFQDAGHFDAENIKKKQEALVARYEALKEPMVARKQKLADSLRLQQLFRDVEDEETWIREKEPIAASTNRGKDLIGVQNLLKKHQALQAEIAGHEPRIKAVTQKGNAMVEEGHFAAEDVKAKLHELNQKWEALKAKASQRRQDLEDSLQAQQYFADANEAESWMREKEPIVGSTDYGKDEDSAEALLKKHEALMSDLSAYGSSIQALREQAQSCRQQVAPTDDETGKELVLALYDYQEKSPREVTMKKGDILTLLNSTNKDWWKVEVNDRQGFVPAAYVKKLDPAQSASRENLLEEQGSIALRQEQIDNQYHSLLELGEKRKGMLEKSCKKFMLFREANELQQWINEKEAALTSEEVGADLEQVEVLQKKFDDFQKDLKANESRLKDINKVAEDLESEGLMAEEVQAVQQQEVYGMMPRDETDSKTASPWKSARLMVHTVATFNSIKELNERWRSLQQLAEERSQLLGSAHEVQRFHRDADETKEWIEEKNQALNTDNYGHDLASVQALQRKHEGFERDLAALGDKVNSLGETAERLIQSHPESAEDLQEKCTELNQAWSSLGKRADQRKAKLGDSHDLQRFLSDFRDLMSWINGIRGLVSSDELAKDVTGAEALLERHQEHRTEIDARAGTFQAFEQFGQQLLAHGHYASPEIKQKLDILDQERADLEKAWVQRRMMLDQCLELQLFHRDCEQAENWMAAREAFLNTEDKGDSLDSVEALIKKHEDFDKAINVQEEKIAALQAFADQLIAAGHYAKGDISSRRNEVLDRWRRLKAQMIEKRSKLGESQTLQQFSRDVDEIEAWISEKLQTASDESYKDPTNIQSKHQKHQAFEAELHANADRIRGVIDMGNSLIERGACAGSEDAVKARLAALADQWQFLVQKSAEKSQKLKEANKQQNFNTGIKDFDFWLSEVEALLASEDYGKDLASVNNLLKKHQLLEADISAHEDRLKDLNSQADSLMTSSAFDTSQVKDKRDTINGRFQKIKSMAASRRAKLNESHRLHQFFRDMDDEESWIKEKKLLVGSEDYGRDLTGVQNLRKKHKRLEAELAAHEPAIQGVLDTGKKLSDDNTIGKEEIQQRLAQFVEHWKELKQLAAARGQRLEESLEYQQFVANVEEEEAWINEKMTLVASEDYGDTLAAIQGLLKKHEAFETDFTVHKDRVNDVCTNGQDLIKKNNHHEENISSKMKGLNGKVSDLEKAAAQRKAKLDENSAFLQFNWKADVVESWIGEKENSLKTDDYGRDLSSVQTLLTKQETFDAGLQAFQQEGIANITALKDQLLAAKHVQSKAIEARHASLMKRWSQLLANSAARKKKLLEAQSHFRKVEDLFLTFAKKASAFNSWFENAEEDLTDPVRCNSLEEIKALREAHDAFRSSLSSAQADFNQLAELDRQIKSFRVASNPYTWFTMEALEETWRNLQKIIKERELELQKEQRRQEENDKLRQEFAQHANAFHQWIQETRTYLLDGSCMVEESGTLESQLEATKRKHQEIRAMRSQLKKIEDLGAAMEEALILDNKYTEHSTVGLAQQWDQLDQLGMRMQHNLEQQIQARNTTGVTEEALKEFSMMFKHFDKDKSGRLNHQEFKSCLRSLGYDLPMVEEGEPDPEFEAILDTVDPNRDGHVSLQEYMAFMISRETENVKSSEEIESAFRALSSEGKPYVTKEELYQNLTREQADYCVSHMKPYVDGKGRELPTAFDYVEFTRSLFVN

SEQ ID NO: 36134 - protein, 528 aa, Homo sapiens
MAGSDTAPFLSQADDPDDGPVPGTPGLPGSTGNPKSEEPEVPDQEGLQRITGLSPGRSALIVAVLCYINLLNYMDRFTVAGVLPDIEQFFNIGDSSSGLIQTVFISSYMVLAPVFGYLGDRYNRKYLMCGGIAFWSLVTLGSSFIPGEHFWLLLLTRGLVGVGEASYSTIAPTLIADLFVADQRSRMLSIFYFAIPVGSGLGYIAGSKVKDMAGDWHWALRVTPGLGVVAVLLLFLVVREPPRGAVERHSDLPPLNPTSWWADLRALARNPSFVLSSLGFTAVAFVTGSLALWAPAFLLRSRVVLGETPPCLPGDSCSSSDSLIFGLITCLTGVLGVGLGVEISRRLRHSNPRADPLVCATGLLGSAPFLFLSLACARGSIVATYIFIFIGETLLSMNWAIVADILLYVVIPTRRSTAEAFQIVLSHLLGDAGSPYLIGLISDRLRRNWPPSFLSEFRALQFSLMLCAFVGALGGAAFLGTAIFIEADRRRAQLHVQGLLHEAGSTDDRIVVPQRGRSTRVPVASVLI

SEQ ID NO: 36135 - protein, 476 aa, Homo sapiens
MAGSDTAPFLSQADDPDDGPVPGTPGLPGSTGNPKSEEPEVPDQEGLQRITGLSPGRSALIVAVLCYINLLNYMDRFTVAGVLPDIEQFFNIGDSSSGLIQTVFISSYMVLAPVFGYLGDRYNRKYLMCGGIAFWSLVTLGSSFIPGEHFWLLLLTRGLVGVGEASYSTIAPTLIADLFVADQRSRMLSIFYFAIPVGSGLGYIAGSKVKDMAGDWHWALRVTPGLGVVAVLLLFLVVREPPRGAVERHSDLPPLNPTSWWADLRALARNLIFGLITCLTGVLGVGLGVEISRRLRHSNPRADPLVCATGLLGSAPFLFLSLACARGSIVATYIFIFIGETLLSMNWAIVADILLYVVIPTRRSTAEAFQIVLSHLLGDAGSPYLIGLISDRLRRNWPPSFLSEFRALQFSLMLCAFVGALGGAAFLGTAIFIEADRRRAQLHVQGLLHEAGSTDDRIVVPQRGRSTRVPVASVLI

SEQ ID NO: 36136 - protein, 454 aa, Homo sapiens
MAGSDTAPFLSQADDPDDGPVPGTPGLPGSTGNPKSEEPEVPDQEGLQRITGLSPGRSALIVAVLCYINLLNYMDRFTVAVFISSYMVLAPVFGYLGDRYNRKYLMCGGIAFWSLVTLGSSFIPGEHFWLLLLTRGLVGVGEASYSTIAPTLIADLFVADQRSRMLSIFYFAIPVGSGLGYIAGSKVKDMAGDWHWALRVTPGLGVVAVLLLFLVVREPPRGAVERHSDLPPLNPTSWWADLRALARNLIFGLITCLTGVLGVGLGVEISRRLRHSNPRADPLVCATGLLGSAPFLFLSLACARGSIVATYIFIFIGETLLSMNWAIVADILLYVVIPTRRSTAEAFQIVLSHLLGDAGSPYLIGLISDRLRRNWPPSFLSEFRALQFSLMLCAFVGALGGAAFLGTAIFIEADRRRAQLHVQGLLHEAGSTDDRIVVPQRGRSTRVPVASVLI

SEQ ID NO: 36137 - protein, 455 aa, Homo sapiens
MDRFTVAGVLPDIEQFFNIGDSSSGLIQTVFISSYMVLAPVFGYLGDRYNRKYLMCGGIAFWSLVTLGSSFIPGEHFWLLLLTRGLVGVGEASYSTIAPTLIADLFVADQRSRMLSIFYFAIPVGSGLGYIAGSKVKDMAGDWHWALRVTPGLGVVAVLLLFLVVREPPRGAVERHSDLPPLNPTSWWADLRALARNPSFVLSSLGFTAVAFVTGSLALWAPAFLLRSRVVLGETPPCLPGDSCSSSDSLIFGLITCLTGVLGVGLGVEISRRLRHSNPRADPLVCATGLLGSAPFLFLSLACARGSIVATYIFIFIGETLLSMNWAIVADILLYVVIPTRRSTAEAFQIVLSHLLGDAGSPYLIGLISDRLRRNWPPSFLSEFRALQFSLMLCAFVGALGGAAFLGTAIFIEADRRRAQLHVQGLLHEAGSTDDRIVVPQRGRSTRVPVASVLI

SEQ ID NO: 36138 - protein, 229 aa, Homo sapiens
MAGSDTAPFLSQADDPDDGPVPGTPGLPGSTGNPKSEEPEVPDQEGLQRITGLSPGRSALIVAVLCYINLLNYMDRFTVAGVLPDIEQFFNIGDSSSGLIQTVFISSYMVLAPVFGYLGDRYNRKYLMCGGIAFWSLVTLGSSFIPGEHFWLLLLTRGLVGVGEASYSTIAPTLIADLFVADQRSRMLSIFYFAIPVGSGLGYIAGSKVKDMAGDWHWALRVSLVLAWG

SEQ ID NO: 36139 - protein, 169 aa, Homo sapiens
MSSYQQKQTFTPPPQLQQQQVKQPSQPPPQEIFVPTTKEPCHSKVPQPGNTKIPEPGCTKVPEPGCTKVPEPGCTKVPEPGCTKVPEPGCTKVPEPGCTKVPEPGYTKVPEPGSIKVPDQGFIKFPEPGAIKVPEQGYTKVPVPGYTKLPEPCPSTVTPGPAQQKTKQK

SEQ ID NO: 36140 - protein, 597 aa, Homo sapiens
MSSTVNNGAASMQSTPDAANGFPQPSSSSGTWPRAEEELRAAEPGLVKRAHREILDHERKRRVELKCMELQEMMEEQGYSEEEIRQKVGTFRQMLMEKEGVLTREDRPGGHIVAETPRLTEGAEPGLEYAPFDDDDGPVDCDCPASCYRGHRGYRTKHWSSSSASPPPKKKKKKKGGHRRSRKKRRLESECSCGSSSPLRKKKKSVKKHRRDRSDSGSRRKRRHRSRSSKCKRKEKNKEKKRPHTESPGRRSHRHSSGSSHSPSLSSHYSDSRSPSRLSPKHRDEGRKTGSQRSSGSRSPSPSGGSGWGSPQRNGGSGQRSGAHGGRPGSAHSPPDKPSSPSPRVRDKAAAAAPTPPARGKESPSPRSAPSSQGRGGRAAGGAGRRRRRRRRRRRSRSSASAPRRRGRRRPRPAPPRGSSRSLSRARSSSDSGSGRGAPGPGPEPGSERGHGGHGKRAKERPPRARPASTSPSPGAHGRRGGPEGKSSSRSPGPHPRSWSSSRSPSKSRSRSAEKRPHSPSRSPSPKKPLSRDKDGEGRARHSEAEATRARRRSRSYSPIRKRRRDSPSFMEPRRITSAASVLFHTTGPAPLPPPAA

SEQ ID NO: 36141 - protein, 995 aa, Homo sapiens
MSSLPRRAKVQVQDVVLKDEFSSFSELSSASEEDDKEDSAWEPQKKVPRSRKQPPPKESKPKRMPRVKKNAPQISDGSEVVVVKEELNSSVAIADTALEDRKNKLDTVQTLKTAKTKQKCAAQPHTVRRTKKLKVEEETSKASNLEGESNSSETPSTSTVWGGTCKKEENDDDFTFGQSALKKIKTETYPQGQPVKFPANANSTKEEVEMNWDMVQVLSERTNIEPWVCANIIRLFNDDNTIPFIIRYRKELINNLDADSLREVQQTLEELRAVAKKVHSTIQKIKKEGKMSECLLKAMLNCKTFEELEHVSAPYKTGSKGTKAQRARQLGLEGAARALLEKPGELSLLSYIRPDVKGLSTLQDIEIGVQHILADMIAKDKDTLDFIRNLCQKRHVCIQSSLAKVSSKKVNEKDVDKFLLYQHFSCNIRNIHHHQILAINRGENLKVLTVKVNISDGVKDEFCRWCIQNRWRPRSFARPELMKILYNSLNDSFKRLIYPLLCREFRAKLTSDAEKESVMMFGRNLRQLLLTSPVPGRTLMGVDPGYKHGCKLAIISPTSQILHTDVVYLHCGQGFREAEKIKTLLLNFNCSTVVIGNGTACRETEAYFADLIMKNYFAPLDVVYCIVSEAGASIYSVSPEANKEMPGLDPNLRSAVSIARRVQDPLAELVKIEPKHIGVGMYQHDVSQTLLKATLDSVVEECVSFVGVDINICSEVLLRHIAGLNANRAKNIIEWREKNGPFINREQLKKVKGLGPKSFQQCAGFIRINQDYIRTFCSQQTETSGQIQGVAVTSSADVEVTNEKQGKKKSKTAVNVLLKPNPLDQTCIHPESYDIAMRFLSSIGGTLYEVGKPEMQQKINSFLEKEGMEKIAERLQTTVHTLQVIIDGLSQPESFDFRTDFDKPDFKRSIVCLEDLQIGTVLTGKVENATLFGIFVDIGVGKSGLIPIRNVTEAKLSKTKKRRSLGLGPGERVEVQVLNIDIPRSRITLDLIRVL

SEQ ID NO: 36142 - protein, 620 aa, Homo sapiens
MIAKDKDTLDFIRNLCQKRHVCIQSSLAKVSSKKVNEKDVDKFLLYQHFSCNIRNIHHHQILAINRGENLKVLTVKVNISDGVKDEFCRWCIQNRWRPRSFARPELMKILYNSLNDSFKRLIYPLLCREFRAKLTSDAEKESVMMFGRNLRQLLLTSPVPGRTLMGVDPGYKHGCKLAIISPTSQILHTDVVYLHCGQGFREAEKIKTLLLNFNCSTVVIGNGTACRETEAYFADLIMKNYFAPLDVVYCIVSEAGASIYSVSPEANKEMPGLDPNLRSAVSIARRVQDPLAELVKIEPKHIGVGMYQHDVSQTLLKATLDSVVEECVSFVGVDINICSEVLLRHIAGLNANRAKNIIEWREKNGPFINREQLKKVKGLGPKSFQQCAGFIRINQDYIRTFCSQQTETSGQIQGVAVTSSADVEVTNEKQGKKKSKTAVNVLLKPNPLDQTCIHPESYDIAMRFLSSIGGTLYEVGKPEMQQKINSFLEKEGMEKIAERLQTTVHTLQVIIDGLSQPESFDFRTDFDKPDFKRSIVCLEDLQIGTVLTGKVENATLFGIFVDIGVGKSGLIPIRNVTEAKLSKTKKRRSLGLGPGERVEVQVLNIDIPRSRITLDLIRVL

SEQ ID NO: 36143 - protein, 339 aa, Homo sapiens
MAAAAAAALESWQAAAPRKRRSAARRPRRREAAPRGREAAPRGREAAPRGPEAEFESDSGVVLRRIWEAEKDLFISDFWSSALETINRCLTKHLEQLKAPVGTLSDIFGNLHLDSLPEESDVATDSIPREILVTGTCHLKCVCYGIGNFATCIVARNQLTFLLLLLEKCQIPRSHCWVYDPLFSQLEIEVLNTLGVTVLSENEEGKRSIRGEPTIFYMLHCGTALYNNLLWSNWSVDALSKMVIIGNSFKGLEERLLARILQKNYPYIAKILKGLEELEFPQTSQYMDIFNDTSVHWFPVQKLEQLSIDIWEFREEPDYQDCEDLEIIRNKREDPSATD

SEQ ID NO: 36144 - protein, 508 aa, Homo sapiens
MLPTQAGAAAALGRGSALGGSLNRTPTGRPGGGGGTRGANGGRVPGNGAGLGPGRLEREAAAAAATTPAPTAGALYSGSEGDSESGEEEELGAERRGLKRSLSEMEIGMVVGGPEASAAATGGYGPVSGAVSGAKPGKKTRGRVKIKMEFIDNKLRRYTTFSKRKTGIMKKAYELSTLTGTQVLLLVASETGHVYTFATRKLQPMITSETGKALIQTCLNSPDSPPRSDPTTDQRMSATGFEETDLTYQVSESDSSGETKDTLKPAFTVTNLPGTTSTIQTAPSTSTTMQVSSGPSFPITNYLAPVSASVSPSAVSSANGTVLKSTGSGPVSSGGLMQLPTSFTLMPGGAVAQQVPVQAIQVHQAPQQASPSRDSSTDLTQTSSSGTVTLPATIMTSSVPTTVGGHMMYPSPHAVMYAPTSGLGDGSLTVLNAFSQAPSTMQVSHSQVQEPGGVPQVFLTASSGTVQIPVSAVQLHQMAVIGQQAGSSSNLTELQVVNLDTAHSTKSE

SEQ ID NO: 36145 - protein, 715 aa, Homo sapiens
MSSPKRSSKPSMSLAPSGSSMPTADPKPPASLKSTKSATPNRSLVPTKPATSRNSVMSPSSSKSTKSTSTKRAPSNRPSSRSRVRSKARTPSRVSTDTRTSKASKASDVRCHQRRGTHSRGRTPGRRGSRSSKRSPSRASTPGRIRTHGARPGMASRVRTPTSQQKGSRGKSYGRPRTSNRERSDSQPRNLSKKSYRPPGGSGIGRSSELAVTPSTAKCQTPTGIPSKEKSDNPSPSSSRKVKSYGQMIIPSREKSYSPTEMSSRVKSYNQASTRSRPQSHSQSRSPRRSRSGSQKRTHSRVRSHSWKRNHSRARSRTRKGILSQMGRHSQSRSHSKGKSQNQSRTPRRGRSHNWSRNPSKERSHSHSRSSSKERDHRGSSSPRKESGRSQSGSPNKQRDHSRSRSPNKARDRSRSRSPYKARDRSRSRSPNKARDCSRSRSPYKARDRSRSRSPNKARDHSRSRSPNKARDRSRSRSPSKERDHSQLGSPSKERDHRRSRSPSKERQCRQSRSSSKERDHRRSRSPSKERQRRQSRSPNKERDRSQSRSPSEEREHRQSRSPSKERDRRRWRSPSKERERRQSRSSSEERDHSRSRSPNKQSGYSRPRASSKEKAHSRSRTPSKEGNHSQSRTSSKESDPSQSTVPRSPDWKRSPTRTSSLSQNRTPSKTSSHSPSTFPSGGQTLSQDDSQADATTSKATLPGERSSSSSSKLA

SEQ ID NO: 36146 - protein, 99 aa, Homo sapiens
MEEPTSSTNENKMKSPCESNKRKVDKKKKNLHRASAPEQSLKETEKAKYPTLVFYCRKNKKRNSNQLENNQPTESSTDPIKEKGDLDISAGSPQDGGQN

SEQ ID NO: 36147 - protein, 271 aa, Homo sapiens
MASADSRRVADGGGAGGTFQPYLDTLRQELQQTDPTLLSVVVAVLAVLLTLVFWKLIRSRRSSQRAVLLVGLCDSGKTLLFVRLLTGLYRDTQTSITDSCAVYRVNNNRGNSLTLIDLPGHESLRLQFLERFKSSARAIVFVVDSAAFQREVKDVAEFLYQVLIDSMGLKNTPSFLIACNKQDIAMAKSAKLIQQQLEKELNTLRVTRSAAPSTLDSSSTAPAQLGKKGKEFEFSQLPLKVEFLECSAKGGRGDVGSADIQDLEKWLAKIA

SEQ ID NO: 36148 - protein, 73 aa, Homo sapiens
MSYQQQQCKQPCQPPPVCPTPKCPEPCPPPKCPEPYLPPPCPPEHCPPPPCQDKCPPVQPYPPCQQKYPPKSK

SEQ ID NO: 36149 - protein, 488 aa, Homo sapiens
MEPFLRRRLAFLSFFWDKIWPAGGEPDHGTPGSLDPNTDPVPTLPAEPCSPFPQLFLALYDFTARCGGELSVRRGDRLCALEEGGGYIFARRLSGQPSAGLVPITHVAKASPETLSDQPWYFSGVSRTQAQQLLLSPPNEPGAFLIRPSESSLGGYSLSVRAQAKVCHYRVSMAADGSLYLQKGRLFPGLEELLTYYKANWKLIQNPLLQPCMPQKAPRQDVWERPHSEFALGRKLGEGYFGEVWEGLWLGSLPVAIKVIKSANMKLTDLAKEIQTLKGLRHERLIRLHAVCSGGEPVYIVTELMRKGNLQAFLGTPEGRALRLPPLLGFACQVAEGMSYLEEQRVVHRDLAARNVLVDDGLACKVADFGLARLLKDDIYSPSSSSKIPVKWTAPEAANYRVFSQKSDVWSFGVLLHEVFTYGQCPYEGMTNHETLQQIMRGYRLPRPAACPAEVYVLMLECWRSSPEERPSFATLREKLHAIHRCHP

SEQ ID NO: 36150 - protein, 1573 aa, Homo sapiens
MRVLACLLAALVGIQAVERLRLADGPHGCAGRLEVWHGGRWGTVCDDGWDLRDAAVACRQLGCGGALAAPGGAFFGEGAGPVWLSELACRGNEGQLGLCHHRGWKAHICSHEEDAGVVCAGQRVANSRDDSTSPLDGAPWPGLLLELSPSTEEPLVTHAPRPAGNPQNASRKKSPRPKQAKSTRAPLLTTGAPRQERLRLVSGPHRCAGRLEVWHGGRWGTVCDDGWDLRDAAVACRELGCGGALAAPGGARFGPGAGPVWMDDVGCGGGEQALRDCPRSPWGRSNCDHSEDAGLVCTGPAPRLRLADGPHGCAGRLEVWHGGRWGSVCDDAWDLRDAAVACRELGCGGALAAPGGAFFGEGSGPIILDDLRCRGNETALRFCPARPWGQHDCHHREDAGAVCDGMPLGYVPPTAPTDSNNSTPREAASRPPSTMTSQAPGTAGVSPPPASPTVLWEPGPEAGSPQLRLVAGPSKCSGRLEVWHDQRWGTVCDDSWDMRDSAVVCRELGCGGPQQPDPAAGRFGWGAGPIWLDDVGCVGTEASLSDCPAAPWGKHNCAHNEDVGVTCTGPPGLDSISDPFSWSWIPGLGRDRDAWLPGELATKPSASVTASVLEKTTTKAPGKMPKSTKKWVTKNAKRPTTQPPVMPTTKHSRAQSPPDLTSQTTAALTTEASRRPTSEFTRRPTTEAPQRWTSHTTATLTPQAPRERTTKTMAMLTTQGPQEMTSESTIKSIPQASLEPSAEIPEGSPESPKDPAPSPSVSTTGESGLFRVRLADGPNRCAGRLEVWHAGRWGTVCDDNWDLRDATVACWELGCGKVRPRVGKTHYGPGTGPIWLDDMGCKGSEASLSDCPSGAWGKHNCDHEEDVGLTCTGYTDYDDYPPWTWDPTSREDLAKGTTTAGVPGHTLPWRTTRRPGSSSPAIRRLPDTGSKDGYKLPWTWDTPSGRGLAEGTPTAGKLGPTLGAGTTRSPGSPPTLRVHGDTGSPRKPWPERRPPRPAATRTAPPTPSPGPSASPGPPGPALTSDSSRELTPHSALTSEATSDAPDTSPPTPDPASRTNPDLILTSPDFALSTPDSSVVPALTPEPSPTPLPTLPKELTSDPSTPSEVTSLSPTSEQVPESDTTPDLDTTPYSSTVSEYSRSPDPSPSPHPTTTPDPTMAPDPITTLNPTVTPHFPTTPHPTTTPHPTTITHSTMIPDPTTTPQPFTTITHSTMIPDPTTTPQPFTTMQPTTTPHSTTPHPTTTPHPTTITHSTMIPDPTTTPQPFTTMQPTTMPHPTTTPHPTTTPHPTTTPHPTTTPHPTMTPDPTTTPYPTTTPDPTTTPHPTTPDPSSTPVITTVSLPTSLGTELSSPTLAPTVKPSLHPQLTFTAPAPHTSTSQIPTLEPSPALESSPSRSSTATSMDPLSTEDFKPPRSQSPNLTPPPTHTPHSASDLTVSPDPLLSPTAHPLDHPPLDPLTLGPTPGQSPGPHGPCVAPTPPVRVMACEPPALVELVAAVRDVGGQLQRLTQVVEQERQERQALLLGLTQLVEAARGLGQLGEAVKRLAEMAWTTSMPAPTTTTPEEEERPLRGDV

SEQ ID NO: 36151 - protein, 951 aa, Homo sapiens
MRVLACLLAALVGIQAVERLRLADGPHGCAGRLEVWHGGRWGTVCDDGWDLRDAAVACRQLGCGGALAAPGGAFFGEGAGPVWLSELACRGNEGQLGLCHHRGWKAHICSHEEDAGVVCAGQRVANSRDDSTSPLDGAPWPGLLLELSPSTEEPLVTHAPRPAGNPQNASRKKSPRPKQAKSTRAPLLTTGAPRQERLRLVSGPHRCAGRLEVWHGGRWGTVCDDGWDLRDAAVACRELGCGGALAAPGGARFGPGAGPVWMDDVGCGGGEQALRDCPRSPWGRSNCDHSEDAGLVCTGPAPRLRLADGPHGCAGRLEVWHGGRWGSVCDDAWDLRDAAVACRELGCGGALAAPGGAFFGEGSGPIILDDLRCRGNETALRFCPARPWGQHDCHHREDAGAVCDGMPLGYVPPTAPTDSNNSTPREAASRPPSTMTSQAPGTAGVSPPPASPTVLWEPGPEAGSPQLRLVAGPSKCSGRLEVWHDQRWGTVCDDSWDMRDSAVVCRELGCGGPQQPDPAAGRFGWGAGPIWLDDVGCVGTEASLSDCPAAPWGKHNCAHNEDVGVTCTGPPGLDSISDPFSWSWIPGLGRDRDAWLPGELATKPSASVTASVLEKTTTKAPGKMPKSTKKWVTKNAKRPTTQPPVMPTTKHSRAQSPPDLTSQTTAALTTEASRRPTSEFTRRPTTEAPQRWTSHTTATLTPQAPRERTTKTMAMLTTQGPQEMTSESTIKSIPQASLEPSAEIPEGSPESPKDPAPSPSVSTTGESGLFRVRLADGPNRCAGRLEVWHAGRWGTVCDDNWDLRDATVACWELGCGKVRPRVGKTHYGPGTGPIWLDDMGCKGSEASLSDCPSGAWGKHNCDHEEDVGLTCTGYTDYDDYPPWTWDPTSREDLAKGTTTAGVPGHTLPWRTTRRPGSSSPAIRRLPDTEPEAGAPRGDAPRSRTARVAAPP

SEQ ID NO: 36152 - protein, 410 aa, Homo sapiens
MVRVRAVVMARDDSSGGWLPVGGGGLSQVSVCRVRGARPEGGARQGHYVIHGERLRDQKTTLECTLKPGLVYNKVNPIFHHWSLGDCKFGLTFQSPAEADEFQKSLLAALAALGRGSLTPSSSSSSSSPSQDTAETPCPLTSHVDSDSSSSHSRQETPPSAAAAPIITMESASGFGPTTPPQRRRSSAQSYPPLLPFTGIPEPSEPLAGAGGLGWGGRGYEDYRRSGPPAPLALSTCVVRFAKTGALRGAALGPPAALPAPLTEAAPPAPPARPPPGPGPSSAPAKASPEAEEAARCVHCRALFRRRADGRGGRCAEAPDPGRLLVRRLSCLWCAESLLYHCLSDAEGDFSDPCACEPGHPRPAARWAALAALSLAVPCLCCYAPLRACHWVAARCGCAGCGGRHEEAAR

SEQ ID NO: 36153 - protein, 152 aa, Homo sapiens
MVRVRAVVMARDDSSGGWLPVGGGGLSQVSVCRVRGARPEGGARQGHYVIHGERLRDQKTTLECTLKPGLVYNKVNPIFHHWSLGDCKFGLTFQSPAEADEFQKSLLAALAALGRGSLTPSSSSSSSSPSQDTAETPCPLTLSQYFRHMLCP

SEQ ID NO: 36154 - protein, 88 aa, Homo sapiens
MDDADPEERNYDNMLKMLSDLNKDLEKLLEEMEKISVQATWMAYDMVVMRTNPTLAESMRRLEDAFVNCKEEMEKNWQELLHETKQRL

SEQ ID NO: 36155 - protein, 218 aa, Homo sapiens
MERQGVDVPHVKCKDQEPQPLGESKEHPRWEENCEEEAGGGPASASCQLTVLEGKSGLYFSSLDSSIDILQKRAQELIENINKSRQKDHALMTNFRNSLKTKVSDLTEKLEERIYQIYNDHNKIIQEKLQEFTQKMAKISHLETELKQVCHSVETVYKDLCLQPEQSLRLRWGPDHSRGKSPPRPGNSQPPDVFVSSVAETTSQATASEVQTNRDGEC

SEQ ID NO: 36156 - protein, 732 aa, Homo sapiens
MDPSADTWDLFSPLISLWINRFYIYLGFAVSISLWICVQIVIKTQGKNLQEKSVPKAAQDLMTNGYVSLQEKDIFVSGVKIFYGSQTGTAKGFATVLAEAVTSLDLPVAIINLKEYDPDDHLIEEVTSKNVCVFLVATYTDGLPTESAEWFCKWLEEASIDFRFGKTYLKGMRYAVFGLGNSAYASHFNKVGKNVDKWLWMLGAHRVMSRGEGDCDVVKSKHGSIEADFRAWKTKFISQLQALQKGERKKSCGGHCKKGKCESHQHGSEEREEGSHEQDELHHRDTEEEEPFESSSEEEFGGEDHQSLNSIVDVEDLGKIMDHVKKEKREKEQQEEKSGLFRNMGRNEDGERRAMITPALREALTKQGYQLIGSHSGVKLCRWTKSMLRGRGGCYKHTFYGIESHRCMETTPSLACANKCVFCWRHHTNPVGTEWRWKMDQPEMILKEAIENHQNMIKQFKGVPGVKAERFEEGMTVKHCALSLVGEPIMYPEINRFLKLLHQCKISSFLVTNAQFPAEIRNLEPVTQLYVSVDASTKDSLKKIDRPLFKDFWQRFLDSLKALAVKQQRTVYRLTLVKAWNVDELQAYAQLVSLGNPDFIEVKGVTYCGESSASSLTMAHVPWHEEVVQFVHELVDLIPEYEIACEHEHSNCLLIAHRKFKIGGEWWTWIDYNRFQELIQEYEDSGGSKTFSAKDYMARTPHWALFGASERGFDPKDTRHQRKNKSKAISGC

SEQ ID NO: 36157 - protein, 384 aa, Homo sapiens
MDPSADTWDLFSPLISLWINRFYIYLGFAVSISLWICVQIVIKTQGKNLQEKSVPKAAQDLMTNGYVSLQEKDIFVSGVKIFYGSQTGTAKGFATVLAEAVTSLDLPVAIINLKEYDPDDHLIEEVTSKNVCVFLVATYTDGLPTESAEWFCKWLEEASIDFRFGKTYLKGMRYAVFGLGNSAYASHFNKVGKNVDKWLWMLGAHRVMSRGEGDCDVVKSKHGSIEADFRAWKTKFISQLQALQKGERKKSCGGHCKKGKCESHQHGSEEREEGSHEQDELHHRDTEEEEPFESSSEEEFGGEDHQSLNSIVDVEDLGKIMDHVKKEKREKEQQEEKSGLFRNMGRNEDGERRAMITPALREALTKQVHAPRERRLLQTHILWN

SEQ ID NO: 36158 - protein, 660 aa, Homo sapiens
MDVLVSECSARLLQQEEEIKSLTAEIDRLKNCGCLGASPNLEQLQEENLKLKYRLNILRKSLQAERNKPTKNMINIISRLQEVFGHAIKAAYPDLENPPLLVTPSQQAKFGDYQCNSAMGISQMLKTKEQKVNPREIAENITKHLPDNECIEKVEIAGPGFINVHLRKDFVSEQLTSLLVNGVQLPALGENKKVIVDFSSPNIAKEMHVGHLRSTIIGESISRLFEFAGYDVLRLNHVGDWGTQFGMLIAHLQDKFPDYLTVSPPIGDLQVFYKESKKRFDTEEEFKKRAYQCVVLLQGKNPDITKAWKLICDVSRQELNKIYDALDVSLIERGESFYQDRMNDIVKEFEDRGFVQVDDGRKIVFVPGCSIPLTIVKSDGGYTYDTSDLAAIKQRLFEEKADMIIYVVDNGQSVHFQTIFAAAQMIGWYDPKVTRVFHAGFGVVLGEDKKKFKTRSGETVRLMDLLGEGLKRSMDKLKEKERDKVLTAEELNAAQTSVAYGCIKYADLSHNRLNDYIFSFDKMLDDRGNTAAYLLYAFTRIRSIARLANIDEEMLQKAARETKILLDHEKEWKLGRCILRFPEILQKILDDLFLHTLCDYIYELATAFTEFYDSCYCVEKDRQTGKILKVNMWRMLLCEAVAAVMAKGFDILGIKPVQRM

SEQ ID NO: 36159 - protein, 588 aa, Homo sapiens
MINIISRLQEVFGHAIKAAYPDLENPPLLVTPSQQAKFGDYQCNSAMGISQMLKTKEQKVNPREIAENITKHLPDNECIEKVEIAGPGFINVHLRKDFVSEQLTSLLVNGVQLPALGENKKVIVDFSSPNIAKEMHVGHLRSTIIGESISRLFEFAGYDVLRLNHVGDWGTQFGMLIAHLQDKFPDYLTVSPPIGDLQVFYKESKKRFDTEEEFKKRAYQCVVLLQGKNPDITKAWKLICDVSRQELNKIYDALDVSLIERGESFYQDRMNDIVKEFEDRGFVQVDDGRKIVFVPGCSIPLTIVKSDGGYTYDTSDLAAIKQRLFEEKADMIIYVVDNGQSVHFQTIFAAAQMIGWYDPKVTRVFHAGFGVVLGEDKKKFKTRSGETVRLMDLLGEGLKRSMDKLKEKERDKVLTAEELNAAQTSVAYGCIKYADLSHNRLNDYIFSFDKMLDDRGNTAAYLLYAFTRIRSIARLANIDEEMLQKAARETKILLDHEKEWKLGRCILRFPEILQKILDDLFLHTLCDYIYELATAFTEFYDSCYCVEKDRQTGKILKVNMWRMLLCEAVAAVMAKGFDILGIKPVQRM

SEQ ID NO: 36160 - protein, 898 aa, Homo sapiens
MRKGVLKDPEIADLFYKDDPEELFIGLHEIGHGSFGAVYFATNAHTSEVVAIKKMSYSGKQTHEKWQDILKEVKFLRQLKHPNTIEYKGCYLKEHTAWLVMEYCLGSASDLLEVHKKPLQEVEIAAITHGALHGLAYLHSHALIHRDIKAGNILLTEPGQVKLADFGSASMASPANSFVGTPYWMAPEVILAMDEGQYDGKVDIWSLGITCIELAERKPPLFNMNAMSALYHIAQNDSPTLQSNEWTDSFRRFVDYCLQKIPQERPTSAELLRHDFVRRDRPLRVLIDLIQRTKDAVRELDNLQYRKMKKILFQETRNGPLNESQEDEEDSEHGTSLNREMDSLGSNHSIPSMSVSTGSQSSSVNSMQEVMDESSSELVMMHDDESTINSSSSVVHKKDHVFIRDEAGHGDPRPEPRPTQSVQSQALHYRNRERFATIKSASLVTRQIHEHEQENELREQMSGYKRMRRQHQKQLIALENKLKAEMDEHRLKLQKEVETHANNSSIELEKLAKKQVAIIEKEAKVAAADEKKFQQQILAQQKKDLTTFLESQKKQYKICKEKIKEEMNEDHSTPKKEKQERISKHKENLQHTQAEEEAHLLTQQRLYYDKNCRFFKRKIMIKRHEVEQQNIREELNKKRTQKEMEHAMLIRHDESTRELEYRQLHTLQKLRMDLIRLQHQTELENQLEYNKRRERELHRKHVMELRQQPKNLKAMEMQIKKQFQDTCKVQTKQYKALKNHQLEVTPKNEHKTILKTLKDEQTRKLAILAEQYEQSINEMMASQALRLDEAQEAECQALRLQLQQEMELLNAYQSKIKMQTEAQHERELQKLEQRVSLRRAHLEQKIEEELAALQKERSERIKNLLERQEREIETFDMESLRMGFGNLVTLDFPKEDYR

SEQ ID NO: 36161 - protein, 56 aa, Homo sapiens
MSLLWTPQILTISFVSYILSLFPSPFPSCYTSCWFETSITTEKELNQYFELAKFLA

SEQ ID NO: 36162 - protein, 127 aa, Homo sapiens
MDVFKKGFSIAKEGVVGAVEKTKQGVTEAAEKTKEGVMYVGAKTKENVVQSVTSVAEKTKEQANAVSEAVVSSVNTVATKTVEEAENIAVTSGVVRKEDLRPSAPQQEGEASKEKEEVAEEAQSGGD

SEQ ID NO: 36163 - protein, 617 aa, Homo sapiens
MFRTAVMMAASLALTGAVVAHAYYLKHQFYPTVVYLTKSSPSMAVLYIQAFVLVFLLGKVMGKVFFGQLRAAEMEHLLERSWYAVTETCLAFTVFRDDFSPRFVALFTLLLFLKCFHWLAEDRVDFMERSPNISWLFHCRIVSLMFLLGILDFLFVSHAYHSILTRGASVQLVFGFEYAILMTMVLTIFIKYVLHSVDLQSENPWDNKAVYMLYTELFTGFIKVLLYMAFMTIMIKVHTFPLFAIRPMYLAMRQFKKAVTDAIMSRRAIRNMNTLYPDATPEELQAMDNVCIICREEMVTGAKRLPCNHIFHTSCLRSWFQRQQTCPTCRMDVLRASLPAQSPPPPEPADQGPPPAPHPPPLLPQPPNFPQGLLPPFPPGMFPLWPPMGPFPPVPPPPSSGEAVAPPSTSAAALSRPSGAATTTAAGTSATAASATASGPGSGSAPEAGPAPGFPFPPPWMGMPLPPPFAFPPMPVPPAGFAGLTPEELRALEGHERQHLEARLQSLRNIHTLLDAAMLQINQYLTVLASLGPPRPATSVNSTEETATTVVAAASSTSIPSSEATTPTPGASPPAPEMERPPAPESVGTEEMPEDGEPDAAELRRRRLQKLESPVAH

SEQ ID NO: 36164 - protein, 565 aa, Homo sapiens
MFRTAVMMAASLALTGAVVAHAYYLKHQFYPTVVYLTKSSPSMAVLYIQAFVLVFLLGKVMGKVFFGQLRAAEMEHLLERSWYAVTETCLAFTVFRDDFSPRFVALFTLLLFLKCFHWLAEDRVDFYAILMTMVLTIFIKYVLHSVDLQSENPWDNKAVYMLYTELFTGFIKVLLYMAFMTIMIKVHTFPLFAIRPMYLAMRQFKKAVTDAIMSRRAIRNMNTLYPDATPEELQAMDNVCIICREEMVTGAKRLPCNHIFHTSCLRSWFQRQQTCPTCRMDVLRASLPAQSPPPPEPADQGPPPAPHPPPLLPQPPNFPQGLLPPFPPGMFPLWPPMGPFPPVPPPPSSGEAVAPPSTSAALSRPSGAATTTAAGTSATAASATASGPGSGSAPEAGPAPGFPFPPPWMGMPLPPPFAFPPMPVPPAGFAGLTPEELRALEGHERQHLEARLQSLRNIHTLLDAAMLQINQYLTVLASLGPPRPATSVNSTEETATTVVAAASSTSIPSSEATTPTPGASPPAPEMERPPAPESVGTEEMPEDGEPDAAELRRRRLQKLESPVAH

SEQ ID NO: 36165 - protein, 616 aa, Homo sapiens
MFRTAVMMAASLALTGAVVAHAYYLKHQFYPTVVYLTKSSPSMAVLYIQAFVLVFLLGKVMGKVFFGQLRAAEMEHLLERSWYAVTETCLAFTVFRDDFSPRFVALFTLLLFLKCFHWLAEDRVDFMERSPNISWLFHCRIVSLMFLLGILDFLFVSHAYHSILTRGASVQLVFGFEYAILMTMVLTIFIKYVLHSVDLQSENPWDNKAVYMLYTELFTGFIKVLLYMAFMTIMIKVHTFPLFAIRPMYLAMRQFKKAVTDAIMSRRAIRNMNTLYPDATPEELQAMDNVCIICREEMVTGAKRLPCNHIFHTSCLRSWFQRQQTCPTCRMDVLRASLPAQSPPPPEPADQGPPPAPHPPPLLPQPPNFPQGLLPPFPPGMFPLWPPMGPFPPVPPPPSSGEAVAPPSTSAALSRPSGAATTTAAGTSATAASATASGPGSGSAPEAGPAPGFPFPPPWMGMPLPPPFAFPPMPVPPAGFAGLTPEELRALEGHERQHLEARLQSLRNIHTLLDAAMLQINQYLTVLASLGPPRPATSVNSTEETATTVVAAASSTSIPSSEATTPTPGASPPAPEMERPPAPESVGTEEMPEDGEPDAAELRRRRLQKLESPVAH

SEQ ID NO: 36166 - protein, 299 aa, Homo sapiens
MALLVRVLRNQTSISQWVPVCSRLIPVSPTQGQGDRALSRTSQWPQMSQSRACGGSEQIPGIDIQLNRKYHTTRKLSTTKDSPQPVEEKVGAFTKIIEAMGFTGPLKYSKWKIKIAALRMYTSCVEKTDFEEFFLRCQMPDTFNSWFLITLLHVWMCLVRMKQEGRSGKYMCRIIVHFMWEDVQQRGRVMGVNPYILKKNMILMTNHFYAAILGYDEGILSDDHGLAAALWRTFFNRKCEDPRHLELLVEYVRKQIQYLDSMNGEDLLLTGEVSWRPLVEKNPQSILKPHSPTYNDEGL

SEQ ID NO: 36167 - protein, 273 aa, Homo sapiens
MALLVRVLRNQTSISQWVPVCSRLIPVSPTQGQGDRALSRTSQWPQMSQSRACGGSEQIPGIDIQLNRKYHTTRKLSTTKDSPQPVEEKVGAFTKIIEAMGFTGPLKYSKWKIKIAALRMYTSCVEKTDFEEFFLRCQMPDTFNSWFLITLLHVWMCLVRMKQEGRSGKYMCRIIVHFMWEDVQQRGRVMGGILSDDHGLAAALWRTFFNRKCEDPRHLELLVEYVRKQIQYLDSMNGEDLLLTGEVSWRPLVEKNPQSILKPHSPTYNDEGL

SEQ ID NO: 36168 - protein, 184 aa, Homo sapiens
MQPIDTCVSYPRTGSVSHFPGCQMPDTFNSWFLITLLHVWMCLVRMKQEGRSGKYMCRIIVHFMWEDVQQRGRVMGVNPYILKKNMILMTNHFYAAILGYDEGILSDDHGLAAALWRTFFNRKCEDPRHLELLVEYVRKQIQYLDSMNGEDLLLTGEVSWRPLVEKNPQSILKPHSPTYNDEGL

SEQ ID NO: 36169 - protein, 272 aa, Homo sapiens
MALLVRVLRNQTSISQWVPVCSRLIPVSPTQGQGDRALSRTSQWPQMSQSRACGGSEQIPGIDIQLNRKYHTTRKLSTTKDSPQPVEEKVGAFTKIIEAMGFTGPLKYRCQMPDTFNSWFLITLLHVWMCLVRMKQEGRSGKYMCRIIVHFMWEDVQQRGRVMGVNPYILKKNMILMTNHFYAAILGYDEGILSDDHGLAAALWRTFFNRKCEDPRHLELLVEYVRKQIQYLDSMNGEDLLLTGEVSWRPLVEKNPQSILKPHSPTYNDEGL

SEQ ID NO: 36170 - protein, 231 aa, Homo sapiens
MALLVRVLRNQTSISQWVPVCSRLIPVSPTQGQGDRALSRTSQKIKIAALRMYTSCVEKTDFEEFFLRCQMPDTFNSWFLITLLHVWMCLVRMKQEGRSGKYMCRIIVHFMWEDVQQRGRVMGVNPYILKKNMILMTNHFYAAILGYDEGILSDDHGLAAALWRTFFNRKCEDPRHLELLVEYVRKQIQYLDSMNGEDLLLTGEVSWRPLVEKNPQSILKPHSPTYNDEGL

SEQ ID NO: 36171 - protein, 218 aa, Homo sapiens
MSCSGSGADPEAAPASAASAPGPAPPVSAPAALPSSTAAENKASPAGTAGGPGAGAAAGGTGPLAARAGEPAERRGAAPVSAGGAAPPEGAISNGVYVLPSAANGDVKPVVSSTPLVDFLMQLEDYTPTIPDAVTGYYLNRAGFEASDPRIIRLISLAAQKFISDIANDALQHCKMKGTASGSSRSKSKDRKYTLTMEDLTPALSEYGINVKKPHYFT

SEQ ID NO: 36172 - protein, 351 aa, Homo sapiens
MAVPAAAMGPSALGQSGPGSMAPWCSVSSGPSRYVLGMQELFRGHSKTREFLAHSAKVHSVAWSCDGRRLASGSFDKTASVFLLEKDRLVKENNYRGHGDSVDQLCWHPSNPDLFVTASGDKTIRIWDVRTTKCIATVNTKGENINICWSPDGQTIAVGNKDDVVTFIDAKTHRSKAEEQFKFEVNEISWNNDNNMFFLTNGNGCINILSYPELKPVQSINAHPSNCICIKFDPMGKYFATGSADALVSLWDVDELVCVRCFSRLDWPVRTLSFSHDGKMLASASEDHFIDIAEVETGDKLWEVQCESPTFTVAWHPKRPLLAFACDDKDGKYDSSREAGTVKLFGLPNDS

SEQ ID NO: 36173 - protein, 327 aa, Homo sapiens
MAVPAAAMGPSALGQSGPGSMAPWCSVSSGPSRYVLGMQELFRGHSKTREFLAHSAKVHSVAWSCDGRRLASGSFDKTASVFLLEKDRLVKENNYRGHGDSVDQLCWHPSNPDLFVTASGDKTIRIWDVRTTKCIATVNTKGENINICWSPDGQTIAVGNKDDVVTFIDAKTHRSKAEEQFKFEVNEISWNNDNNMFFLTNGNGCINILSYPELKPVQSINAHPSNCICIKFDPMGKYFATGSADALVSLWDVDELVCVRCFSRLDWPVRTLSFSHDGKMLASASEDHFIDIAEVETGNFMRIYRLSPLAVRTSLVISSLHVTTSPA

SEQ ID NO: 36174 - protein, 439 aa, Homo sapiens
MAEDVSSAAPSPRGCADGRDADPTEEQMAETERNDEEQFECQELLECQVQVGAPEEEEEEEEDAGLVAEAEAVAAGWMLDFLCLSLCRAFRDGRSEDFRRTRNSAEAIIHGLSSLTACQLRTIYICQFLTRIAAGKTLDAQFENDERITPLESALMIWGSIEKEHDKLHEEIQNLIKIQAIAVCMENGNFKEAEEVFERIFGDPNSHMPFKSKLLMIISQKDTFHSFFQHFSYNHMMEKIKSYVNYVLSEKSSTFLMKAAAKVVESKRTRTITSQDKPSGNDVEMETEANLDTRKSVSDKQSAVTESSEGTVSLLRSHKNLFLSKLQHGTQQQDLNKKERRVGTPQSTKKKKESRRATESRIPVSKSQPVTPEKHRARKRQAWLWEEDKNLRSGVRKYGEGNWSKILLHYKFNNRTSVMLKDRWRTMKKLKLISSDSED

SEQ ID NO: 36175 - protein, 419 aa, Homo sapiens
MAEDVSSAAPSPRGCADGRDADPTEEQMAETERNDEEQFECQELLECQVQVGAPEEEEEEEEDAGLVAEAEAVAAGWMLDFLCLSLCRAFRDGRSEDFRRTRNSAEAIIHGLSSLTACQLRTIYICQFLTRIAAGKTLDAQFENDERITPLESALMIWGSIEKEHDKLHEEIQNLIKIQAIAVCMENGNFKEAEEVFERIFGDPNSHMPFKSKLLMIISQKDTFHSFFQHFSYNHMMEKIKSYVNYVLSEKSSTFLMKAAAKVVESKRTRTITSQDKPSGNDVEMETEANLDTRKRSHKNLFLSKLQHGTQQQDLNKKERRVGTPQSTKKKKESRRATESRIPVSKSQPVTPEKHRARKRQAWLWEEDKNLRSGVRKYGEGNWSKILLHYKFNNRTSVMLKDRWRTMKKLKLISSDSED

SEQ ID NO: 36176 - protein, 257 aa, Homo sapiens
MADKMDMSLDDIIKLNRSQRGGRGGGRGRGRAGSQGGRGGGAQAAARVNRGGGPIRNRPAIARGAAGGGGRNRPAPYSRPKQLPDKWQHDLFDSGFGGGAGVETGGKLLVSNLDFGVSDADIQELFAEFGTLKKAAVHYDRSGRSLGTADVHFERKADALKAMKQYNGVPLDGRPMNIQLVTSQIDAQRRPAQSVNRGGMTRNRGAGGFGGGGGTRRGTRGGARGRGRGAGRNSKQQLSAEELDAQLDAYNARMDTS

SEQ ID NO: 36177 - protein, 1347 aa, Homo sapiens
MKSCAVSLTTAAVAFGDEAKKMAEGKASRESEEESVSLTVEEREALGGMDSRLFGFVRLHEDGARTKTLLGKAVRCYESLILKAEGKVESDFFCQLGHFNLLLEDYSKALSAYQRYYSLQADYWKNAAFLYGLGLVYFYYNAFHWAIKAFQDVLYVDPSFCRAKEIHLRLGLMFKVNTDYKSSLKHFQLALIDCNPCTLSNAEIQFHIAHLYETQRKYHSAKEAYEQLLQTENLPAQVKATVLQQLGWMHHNMDLVGDKATKESYAIQYLQKSLEADPNSGQSWYFLGRCYSSIGKVQDAFISYRQSIDKSEASADTWCSIGVLYQQQNQPMDALQAYICAVQLDHGHAAAWMDLGTLYESCNQPQDAIKCYLNAARSKRCSNTSTLAARIKFLQNGSDNWNGGQSLSHHPVQQVYSLCLTPQKLQHLEQLRANRDNLNPAQKHQLEQLESQFVLMQQMRHKEVAQVRTTGIHNGAITDSSLPTNSVSNRQPHGALTRVSSVSQPGVRPACVEKLLSSGAFSAGCIPCGTSKILGSTDTILLGSNCIAGSESNGNVPYLQQNTHTLPHNHTDLNSSTEEPWRKQLSNSAQGLHKSQSSCLSGPNEEQPLFSTGSAQYHQATSTGIKKANEHLTLPSNSVPQGDADSHLSCHTATSGGQQGIMFTKESKPSKNRSLVPETSRHTGDTSNGCADVKGLSNHVHQLIADAVSSPNHGDSPNLLIADNPQLSALLIGKANGNVGTGTCDKVNNIHPAVHTKTDHSVASSPSSAISTATPSPKSTEQRSINSVTSLNSPHSGLHTVNGEGLGKSQSSTKVDLPLASHRSTSQILPSMSVSICPSSTEVLKACRNPGKNGLSNSCILLDKCPPPRPPTSPYPPLPKDKLNPPTPSIYLENKRDAFFPPLHQFCTNPKNPVTVIRGLAGALKLDLGLFSTKTLVEANNEHMVEVRTQLLQPADENWDPTGTKKIWRCESNRSHTTIAKYAQYQASSFQESLREENEKRTQHKDHSDNESTSSENSGRRRKGPFKTIKFGTNIDLSDNKKWKLQLHELTKLPAFARVVSAGNLLTHVGHTILGMNTVQLYMKVPGSRTPGHQENNNFCSVNINIGPGDCEWFVVPEDYWGVLNDFCEKNNLNFLMSSWWPNLEDLYEANVPVYRFIQRPGDLVWINAGTVHWVQAVGWCNNIAWNVGPLTACQYKLAVERYEWNKLKSVKSPVPMVHLSWNMARNIKVSDPKLFEMIKYCLLKILKQYQTLREALVAAGKEVIWHGRTNDEPAHYCSICEVEVFNLLFVTNESNTQKTYIVHCHDCARKTSKSLENFVVLEQYKMEDLIQVYDQFTLALSLSSSS

SEQ ID NO: 36178 - protein, 1079 aa, Homo sapiens
MKSCAVSLTTAAVAFGDEAKKMAEGKASRESEEESVSLTVEEREALGGMDSRLFGFVRLHEDGARTKTLLGKAVRCYESLILKAEGKVESDFFCQLGHFNLLLEDYSKALSAYQRYYSLQADYWKNAAFLYGLGLVYFYYNAFHWAIKAFQDVLYVDPSFCRAKEIHLRLGLMFKVNTDYKSSLKHFQLALIDCNPCTLSNAEIQFHIAHLYETQRKYHSAKEAYEQLLQTENLPAQVKATVLQQLGWMHHNMDLVGDKATKESYAIQYLQKSLEADPNSGQSWYFLGRCYSSIGKVQDAFISYRQSIDKSEASADTWCSIGVLYQQQNQPMDALQAYICAVQLDHGHAAAWMDLGTLYESCNQPQDAIKCYLNAARSKRCSNTSTLAARIKFLQNGSDNWNGGQSLSHHPVQQVYSLCLTPQKLQHLEQLRANRDNLNPAQKHQLEQLESQFVLMQQMRHKEVAQVRTTGIHNGAITDSSLPTNSVSNRQPHGALTRVSSVSQPGVRPACVEKLLSSGAFSAGCIPCGTSKILGSTDTILLGSNCIAGSESNGNVPYLQQNTHTLPHNHTDLNSSTEEPWRKQLSNSAQGLHKSQSSCLSGPNEEQPLFSTGSAQYHQATSTGIKKANEHLTLPSNSVPQGDADSHLSCHTATSGGQQGIMFTKESKPSKNRSLVPETSRHTGDTSNGCADVKGLSNHVHQLIADAVSSPNHGDSPNLLIADNPQLSALLIGKANGNVGTGTCDKVNNIHPAVHTKTDHSVASSPSSAISTATPSPKSTEQRSINSVTSLNSPHSGLHTVNGEGLGKSQSSTKVDLPLASHRSTSQILPSMSVSICPSSTEVLKACRNPGKNGLSNSCILLDKCPPPRPPTSPYPPLPKDKLNPPTPSIYLENKRDAFFPPLHQFCTNPKNPVTVIRGLAGALKLDLGLFSTKTLVEANNEHMVEVRTQLLQPADENWDPTGTKKIWRCESNRSHTTIAKYAQYQASSFQESLRAGMQWCDLSSLQPPPPGFKRFSHLSLPNSWNYRHLPSCPTNFCIFVETGFHHVGQACLELLTSGGLLASASQSAGITGVSHHAR

SEQ ID NO: 36179 - protein, 1240 aa, Homo sapiens
MKSCAVSLTTAAVAFGDEAKKMAEGKASRESEEESVSLTVEEREALGGMDSRLFGFVRLHEDGARTKTLLGKAVRCYESLILKAEGKVESDFFCQLGHFNLLLEDYSKALSAYQRYYSLQADYWKNAAFLYGLGLVYFYYNAFHWAIKAFQDVLYVDPSFCRAKEIHLRLGLMFKVNTDYKSSLKHFQLALIDCNPCTLSNAEIQFHIAHLYETQRKYHSAKEAYEQLLQTENLPAQVKATVLQQLGWMHHNMDLVGDKATKESYAIQYLQKSLEADPNSGQSWYFLGRCYSSIGKVQDAFISYRQSIDKSEASADTWCSIGVLYQQQNQPMDALQAYICAVQLDHGHAAAWMDLGTLYESCNQPQDAIKCYLNAARSKRCSNTSTLAARIKFLQNGSDNWNGGQSLSHHPVQQVYSLCLTPQKLQHLEQLRANRDNLNPAQKHQLEQLESQFVLMQQMRHKEVAQVRTTGIHNGAITDSSLPTNSVSNRQPHGALTRVSSVSQPGVRPACVEKLLSSGAFSAGCIPCGTSKILGSTDTILLGSNCIAGSESNGNVPYLQQNTHTLPHNHTDLNSSTEEPWRKQLSNSAQGLHKSQSSCLSGPNEEQPLFSTGSAQYHQATSTGIKKANEHLTLPSNSVPQGDADSHLSCHTATSGGQQGIMFTKESKPSKNRSLVPETSRHTGDTSNGCADVKGLSNHVHQLIADAVSSPNHGDSPNLLIADNPQLSALLIGKANGNVGTGTCDKVNNIHPAVHTKTDHSVASSPSSAISTATPSPKSTEQRSINSVTSLNSPHSGLHTVNGEGLGKSQSSTKVDLPLASHRSTSQILPSMSVSICPSSTEVLKACRNPGKNGLSNSCILLDKCPPPRPPTSPYPPLPKDKLNPPTPSIYLENKRDAFFPPLHQFCTNPKNPVTVIRGLAGALKLDLGLFSTKTLVEANNEHMVEVRTQLLQPADENWDPTGTKKIWRCESNRSHTTIAKYAQYQASSFQESLREENEKRTQHKDHSDNESTSSENSGRRRKGPFKTIKFGTNIDLSDNKKWKLQLHELTKLPAFARVVSAGNLLTHVGHTILGMNTVQLYMKVPGSRTPGHQENNNFCSVNINIGPGDCEWFVVPEDYWGVLNDFCEKNNLNFLMSSWWPNLEDLYEANVPVYRFIQRPGDLVWINAGTVHWVQAVGWCNNIAWNVGPLTACQYKLAVERYEWNKLKSVKSPVPMVHLSWNMARNIKVSDPKLFEMIK

SEQ ID NO: 36180 - protein, 1392 aa, Homo sapiens
MKSCAVSLTTAAVAFGDEAKKMAEGKASRESEEESVSLTVEEREALGGMDSRLFGFVRLHEDGARTKTLLGKAVRCYESLILKAEGKVESDFFCQLGHFNLLLEDYSKALSAYQRYYSLQADYWKNAAFLYGLGLVYFYYNAFHWAIKAFQDVLYVDPSFCRAKEIHLRLGLMFKVNTDYKSSLKHFQLALIDCNPCTLSNAEIQFHIAHLYETQRKYHSAKEAYEQLLQTENLPAQVKATVLQQLGWMHHNMDLVGDKATKESYAIQYLQKSLEADPNSGQSWYFLGRCYSSIGKVQDAFISYRQSIDKSEASADTWCSIGVLYQQQNQPMDALQAYICAVQLDHGHAAAWMDLGTLYESCNQPQDAIKCYLNAARSKRCSNTSTLAARIKFLQAQLCNLPQSSLQNKTKLLPSIEEAWSLPIPAELTSRQGAMNTAQQNGSDNWNGGQSLSHHPVQQVYSLCLTPQKLQHLEQLRANRDNLNPAQKHQLEQLESQFVLMQQMRHKEVAQVRTTGIHNGAITDSSLPTNSVSNRQPHGALTRVSSVSQPGVRPACVEKLLSSGAFSAGCIPCGTSKILGSTDTILLGSNCIAGSESNGNVPYLQQNTHTLPHNHTDLNSSTEEPWRKQLSNSAQGLHKSQSSCLSGPNEEQPLFSTGSAQYHQATSTGIKKANEHLTLPSNSVPQGDADSHLSCHTATSGGQQGIMFTKESKPSKNRSLVPETSRHTGDTSNGCADVKGLSNHVHQLIADAVSSPNHGDSPNLLIADNPQLSALLIGKANGNVGTGTCDKVNNIHPAVHTKTDHSVASSPSSAISTATPSPKSTEQRSINSVTSLNSPHSGLHTVNGEGLGKSQSSTKVDLPLASHRSTSQILPSMSVSICPSSTEVLKACRNPGKNGLSNSCILLDKCPPPRPPTSPYPPLPKDKLNPPTPSIYLENKRDAFFPPLHQFCTNPKNPVTVIRGLAGALKLDLGLFSTKTLVEANNEHMVEVRTQLLQPADENWDPTGTKKIWRCESNRSHTTIAKYAQYQASSFQESLREENEKRTQHKDHSDNESTSSENSGRRRKGPFKTIKFGTNIDLSDNKKWKLQLHELTKLPAFARVVSAGNLLTHVGHTILGMNTVQLYMKVPGSRTPGHQENNNFCSVNINIGPGDCEWFVVPEDYWGVLNDFCEKNNLNFLMSSWWPNLEDLYEANVPVYRFIQRPGDLVWINAGTVHWVQAVGWCNNIAWNVGPLTACQYKLAVERYEWNKLKSVKSPVPMVHLSWNMARNIKVSDPKLFEMIKYCLLKILKQYQTLREALVAAGKEVIWHGRTNDEPAHYCSICEVEVFNLLFVTNESNTQKTYIVHCHDCARKTSKSLENFVVLEQYKMEDLIQVYDQFTLALSLSSSS

SEQ ID NO: 36181 - protein, 1211 aa, Homo sapiens
MKSCAVSLTTAAVAFGDEAKKMAEGKASRESEEESVSLTVEEREALGGMDSRLFGFVRLHEDGARTKTLLGKAVRCYESLILKAEGKVESDFFCQLGHFNLLLEDYSKALSAYQRYYSLQADYWKNAAFLYGLGLVYFYYNAFHWAIKAFQDVLYVDPSFCRAKEIHLRLGLMFKVNTDYKSSLKHFQLALIDCNPCTLSNAEIQFHIAHLYETQRKYHSAKEAYEQLLQTENLPAQVKATVLQQLGWMHHNMDLVGDKATKESYAIQYLQKSLEADPNSGQSWYFLGRCYSSIGKVQDAFISYRQSIDKSEASADTWCSIGVLYQQQNQPMDALQAYICAVQLDHGHAAAWMDLGTLYESCNQPQDAIKCYLNAARSKRCSNTSTLAARIKFLQAQLCNLPQSSLQNKTKLLPSIEEAWSLPIPAELTSRQGAMNTAQQNGSDNWNGGQSLSHHPVQQVYSLCLTPQKLQHLEQLRANRDNLNPAQKHQLEQLESQFVLMQQMRHKEVAQGLHKSQSSCLSGPNEEQPLFSTGSAQYHQATSTGIKKANEHLTLPSNSVPQGDADSHLSCHTATSGGQQGIMFTKESKPSKNRSLVPETSRHTGDTSNGCADVKGLSNHVHQLIADAVSSPNHGDSPNLLIADNPQLSALLIGKANGNVGTGTCDKVNNIHPAVHTKTDHSVASSPSSAISTATPSPKSTEQRSINSVTSLNSPHSGLHTVNGEGLGKSQSSTKVDLPLASHRSTSQILPSMSVSICPSSTEVLKACRNPGKNGLSNSCILLDKCPPPRPPTSPYPPLPKDKLNPPTPSIYLENKRDAFFPPLHQFCTNPKNPVTVIRGLAGALKLDLGLFSTKTLVEANNEHMVEVRTQLLQPADENWDPTGTKKIWRCESNRSHTTIAKYAQYQASSFQESLREENEKRTQHKDHSDNESTSSENSGRRRKGPFKTIKFGTNIDLSDNKKWKLQLHELTKLPAFARVVSAGNLLTHVGHTILGMNTVQLYMKVPGSRTPGHQENNNFCSVNINIGPGDCEWFVVPEDYWGVLNDFCEKNNLNFLMSSWWPNLEDLYEANVPVYRFIQRPGDLVWINAGTVHWVQAVGWCNNIAWNVGPLTACQYKLAVERYEWNKLKSVKSPVPMVHLSWNMARNIKVSDPKLFEMIKYCLLKILKQYQTLREALVAAGKEVIWHGRTNDEPAHYCSICEALSLSSSS

SEQ ID NO: 36182 - protein, 215 aa, Homo sapiens
MLAGQLEARDPKEGTHPEDPCPGAGAVMEKTAVAAEVLTEDCNTGEMPPLQQQIIRLHQELGRQKSLWADVHGKLRSHIDALREQNMELREKLRALQLQRWKARKKSAASPHAGQESHTLALEPAFGKISPLSADEETIPKYAGHKNQSATLLGQRSSSNNSAPPKPMSLKIERISSWKTPPQENRDKNLSRRRQDRRATPTGRPTPCAERRGGV

SEQ ID NO: 36183 - protein, 81 aa, Homo sapiens
MESPKKKNQQLKVGILHLGSRQKKIRIQLRSQCATWKVICKSCISQTPGINLDLGSGVKVKIIPKEEHCKMPEAGEEQPQV

SEQ ID NO: 36184 - protein, 69 aa, Homo sapiens
MESPKKKNQQLKVGILHLGSRQKKIRIQLRSQVLGREMRDMEGDLQELHQSNTGDKSGFGFRRQGEDNT

SEQ ID NO: 36185 - protein, 767 aa, Homo sapiens
MVGQRAQHSPVSLLLLIHLCLLHLRASGQPHPTPEAPVEEVVSVQGVRGGSVELACGSGPAPLLVLWSFTPLGSLVPRPVAVTDGAMSKVEAIASALGVVSLRNSSLVLGELHEGARGHFLCQVLHVAGGQLHAAYSHLTLAVLVPVSKPQVRLSNPSPVEGASVVATCAVREGTEPVTFAWQHRAPRGLGEALVGVTEPLFQLDPVNRTHLGWYMCSASNSVNRLSSDGAFLDVIYGPDKPVITMEPLGLTEEGFWASEREEVTLSCLAASNPPSHYVWLRDHTQVHTGPTYVIARAGRVHTGLYTCLARNSYLDTRTQTTVQLTIYYPPEGQPSCAVHPSPEAVTLLCAWPGGLPPAQLQWEGPQGPGPTAPSNVTWSHAAAQLPSGSVFTCTGQHPALAPPALCTVMLWEPLGRPTCWSTATMGDQFIMLSCEWPGGEPPATLGWLDEQQQPLGGSSSSMAVHLLQAQEDLAGREFTCRGTHLLRTPDPHCHLQLEAPQLDVAEPRVSVLEGGEAWLECSLRGGTPPAQLLWLGPQQQKVDPGTSGFMLHPEGAQLRLGIYDADPAHHRGTYQCVARNAVGNSSQSVLLEVLRYPAPPNVTISRLTYGRHRREVQLQWAILGPGNLTGFLVQRKASALGPGAGAWETAASDIEPESRGRRLGGLDPGVLYAFRILALNHHTAGHPSEVKIPADPPFSAYPAVLGAAGTGMVVATVASLLVFQYAARHPETFPRLETPTTTPGLDPAQETTDSPVNVTITVTATP

SEQ ID NO: 36186 - protein, 285 aa, Homo sapiens
MEVPPPAPRSFLCRALCLFPRVFAAEAVTADSEVLEERQKRLPYVPEPYYPESGWDRLRELFGKDEQQRISKDLANICKTAATAGIIGWVYGGIPAFIHAKQQYIEQSQAEIYHNRFDAVQSAHRAATRGFIRYGWRWGWRTAVFVTIFNTVNTSLNVYRNKDALSHFVIAGAVTGSLFRINVGLRGLVAGGIIGALLGTPVGGLLMAFQKYSGETVQERKQKDRKALHELKLEEWKGRLQVTEHLPEKIESSLQEDEPENDAKKIEALLNLPRNPSVIDKQDKD

SEQ ID NO: 36187 - protein, 557 aa, Homo sapiens
MDSTVPSALELPQRLALNPRESPRSPEEEEPHLLSSLAAVQTLASVIRPCYGPHGRQKFLVTMKGETVCTGCATAILRALELEHPAAWLLREAGQTQAENSGDGTAFVVLLTEALLEQAEQLLKAGLPRPQLREAYATATAEVLATLPSLAIQSLGPLEDPSWALHSVMNTHTLSPMDHLTKLVAHACWAIKELDGSFKPERVGVCALPGGTLEDSCLLPGLAISGKLCGQMATVLSGARVALFACPFGPAHPNAPATARLSSPADLAQFSKGSDQLLEKQVGQLAAAGINVAVVLGEVDEETLTLADKYGIVVIQARSWMEIIYLSEVLDTPLLPRLLPPQRPGKCQRVYRQELGDGLAVVFEWECTGTPALTVVLRGATTQGLRSAEQAVYHGIDAYFQLCQDPRLIPGAGATEMALAKMLSDKGSRLEGPSGPAFLAFAWALKYLPKTLAENAGLAVSDVMAEMSGVHQGGNLLMGVGTEGIINVAQEGVWDTLIVKAQGFRAVAEVVLQLVTVDEIVVAKKSPTHQEIWNPDSKKTKKHPPPVETKKILGLNN

SEQ ID NO: 36188 - protein, 297 aa, Homo sapiens
MASPQLCRALVSAQWVAEALRAPRAGQPLQLLDASWYLPKLGRDARREFEERHIPGAAFFDIDQCSDRTSPYDHMLPGAEHFAEYAGRLGVGAATHVVIYDASDQGLYSAPRVWWMFRAFGHHAVSLLDGGLRHWLRQNLPLSSGKSQPAPAEFRAQLDPAFIKTYEDIKENLESRRFQVVDSRATGRFRGTEPEPRDGIEPGHIPGTVNIPFTDFLSQEGLEKSPEEIRHLFQEKKVDLSKPLVATCGSGVTACHVALGAYLCGKPDVPIYDGSWVEWYMRARPEDVISEGRGKTH

SEQ ID NO: 36189 - protein, 317 aa, Homo sapiens
MAEPGSRESETRARSPSVAAMASPQLCRALVSAQWVAEALRAPRAGQPLQLLDASWYLPKLGRDARREFEERHIPGAAFFDIDQCSDRTSPYDHMLPGAEHFAEYAGRLGVGAATHVVIYDASDQGLYSAPRVWWMFRAFGHHAVSLLDGGLRHWLRQNLPLSSGKSQPAPAEFRAQLDPAFIKTYEDIKENLESRRFQVVDSRATGRFRGTEPEPRDGIEPGHIPGTVNIPFTDFLSQEGLEKSPEEIRHLFQEKKVDLSKPLVATCGSGVTACHVALGAYLCGKPDVPIYDGSWVEWYMRARPEDVISEGRGKTH

SEQ ID NO: 36190 - protein, 1050 aa, Homo sapiens
MEVAVEKAVAAAAAASAAASGGPSAAPSGENEAESRQGPDSERGGEAARLNLLDTCAVCHQNIQSRAPKLLPCLHSFCQRCLPAPQRYLMLPAPMLGSAETPPPVPAPGSPVSGSSPFATQVGVIRCPVCSQECAERHIIDNFFVKDTTEVPSSTVEKSNQVCTSCEDNAEANGFCVECVEWLCKTCIRAHQRVKFTKDHTVRQKEEVSPEAVGVTSQRPVFCPFHKKEQLKLYCETCDKLTCRDCQLLEHKEHRYQFIEEAFQNQKVIIDTLITKLMEKTKYIKFTGNQIQNRIIEVNQNQKQVEQDIKVAIFTLMVEINKKGKALLHQLESLAKDHRMKLMQQQQEVAGLSKQLEHVMHFSKWAVSSGSSTALLYSKRLITYRLRHLLRARCDASPVTNNTIQFHCDPSFWAQNIINLGSLVIEDKESQPQMPKQNPVVEQNSQPPSGLSSNQLSKFPTQISLAQLRLQHMQQQVMAQRQQVQRRPAPVGLPNPRMQGPIQQPSISHQQPPPRLINFQNHSPKPNGPVLPPHPQQLRYPPNQNIPRQAIKPNPLQMAFLAQQAIKQWQISSGQGTPSTTNSTSSTPSSPTITSAAGYDGKAFGSPMIDLSSPVGGSYNLPSLPDIDCSSTIMLDNIVRKDTNIDHGQPRPPSNRTVQSPNSSVPSPGLAGPVTMTSVHPPIRSPSASSVGSRGSSGSSSKPAGADSTHKVPVVMLEPIRIKQENSGPPENYDFPVVIVKQESDEESRPQNANYPRSILTSLLLNSSQSSTSEETVLRSDAPDSTGDQPGLHQDNSSNGKSEWLDPSQKSPLHVGETRKEDDPNEDWCAVCQNGGELLCCEKCPKVFHLSCHVPTLTNFPSGEWICTFCRDLSKPEVEYDCDAPSHNSEKKKTEGLVKLTPIDKRKCERLLLFLYCHEMSLAFQDPVPLTVPDYYKIIKNPMDLSTIKKRLQEDYSMYSKPEDFVADFRLIFQNCAEFNEPDSEVANAGIKLENYFEELLKNLYPEKRFPKPEFRNESEDNKFSDDSDDDFVQPRKKRLKSIEERQLLK

SEQ ID NO: 36191 - protein, 1016 aa, Homo sapiens
MEVAVEKAVAAAAAASAAASGGPSAAPSGENEAESRQGPDSERGGEAARLNLLDTCAVCHQNIQSRAPKLLPCLHSFCQRCLPAPQRYLMLPAPMLGSAETPPPVPAPGSPVSGSSPFATQVGVIRCPVCSQECAERHIIDNFFVKDTTEVPSSTVEKSNQVCTSCEDNAEANGFCVECVEWLCKTCIRAHQRVKFTKDHTVRQKEEVSPEAVGVTSQRPVFCPFHKKEQLKLYCETCDKLTCRDCQLLEHKEHRYQFIEEAFQNQKVIIDTLITKLMEKTKYIKFTGNQIQNRIIEVNQNQKQVEQDIKVAIFTLMVEINKKGKALLHQLESLAKDHRMKLMQQQQEVAGLSKQLEHVMHFSKWAVSSGSSTALLYSKRLITYRLRHLLRARCDASPVTNNTIQFHCDPSFWAQNIINLGSLVIEDKESQPQMPKQNPVVEQNSQPPSGLSSNQLSKFPTQISLAQLRLQHMQQQQPPPRLINFQNHSPKPNGPVLPPHPQQLRYPPNQNIPRQAIKPNPLQMAFLAQQAIKQWQISSGQGTPSTTNSTSSTPSSPTITSAAGYDGKAFGSPMIDLSSPVGGSYNLPSLPDIDCSSTIMLDNIVRKDTNIDHGQPRPPSNRTVQSPNSSVPSPGLAGPVTMTSVHPPIRSPSASSVGSRGSSGSSSKPAGADSTHKVPVVMLEPIRIKQENSGPPENYDFPVVIVKQESDEESRPQNANYPRSILTSLLLNSSQSSTSEETVLRSDAPDSTGDQPGLHQDNSSNGKSEWLDPSQKSPLHVGETRKEDDPNEDWCAVCQNGGELLCCEKCPKVFHLSCHVPTLTNFPSGEWICTFCRDLSKPEVEYDCDAPSHNSEKKKTEGLVKLTPIDKRKCERLLLFLYCHEMSLAFQDPVPLTVPDYYKIIKNPMDLSTIKKRLQEDYSMYSKPEDFVADFRLIFQNCAEFNEPDSEVANAGIKLENYFEELLKNLYPEKRFPKPEFRNESEDNKFSDDSDDDFVQPRKKRLKSIEERQLLK

SEQ ID NO: 36192 - protein, 70 aa, Homo sapiens
MGSKIFCCCRKTSEGSSTTVGFHNPRMFEQHHPRSFNLNTNSLHSAVPKRHPRLPYDNRMMLKACILRRP

SEQ ID NO: 36193 - protein, 548 aa, Homo sapiens
MKTLETQPLAPDCCPSDQDPAPAHPSPHASPMNKNADSELMPPPPERGDPPRLSPDPVAGSAVSQELREGDPVSLSTPLETEFGSPSELSPRIEEQELSENTSLPAEEANGSLSEEEANGPELGSGKAMEDTSGEPAAEDEGDTAWNYSFSQLPRFLSGSWSEFSTQPENFLKGCKWAPDGSCILTNSADNILRIYNLPPELYHEGEQVEYAEMVPVLRMVEGDTIYDYCWYSLMSSAQPDTSYVASSSRENPIHIWDAFTGELRASFRAYNHLDELTAAHSLCFSPDGSQLFCGFNRTVRVFSTARPGRDCEVRATFAKKQGQSGIISCIAFSPAQPLYACGSYGRSLGLYAWDDGSPLALLGGHQGGITHLCFHPDGNRFFSGARKDAELLCWDLRQSGYPLWSLGREVTTNQRIYFDLDPTGQFLVSGSTSGAVSVWDTDGPGNDGKPEPVLSFLPQKDCTNGVSLHPSLPLLATASGQRVFPEPTESGDEGEELGLPLLSTRHVHLECRLQLWWCGGAPDSSIPDDHQGEKGQGGTEGGVGELI

SEQ ID NO: 36194 - protein, 921 aa, Homo sapiens
MATPSAAFEALMNGVTSWDVPEDAVPCELLLIGEASFPVMVNDMGQVLIAASSYGRGRLVVVSHEDYLVEAQLTPFLLNAVGWLCSSPGAPIGVHPSLAPLAKILEGSGVDAKVEPEVKDSLGVYCIDAYNETMTEKLVKFMKCGGGLLIGGQAWDWANQGEDERVLFTFPGNLVTSVAGIYFTDNKGDTSFFKVSKKMPKIPVLVSCEDDLSDDREELLHGISELDISNSDCFPSQLLVHGALAFPLGLDSYHGCVIAAARYGRGRVVVTGHKVLFTVGKLGPFLLNAVRWLDGGRRGKVVVQTELRTLSGLLAVGGIDTSIEPNLTSDASVYCFEPVSEVGVKELQEFVAEGGGLFVGAQAWWWAFKNPGVSPLARFPGNLLLNPFGISITSQSLNPGPFRTPKAGIRTYHFRSTLAEFQVIMGRKRGNVEKGWLAKLGPDGAAFLQIPAEEIPAYMSVHRLLRKLLSRYRLPVATRENPVINDCCRGAMLSLATGLAHSGSDLSLLVPEIEDMYSSPYLRPSESPITVEVNCTNPGTRYCWMSTGLYIPGRQIIEVSLPEAAASADLKIQIGCHTDDLTRASKLFRGPLVINRCCLDKPTKSITCLWGGLLYIIVPQNSKLGSVPVTVKGAVHAPYYKLGETTLEEWKRRIQENPGPWGELATDNIILTVPTANLRTLENPEPLLRLWDEVMQAVARLGAEPFPLRLPQRIVADVQISVGWMHAGYPIMCHLESVQELINEKLIRTKGLWGPVHELGRNQQRQEWEFPPHTTEATCNLWCVYVHETVLGIPRSRANIALWPPVREKRVRIYLSKGPNVKNWNAWTALETYLQLQEAFGWEPFIRLFTEYRNQTNLPTENVDKMNLWVKMFSHQVQKNLAPFFEAWAWPIQKEVATSLAYLPEWKENIMKLYLLTQMPH

SEQ ID NO: 36195 - protein, 919 aa, Homo sapiens
MATPSAAFEALMNGVTSWDVPEDAVPCELLLIGEASFPVMVNDMGQVLIAASSYGRGRLVVVSHEDYLVEAQLTPFLLNAVGWLCSSPGAPIGVHPSLAPLAKILEGSGVDAKVEPEVKDSLGVYCIDAYNETMTEKLVKFMKCGGGLLIGGQAWDWANQGEDERVLFTFPGNLVTSVAGIYFTDNKGDTSFFKVSKKMPKIPVLVSCEDDLSDDREELLHGISELDISNSDCFPSQLLVHGALAFPLGLDSYHGCVIAAARYGRGRVVVTGHKVLFTVGKLGPFLLNAVRWLDGGRRGKVVVQTELRTLSGLLAVGGIDTSIEPNLTSDASVYCFEPVSEVGVKELQEFVAEGGGLFVGAQAWWWAFKNPGVSPLARFPGNLLLNPFGISITSQSLNPGPFRTPKAGIRTYHFRSTLAEFQVIMGRKRGNVEKGWLAKLGPDGAAFLQIPAEEIPAYMSVHRLLRKLLSRYRLPVATRENPVINDCCRGAMLSLATGLAHSGSDLSLLVPEIEDMYSSPYLRPSESPITVEVNCTNPGTRYCWMSTGLYIPGRQIIEVSLPEAAASADLKIQIGCHTDDLTRASKLFRGPLVINRCCLDKPTKSITCLWGGLLYIIVPQNSKLGSVPVTVKGAVHAPYYKLGETTLEEWKRRIQENPGPWGELATDNIILTVPTANLRTLENPEPLLRLWDEVMQAVARLGAEPFPLRLPQRIVADVQISVGWMHAGYPIMCHLESVQELINEKLIRTKGLWGPVHELGRNQQRQEWEFPPHTTEATCNLWCVYVHETVLGIPRSRANIALWPPVREKRVRIYLSKGPNVKNWNAWTALETYLQLQEAFGWEPFIRLFTEYRNQTNLPTENVDKMNLWVKMFSHQVQKNLAPFFEAWAWPIQKEVATSLAYLPEWKENIMKLYLLTQM

SEQ ID NO: 36196 - protein, 206 aa, Homo sapiens
MEKLYKENEGKPENERNLESEGKPEDEGSTEDEGKSDEEEKPDMEGKTECEGKREDEGEPGDEGQLEDEGNQEKQGKSEGEDKPQSEGKPASQAKPESQPRAAEKRPAEDYVPRKAKRKTDRGTDDSPKDSQEDLQERHLSSEEMMRECGDVSRAQEELRKKQKMGGFHWMQRDVQDPFAPRGQRGVRGVRGGGRGQKDLEDVPYV

SEQ ID NO: 36197 - protein, 1127 aa, Homo sapiens
MTSLYGRHAEKTTDMPKPSAPKVHVQRSVSRDTIAIHFSASGEEEEEEEEEFREYFEEGLDDQSIVTGLEAKEDLYLEPQVGHDPAGPAASPVLADGLSVSQAPAILPVSKNTVKLLESPVPAAQVLSTVPLAVSPGSSSSGPLASSPSVSSLSEQKTSSSSPLSSPSKSPILSSSASTSTLSSAKPFMSLVKSLSTEVEPKESPHPARHRHLMKTLVKSLSTDTSRQESDTVSYKPPDSKLNLHLFKQFTQPRNTGGDSKTAPSSPLTSPSDTRSFFKVPEMEAKIEDTKRRLSEVIYEPFQLLSKIIGEESGSHRPKALSSSASELSNLSSLNGHLESNNNYSIKEEECDSEGDGYGSDSNIPRSDHPKSTGEPTREIELKSSQGSSLKDLGLKTSSLVLEKCSLSALVSKEDEEFCELYTEDFDLETEGESKVDKLSDIPLKPEVLAEDGVVLDSEDEVDSAVQHPELPVKTLGFFIMCVYVYLILPLPHYVSGLFLGIGLGFMTAVCVIWFFTPPSAHKYHKLHKNLRHWNTRSLDIKEPEILKGWMNEIYNYDPETYHATLTHSVFVRLEGGTLRLSKPNKNISRRASYNEPKPEVTYISQKIYDLSDSKIYLVPKTLARKRIWNKKYPICIELGQQDDFMSKAQTDKETSEEKPPAEGSEDPKKPPRPQEGTRSSQRDQILYLFGRTGREKEEWFRRFILASKLKSEIKKSSGVSGGKPGLLPAHSRHNSPSGHLTHSRSSSKGSVEEIMSQPKQKELAGSVRQKMLLDYSVYMGRCVPQESRSPQRSPLQSAESSPTAGKKLPEVPPSEEEEQEAWVNALLGRIFWDFLGEKYWSDLVSKKIQMKLSKIKLPYFMNELTLTELDMGVAVPKILQAFKPYVDHQGLWIDLEMSYNGSFLMTLETKMNLTKLGKEPLVEALKVGEIGKEGCRPRAFCLADSDEESSSAGSSEEDDAPEPSGGDKQLLPGAEGYVGGHRTSKIMRFVDKITKSKYFQKATETEFIKKKIEEVSNTPLLLTVEVQECRGTLAVNIPPPPTDRVWYGFRKPPHVELKARPKLGEREVTLVHVTDWIEKKLEQEFQKVFVMPNMDDVYITIMHSAMDPRSTSCLLKDPPVEAADQP

SEQ ID NO: 36198 - protein, 1134 aa, Homo sapiens
MTSLYGRHAEKTTDMPKPSAPKVHVQRSVSRDTIAIHFSASGEEEEEEEEEFREYFEEGLDDQSIVTGLEAKEDLYLEPQVGHDPAGPAASPVLADGLSVSQAPAILPVSKNTVKLLESPVPAAQVLSTVPLAVSPGSSSSGPLASSPSVSSLSEQKTSSSSPLSSPSKSPILSSSASTSTLSSAKPFMSLVKSLSTEVEPKESPHPARHRHLMKTLVKSLSTDTSRQESDTVSYKPPDSKLNLHLFKQFTQPRNTGGDSKTAPSSPLTSPSDTRSFFKVPEMEAKIEDTKRRLSEVIYEPFQLLSKIIGEESGSHRPKALSSSASELSNLSSLNGHLESNNNYSIKEEECDSEGDGYGSDSNIPRSDHPKSTGEPTREIELKSSQGSSLKDLGLKTSSLVLEKCSLSALVSKEDEEFCELYTEDFDLETEGESKVDKLSDIPLKPEVLAEDGVVLDSEDEVDSAVQHPELPVKTLGFFIMCVYVYLILPLPHYVSGLFLGIGLGFMTAVCVIWFFTPPSAHKYHKLHKNLRHWNTRSLDIKEPEILKGWMNEIYNYDPETYHATLTHSVFVRLEGGTLRLSKPNKNISRRASYNEPKPEVTYISQKIYDLSDSKIYLVPKTLARKRIWNKKYPICIELGQQDDFMSKAQTDKETSEEKPPAEGSEDPKKPPRPQEGTRSSQRDQILYLFGRTGREKEEWFRRFILASKLKSEIKKSSGVSGGKPAPVFLAPGLLPAHSRHNSPSGHLTHSRSSSKGSVEEIMSQPKQKELAGSVRQKMLLDYSVYMGRCVPQESRSPQRSPLQSAESSPTAGKKLPEVPPSEEEEQEAWVNALLGRIFWDFLGEKYWSDLVSKKIQMKLSKIKLPYFMNELTLTELDMGVAVPKILQAFKPYVDHQGLWIDLEMSYNGSFLMTLETKMNLTKLGKEPLVEALKVGEIGKEGCRPRAFCLADSDEESSSAGSSEEDDAPEPSGGDKQLLPGAEGYVGGHRTSKIMRFVDKITKSKYFQKATETEFIKKKIEEVSNTPLLLTVEVQECRGTLAVNIPPPPTDRVWYGFRKPPHVELKARPKLGEREVTLVHVTDWIEKKLEQEFQKVFVMPNMDDVYITIMHSAMDPRSTSCLLKDPPVEAADQP

SEQ ID NO: 36199 - protein, 410 aa, Homo sapiens
MVLKAEHTRSPSATLPSNVPSCRSLSSSEDGPSGPSSLADGGLAHNLQDSVRHRILYLSEQLRVEKASRDGNTVSYLKLVSKADRHQVPHIQQAFEKVNQRASATIAQIEHRLHQCHQQLQELEEGCRPEGLLLMAESDPANCEPPSEKALLSEPPEPGGEDGPVNLPHASRPFILESRFQSLQQGTCLETEDVAQQQNLLLQKVKAELEEAKRFHISLQESYHSLKERSLTDLQLLLESLQEEKCRQALMEEQVNGRLQGQLNEIYNLKHNLACSEERMAYLSYERAKEIWEITETFKSRISKLEMLQQVTQLEAAEHLQSRPPQMLFKFLSPRLSLATVLLVFVSTLCACPSSLISSRLCTCTMLMLIGLGVLAWQRWRAIPATDWQEWVPSRCRLYSKDSGPPADGP

SEQ ID NO: 36200 - protein, 940 aa, Homo sapiens
MARKRAAGGEPRGRELRSQKSKAKSKARREEEEEDAFEDEKPPKKSLLSKVSQGKRKRGCSHPGGSADGPAKKKVAKVTVKSENLKVIKDEALSDGDDLRDFPSDLKKAHHLKRGATMNEDSNEEEEESENDWEEVEELSEPVLGDVRESTAFSRSLLPVKPVEIEIETPEQAKTRERSEKIKLEFETYLRRAMKRFNKGVHEDTHKVHLLCLLANGFYRNNICSQPDLHAIGLSIIPARFTRVLPRDVDTYYLSNLVKWFIGTFTVNAELSASEQDNLQTTLERRFAIYSARDDEELVHIFLLILRALQLLTRLVLSLQPIPLKSATAKGKKPSKERLTADPGGSSETSSQVLENHTKPKTSKGTKQEETFAKGTCRPSAKGKRNKGGRKKRSKPSSSEEDEGPGDKQEKATQRRPHGRERRVASRVSYKEESGSDEAGSGSDFELSSGEASDPSDEDSEPGPPKQRKAPAPQRTKAGSKSASRTHRGSHRKDPSLPAASSSSSSSKRGKKMCSDGEKAEKRSIAGIDQWLEVFCEQEEKWVCVDCVHGVVGQPLTCYKYATKPMTYVVGIDSDGWVRDVTQRYDPVWMTVTRKCRVDAEWWAETLRPYQSPFMDREKKEDLEFQAKHMDQPLPTAIGLYKNHPLYALKRHLLKYEAIYPETAAILGYCRGEAVYSRDCVHTLHSRDTWLKKARVVRLGEVPYKMVKGFSNRARKARLAEPQLREENDLGLFGYWQTEEYQPPVAVDGKVPRNEFGNVYLFLPSMMPIGCVQLNLPNLHRVARKLDIDCVQAITGFDFHGGYSHPVTDGYIVCEEFKDVLLTAWENEQAVIERKEKEKKEKRALGNWKLLAKGLLIRERLKRRYGPKSEAAAPHTDAGGGLSSDEEEGTSSQAEAARILAASWPQNREDEEKQKLKGGPKKTKREKKAAASHLFPFEQL

SEQ ID NO: 36201 - protein, 903 aa, Homo sapiens
MARKRAAGGEPRGRELRSQKSKAKSKARREEEEEDAFEDEKPPKKSLLSKVSQGKRKRGCSHPGGSADGPAKKKVAKVTVKSENLKVIKDEALSDGDDLRDFPSDLKKAHHLKRGATMNEDSNEEEEESENDWEEAKTRERSEKIKLEFETYLRRAMKRFNKGVHEDTHKVHLLCLLANGFYRNNICSQPDLHAIGLSIIPARFTRVLPRDVDTYYLSNLVKWFIGTFTVNAELSASEQDNLQTTLERRFAIYSARDDEELVHIFLLILRALQLLTRLVLSLQPIPLKSATAKGKKPSKERLTADPGGSSETSSQVLENHTKPKTSKGTKQEETFAKGTCRPSAKGKRNKGGRKKRSKPSSSEEDEGPGDKQEKATQRRPHGRERRVASRVSYKEESGSDEAGSGSDFELSSGEASDPSDEDSEPGPPKQRKAPAPQRTKAGSKSASRTHRGSHRKDPSLPAASSSSSSSKRGKKMCSDGEKAEKRSIAGIDQWLEVFCEQEEKWVCVDCVHGVVGQPLTCYKYATKPMTYVVGIDSDGWVRDVTQRYDPVWMTVTRKCRVDAEWWAETLRPYQSPFMDREKKEDLEFQAKHMDQPLPTAIGLYKNHPLYALKRHLLKYEAIYPETAAILGYCRGEAVYSRDCVHTLHSRDTWLKKARVVRLGEVPYKMVKGFSNRARKARLAEPQLREENDLGLFGYWQTEEYQPPVAVDGKVPRNEFGNVYLFLPSMMPIGCVQLNLPNLHRVARKLDIDCVQAITGFDFHGGYSHPVTDGYIVCEEFKDVLLTAWENEQAVIERKEKEKKEKRALGNWKLLAKGLLIRERLKRRYGPKSEAAAPHTDAGGGLSSDEEEGTSSQAEAARILAASWPQNREDEEKQKLKGGPKKTKREKKAAASHLFPFEQL

SEQ ID NO: 36202 - protein, 140 aa, Homo sapiens
MARKRAAGGEPRGRELRSQKSKAKSKARREEEEEDAFEDEKPPKKSLLSKVSQGKRKRGCSHPGGSADGPAKKKVAKVTVKSENLKVIKDEALSDGDDLRDFPSDLKKAHHLKRGATMNEDSNEEEEESENDWEEVEVKR

SEQ ID NO: 36203 - protein, 433 aa, Homo sapiens
MLPAGCSRRLVAELQGALDACAQRQLQLEQSLRVCRRLLHAWEPTGTRALKPPPGPETNGEDPLPACTPSPQDLKELEFLTQALEKAVRVRRGITKAGERDKAPSLKSRSIVTSSGTTASAPPHSPGQAGGHASDTRPTKGLRQTTVPAKGHPERRLLSVGDGTRVGMGARTPRPGAGLRDQQMAPSAAPQAPEAFTLKEKGHLLRLPAAFRKAASQNSSLWAQLSSTQTSDSTDAAAAKTQFLQNMQTASGGPQPRLSAVEVEAEAGRLRKACSLLRLRMREELSAAPMDWMQEYRCLLTLEGLQAMVGQCLHRLQELRAAVAEQPPRPCPVGRPPGASPSCGGRAEPAWSPQLLVYSSTQELQTLAALKLRVAVLDQQIHLEKVLMAELLPLVSAAQPQGPPWLALCRAVHSLLCEGGARVLTILRDEPAV

SEQ ID NO: 36204 - protein, 266 aa, Homo sapiens
MGARTPRPGAGLRDQQMAPSAAPQAPEAFTLKEKGHLLRLPAAFRKAASQNSSLWAQLSSTQTSDSTDAAAAKTQFLQNMQTASGGPQPRLSAVEVEAEAGRLRKACSLLRLRMREELSAAPMDWMQEYRCLLTLEGLQAMVGQCLHRLQELRAAVAEQPPRPCPVGRPPGASPSCGGRAEPAWSPQLLVYSSTQELQTLAALKLRVAVLDQQIHLEKVLMAELLPLVSAAQPQGPPWLALCRAVHSLLCEGGARVLTILRDEPAV

SEQ ID NO: 36205 - protein, 195 aa, Homo sapiens
MGARTPRPGAGLRDQQMAPSAAPQAPEAFTLKEKGHLLRLPAAFRKAASQNSSLWAQLSSTQTSDSTDAAAAKTQFLQNMQTASGGPQPRLSAVEVEAEAGRLRKACSLLRLRMREELSAAPMDWMQEYRCLLTLEGLQAMVGQCLHRLQELRAAPRSCRPWRPSSCEWLCWTSRSTWKRCFWKRRWGCNRGPQP

SEQ ID NO: 36206 - protein, 334 aa, Homo sapiens
MATEEKKPETEAARAQPTPSSSATQSKPTPVKPNYALKFTLAGHTKAVSSVKFSPNGEWLASSSADKLIKIWGAYDGKFEKTISGHKLGISDVAWSSDSNLLVSASDDKTLKIWDVSSGKCLKTLKGHSNYVFCCNFNPQSNLIVSGSFDESVRIWDVKTGKCLKTLPAHSDPVSAVHFNRDGSLIVSSSYDGLCRIWDTASGQCLKTLIDDDNPPVSFVKFSPNGKYILAATLDNTLKLWDYSKGKCLKTYTGHKNEKYCIFANFSVTGGKWIVSGSEDNLVYIWNLQTKEIVQKLQGHTDVVISTACHPTENIIASAALENDKTIKLWKSDC

SEQ ID NO: 36207 - protein, 214 aa, Homo sapiens
MSQRKARGPPAMPGVGHSQTQAKARLLPGADRKRSRLSRTRQDPWEERSWSNQRWSRATPGPRGTRAGGLALGRSEASPENAARERSRVRTLRQAFLALQAALPAVPPDTKLSKLDVLVLAASYIAHLTRTLGHELPGPAWPPFLRGLRYLHPLKKWPMRSRLYAGGLGYSDLDSTTASTPSQRTRDAEVGSQVPGEADALLSTTPLSPALGDK

SEQ ID NO: 36208 - protein, 756 aa, Homo sapiens
MVVTRSARAKASIQAASAESSGQKSFAANGIQAHPESSTGSDARTTAESQTTGKQSLIPRTPKARKRKSRTTGSLPKGTEPSTDGETSEAESNYSVSEHHDTILRVTRRRQILIACSPVSSVRKKPKVTPTKESYTEEIVSEAESHVSGISRIVLPTEKTTGARRSKAKSLTDPSQESHTEAISDAETSSSDISFSGIATRRTRSMQRKLKAQTEKKDSKIVPGNEKQIVGTPVNSEDSDTRQTSHLQARSLSEINKPNFYNNDFDDDFSHRSSENILTVHEQANVESLKETKQNCKDLDEDANGITDEGKEINEKSSQLKNLSELQDTSLQQLVSQRHSTPQNKNAVSVHSNLNSEAVMKSLTQTFATVEVGRWNNNKKSPIKASDLTKFGDCGGSDDEEESTVISVSEDMNSEGNVDFECDTKLYTSAPNTSQGKDNSVLLVLSSDESQQSENSENEEDTLCFVENSGQRESLSGDTGSLSCDNALFVIDTTPGMSADKNFYLEEEDKASEVAIEEEKEEEEDEKSEEDSSDHDENEDEFSDEEDFLNSTKAKLLKLTSSSIDPGLSIKQLGGLYINFNADKLQSNKRTLTQIKEKKKNELLQKAVITPDFEKNHCVPPYSESKYQLQKKRRKERQKTAGDGWFGMKAPEMTNELKNDLKALKMRASMDPKRFYKKNDRDGFPKYFQIGTIVDNPADFYHSRIPKKQRKRTIVEELLADSEFRRYNRRKYSEIMAEKAANAAGKKFRKKKKFRN

SEQ ID NO: 36209 - protein, 167 aa, Homo sapiens
MDRGRPAGSPLSASAEPAPLAAAIRDSRPGRTGPGPAGPGGGSRSGSGRPAAANAARERSRVQTLRHAFLELQRTLPSVPPDTKLSKLDVLLLATTYIAHLTRSLQDDAEAPADAGLGALRGDGYLHPVKKWPMRSRLYIGATGQFLKHSVSGEKTNHDNTPTDSQP

SEQ ID NO: 36210 - protein, 1180 aa, Homo sapiens
MSVKSPFNVMSRNNLEAPPCKMTEPFNFEKNENKLPPHESLRSPGTLPNHPNFRLKSSENGNKKNNFLLCEQTKQYLASQEDNSVSSNPNGINGEVVGSKGDRKKLPAGNSVSPPSAESNSPPKEVNIKPGNNVRPAKSKKLNKLVENSLSISNPGLFTSLGPPLRSTTCHRCGLFGSLRCSQCKQTYYCSTACQRRDWSAHSIVCRPVQPNFHKLENKSSIETKDVEVNNKSDCPLGVTKEIAIWAERIMFSDLRSLQLKKTMEIKGTVTEFKHPGDFYVQLYSSEVLEYMNQLSASLKETYANVHEKDYIPVKGEVCIAKYTVDQTWNRAIIQNVDVQQKKAHVLYIDYGNEEIIPLNRIYHLNRNIDLFPPCAIKCFVANVIPAEGNWSSDCIKATKPLLMEQYCSIKIVDILEEEVVTFAVEVELPNSGKLLDHVLIEMGYGLKPSGQDSKKENADQSDPEDVGKMTTENNIVVDKSDLIPKVLTLNVGDEFCGVVAHIQTPEDFFCQQLQSGRKLAELQASLSKYCDQLPPRSDFYPAIGDICCAQFSEDDQWYRASVLAYASEESVLVGYVDYGNFEILSLMRLCPIIPKLLELPMQAIKCVLAGVKPSLGIWTPEAICLMKKLVQNKIITVKVVDKLENSSLVELIDKSETPHVSVSKVLLDAGFAVGEQSMVTDKPSDVKETSVPLGVEGKVNPLEWTWVELGVDQTVDVVVCVIYSPGEFYCHVLKEDALKKLNDLNKSLAEHCQQKLPNGFKAEIGQPCCAFFAGDGSWYRALVKEILPNGHVKVHFVDYGNIEEVTADELRMISSTFLNLPFQGIRCQLADIQSRNKHWSEEAITRFQMCVAGIKLQARVVEVTENGIGVELTDLSTCYPRIISDVLIDEHLVLKSASPHKDLPNDRLVNKHELQVHVQGLQATSSAEQWKTIELPVDKTIQANVLEIISPNLFYALPKGMPENQEKLCMLTAELLEYCNAPKSRPPYRPRIGDACCAKYTSDDFWYRAVVLGTSDTDVEVLYADYGNIETLPLCRVQPITSSHLALPFQIIRCSLEGLMELNGSSSQLIIMLLKNFMLNQNVMLSVKGITKNVHTVSVEKCSENGTVDVADKLVTFGLAKNITPQRQSALNTEKMYRMNCCCTELQKQVEKHEHILLFLLNNSTNQNKFIEMKKLLKS

SEQ ID NO: 36211 - protein, 1066 aa, Homo sapiens
MSVKSPFNVMSRNNLEAPPCKMTEPFNFEKNENKLPPHESLRSPGTLPNHPNFRLKSSENGNKKNNFLLCEQTKQYLASQEDNSVSSNPNGINGEVVGSKGDRKKLPAGNSVSPPSAESNSPPKEVNIKPGNNVRPAKSKKLNKLVENSLSISNPGLFTSLGPPLRSTTCHRCGLFGSLRCSQCKQTYYCSTACQRRDWSAHSIVCRPVQPNFHKLENKSSIETKDVEVNNKSDCPLGVTKEIAIWAERIMFSDLRSLQLKKTMEIKGTVTEFKHPGDFYVQLYSSEVLEYMNQLSASLKETYANVHEKDYIPVKGEVCIAKYTVDQTWNRAIIQNVDVQQKKAHVLYIDYGNEEIIPLNRIYHLNRNIDLFPPCAIKCFVANVIPAEGNWSSDCIKATKPLLMEQYCSIKIVDILEEEVVTFAVEVELPNSGKLLDHVLIEMGYGLKPSGQDSKKENADQSDPEDVGKMTTENNIVVDKSDLIPKVLTLNVGDEFCGVVAHIQTPEDFFCQQLQSGRKLAELQASLSKYCDQLPPRSDFYPAIGDICCAQFSGVKPSLGIWTPEAICLMKKLVQNKIITVKVVDKLENSSLVELIDKSETPHVSVSKVLLDAGFAVGEQSMVTDKPSDVKETSVPLGVEGKVNPLEWTWVELGVDQTVDVVVCVIYSPGEFYCHVLKEDALKKLNDLNKSLAEHCQQKLPNGFKAEIGQPCCAFFADIQSRNKHWSEEAITRFQMCVAGIKLQARVVEVTENGIGVELTDLSTCYPRIISDVLIDEHLVLKSASPHKDLPNDRLVNKHELQVHVQGLQATSSAEQWKTIELPVDKTIQANVLEIISPNLFYALPKGMPENQEKLCMLTAELLEYCNAPKSRPPYRPRIGDACCAKYTSDDFWYRAVVLGTSDTDVEVLYADYGNIETLPLCRVQPITSSHLALPFQIIRCSLEGLMELNGSSSQLIIMLLKNFMLNQNVMLSVKGITKNVHTVSVEKCSENGTVDVADKLVTFGLAKNITPQRQSALNTEKMYRMNCCCTELQKQVEKHEHILLFLLNNSTNQNKFIEMKKLLKS

SEQ ID NO: 36212 - protein, 1189 aa, Homo sapiens
MSVKSPFNVMSRNNLEAPPCKMTEPFNFEKNENKLPPHESLRSPGTLPNHPNFRLKSSENGNKKNNFLLCEQTKQYLASQEDNSVSSNPNGINGEVVGSKGDRKKLPAGNSVSPPSAESNSPPKEVNIKPGNNVRPAKSKKLNKLVENSLSISNPGLFTSLGPPLRSTTCHRCGLFGSLRCSQCKQTYYCSTACQRRDWSAHSIVCRPVQPNFHKLENKSSIETKDVEVNNKSDCPLGVTKEIAIWAERIMFSDLRSLQLKKTMEIKGTVTEFKHPGDFYVQLYSSEVLEYMNQLSASLKETYANVHEKDYIPVKGEVCIAKYTVDQTWNRAIIQNVDVQQKKAHVLYIDYGNEEIIPLNRIYHLNRNIDLFPPCAIKCFVANVIPAEGNWSSDCIKATKPLLMEQYCSIKIVDILEEEVVTFAVEVELPNSGKLLDHVLIEMGYGLKPSGQDSKKENADQSDPEDVGKMTTENNIVVDKSDLIPKVLTLNVGDEFCGVVAHIQTPEDFFCQQLQSGRKLAELQASLSKYCDQLPPRSDFYPAIGDICCAQFSEDDQWYRASVLAYASEESVLVGYVDYGNFEILSLMRLCPIIPKLLELPMQAIKCVLAGVKPSLGIWTPEAICLMKKLVQNKIITVKVVDKLENSSLVELIDKSETPHVSVSKVLLDAGFAVGEQSMVTDKPSDVKETSVPLGVEGKVNPLEWTWVELGVDQTVDVVVCVIYSPGEFYCHVLKEDALKKLNDLNKSLAEHCQQKLPNGFKAEIGQPCCAFFAGDGSWYRALVKEILPNGHVKVHFVDYGNIEEVTADELRMISSTFLNLPFQGIRCQLADIQSRNKHWSEEAITRFQMCVAGIKLQARVVEVTENGIGVELTDLSTCYPRIISDVLIDEHLVLKSASPHKDLPNDRLVNKHELQVHVQGLQATSSAEQWKTIELPVDKTIQANVLEIISPNLFYALPKGMPENQEKLCMLTAELLEYCNAPKSRPPYRPRIGDACCAKYTSDDFWYRAVVLGTSDTDVEVLYADYGNIETLPLCRVQPITSSHLALPFQIIRCSLEGLMELNGSSSQLIIMLLKNFMLNQNVMLSVKGITKNVHTVSVEKCSENGTVDVADKLVTFGLAKNITPQRQSALNTEKMYRMNCCCTELQKQVEKHEHILLFLLNNSTNQNKFIEMKKLLKKTASLGGKPL

SEQ ID NO: 36213 - protein, 708 aa, Homo sapiens
MNQLSASLKETYANVHEKDYIPVKGEVCIAKYTVDQAIKCFVANVIPAEGNWSSDCIKATKPLLMEQYCSIKIVDILEEEVVTFAVEVELPNSGKLLDHVLIEMGYGLKPSGQDSKKENADQSDPEDVGKMTTENNIVVDKSDLIPKVLTLNVGDEFCGVVAHIQTPEDFFCQQLQSGRKLAELQASLSKYCDQLPPRSDFYPAIGDICCAQFSGVKPSLGIWTPEAICLMKKLVQNKIITVKVVDKLENSSLVELIDKSETPHVSVSKVLLDAGFAVGEQSMVTDKPSDVKETSVPLGVEGKVNPLEWTWVELGVDQTVDVVVCVIYSPGEFYCHVLKEDALKKLNDLNKSLAEHCQQKLPNGFKAEIGQPCCAFFAGDGSWYRALVKEILPNGHVKVHFVDYGNIEEVTADELRMISSTFLNLPFQGIRCQLADIQSRNKHWSEEAITRFQMCVAGIKLQARVVEVTENGIGVELTDLSTCYPRIISDVLIDEHLVLKSASPHKDLPNDRLVNKHELQVHVQGLQATSSAEQWKTIELPVDKTIQANVLEIISPNLFYALPKGMPENQEKLCMLTAELLEYCNAPKSRPPYRPRIGDACCAKYTSDDFWYRAVVLGTSDTDVEVLYADYGNIETLPLCRVQPITSSHLALPFQIIRCSLEEKMYRMNCCCTELQKQVEKHEHILLFLLNNSTNQNKFIEMKKLLKS

SEQ ID NO: 36214 - protein, 240 aa, Homo sapiens
MLRSCAARLRTLGALCLPPVGRRLPGSEPRPELRSFSSEEVILKDCSVPNPSWNKDLRLLFDQFMKKCEDGSWKRLPSYKRTPTEWIQDFKTHFLDPKLMKEEQMSQAQLFTRSFDDGLGFEYVMFYNDIEKRMVCLFQGGPYLEGPPGFIHGGAIATMIDATVGMCAMMAGGIVMTANLNINYKRPIPLCSVVMINSQLDKVEGRKFFVSCNVQSVDEKTLYSEATSLFIKLNPAKSLT

SEQ ID NO: 36215 - protein, 444 aa, Homo sapiens
MREIVLTQIGQCGNQIGAKFWEVISDEHAIDSAGTYHGDSHLQLERINVYYNEASGGRYVPRAVLVDLEPGTMDSVRSGPFGQVFRPDNFIFGQCGAGNNWAKGHYTEGAELMESVMDVVRKEAESCDCLQGFQLTHSLGGGTGSGMGTLLLSKIREEYPDRIINTFSILPSPKVSDTVVEPYNATLSVHQLIENADETFCIDNEALYDICSKTLKLPTPTYGDLNHLVSATMSGVTTCLRFPGQLNADLRKLAVNMVPFPRLHFFMPGFAPLTSRGSQQYRALTVAELTQQMFDAKNMMAACDPRHGRYLTAAAIFRGRMPMREVDEQMFNIQDKNSSYFADWLPNNVKTAVCDIPPRGLKMSATFIGNNTAIQELFKRVSEQFTAMFRRKAFLHWYTGEGMDEMEFTEAESNMNDLVSEYQQYQDATAEEEEDEEYAEEEVA

SEQ ID NO: 36216 - protein, 587 aa, Homo sapiens
MRPRGLPPLLVVLLGCWASVSAQTDATPAVTTEGLNSTEAALATFGTFPSTRPPGTPRAPGPSSGPRPTPVTDVAVLCVCDLSPAQCDINCCCDPDCSSVDFSVFSACSVPVVTGDSQFCSQKAVIYSLNFTANPPQRVFELVDQINPSIFCIHITNYKPALSFINPEVPDENNFDTLMKTSDGFTLNAESYVSFTTKLDIPTAAKYEYGVPLQTSDSFLRFPSSLTSSLCTDNNPAAFLVNQAVKCTRKINLEQCEEIEALSMAFYSSPEILRVPDSRKKVPITVQSIVIQSLNKTLTRREDTDVLQPTLVNAGHFSLCVNVVLEVKYSLTYTDAGEVTKADLSFVLGTVSSVVVPLQQKFEIHFLQENTQPVPLSGNPGYVVGLPLAAGFQPHKGSGIIQTTNRYGQLTILHSTTEQDCLALEGVRTPVLFGYTMQSGCKLRLTGALPCQLVAQKVKSLLWGQGFPDYVAPFGNSQAQDMLDWVPIHFITQSFNRKDSCQLPGALVIEVKWTKYGSLLNPQAKIVNVTANLISSSFPEANSGNERTILISTAVTFVDVSAPAEAGFRAPPAINARLPFNFFFPFV

SEQ ID NO: 36217 - protein, 592 aa, Homo sapiens
MRPRGLPPLLVVLLGCWASVSAQTDATPAVTTEGLNSTEAALATFGTFPSTRPPGTPRAPGPSSGPRPTPVTDVAVLCVCDLSPAQCDINCCCDPDCSSVDFSVFSACSVPVVTGDSQFCSQKAVIYSLNFTANPPQRVFELVDQINPSIFCIHITNYKPALSFINPEVPDENNFDTLMKTSDGFTLNAESYVSFTTKLDIPTAAKYEYGVPLQTSDSFLRFPSSLTSSLCTDNNPAAFLVNQAVKCTRKINLEQCEEIEALSMAFYSSPEILRVPDSRKKVPITVQSIVIQSLNKTLTRREDTDVLQPTLVNAGHFSLCVNVVLEVKYSLTYTDAGEVTKADLSFVLGTVSSVVVPLQQKFEIHFLQENTQPVPLSGNPGYVVGLPLAAGFQPHKGSGIIQTTNRYGQLTILHSTTEQDCLALEGVRTPVLFGYTMQSGCKLRLTGALPCQLVAQKVKSLLWGQGFPDYVAPFGNSQAQDMLDWVPIHFITQSFNRKHFVLQDSCQLPGALVIEVKWTKYGSLLNPQAKIVNVTANLISSSFPEANSGNERTILISTAVTFVDVSAPAEAGFRAPPAINARLPFNFFFPFV

SEQ ID NO: 36218 - protein, 573 aa, Homo sapiens
MRPRGLPPLLVVLLGCWASVSAQTDATPAVTTEGLNSTEAALATFGTFPSTRPPGTPRAPGPSSGPRPTPVTDVAVLCVCDLSPAQCDINCCCDPDCSSVDFSVFSACSVPVVTGDSQFCSQKAVIYSLNFTANPPQRVFELVDQINPSIFCIHITNYKPALSFINPEVPDENNFDTLMKTSDGFTLNAESYVSFTTKLDIPTAAKYEYGVPLQTSDSFLRFPSSLTSSLCTDNNPAGQAYWFTPVIPALWEAEARGSLEVPDSRKKVPITVQSIVIQSLNKTLTRREDTDVLQPTLVNAGHFSLCVNVVLEVKYSLTYTDAGEVTKADLSFVLGTVSSVVVPLQQKFEIHFLQENTQPVPLSGNPGYVVGLPLAAGFQPHKGSGIIQTTNRYGQLTILHSTTEQDCLALEGVRTPVLFGYTMQSGCKLRLTGALPCQLVAQKVKSLLWGQGFPDYVAPFGNSQAQDMLDWVPIHFITQSFNRKDSCQLPGALVIEVKWTKYGSLLNPQAKIVNVTANLISSSFPEANSGNERTILISTAVTFVDVSAPAEAGFRAPPAINARLPFNFFFPFV

SEQ ID NO: 36219 - protein, 531 aa, Homo sapiens
MCQLLESTVIQPQGDSPVAVLCVCDLSPAQCDINCCCDPDCSSVDFSVFSACSVPVVTGDSQFCSQKAVIYSLNFTANPPQRVFELVDQINPSIFCIHITNYKPALSFINPEVPDENNFDTLMKTSDGFTLNAESYVSFTTKLDIPTAAKYEYGVPLQTSDSFLRFPSSLTSSLCTDNNPAAFLVNQAVKCTRKINLEQCEEIEALSMAFYSSPEILRVPDSRKKVPITVQSIVIQSLNKTLTRREDTDVLQPTLVNAGHFSLCVNVVLEVKYSLTYTDAGEVTKADLSFVLGTVSSVVVPLQQKFEIHFLQENTQPVPLSGNPGYVVGLPLAAGFQPHKGSGIIQTTNRYGQLTILHSTTEQDCLALEGVRTPVLFGYTMQSGCKLRLTGALPCQLVAQKVKSLLWGQGFPDYVAPFGNSQAQDMLDWVPIHFITQSFNRKDSCQLPGALVIEVKWTKYGSLLNPQAKIVNVTANLISSSFPEANSGNERTILISTAVTFVDVSAPAEAGFRAPPAINARLPFNFFFPFV

SEQ ID NO: 36220 - protein, 483 aa, Homo sapiens
MITAHCGLDLLGSVAVLCVCDLSPAQCDINCCCDPDCSSVDFSVFSACSVPVVTGDSQFCSQKAVIYSLNFTANPPQRVFELVDQINPSIFCIHITNYKPALSFINPEVPDENNFDTLMKTSDGFTLNAESYVSFTTKLDIPTAAKYEYGVPLQTSDSFLRFPSSLTSSLCTDNNPAAFLVNQAVKCTRKINLEQCEEIEALSMAFYSSPEILRVPDSRKKVPITVQSIVIQSLNKTLTRREDTDVLQPTLVNAGHFSLCVNVVLEVKYSLTYTDAGEVTKADLSFVLGTVSSVVVPLQQKFEIHFLQENTQPVPLSGNPGYVVGLPLAAGFQPHKGGALPCQLVAQKVKSLLWGQGFPDYVAPFGNSQAQDMLDWVPIHFITQSFNRKHFVLQDSCQLPGALVIEVKWTKYGSLLNPQAKIVNVTANLISSSFPEANSGNERTILISTAVTFVDVSAPAEAGFRAPPAINARLPFNFFFPFV

SEQ ID NO: 36221 - protein, 260 aa, Homo sapiens
MKTSDGFTLNAESYVSFTTKLDIPTAAKYEYGVPLQTSDSFLRFPSSLTSSLCTDNNPAAFLVNQAVKCTRKINLEQCEEIEALSMAFYSSPEILRVPDSRKKVPITVQSIVIQSLNKTLTRREDTDVLQPTLVNAGHFSLCVNVVLEVKYSLTYTDAGEVTKADLSFVLGTVSSVVVPLQQKFEIHFLQTDWSSPVSARSTEGEEPAVGPGLPRLRGPFWKFPGPGHAGLGAHPLHHPVIQQEGFLPAPRGFGYRSEVD

SEQ ID NO: 36222 - protein, 526 aa, Homo sapiens
MLQEESDLSLIIAQIVQKLKGSNLYSQLERQAWASLQRPEIKLESLKEDIKEFFKISGWEKKLQNAVYSELSVFPLPSHPAAPPEHLKEPLVYMRKAQGSWEKRILKSLNSMCTELSIPLARKRPVGEQKELLNKWNEMGTDEPDLSLFRPVYAPKDFLEVLINLRNPNYENGDSLSFRTHLGLIQVPLKVKDIPELKECFVELGLNIGQLGIDDSTQVPPELFENEHVRIGQKVLAEQDSAAAQQYIRQGSPTALRAELWALILNISSQPEDVLYYEQLKTNVIQHDLLVDSLIYKDVKLTASNDDYYFVFEDYLYQVLLCFSRDTSVLSHFAFNSASPPKSYIRGKLGLEEYAVFYPPNGVIPFHGFSMYVAPLCFLYHEPSKLYQIFREMYVRFFFRLHSISSHPSGIVSLCLLFETLLQTYLPQLFYHLREIGAQPLRISFKWMVRAFSGYLATDQLLLLWDRILGYNSLEILAVLAAAVFAFRAVNLMEVTSLAAAEAVLADLSTLKVMPLLQIFLFATVT

SEQ ID NO: 36223 - protein, 461 aa, Homo sapiens
MLQEESDLSLIIAQIVQKLKGSNLYSQLERQAWGSWEKRILKSLNSMCTELSIPLARKRPVGEQKELLNKWNEMGTDEPDLSLFRPVYAPKDFLEVLINLRNPNYENGDSLSFRTHLGLIQVPLKVKDIPELKECFVELGLNIGQLGIDDSTQVPPELFENEHVRIGQKVLAEQDSAAAQQYIRQGSPTALRAELWALILNISSQPEDVLYYEQLKTNVIQHDLLVDSLIYKDVKLTASNDDYYFVFEDYLYQVLLCFSRDTSVLSHFAFNSASPPKSYIRGKLGLEEYAVFYPPNGVIPFHGFSMYVAPLCFLYHEPSKLYQIFREMYVRFFFRLHSISSHPSGIVSLCLLFETLLQTYLPQLFYHLREIGAQPLRISFKWMVRAFSGYLATDQLLLLWDRILGYNSLEILAVLAAAVFAFRAVNLMEVTSLAAAEAVLADLSTLKVMPLLQIFLFATVT

SEQ ID NO: 36224 - protein, 240 aa, Homo sapiens
MEESVVRPSVFVVDGQTDIPFTRLGRSHRRQSCSVARVGLGLLLLLMGAGLAVQGWFLLQLHWRLGEMVTRLPDGPAGSWEQLIQERRSHEVNPAAHLTGANSSLTGSGGPLLWETQLGLAFLRGLSYHDGALVVTKAGYYYIYSKVQLGGVGCPLGLASTITHGLYKRTPRYPEELELLVSQQSPCGRATSSSRVWWDSSFLGGVVHLEAGEKVVVRVLDERLVRLRDGTRSYFGAFMV

SEQ ID NO: 36225 - protein, 204 aa, Homo sapiens
MEESVVRPSVFVVDGQTDIPFTRLGRSHRRQSCSVARDGPAGSWEQLIQERRSHEVNPAAHLTGANSSLTGSGGPLLWETQLGLAFLRGLSYHDGALVVTKAGYYYIYSKVQLGGVGCPLGLASTITHGLYKRTPRYPEELELLVSQQSPCGRATSSSRVWWDSSFLGGVVHLEAGEKVVVRVLDERLVRLRDGTRSYFGAFMV

SEQ ID NO: 36226 - protein, 1134 aa, Homo sapiens
MPVFHTRTIESILEPVAQQISHLVIMHEEGEVDGKAIPDLTAPVAAVQAAVSNLVRVGKETVQTTEDQILKRDMPPAFIKVENACTKLVQAAQMLQSDPYSVPARDYLIDGSRGILSGTSDLLLTFDEAEVRKIIRVCKGILEYLTVAEVVETMEDLVTYTKNLGPGMTKMAKMIDERQQELTHQEHRVMLVNSMNTVKELLPVLISAMKIFVTTKNSKNQGIEEALKNRNFTVEKMSAEINEIIRVLQLTSWDEDAWASKDTEAMKRALASIDSKLNQAKGWLRDPSASPGDAGEQAIRQILDEAGKVGELCAGKERREILGTCKMLGQMTDQVADLRARGQGSSPVAMQKAQQVSQGLDVLTAKVENAARKLEAMTNSKQSIAKKIDAAQNWLADPNGGPEGEEQIRGALAEARKIAELCDDPKERDDILRSLGEISALTSKLADLRRQGKGDSPEARALAKQVATALQNLQTKTNRAVANSRPAKAAVHLEGKIEQAQRWIDNPTVDDRGVGQAAIRGLVAEGHRLANVMMGPYRQDLLAKCDRVDQLTAQLADLAARGEGESPQARALASQLQDSLKDLKARMQEAMTQEVSDVFSDTTTPIKLLAVAATAPPDAPNREEVFDERAANFENHSGKLGATAEKAAAVGTANKSTVEGIQASVKTARELTPQVVSAARILLRNPGNQAAYEHFETMKNQWIDNVEKMTGLVDEAIDTKSLLDASEEAIKKDLDKCKVAMANIQPQMLVAGATSIARRANRILLVAKREVENSEDPKFREAVKAASDELSKTISPMVMDAKAVAGNISDPGLQKSFLDSGYRILGAVAKVREAFQPQEPDFPPPPPDLEQLRLTDELAPPKPPLPEGEVPPPRPPPPEEKDEEFPEQKAGEVINQPMMMAARQLHDEARKWSSKPGIPAAEVGIGVVAEADAADAAGFPVPPDMEDDYEPELLLMPSNQPVNQPILAAAQSLHREATKWSSKGNDIIAAAKRMALLMAEMSRLVRGGSGTKRALIQCAKDIAKASDEVTRLAKEVAKQCTDKRIRTNLLQVCERIPTISTQLKILSTVKATMLGRTNISDEESEQATEMLVHNAQNLMQSVKETVREAEAASIKIRTDAGFTLRWVRKTPWYQ

SEQ ID NO: 36227 - protein, 1066 aa, Homo sapiens
MPVFHTRTIESILEPVAQQISHLVIMHEEGEVDGKAIPDLTAPVAAVQAAVSNLVRVGKETVQTTEDQILKRDMPPAFIKVENACTKLVQAAQMLQSDPYSVPARDYLIDGSRGILSGTSDLLLTFDEAEVRKIIRVCKGILEYLTVAEVVETMEDLVTYTKNLGPGMTKMAKMIDERQQELTHQEHRVMLVNSMNTVKELLPVLISAMKIFVTTKNSKNQGIEEALKNRNFTVEKMSAEINEIIRVLQLTSWDEDAWASKDTEAMKRALASIDSKLNQAKGWLRDPSASPGDAGEQAIRQILDEAGKVGELCAGKERREILGTCKMLGQMTDQVADLRARGQGSSPVAMQKAQQVSQGLDVLTAKVENAARKLEAMTNSKQSIAKKIDAAQNWLADPNGGPEGEEQIRGALAEARKIAELCDDPKERDDILRSLGEISALTSKLADLRRQGKGDSPEARALAKQVATALQNLQTKTNRAVANSRPAKAAVHLEGKIEQAQRWIDNPTVDDRGVGQAAIRGLVAEGHRLANVMMGPYRQDLLAKCDRVDQLTAQLADLAARGEGESPQARALASQLQDSLKDLKARMQEAMTQEVSDVFSDTTTPIKLLAVAATAPPDAPNREEVFDERAANFENHSGKLGATAEKAAAVGTANKSTVEGIQASVKTARELTPQVVSAARILLRNPGNQAAYEHFETMKNQWIDNVEKMTGLVDEAIDTKSLLDASEEAIKKDLDKCKVAMANIQPQMLVAGATSIARRANRILLVAKREVENSEDPKFREAVKAASDELSKTISPMVMDAKAVAGNISDPGLQKSFLDSGYRILGAVAKVREAFQPQEPDFPPPPPDLEQLRLTDELAPPKPPLPEGEVPPPRPPPPEEKDEEFPEQKAGEVINQPMMMAARQLHDEARKWSSKGNDIIAAAKRMALLMAEMSRLVRGGSGTKRALIQCAKDIAKASDEVTRLAKEVAKQCTDKRIRTNLLQVCERIPTISTQLKILSTVKATMLGRTNISDEESEQATEMLVHNAQNLMQSVKETVREAEAASIKIRTDAGFTLRWVRKTPWYQ

SEQ ID NO: 36228 - protein, 222 aa, Homo sapiens
MPPAFIKVENACTKLVQAAQMLQSDPYSVPARDYLIDGSRGILSGTSDLLLTFDEAEVRKIIRVCKGILEYLTVAEVVETMEDLVTYTKNLGPGMTKMAKMIDERQQELTHQEHRVMLVNSMNTVKELLPVLISAMKIFVTTKNSKNQGIEEALKNRNFTVEKMSAEINEIIRVLQLTSWDEDAWASKVRVLSGEISKIPNSPWLGVLIGTCLILYLVIFVA

SEQ ID NO: 36229 - protein, 325 aa, Homo sapiens
MAHFVQGTSRMIAAESSTEHKECAEPSTRKNLMNSLEQKIRCLEKQRKELLEVNQQWDQQFRSMKELYERKVAELKTKLDAAERFLSTREKDPHQRQRKDDRQREDDRQRDLTRDRLQREEKEKERLNEELHELKEENKLLKGKNTLANKEKEHYECEIKRLNKALQDALNIKCSFSEDCLRKSRVEFCHEEMRTEMEVLKQQVQIYEEDFKKERSDRERLNQEKEELQQINETSQSQLNRLNSQIKACQMEKEKLEKQLKQMYCPPCNCGLVFHLQDPWVPTGPGAVQKQREHPPDYQWYALDQLPPDVQHKANGLSSVKKVHP

SEQ ID NO: 36230 - protein, 369 aa, Homo sapiens
MNKNEKHDDKLVMFTNQSEDSERCESMELDKKIQDLIERNASPHPKRFTPEAMPTHRNLCSLKTPGKTASMAHFVQGTSRMIAAESSTEHKECAEPSTRKNLMNSLEQKIRCLEKQRKELLEVNQQWDQQFRSMKELYERKVAELKTKLDAAERFLSTREKDPHQRQRKDDRQREDDRQRDLTRDRLQREEKEKERLNEELHELKEENKLLKGKNTLANKEKEHYECEIKRLNKALQDALNIKCSFSEDCLRKSRVEFCHEEMRTEMEVLKQQVQIYEEDFKKERSDRERLNQEKEELQQINETSQSQLNRLNSQIKACQMEKEKLEKQLKQMYCPPCNCGLVFHLQDPWVPTGPGAVQKQREHPVYPQ

SEQ ID NO: 36231 - protein, 376 aa, Homo sapiens
MIPCGWLMNKNEKHDDKLVMFTNQSEDSERCESMELDKKIQDLIERNASPHPKRFTPEAMPTHRNLCSLKTPGKTASMAHFVQGTSRMIAAESSTEHKECAEPSTRKNLMNSLEQKIRCLEKQRKELLEVNQQWDQQFRSMKELYERKVAELKTKLDAAERFLSTREKDPHQRQRKDDRQREDDRQRDLTRDRLQREEKEKERLNEELHELKEENKLLKGKNTLANKEKEHYECEIKRLNKALQDALNIKCSFSEDCLRKSRVEFCHEEMRTEMEVLKQQVQIYEEDFKKERSDRERLNQEKEELQQINETSQSQLNRLNSQIKACQMEKEKLEKQLKQMYCPPCNCGLVFHLQDPWVPTGPGAVQKQREHPVYPQ

SEQ ID NO: 36232 - protein, 493 aa, Homo sapiens
MASGILVNVKEEVTCPICLELLTQPLSLDCGHSFCQACLTANHKKSMLDKGESSCPVCRISYQPENIRPNRHVANIVEKLREVKLSPEGQKVDHCARHGEKLLLFCQEDGKVICWLCERSQEHRGHHTFLTEEVAREYQVKLQAALEMLRQKQQEAEELEADIREEKASWKTQIQYDKTNVLADFEQLRDILDWEESNELQNLEKEEEDILKSLTNSETEMVQQTQSLRELISDLEHRLQGSVMELLQGVDGVIKRTENVTLKKPETFPKNQRRVFRAPDLKGMLEVFRELTDVRRYWVDVTVAPNNISCAVISEDKRQVSSPKPQIIYGARGTRYQTFVNFNYCTGILGSQSITSGKHYWEVDVSKKTAWILGVCAGFQPDAMCNIEKNENYQPKYGYWVIGLEEGVKCSAFQDSSFHTPSVPFIVPLSVIICPDRVGVFLDYEACTVSFFNITNHGFLIYKFSHCSFSQPVFPYLNPRKCGVPMTLCSPSS

SEQ ID NO: 36233 - protein, 400 aa, Homo sapiens
MASGILVNVKEEVTCPICLELLTQPLSLDCGHSFCQACLTANHKKSMLDKGESSCPVCRISYQPENIRPNRHVANIVEKLREVKLSPEGQKVDHCARHGEKLLLFCQEDGKVICWLCERSQEHRGHHTFLTEEVAREYQVKLQAALEMLRQKQQEAEELEADIREEKASWKTQIQYDKTNVLADFEQLRDILDWEESNELQNLEKEEEDILKSLTNSETEMVQQTQSLRELISDLEHRLQGSVMELLQGVDGVIKRTENVTLKKPETFPKNQRRVFRAPDLKGMLEVFRELTDVRRYWVDVTVAPNNISCAVISEDKRQVSSPKPQIIYGARGTRYQTFVNFNYCTGILGSQSITSGKHYWEVDVSKKTAWILGVCAGFQPDAMCNIEKKRFMILLPRHT

SEQ ID NO: 36234 - protein, 347 aa, Homo sapiens
MASGILVNVKEEVTCPICLELLTQPLSLDCGHSFCQACLTANHKKSMLDKGESSCPVCRISYQPENIRPNRHVANIVEKLREVKLSPEGQKVDHCARHGEKLLLFCQEDGKVICWLCERSQEHRGHHTFLTEEVAREYQVKLQAALEMLRQKQQEAEELEADIREEKASWKTQIQYDKTNVLADFEQLRDILDWEESNELQNLEKEEEDILKSLTNSETEMVQQTQSLRELISDLEHRLQGSVMELLQGVDGVIKRTENVTLKKPETFPKNQRRVFRAPDLKGMLEVFRELTDVRRYWGKEKSHYHKPPCGLSLLLSLSFRILCSLLGSCFKIYDSPSKTHITYPSL

SEQ ID NO: 36235 - protein, 326 aa, Homo sapiens
MASGILVNVKEEVTCPICLELLTQPLSLDCGHSFCQACLTANHKKSMLDKGESSCPVCRISYQPENIRPNRHVANIVEKLREVKLSPEGQKVDHCARHGEKLLLFCQEDGKVICWLCERSQEHRGHHTFLTEEVAREYQVKLQAALEMLRQKQQEAEELEADIREEKASWKTQIQYDKTNVLADFEQLRDILDWEESNELQNLEKEEEDILKSLTNSETEMVQQTQSLRELISDLEHRLQGSVMELLQGVDGVIKRTENVTLKKPETFPKNQRRVFRAPDLKGMLEVFRELTDVRRYWGWSAMARSRFTATSTSQIQAILLPQPPK

SEQ ID NO: 36236 - protein, 271 aa, Homo sapiens
MASGILVNVKEEVTCPICLELLTQPLSLDCGHSFCQACLTANHKKSMLDKGESSCPVCRISYQPENIRPNRHVANIVEKLREVKLSPEGQKVDHCARHGEKLLLFCQEDGKVICWLCERSQEHRGHHTFLTEEVAREYQVKLQAALEMLRQKQQEAEELEADIREEKASWKTQIQYDKTNVLADFEQLRDILDWEESNELQNLEKEEEDILKSLTNSETEMVQQTQSLRELISDLEHRLQGSVMELLQDGERDLEEARNFSKKSKESVSSS

SEQ ID NO: 36237 - protein, 257 aa, Homo sapiens
MASGILVNVKEEVTCPICLELLTQPLSLDCGHSFCQACLTANHKKSMLDKGESSCPVCRISYQPENIRPNRHVANIVEKLREVKLSPEGQKVDHCARHGEKLLLFCQEDGKVICWLCERSQEHRGHHTFLTEEVAREYQVKLQAALEMLRQKQQEAEELEADIREEKASWKTQIQYDKTNVLADFEQLRDILDWEESNELQNLEKEEEDILKSLTNSETEMVQQTQSLRELISDLEHRLQGSVMELLQVKSGKKPEH

SEQ ID NO: 36238 - protein, 138 aa, Homo sapiens
MNSLVSWQLLLFLCATHFGEPLEKVASVGNSRPTGQQLESLGLLAPGEQSLPCTERKPAATARLSRRGTSLSPPPESSGSPQQPGLSAPHSRQIPAPQGAVLVQREKDLPNYNWNSFGLRFGKREAAPGNHGRSAGRG

SEQ ID NO: 36239 - protein, 406 aa, Homo sapiens
MDQSGMEIPVTLIIKAPNQKYSDQTISCFLNWTVGKLKTHLSNVYPSKPLTKDQRLVYSGRLLPDHLQLKDILRKQDEYHMVHLVCTSRTPPSSPKSSTNRESHEALASSSNSSSDHSGSTTPSSGQETLSLAVGSSSEGLRQRTLPQAQTDQAQSHQFPYVMQGNVDNQFPGQAAPPGFPVYPAFSPLQMLWWQQMYAHQYYMQYQAAVSAQATSNVNPTQPTTSQPLNLAHVPGEEPPPAPNLVAQENRPMNENVQMNAQGGPVLNEEDFNRDWLDWMYTFSRAAILLSIVYFYSSFSRFIMVMGAMLLVYLHQAGWFPFRQEGGHQQAPNNNAEVNNDGQNANNLELEEMERLMDDGLEDESGEDGGEDASAIQRPGLMASAWSFITTFFTSLIPEGPPQVAN

SEQ ID NO: 36240 - protein, 531 aa, Homo sapiens
MLGFLSRGPSMKLCMGLACVLSLWNTVSGIKGEAKKEKGMTFLPTTVSGLREEERKEKGVAFLATTELPARSIDLSALNLTELVNGMLSRALKDSKKFFSLLSVTSYSSFAFHKFSVAVYNISNLKTVDPAKFPTRYCYCLNNRTNDLSDFTALLVDIIGNSTSYLTEIFKSTSILSVNQSNESDCIFICVMTGKSGRNLSDFWEIEEKYPIINYTFTSGLSGVLGAATRGTARTSKPTTKSQKTLPSTSPGHWTQSTPWASALRSSPWTETAAPSETEETLNTGRPPELPARATATWFSASHTLPALATRRVARTQWLTADRQTWASISSVPWAQTISEKKPGGSLWETRSSPPTTAGTEEAMNTTSLLAPAAEIMATPGSPSQASPTLGAFTHGTQTPSPTKATAPRYPQTGDLSAEWPFTAGEEPVLVPRPHQVSRCPQPLFKVGAMAAAPLTLAIQRLNPCLMELCQFFQQCLCMSQRSPRTEDMRYCLEYYSWFLKNATYICQRVKRVSHSHTLKQKCLENICKSV

SEQ ID NO: 36241 - protein, 388 aa, Homo sapiens
MEETNSSSKDMYQSPGEAEGWRWKKGSDRGQNLFRKHSKCLILLIRERFESPHSYICSPVTFQFFYAQSVKHVNVTIDCLPEGAATRGTARTSKPTTKSQKTLPSTSPGHWTQSTPWASALRSSPWTETAAPSETEETLNTGRPPELPARATATWFSASHTLPALATRRVARTQWLTADRQTWASISSVPWAQTISEKKPGGSLWETRSSPPTTAGTEEAMNTTSLLAPAAEIMATPGSPSQASPTLGAFTHGTQTPSPTKATAPRYPQTGDLSAEWPFTAGEEPVLVPRPHQVSRCPQPLFKVGAMAAAPLTLAIQRLNPCLMELCQFFQQCLCMSQRSPRTEDMRYCLEYYSWFLKNATYICQRVKRVSHSHTLKQKCLENICKSV

SEQ ID NO: 36242 - protein, 270 aa, Homo sapiens
MQYPHPGPAAGAVGVPLYAPTPLLQPAHPTPFYIEDILGRGPAAPTPAPTLPSPNSSFTSLVSPYRTPVYEPTPIHPAFSHHSAAALAAAYGPGGFGGPLYPFPRTVNDYTHALLRHDPLGKPLLWSPFLQRPLHKRKGGQVRFSNDQTIELEKKFETQKYLSPPERKRLAKMLQLSERQVKTWFQNRRAKWRRLKQENPQSNKKEELESLDSSCDQRQDLPSEQNKGASLDSSQCSPSPASQEDLESEISEDSDQEVDIEGDKSYFNAG

SEQ ID NO: 36243 - protein, 5 aa, Homo sapiens
GTTGT

SEQ ID NO: 36244 - protein, 733 aa, Homo sapiens
MTFPEADILLKSGECAGQTMLDTMEAPGHSRQLLLQLNNQRTKGFLCDVIIVVQNALFRAHKNVLAASSAYLKSLVVHDNLLNLDHDMVSPAVFRLVLDFIYTGRLADGAEAAAAAAVAPGAEPSLGAVLAAASYLQIPDLVALCKKRLKRHGKYCHLRGGGGGGGGYAPYGRPGRGLRAATPVIQACYPSPVGPPPPPAAEPPSGPEAAVNTHCAELYASGPGPAAALCASERRCSPLCGLDLSKKSPPGSAAPERPLAERELPPRPDSPPSAGPAAYKEPPLALPSLPPLPFQKLEEAAPPSDPFRGGSGSPGPEPPGRPDGPSLLYRWMKHEPGLGSYGDELGRERGSPSERCEERGGDAAVSPGGPPLGLAPPPRYPGSLDGPGAGGDGDDYKSSSEETGSSEDPSPPGGHLEGYPCPHLAYGEPESFGDNLYVCIPCGKGFPSSEQLNAHVEAHVEEEEALYGRAEAAEVAAGAAGLGPPFGGGGDKVAGAPGGLGELLRPYRCASCDKSYKDPATLRQHEKTHWLTRPYPCTICGKKFTQRGTMTRHMRSHLGLKPFACDACGMRFTRQYRLTEHMRIHSGEKPYECQVCGGKFAQQRNLISHMKMHAVGGAAGAAGALAGLGGLPGVPGPDGKGKLDFPEGVFAVARLTAEQLSLKQQDKAAAAELLAQTTHFLHDPKVALESLYPLAKFTAELGLSPDKAAEVLSQGAHLAAGPDGRTIDRFSPT

SEQ ID NO: 36245 - protein, 714 aa, Homo sapiens
MLDTMEAPGHSRQLLLQLNNQRTKGFLCDVIIVVQNALFRAHKNVLAASSAYLKSLVVHDNLLNLDHDMVSPAVFRLVLDFIYTGRLADGAEAAAAAAVAPGAEPSLGAVLAAASYLQIPDLVALCKKRLKRHGKYCHLRGGGGGGGGYAPYGRPGRGLRAATPVIQACYPSPVGPPPPPAAEPPSGPEAAVNTHCAELYASGPGPAAALCASERRCSPLCGLDLSKKSPPGSAAPERPLAERELPPRPDSPPSAGPAAYKEPPLALPSLPPLPFQKLEEAAPPSDPFRGGSGSPGPEPPGRPDGPSLLYRWMKHEPGLGSYGDELGRERGSPSERCEERGGDAAVSPGGPPLGLAPPPRYPGSLDGPGAGGDGDDYKSSSEETGSSEDPSPPGGHLEGYPCPHLAYGEPESFGDNLYVCIPCGKGFPSSEQLNAHVEAHVEEEEALYGRAEAAEVAAGAAGLGPPFGGGGDKVAGAPGGLGELLRPYRCASCDKSYKDPATLRQHEKTHWLTRPYPCTICGKKFTQRGTMTRHMRSHLGLKPFACDACGMRFTRQYRLTEHMRIHSGEKPYECQVCGGKFAQQRNLISHMKMHAVGGAAGAAGALAGLGGLPGVPGPDGKGKLDFPEGVFAVARLTAEQLSLKQQDKAAAAELLAQTTHFLHDPKVALESLYPLAKFTAELGLSPDKAAEVLSQGAHLAAGPDGRTIDRFSPT

SEQ ID NO: 36246 - protein, 1084 aa, Homo sapiens
MSSQSHPDGLSGRDQPVELLNPARVNHMPSTVDVATALPLQVAPSAVPMDLRLDHQFSLPVAEPALREQQLQQELLALKQKQQIQRQILIAEFQRQHEQLSRQHEAQLHEHIKQQQEMLAMKHQQELLEHQRKLERHRQEQELEKQHREQKLQQLKNKEKGKESAVASTEVKMKLQEFVLNKKKALAHRNLNHCISSDPRYWYGKTQHSSLDQSSPPQSGVSTSYNHPVLGMYDAKDDFPLRKTASEPNLKLRSRLKQKVAERRSSPLLRRKDGPVVTALKKRPLDVTDSACSSAPGSGPSSPNNSSGSVSAENGIAPAVPSIPAETSLAHRLVAREGSAAPLPLYTSPSLPNITLGLPATGPSAGTAGQQDAERLTLPALQQRLSLFPGTHLTPYLSTSPLERDGGAAHSPLLQHMVLLEQPPAQAPLVTGLGALPLHAQSLVGADRVSPSIHKLRQHRPLGRTQSAPLPQNAQALQHLVIQQQHQQFLEKHKQQFQQQQLQMNKIIPKPSEPARQPESHPEETEEELREHQALLDEPYLDRLPGQKEAHAQAGVQVKQEPIESDEEEAEPPREVEPGQRQPSEQELLFRQQALLLEQQRIHQLRNYQASMEAAGIPVSFGGHRPLSRAQSSPASATFPVSVQEPPTKPRFTTGLVYDTLMLKHQCTCGSSSSHPEHAGRIQSIWSRLQETGLRGKCECIRGRKATLEELQTVHSEAHTLLYGTNPLNRQKLDSKKLLGSLASVFVRLPCGGVGVDSDTIWNEVHSAGAARLAVGCVVELVFKVATGELKNGFAVVRPPGHHAEESTPMGFCYFNSVAVAAKLLQQRLSVSKILIVDWDVHHGNGTQQAFYSDPSVLYMSLHRYDDGNFFPGSGAPDEVGTGPGVGFNVNMAFTGGLDPPMGDAEYLAAFRTVVMPIASEFAPDVVLVSSGFDAVEGHPTPLGGYNLSARCFGYLTKQLMGLAGGRIVLALEGGHDLTAICDASEACVSALLGNELDPLPEKVLQQRPNANAVRSMEKVMEIHSKYWRCLQRTTSTAGRSLIEAQTCENEEAETVTAMASLSVGVKPAEKRPDEEPMEEEPPL

SEQ ID NO: 36247 - protein, 972 aa, Homo sapiens
MLAMKHQQELLEHQRKLERHRQEQELEKQHREQKLQQLKNKEKGKESAVASTEVKMKLQEFVLNKKKALAHRNLNHCISSDPRYWYGKTQHSSLDQSSPPQSGVSTSYNHPVLGMYDAKDDFPLRKTASEPNLKLRSRLKQKVAERRSSPLLRRKDGPVVTALKKRPLDVTDSACSSAPGSGPSSPNNSSGSVSAENGIAPAVPSIPAETSLAHRLVAREGSAAPLPLYTSPSLPNITLGLPATGPSAGTAGQQDAERLTLPALQQRLSLFPGTHLTPYLSTSPLERDGGAAHSPLLQHMVLLEQPPAQAPLVTDWYLSGLGALPLHAQSLVGADRVSPSIHKLRQHRPLGRTQSAPLPQNAQALQHLVIQQQHQQFLEKHKQQFQQQQLQMNKIIPKPSEPARQPESHPEETEEELREHQALLDEPYLDRLPGQKEAHAQAGVQVKQEPIESDEEEAEPPREVEPGQRQPSEQELLFRQQALLLEQQRIHQLRNYQASMEAAGIPVSFGGHRPLSRAQSSPASATFPVSVQEPPTKPRFTTGLVYDTLMLKHQCTCGSSSSHPEHAGRIQSIWSRLQETGLRGKCECIRGRKATLEELQTVHSEAHTLLYGTNPLNRQKLDSKKLLGSLASVFVRLPCGGVGVDSDTIWNEVHSAGAARLAVGCVVELVFKVATGELKNGFAVVRPPGHHAEESTPMGFCYFNSVAVAAKLLQQRLSVSKILIVDWDVHHGNGTQQAFYSDPSVLYMSLHRYDDGNFFPGSGAPDEVGTGPGVGFNVNMAFTGGLDPPMGDAEYLAAFRTVVMPIASEFAPDVVLVSSGFDAVEGHPTPLGGYNLSARCFGYLTKQLMGLAGGRIVLALEGGHDLTAICDASEACVSALLGNELDPLPEKVLQQRPNANAVRSMEKVMEIHSKYWRCLQRTTSTAGRSLIEAQTCENEEAETVTAMASLSVGVKPAEKRPDEEPMEEEPPL

SEQ ID NO: 36248 - protein, 189 aa, Homo sapiens
MLGMIKNSLFGSVETWPWQVLSKGDKEEVAYEERACEGGKFATVEVTDKPVDEALREAMPKVAKYAGGTNDKGIGMGMTVPISFAVFPNEDGSLQKKLKVWFRIPNQFQSDPPAPSDKSVKIEEREGITVYSMQFGGYAKEADYVAQATRLRAALEGTATYRGDIYFCTGYDPPMKPYGRRNEIWLLKT

SEQ ID NO: 36249 - protein, 2144 aa, Homo sapiens
MTSLAQQLQRLALPQSDASLLSRDEVASLLFDPKEAATIDRDTAFAIGCTGLEELLGIDPSFEQFEAPLFSQLAKTLERSVQTKAVNKQLDENISLFLIHLSPYFLLKPAQKCLEWLIHRFHIHLYNQDSLIACVLPYHETRIFVRVIQLLKINNSKHRWFWLLPVKQSGVPLAKGTLITHCYKDLGFMDFICSLVTKSVKVFAEYPGSSAQLRVLLAFYASTIVSALVAAEDVSDNIIAKLFPYIQKGLKSSLPDYRAATYMIICQISVKVTMENTFVNSLASQIIKTLTKIPSLIKDGLSCLIVLLQRQKPESLGKKPFPHLCNVPDLITILHGISETYDVSPLLHYMLPHLVVSIIHHVTGEETEGMDGQIYKRHLEAILTKISLKNNLDHLLASLLFEEYISYSSQEEMDSNKVSLLNEQFLPLIRLLESKYPRTLDVVLEEHLKEIADLKKQELFHQFVSLSTSGGKYQFLADSDTSLMLSLNHPLAPVRILAMNHLKKIMKTSKEGVDESFIKEAVLARLGDDNIDVVLSAISAFEIFKEHFSSEVTISNLLNLFQRAELSKNGEWYEVLKIAADILIKEEILSENDQLSNQVVVCLLPFMVINNDDTESAEMKIAIYLSKSGICSLHPLLRGWEEALENVIKSTKPGKLIGVANQKMIELLADNINLGDPSSMLKMVEDLISVGEEESFNLKQKVTFHVILSVLVSCCSSLKETHFPFAIRVFSLLQKKIKKLESVITAVEIPSEWHIELMLDRGIPVELWAHYVEELNSTQRVAVEDSVFLVFSLKKFIYALKAPKSFPKGDIWWNPEQLKEDSRDYLHLLIGLFEMMLNGADAVHFRVLMKLFIKVHLEDVFQLFKFCSVLWTYGSSLSNPLNCSVKTVLQTQALYVGCAMLSSQKTQCKHQLASISSPVVTSLLINLGSPVKEVRRAAIQCLQALSGVASPFYLIIDHLISKAEEITSDAAYVIQDLATLFEELQREKKLKSHQKLSETLKNLLSCVYSCPSYIAKDLMKVLQGVNGEMVLSQLLPMAEQLLEKIQKEPTAVLKDEAMVLHLTLGKYNEFSVSLLNEDPKSLDIFIKAVHTTKELYAGMPTIQITALEKITKPFFAAISDEKVQQKLLRMLFDLLVNCKNSHCAQTVSSVFKGISVNAEQVRIELEPPDKAKPLGTVQQKRRQKMQQKKSQDLESVQEVGGSYWQRVTLILELLQHKKKLRSPQILVPTLFNLLSRCLEPLPQEQGNMEYTKQLILSCLLNICQKLSPDGGKIPKDILDEEKFNVELIVQCIRLSEMPQTHHHALLLLGTVAGIFPDKVLHNIMSIFTFMGANVMRLDDTYSFQVINKTVKMVIPALIQSDSGDSIEVSRNVEEIVVKIISVFVDALPHVPEHRRLPILVQLVDTLGAEKFLWILLILLFEQYVTKTVLAAAYGEKDAILEADTEFWFSVCCEFSVQHQIQSLMNILQYLLKLPEEKEETIPKAVSFNKSESQEEMLQVFNVETHTSKQLRHFKFLSVSFMSQLLSSNNFLKKVVESGGPEILKGLEERLLETVLGYISAVAQSMERNADKLTVKFWRALLSKAYDLLDKVNALLPTETFIPVIRGLVGNPLPSVRRKALDLLNNKLQQNISWKKTIVTRFLKLVPDLLAIVQRKKKEGEEEQAINRQTALYTLKLLCKNFGAENPDPFVPVLNTAVKLIAPERKEEKNVLGSALLCIAEVTSTLEALAIPQLPSLMPSLLTTMKNTSELVSSEVYLLSALAALQKVVETLPHFISPYLEGILSQVIHLEKITSEMGSASQANIRLTSLKKTLATTLAPRVLLPAIKKTYKQIEKNWKNHMGPFMSILQEHIGVMKKEELTSHQSQLTAFFLEALDFRAQHSENDLEEVGKTENCIIDCLVAMVVKLSEVTFRPLFFKLFDWAKTEDAPKDRLLTFYNLADCIAEKLKGLFTLFAGHLVKPFADTLNQVNISKTDEAFFDSENDPEKCCLLLQFILNCLYKIFLFDTQHFISKERAEALMMPLVDQLENRLGGEEKFQERVTKHLIPCIAQFSVAMADDSLWKPLNYQILLKTRDSSPKVRFAALITVLALAEKLKENYIVLLPESIPFLAELMEDECEEVEHQCQKTIQQLETVLGEPLQSYF

SEQ ID NO: 36250 - protein, 117 aa, Homo sapiens
MDMRVPAQRLGLLLLWFPGARCAIRMTQSPFSLSASVGDRVTITCWASQGISSYLAWYQQKPAKAPKLFIYYASSLQSGVPSRFSGSGSGTDYTLTISSLQPEDFATYYCQQYYSTP

SEQ ID NO: 36251 - protein, 204 aa, Homo sapiens
MASVSSATFSGHGARSLLQFLRLVGQLKRVPRTGWVYRNVQRPESVSDHMYRMAVMAMVIKDDRLNKDRCVRLALVHDMAECIVGDIAPADNIPKEEKHRREEEAMKQITQLLPEDLRKELYELWEEYETQSSAEAKFVKQLDQCEMILQASEYEDLEHKPGRLQDFYDSTAGKFNHPEIVQLVSELEAERSTNIAAAASEPHS

SEQ ID NO: 36252 - protein, 170 aa, Homo sapiens
MASVSSATFSGHGARSLLQFLRLVGQLKRVPRTGWVYRNVQRPESVSDHMYRMAVMAMVIKDDRLNKDREAMKQITQLLPEDLRKELYELWEEYETQSSAEAKFVKQLDQCEMILQASEYEDLEHKPGRLQDFYDSTAGKFNHPEIVQLVSELEAERSTNIAAAASEPHS

SEQ ID NO: 36253 - protein, 71 aa, Homo sapiens
MASVSSATFSGHGARSLLQFLRLVGQLKRVPRTGWVYRNVQRPESVSDHMYRMAVMAMVIKDDRLNKDRKL

SEQ ID NO: 36254 - protein, 680 aa, Homo sapiens
MGKSRTKRFKRPQFSPTGDCQAEAAAAANGTGGEEDDGPAAELLEKLQHPSAEVRECACAGLARLVQQRPALPGLARRDAVRRLGPLLLDPSLAVRETAAGALRNLSACGGFEVCDDMVTKDIMTPLVALLKECSAGLDSNEMSLQEKKDQNRNSIENIANETVNVLWNICECSSRAVSIFNKEGCLEIVLKYLSRFPTNVDLAISVAYCLQTVTEDNPELLKSFSATALNMLESALLSPVSSMESLLLKTLVAGTIWNLKDIIPCKSQAEIINALLKILSEVLGMDAGEMVIQMKEAETQRLKTAAEAEEILENTNGDDLIEDDEMEGISHKRRVRRKTFVSDLLPPTDKELRETIALLTAQQTALEIIVNMCCNEDPSDDEWEELSSSDESDAFMENSFSECGGQLFSPLCLSHEVHTALTNYLIPKKIFEKTAFPNSIAVDLCSRNPTWKPLIRKMNTIQCRALFCLQSLVSLLDVEHLGGAAALQTLAQHLSQLLFSQPDFAKHVDFLEAISSALRALLQTMASKNISQCMTPDQLMTLCKAGIHSSNVGVRVNVVSILGITGSVLAKEDGTLETLKNIGCFLLEVTTKDPSLVVAGEALDALFDVFADGKEAERASIQIKLLSALKEFQPVFKMKIRKEGRGNYSTDQLCVLDNVKMNLRRFIAYQETVEKRLTS

SEQ ID NO: 36255 - protein, 594 aa, Homo sapiens
MGPEARRTTGRRRSCWKRNPSACGGFEVCDDMVTKDIMTPLVALLKECSAGLDSNEMSLQEKKDQNRNSIENIANETVNVLWNICECSSRAVSIFNKEGCLEIVLKYLSRFPTNVDLAISVAYCLQTVTEDNPELLKSFSATALNMLESALLSPVSSMESLLLKTLVAGTIWNLKDIIPCKSQAEIINALLKILSEVLGMDAGEMVIQMKEAETQRLKTAAEAEEILENTNGDDLIEDDEMEGISHKRRVRRKTFVSDLLPPTDKELRETIALLTAQQTALEIIVNMCCNEDPSDDEWEELSSSDESDAFMENSFSECGGQLFSPLCLSHEVHTALTNYLIPKKIFEKTAFPNSIAVDLCSRNPTWKPLIRKMNTIQCRALFCLQSLVSLLDVEHLGGAAALQTLAQHLSQLLFSQPDFAKHVDFLEAISSALRALLQTMASKNISQCMTPDQLMTLCKAGIHSSNVGVRVNVVSILGITGSVLAKEDGTLETLKNIGCFLLEVTTKDPSLVVAGEALDALFDVFADGKEAERASIQIKLLSALKEFQPVFKMKIRKEGRGNYSTDQLCVLDNVKMNLRRFIAYQETVEKRLTS

SEQ ID NO: 36256 - protein, 314 aa, Homo sapiens
MGPEARRTTGRRRSCWKRNPSACGGFEVCDDMVTKDIMTPLVALLKECSAGLDSNEMSLQEKKDQNRNSIENIANETVNVLWNICECSSRAVSIFNKEGCLEIVLKYLSRFPTNVDLAISVAYCLQTVTEDNPELLKSFSATALNMLESALLSPVSSMESLLLKTLVAGTIWNLKDIIPCKSQAEIINALLKILSEVLGMDAGEMVIQMKEAETQRLKTAAEAEEILENTNGDDLIEDDEMEGISHKRRVRRKTFVSDLLPPTDKELRETIALLTAQQTALEIIVNMCCNEGLLTFTFRHFPPEPRGKLPWRFS

SEQ ID NO: 36257 - protein, 1215 aa, Homo sapiens
MTSTGQDSTTTRQRRSRQNPQSPPQDSSVTSKRNIKKGAVPRSIPNLAEVKKKGKMKKLGQAMEEDLIVGLQGMDLNLEAEALAGTGLVLDEQLNEFHCLWDDSFPEGPERLHAIKEQLIQEGLLDRCVSFQARFAEKEELMLVHSLEYIDLMETTQYMNEGELRVLADTYDSVYLHPNSYSCACLASGSVLRLVDAVLGAEIRNGMAIIRPPGHHAQHSLMDGYCMFNHVAVAARYAQQKHRIRRVLIVDWDVHHGQGTQFTFDQDPSVLYFSIHRYEQGRFWPHLKASNWSTTGFGQGQGYTINVPWNQVGMRDADYIAAFLHVLLPVALEFQPQLVLVAAGFDALQGDPKGEMAATPAGFAQLTHLLMGLAGGKLILSLEGGYNLRALAEGVSASLHTLLGDPCPMLESPGAPCRSAQASVSCALEALEPFWEVLVRSTETVERDNMEEDNVEESEEEGPWEPPVLPILTWPVLQSRTGLVYDQNMMNHCNLWDSHHPEVPQRILRIMCRLEELGLAGRCLTLTPRPATEAELLTCHSAEYVGHLRATEKMKTRELHRESSNFDSIYICPSTFACAQLATGAACRLVEAVLSGEVLNGAAVVRPPGHHAEQDAACGFCFFNSVAVAARHAQTISGHALRILIVDWDVHHGNGTQHMFEDDPSVLYVSLHRYDHGTFFPMGDEGASSQIGRAAGTGFTVNVAWNGPRMGDADYLAAWHRLVLPIAYEFNPELVLVSAGFDAARGDPLGGCQVSPEGYAHLTHLLMGLASGRIILILEGGYNLTSISESMAACTRSLLGDPPPLLTLPRPPLSGALASITETIQVHRRYWRSLRVMKVEDREGPSSSKLVTKKAPQPAKPRLAERMTTREKKVLEAGMGKVTSASFGEESTPGQTNSETAVVALTQDQPSEAATGGATLAQTISEAAIGGAMLGQTTSEEAVGGATPDQTTSEETVGGAILDQTTSEDAVGGATLGQTTSEEAVGGATLAQTTSEAAMEGATLDQTTSEEAPGGTELIQTPLASSTDHQTPPTSPVQGTTPQISPSTLIGSLRTLELGSESQGASESQAPGEENLLGEAAGGQDMADSMLMQGSRGLTDQAIFYAVTPLPWCPHLVAVCPIPAAGLDVTQPCGDCGTIQENWVCLSCYQVYCGRYINGHMLQHHGNSGHPLVLSYIDLSAWCYYCQAYVHHQALLDVKNIAHQNKFGEDMPHPH

SEQ ID NO: 36258 - protein, 1063 aa, Homo sapiens
METTQYMNEGELRVLADTYDSVYLHPNSYSCACLASGSVLRLVDAVLGAEIRNGMAIIRPPGHHAQHSLMDGYCMFNHVAVAARYAQQKHRIRRVLIVDWDVHHGQGTQFTFDQDPSVLYFSIHRYEQGRFWPHLKASNWSTTGFGQGQGYTINVPWNQVGMRDADYIAAFLHVLLPVALEFQPQLVLVAAGFDALQGDPKGEMAATPAGFAQLTHLLMGLAGGKLILSLEGGYNLRALAEGVSASLHTLLGDPCPMLESPGAPCRSAQASVSCALEALEPFWEVLVRSTETVERDNMEEDNVEESEEEGPWEPPVLPILTWPVLQSRTGLVYDQNMMNHCNLWDSHHPEVPQRILRIMCRLEELGLAGRCLTLTPRPATEAELLTCHSAEYVGHLRATEKMKTRELHRESSNFDSIYICPSTFACAQLATGAACRLVEAVLSGEVLNGAAVVRPPGHHAEQDAACGFCFFNSVAVAARHAQTISGHALRILIVDWDVHHGNGTQHMFEDDPSVLYVSLHRYDHGTFFPMGDEGASSQIGRAAGTGFTVNVAWNGPRMGDADYLAAWHRLVLPIAYEFNPELVLVSAGFDAARGDPLGGCQVSPEGYAHLTHLLMGLASGRIILILEGGYNLTSISESMAACTRSLLGDPPPLLTLPRPPLSGALASITETIQVHRRYWRSLRVMKVEDREGPSSSKLVTKKAPQPAKPRLAERMTTREKKVLEAGMGKVTSASFGEESTPGQTNSETAVVALTQDQPSEAATGGATLAQTISEAAIGGAMLGQTTSEEAVGGATPDQTTSEETVGGAILDQTTSEDAVGGATLGQTTSEEAVGGATLAQTTSEAAMEGATLDQTTSEEAPGGTELIQTPLASSTDHQTPPTSPVQGTTPQISPSTLIGSLRTLELGSESQGASESQAPGEENLLGEAAGGQDMADSMLMQGSRGLTDQAIFYAVTPLPWCPHLVAVCPIPAAGLDVTQPCGDCGTIQENWVCLSCYQVYCGRYINGHMLQHHGNSGHPLVLSYIDLSAWCYYCQAYVHHQALLDVKNIAHQNKFGEDMPHPH

SEQ ID NO: 36259 - protein, 776 aa, Homo sapiens
MSEAVRVPSPATPLVVAAPAPEERKGKESEREKLPPIVSAGAGATAGLDRGAKGQISTFSSFISAVSPKKEAAENRSSPAHLVFPNIKNVREPPPICLDVRQKQRTSMDASSSEMKAPVLPEPILPIQPKTVKDFQEDVEKVKSSGDWKAVHDFYLTTFDSFPELNAAFKKDATASFNTIEDSGINAKFVNAVYDTLLNTPQDVQKTVLKGIINSLLREWKGPRTKDDLRAYFILLQNPQFNNTSTYVIYAHLLRQIATLVEADHHFLVHWFKKLSQKRFKQLVERLLQFISLRLFPAKPEEFPPITKCSWWIPSAAKVLALLNTANNLVHPPLIPYTDFYNSTLDHIDLMEEYHTWQNFGNSHRFSFCQYPFVISVAAKKIIIQRDSEQQMINIARQSLVDKVSRRQRPDMNILFLNMKVRRTHLVSDSLDELTRKRADLKKKLKVTFVGEAGLDMGGLTKEWFLLLIRQIFHPDYGMFTYHKDSHCHWFSSFKCDNYSEFRLVGILMGLAVYNSITLDIRFPPCCYKKLLSPPIIPSDQNIPVGICNVTVDDLCQIMPELAHGLSELLSHEGNVEEDFYSTFQVFQEEFGIIKSYNLKPGGDKISVTNQNRKEYVQLYTDFLLNKSIYKQFAAFYYGFHSVCASNALMLLRPEEVEILVCGSPDLDMHALQRSTQYDGYAKTDLTIKYFWDVVLGFPLDLQKKLLHFTTGSDRVPVGGMADLNFKISKNETSTNCLPVAHTCFNQLCLPPYKSKKDLKQKLIIGISNSEGFGLE

SEQ ID NO: 36260 - protein, 207 aa, Homo sapiens
MSEAVRVPSPATPLVVAAPAPEERKGKESEREKLPPIVSAGAGATAGLDRGAKGQISTFSSFISAVSPKKEAAENRSSPAHLVFPNIKNVREPPPICLDVRQKQRTSMDASSSEMKAPVLPEPILPIQPKTVKDFQEDVEKVKSSGDWKAVHDFYLTTFDSFPELNAAFKKDATASFNTIEDSGINAKFVNAVYDTLLNTVSIMTCK

SEQ ID NO: 36261 - protein, 711 aa, Homo sapiens
MGWLPLLLLLTQCLGVPGQRSPLNDFQVLRGTELQHLLHAVVPGPWQEDVADAEECAGRCGPLMDCRAFHYNVSSHGCQLLPWTQHSPHTRLRRSGRCDLFQKKDYVRTCIMNNGVGYRGTMATTVGGLPCQAWSHKFPNDHKYTPTLRNGLEENFCRNPDGDPGGPWCYTTDPAVRFQSCGIKSCREAACVWCNGEEYRGAVDRTESGRECQRWDLQHPHQHPFEPGKFLDQGLDDNYCRNPDGSERPWCYTTDPQIEREFCDLPRCGSEAQPRQEATTVSCFRGKGEGYRGTANTTTAGVPCQRWDAQIPHQHRFTPEKYACKDLRENFCRNPDGSEAPWCFTLRPGMRAAFCYQIRRCTDDVRPQDCYHGAGEQYRGTVSKTRKGVQCQRWSAETPHKPQFTFTSEPHAQLEENFCRNPDGDSHGPWCYTMDPRTPFDYCALRRCADDQPPSILDPPDQVQFEKCGKRVDRLDQRRSKLRVVGGHPGNSPWTVSLRNRQGQHFCGGSLVKEQWILTARQCFSSCHMPLTGYEVWLGTLFQNPQHGEPSLQRVPVAKMVCGPSGSQLVLLKLERSVTLNQRVALICLPPEWYVVPPGTKCEIAGWGETKGTGNDTVLNVALLNVISNQECNIKHRGRVRESEMCTEGLLAPVGACEGDYGGPLACFTHNCWVLEGIIIPNRVCARSRWPAVFTRVSVFVDWIHKVMRLG

SEQ ID NO: 36262 - protein, 387 aa, Homo sapiens
MNRHHLQDHFLEIDKKNCCVFRDDFIAKVLPPVLGLEFIFGLLGNGLALWIFCFHLKSWKSSRIFLFNLAVADFLLIICLPFVMDYYVRRSDWKFGDIPCRLVLFMFAMNRQGSIIFLTVVAVDRYFRVVHPHHALNKISNWTAAIISCLLWGITVGLTVHLLKKKLLIQNGTANVCISFSICHTFRWHEAMFLLEFFLPLGIILFCSARIIWSLRQRQMDRHAKIKRAITFIMVVAIVFVICFLPSVVVRIHIFWLLHTSGTQNCEVYRSVDLAFFITLSFTYMNSMLDPVVYYFSSPSFPNFFSTLINRCLQRKITGEPDNNRSTSVELTGDPNKTRGAPEALIANSGEPWSPSYLGPTSNNHSKKGHCHQEPASLEKQLGCCIE

SEQ ID NO: 36263 - protein, 529 aa, Homo sapiens
MDLPVGPGAAGPSNVPAFLTKLWTLVSDPDTDALICWSPSGNSFHVFDQGQFAKEVLPKYFKHNNMASFVRQLNMYGFRKVVHIEQGGLVKPERDDTEFQHPCFLRGQEQLLENIKRKVTSVSTLKSEDIKIRQDSVTKLLTDVQLMKGKQECMDSKLLAMKHENEALWREVASLRQKHAQQQKVVNKLIQFLISLVQSNRILGVKRKIPLMLNDSGSAHSMPKYSRQFSLEHVHGSGPYSAPSPAYSSSSLYAPDAVASSGPIISDITELAPASPMASPGGSIDERPLSSSPLVRVKEEPPSPPQSPRVEEASPGRPSSVDTLLSPTALIDSILRESEPAPASVTALTDARGHTDTEGRPPSPPPTSTPEKCLSVACLDKNELSDHLDAMDSNLDNLQTMLSSHGFSVDTSALLDLFSPSVTVPDMSLPDLDSSLASIQELLSPQEPPRPPEAENSSPDSGKQLVHYTAQPLFLLDPGSVDTGSNDLPVLFELGEGSYFSEGDGFAEDPTISLLTGSEPPKAKDPTVS

SEQ ID NO: 36264 - protein, 489 aa, Homo sapiens
MDLPVGPGAAGPSNVPAFLTKLWTLVSDPDTDALICWSPSGNSFHVFDQGQFAKEVLPKYFKHNNMASFVRQLNMYGFRKVVHIEQGGLVKPERDDTEFQHPCFLRGQEQLLENIKRKVTSVSTLKSEDIKIRQDSVTKLLTDVQLMKGKQECMDSKLLAMKHENEALWREVASLRQKHAQQQKVVNKLIQFLISLVQSNRILGVKRKIPLMLNDSGSAHSMPKYSRQFSLEHVHGSGPYSAPSPAYSSSSLYAPDAVASSGPIISDITELAPASPMASPGGSIDERPLSSSPLVRVKEEPPSPPQSPRVEEASPGRPSSVDTLLSPTALIDSILRESEPAPASVTALTDARGHTDTEGRPPSPPPTSTPEKCLSVACLDKNELSDHLDAMDSNLDNLQTMLSSHGFSVDTSALLDLFSPSVTVPDMSLPDLDSSLASIQELLSPQEPPRPPEAENSSPDSAGALHSAAAVPAGPRLRGHREQRPAGAV

SEQ ID NO: 36265 - protein, 401 aa, Homo sapiens
MAHVSSETQDVSPKDELTASEASTRSPLCEHTFPGDSDLRSMIEEHAFQVLSQGSLLESPSYTVCVSEPDKDDDFLSLNFPRKLWKIVESDQFKSISWDENGTCIVINEELFKKEILETKAPYRIFQTDAIKSFVRQLNLYGFSKIQQNFQRSAFLATFLSEEKESSVLSKLKFYYNPNFKRGYPQLLVRVKRRIGVKNASPISTLFNEDFNKKHFRAGANMENHNSALAAEASEESLFSASKNLNMPLTRESSVRQIIANSSVPIRSGFPPPSPSTSVGPSEQIATDQHAILNQLTTIHMHSHSTYMQARGHIVNFITTTTSQYHIISPLQNGYFGLTVEPSAVPTRYPLVSVNEAPYRNMLPAGNPWLQMPTIADRSAAPHSRLALQPSPLDKYHPNYN

SEQ ID NO: 36266 - protein, 203 aa, Homo sapiens
MAHVSSETQDVSPKDELTASEASTRSPLCEHTFPGDSDLRSMIEEHAFQVLSQGSLLESPSYTVCVSEPDKDDDFLSLNFPRKLWKIVESDQFKSISWDENGTCIVINEELFKKEILETKAPYRIFQTDAIKSFVRQLNLYGFSKIQQNFQRSAFLATFLSEEKESSVLSKIRFTKMKLSRSSTYENRYLCCNLHLKDESNYS

SEQ ID NO: 36267 - protein, 214 aa, Homo sapiens
MAHVSSETQDVSPKDELTASEASTRSPLCEHTFPGDSDLRSMIEEHAFQVLSQGSLLESPSYTVCVSEPDKDDDFLSLNFPRKLWKIVESDQFKSISWDENGTCIVINEELFKKEILETKAPYRIFQTDAIKSFVRQLNLYGFSKIQQNFQRSAFLATFLSEEKESSVLSKLHVFVFHHSLFGATFGEHHFQPCPLPSGNKAPISTWSGDSWLL

SEQ ID NO: 36268 - protein, 333 aa, Homo sapiens
MASQNTEQEYEAKLAPSVGGEPTSGGPSGSSPDPNPDSSEVLDRHEDQAMSQDPGSQDNSPPEDRNQRVVNVEDNHNLFRLSFPRKLWTIVEEDTFKSVSWNDDGDAVIIDKDLFQREVLQRKGAERIFKTDSLTSFIRQLNLYGFCKTRPSNSPGNKKMMIYCNSNFQRDKPRLLENIQRKDALRNTAQQATRVPTPKRKNLVATRRSLRIYHINARKEAIKMCQQGAPSVQGPSGTQSFRRSGMWSKKSATRHPLGNGPPQEPNGPSWEGTSGNVTFTSSATTWMEGTGILSSLVYSDNGSVMSLYNICYYALLASLSVMSPNEPSDDEEE

SEQ ID NO: 36269 - protein, 365 aa, Homo sapiens
MAKVAKDLNPGVKKMSLGQLQSARGVACLGCKGTCSGFEPHSWRKICKSCKCSQEDHCLTSDLEDDRKIGRLLMDSKYSTLTARVKGGDGIRIYKRNRMIMTNPIATGKDPTFDTITYEWAPPGVTQKLGLQYMELIPKEKQPVTGTEGAFYRRRQLMHQLPIYDQDPSRCRGLLENELKLMEEFVKQYKSEALGVGEVALPGQGGLPKEEGKQQEKPEGAETTAATTNGSLSDPSKEVEYVCELCKGAAPPDSPVVYSDRAGYNKQWHPTCFVCAKCSEPLVDLIYFWKDGAPWCGRHYCESLRPRCSGCDEIIFAEDYQRVEDLAWHRKHFVCEGCEQLLSGRAYIVTKGQLLCPTCSKSKRS

SEQ ID NO: 36270 - protein, 292 aa, Homo sapiens
MDSKYSTLTARVKGGDGIRIYKRNRMIMTNPIATGKDPTFDTITYEWAPPGVTQKLGLQYMELIPKEKQPVTGTEGAFYRRRQLMHQLPIYDQDPSRCRGLLENELKLMEEFVKQYKSEALGVGEVALPGQGGLPKEEGKQQEKPEGAETTAATTNGSLSDPSKEVEYVCELCKGAAPPDSPVVYSDRAGYNKQWHPTCFVCAKCSEPLVDLIYFWKDGAPWCGRHYCESLRPRCSGCDEIIFAEDYQRVEDLAWHRKHFVCEGCEQLLSGRAYIVTKGQLLCPTCSKSKRS

SEQ ID NO: 36271 - protein, 343 aa, Homo sapiens
MPEETQTQDQPMEEEEVETFAFQAEIAQLMSLIINTFYSNKEIFLRELISNSSDALDKIWYESLTDPSKLDSGKELHINLIPNKQDQTLTIVDTGIGMTKADLINNLGTIAKSGTKAFMEALQAGADISMIGQFGVSFYSAYLVAEKVTVITKHNDDEQYAWESSAGGSFTVRTDTGERMGRGTKVILHLKEDQTEYLEEQRIKEIVKKHSQLIGYPITLFVEKECDKEVSDDETEEKEDKEEEKEKEEKESKDKPEIEDVGSDEEEEKKDGDKKKKKTKEKYIDQEELNKTKPIWTRNPDDITNEEYGEFCKNLTNDWEDHLAVKHFSVEGQLEFRALLFVP

SEQ ID NO: 36272 - protein, 1159 aa, Homo sapiens
MPRKQPAGCIFLLTFLGLSGLVGTVTRTYYIGIVEEYWNYVPQGKNVITGKSFTEDKLATLFLERGPNRIGSIYKKAVYRRFTDGTYSIEIPKPPWLGFLGPILRAEVGDVIVIHLKNFASRPYSLHPHGVFYNKDSEGALYPDGTSGRNKNDDMVPPGKNYTYVWPVREEYAPTPADANCLTWVYHSHIDAPKDICSGLIGPLLVCKEGILNRYSGTRNDVDREFVIMFTLVDENQSWYLNENIKHFCTNPDSVDKKDAVFQRSNKMHALNGYLFGNFPEPDMCVGESVSWHLFGMGNEIDIHSIYFYGNTFISRGHRTDVVNLFPATFLTTEMIAENPGKWMITCQVSDHLQAGMLGQYNVDNCKSDIFYPKMKGQQRRYFIAAEKILWDYAPQGYNKFSGLPLNASGSDSDLYFTQGDNRIGGKYWKVRYTEFVDATFTKRKRLSAEEAHLGILGPVIKAEVGDTLLVTFANKADKVYSILPHGVIYDKASDAAPNLDGFVKPGAHVKPGETFTYKWTVPESVSPTAGDPPCLTYLYFSAVDPIKDTSSGLVGPLLVCKKGVLNADGTQKGIDKEFYLLFTVFDENLSRYFDENIQKFIWHPFSIDKEDKEFVKSNRMHAVNGYMYGNQPGLNMCKRDRVSWHLIGLGTDTDMHGIVFQGNTIHLRGTHRDSLALFPHMATTAFMQPDHAGIFRVFCATMPHLSRGMGQIYEVSSCDNRDPSEQRYGMIRTFYIAAEEVEWDYAPNKNWEFEKQHVDARGERHGDIFMNRTENWIGSQYKKVVYREYTDGEFVEIKARPPREEHLELLGPMIHAEVGNTVLIIFKNKASRPYSISAQGVEEMDSGKQFQVPMTKPGEVKTYRWNIPKRSGPGPSDPNCIPWVYYSTVNFVKDTYSGLMGPLITCRKGVLNEKGRRSDVDYEFALLFLVFNENESWYLDDNIKKYLNKDPRDFKRTDDFEESNRMHAINGKIFGNLHGLIMNEDTMTNWYLLGIGSEVDIHTIHYHAESFLFKIDKSYREDVYDLFPGTFQTIELFADHPGTWLLHCHVSDHIHAGMETTYTVLRNIDNRIPYSTTSPGVASHPATVPSNERPGKEQLYFFGKNLGPTGAKAALVILFIIGLLLLITTVILSLRLCSAMKQTDYQQVQSCALPTDAL

SEQ ID NO: 36273 - protein, 293 aa, Homo sapiens
MASNVTNKMDPHSVNSRVFIGNLNTLVVKKSDVEAIFSKYGKIAGCSVHKGFAFVQYDKEKNARAAVAGEDGRMIASQVAVINLAAEPKVNRGNAGVKRSAAEMYGSSFDLDYGFQRDYYDGMYSFPARVPPPPPIALAVVPSKRQRISGNTSRRGKSGFNSKSGKRGSSKSGKLKGDDLQAIKQELTQIKQKVDSLLENLEKIEKEQSKQEVEVKNAKSEEEQSSSSMKKDETHVKMESEGGAEDSAEEGDPLDDDDNEDQGDNQLHLIKNNEKDAEEGEDNRDSTNGQDDS

SEQ ID NO: 36274 - protein, 218 aa, Homo sapiens
MATRSPGVVISDDEPGYDLDLFCIPNHYAEDLERVFIPHGLIMDRTERLARDVMKEMGGHHIVALCVLKGGYKFFADLLDYIKALNRNSDRSIPMTVDFIRLKSYCNDQSTGDIKVIGGDDLSTLTGKNVLIVEDIIDTGKTMQTLLSLVRQYNPKMVKVASLLVKRTPRSVGYKPDFVGFEIPDKFVVGYALDYNEYFRDLNHVCVISETGKAKYKA

SEQ ID NO: 36275 - protein, 543 aa, Homo sapiens
MLLRSKPALPPPLMLLLLGPLGPLSPGALPRPAQAQDVVDLDFFTQEPLHLVSPSFLSVTIDANLATDPRFLILLGSPKLRTLARGLSPAYLRFGGTKTDFLIFDPKKESTFEERSYWQSQVNQDICKYGSIPPDVEEKLRLEWPYQEQLLLREHYQKKFKNSTYSRSSVDVLYTFANCSGLDLIFGLNALLRTADLQWNSSNAQLLLDYCSSKGYNISWELGNEPNSFLKKADIFINGSQLGEDFIQLHKLLRKSTFKNAKLYGPDVGQPRRKTAKMLKSFLKAGGEVIDSVTWHHYYLNGRTATKEDFLNPDVLDIFISSVQKVFQVVESTRPGKKVWLGETSSAYGGGAPLLSDTFAAGFMWLDKLGLSARMGIEVVMRQVFFGAGNYHLVDENFDPLPDYWLSLLFKKLVGTKVLMASVQGSKRRKLRVYLHCTNTDNPRYKEGDLTLYAINLHNVTKYLRLPYPFSNKQVDKYLLRPLGPHGLLSKSVQLNGLTLKMVDDQTLPPLMEKPLRPGSSLGLPAFSYSFFVIRNAKVAACI

SEQ ID NO: 36276 - protein, 485 aa, Homo sapiens
MLLRSKPALPPPLMLLLLGPLGPLSPGALPRPAQAQDVVDLDFFTQEPLHLVSPSFLSVTIDANLATDPRFLILLGSPKLRTLARGLSPAYLRFGGTKTDFLIFDPKKESTFEERSYWQSQVNQDICKYGSIPPDVEEKLRLEWPYQEQLLLREHYQKKFKNSTYSKPNSFLKKADIFINGSQLGEDFIQLHKLLRKSTFKNAKLYGPDVGQPRRKTAKMLKSFLKAGGEVIDSVTWHHYYLNGRTATKEDFLNPDVLDIFISSVQKVFQVVESTRPGKKVWLGETSSAYGGGAPLLSDTFAAGFMWLDKLGLSARMGIEVVMRQVFFGAGNYHLVDENFDPLPDYWLSLLFKKLVGTKVLMASVQGSKRRKLRVYLHCTNTDNPRYKEGDLTLYAINLHNVTKYLRLPYPFSNKQVDKYLLRPLGPHGLLSKSVQLNGLTLKMVDDQTLPPLMEKPLRPGSSLGLPAFSYSFFVIRNAKVAACI

SEQ ID NO: 36277 - protein, 469 aa, Homo sapiens
MLLRSKPALPPPLMLLLLGPLGPLSPGALPRPAQAQDVVDLDFFTQEPLHLVSPSFLSVTIDANLATDPRFLILLGSPKLRTLARGLSPAYLRFGGTKTDFLIFDPKKESTFEERSYWQSQVNQDICKYGSIPPDVEEKLRLEWPYQEQLLLREHYQKKFKNSTYSRSSVDVLYTFANCSGLDLIFGLNALLRTADLQWNSSNAQLLLDYCSSKGYNISWELGNEPNSFLKKADIFINGSQLGEDFIQLHKLLRKSTFKNAKLYGPDVGQPRRKTAKMLKSFLKAGGEVIDSVTWHHYYLNGRTATKEDFLNPDVLDIFISSVQKVFQDYWLSLLFKKLVGTKVLMASVQGSKRRKLRVYLHCTNTDNPRYKEGDLTLYAINLHNVTKYLRLPYPFSNKQVDKYLLRPLGPHGLLSKSVQLNGLTLKMVDDQTLPPLMEKPLRPGSSLGLPAFSYSFFVIRNAKVAACI

SEQ ID NO: 36278 - protein, 380 aa, Homo sapiens
MLLRSKPALPPPLMLLLLGPLGPLSPGALPRPAQAQDVVDLDFFTQEPLHLVSPSFLSVTIDANLATDPRFLILLGSPKLRTLARGLSPAYLRFGGTKTDFLIFDPKKESTFEERSYWQSQVNQDICKYGSIPPDVEEKLRLEWPYQEQLLLREHYQKKFKNSTYSRSSVDVLYTFANCSGLDLIFGLNALLRTADLQWNSSNAQLLLDYCSSKGYNISWELGNEPNSFLKKADIFINGSQLGEDFIQLHKLLRKSTFKNAKLYGPDVGQPRRKTAKMLKSFLKAGGEVIDSVTWHHYYLNGRTATKEDFLNPDVLDIFISSVQKVFQVVESTRPGKKVWLGETSSAYGGGAPLLSDTFAAGFMIIGYLFCSRNWWAPRC

SEQ ID NO: 36279 - protein, 293 aa, Homo sapiens; identical to SEQ ID NO: 23837

SEQ ID NO: 36280 - protein, 1004 aa, Homo sapiens
MVQLYNLHPFGSQQVVPCKLEPDRFCGGGRDALFVAAGCKVEAFAVAGQELCQPRCAFSTLGRVLRLAYSEAGDYLVAIEEKNKATFLRAYVNWRNKRTENSRVCIRMIGHNVEGPFSKAFRDQMYIIEMPLSEAPLCISCCPVKGDLLVGCTNKLVLFSLKYQIINEEFSLLDFERSLIIHIDNITPVEVSFCVGYVAVMSDLEVLIVKLESGPKNGERVHHHPHKTNNRIRRTEEGISNEISQLESDDFVICQKPLELLGEKSEQSGLSVTLESTGLADEKRKYSHFQHLLYRRFAPDISSYVLSDDIKLHSLQLLPIYQTGSLTSDGKNLSQEKELLSLFCFFSLPHVGYLYMVVKSVELMSVYQYPEKSQQAVLTPQFLHVITSNNLQCFTVRCSAAAAREEDPYMDTTLKACPPVSMDVCALRIQLFIGLKAICHFKNHIILLTKAEPEAIPERRQSPKRLLSRKDTSVKIKIPPVAEAGWNLYIVNTISPVQLYKEMVDYSNTYKTVKTQSCIHLLSEAHLLVRAALMDASQLEPGEKAELLEAFKESCGHLGDCYSRLDSQHSHLTLPYYKMSGLSMAEVLARTDWTVEDGLQKYERGLIFYINHSLYENLDEELNEELAAKVVQMFYVAEPKQVPHILCSPSMKNINPLTAMSYLRKLDTSGFSSILVTLTKAAVALKMGDLDMHRNEMKSHSEMKLVCGFILEPRLLIQQRKGQIVPTELALHLKETQPGLLVASVLGLQKNNKIGIEEADSFFKVLCAKDEDTIPQLLVDFWEAQLVACLPDVVLQELFFKLTSQYIWRLSKRQPPDTTPLRTSEDLINACSHYGLIYPWVHVVISSDSLADKNYTEDLSKLQSLICGPSFDIASIIPFLEPLSEDTIAGLSVHVLCRTRLKEYEQCIDILLERCPEAVIPYANHELKEENRTLWWKKLLPELCQRIKCGGEKYQLYLSSLKETLSIVAVELELKDFMNVLPEDGTATFFLPYLLYCSRKKPLT

SEQ ID NO: 36281 - protein, 890 aa, Homo sapiens
MVQLYNLHPFGSQQVVPCKLEPDRFCGGGRDALFVAAGCKVEAFAVAGQELCQPRCAFSTLGRVLRLAYSEAGDYLVAIEEKNKATFLRAYVNWRNKRTENSRVCIRMIGHNVEGPFSKAFRDQMYIIEMPLSEAPLCISCCPVKGDLLVGCTNKLVLFSLKYQIINEEFSLLDFERSLIIHIDNITPVEVSFCVGYVAVMSDLEVLIVKLESGPKNGERVHHHPHKTNNRIRRTEEGISNEISQLESDDFVICQKPLELLGEKSEQSGLSVTLESTGLADEKRKYSHFQHLLYRRFAPDISSYVLSDDIKLHSLQLLPIYQTGSLTSDGKNLSQEKELLSLFCFFSLPHVGYLYMVVKSVELMSVYQYPEKSQQAVLTPQFLHVITSNNLQCFTVRCSAAAAREEDPYMDTTLKACPPVSMDVCALRIQLFIGLKAICHFKNHIILLTKAEPEAIPERRQSPKRLLSRKDTSVKIKIPPVAEAGWNLYIVNTISPVQLYKEMVDYSNTYKTVKTQSCIHLLSEAHLLVRAALMDASQLEPGEKAELLEAFKESCGHLGDCYSRLDSQHSHLTLPYYKMSGLSMAEVLARTDWTVEDGLQKYERGLIFYINHSLYENLDEELNEELAAKVVQMFYVAEPKQVPHILCSPSMKNINPLTAMSYLRKLDTSGFSSILVTLTKAAVALKMGDLDMHRNEMKSHSEMKLVCGFILEPRLLIQQRKGQIVPTELALHLKETQPGLLVASVLGLQKNNKIGIEEADSFFKVLCAKDEDTIPQLLVDFWEAQLVACLPDVVLQELFFKLTSQYIWRLSKRQPPDTTPLRTSEDLINACSHYGLIYPWVHVVISSDSLADKNYTEDLSKLQLPLFRSWSHFQKTLLPASVSMFCVVHA

SEQ ID NO: 36282 - protein, 360 aa, Homo sapiens
MGLLLLVPLLLLPGSYGLPFYNGFYYSNSANDQNLGNGHGKDLLNGVKLVVETPEETLFTYQGASVILPCRYRYEPALVSPRRVRVKWWKLSENGAPEKDVLVAIGLRHRSFGDYQGRVHLRQDKEHDVSLEIQDLRLEDYGRYRCEVIDGLEDESGLVELELRGVVFPYQSPNGRYQFNFHEGQQVCAEQAAVVASFEQLFRAWEEGLDWCNAGWLQDATVQYPIMLPRQPCGGPGLAPGVRSYGPRHRRLHRYDVFCFATALKGRVYYLEHPEKLTLTEAREACQEDDATIAKVGQLFAAWKFHGLDRCDAGWLADGSVRYPVVHPHPNCGPPEPGVRSFGFPDPQSRLYGVYCYRQH

SEQ ID NO: 36283 - protein, 340 aa, Homo sapiens
ASPTSPKVFPLSLDSTPQDGNVVVACLVQGFFPQEPLSVTWSESGQNVTARNFPPSQDASGDLYTTSSQLTLPATQCPDGKSVTCHVKHYTNSSQDVTVPCRVPPPPPCCHPRLSLHRPALEDLLLGSEANLTCTLTGLRDASGATFTWTPSSGKSAVQGPPERDLCGCYSVSSVLPGCAQPWNHGETFTCTAAHPELKTPLTANITKSGNTFRPEVHLLPPPSEELALNELVTLTCLARGFSPKDVLVRWLQGSQELPREKYLTWASRQEPSQGTTTYAVTSILRVAAEDWKKGETFSCMVGHEALPLAFTQKTIDRMAGKPTHINVSVVMAEADGTCY

SEQ ID NO: 36284 - protein, 184 aa, Homo sapiens
MAEPQPPSGGLTDEAALSCCSDADPSTKDFLLQQTMLRVKDPKKSLDFYTRVLGMTLIQKCDFPIMKFSLYFLAYEDKNDIPKEKDEKIAWALSRKATLELTHNWGTEDDETQSYHNGNSDPRGFGHIGIAVPDVYSACKRFEELGVKFVKKPDDGKMKGLAFIQDPDGYWIEILNPNKMATLM

SEQ ID NO: 36285 - protein, 169 aa, Homo sapiens
MAEPQPPSGGLTDEAALSCCSDADPSTKDFLLQQTMLRVKDPKKSLDFYTRVLGMTLIQKCDFPIMKFSLYFLAYEDKNDIPKEKDEKIAWALSRKATLELTHNSDPRGFGHIGIAVPDVYSACKRFEELGVKFVKKPDDGKMKGLAFIQDPDGYWIEILNPNKMATLM

SEQ ID NO: 36286 - protein, 372 aa, Homo sapiens
MSLRCGDAARTLGPRVFGRYFCSPVRPLSSLPDKKKELLQNGPDLQDFVSGDLADRSTWDEYKGNLKRQKGERLRLPPWLKTEIPMGKNYNKLKNTLRNLNLHTVCEEARCPNIGECWGGGEYATATATIMLMGDTCTRGCRFCSVKTARNPPPLDASEPYNTAKAIAEWGLDYVVLTSVDRDDMPDGGAEHIAKTVSYLKERNPKILVECLTPDFRGDLKAIEKVALSGLDVYAHNVETVPELQSKVRDPRANFDQSLRVLKHAKKVQPDVISKTSIMLGLGENDEQVYATMKALREADVDCLTLGQYMQPTRRHLKVEEYITPEKFKYWEKVGNELGFHYTASGPLVRSSYKAGEFFLKNLVAKRKTKDL

SEQ ID NO: 36287 - protein, 322 aa, Homo sapiens
MSLRCGDAARTLGPRVFGRYFCSPVRPLSSLPDKKKELLQNGPDLQDFVSGDLADRSTWDEYKGNLKRQKGERLRLPPWLKTEIPMGKNYNKLKNTLRNLNLHTVCEEARCPNIGECWGGGEYATATATIMLMGDTCTRGCRFCSVKTARNPPPLDASEPYNTAKAIAEWGLDYVVLTSVDRDDMPDGGAEHIAKTVSYLKERNPKILVECLTPDFRGDLKAIEKVALSGLDVYAHNVETVPELQSKVRDPRANFDQSLRVLKHAKKVQPDVISKTSIMLGLGENDEQVYATMKALREADVDCLTLGQYMQPTRRHLKVNFS

SEQ ID NO: 36288 - protein, 329 aa, Homo sapiens
MSLRCGDAARTLGPRVFGRYFCSPVRPLSSLPDKKKELLQNGPDLQDFVSGDLADRSTWDEYKGNLKRQKGERLRLPPWLKTEIPMGKNYNKLKNTLRNLNLHTVCEEARCPNIGECWGGGEYATATATIMLMGDTCTRGCRFCSVKTARNPPPLDASEPYNTAKAIAEWGLDYVVLTSVDRDDMPDGGAEHIAKTVSYLKESKVRDPRANFDQSLRVLKHAKKVQPDVISKTSIMLGLGENDEQVYATMKALREADVDCLTLGQYMQPTRRHLKVEEYITPEKFKYWEKVGNELGFHYTASGPLVRSSYKAGEFFLKNLVAKRKTKDL

SEQ ID NO: 36289 - protein, 330 aa, Homo sapiens [sequence omitted]

SEQ ID NO: 36290 - protein, 859 aa, Homo sapiens
MACRWSTKESPRWRSALLLLFLAGVYGNGALAEHSENVHISGVSTACGETPEQIRAPSGIITSPGWPSEYPAKINCSWFIRANPGEIITISFQDFDIQGSRRCNLDWLTIETYKNIESYRACGSTIPPPYISSQDHIWIRFHSDDNISRKGFRLAYFSGKSEEPNCACDQFRCGNGKCIPEAWKCNNMDECGDSSDEEICAKEANPPTAAAFQPCAYNQFQCLSRFTKVYTCLPESLKCDGNIDCLDLGDEIDCDVPTCGQWLKYFYGTFNSPNYPDFYPPGSNCTWLIDTGDHRKVILRFTDFKLDGTGYGDYVKIYDGLEENPHKLLRVLTAFDSHAPLTVVSSSGQIRVHFCADKVNAARGFNATYQVDGFCLPWEIPCGGNWGCYTEQQRCDGYWHCPNGRDETNCTMCQKEEFPCSRNGVCYPRSDRCNYQNHCPNGSDEKNCFFCQPGNFHCKNNRCVFESWVCDSQDDCGDGSDEENCPVIVPTRVITAAVIGSLICGLLLVIALGCTCKLYSLRMFERRSFETQLSRVEAELLRREAPPSYGQLIAQGLIPPVEDFPVCSPNQASVLENLRLAVRSQLGFTSVRLPMAGRSSNIWNRIFNFARSRHSGSLALVSADGDEVVPSQSTSREPERNHTHRSLFSVESDDTDTENERRDMAGASGGVAAPLPQKVPPTTAVEATVGACASSSTQSTRGGHADNGRDVTSVEPPSVSPARHQLTSALSRMTQGLRWVRFTLGRSSSLSQNQSPLRQLDNGVSGREDDDDVEMLIPISDGSSDFDVNDCSRPLLDLASDQGQGLRQPYNATNPGVRPSNRDGPCERCGIVHTAQIPDTCLEVTLKNETSDDEALLLC

SEQ ID NO: 36291 - protein, 840 aa, Homo sapiens
MACRWSTKESPRWRSALLLLFLAGVYACGETPEQIRAPSGIITSPGWPSEYPAKINCSWFIRANPGEIITISFQDFDIQGSRRCNLDWLTIETYKNIESYRACGSTIPPPYISSQDHIWIRFHSDDNISRKGFRLAYFSGKSEEPNCACDQFRCGNGKCIPEAWKCNNMDECGDSSDEEICAKEANPPTAAAFQPCAYNQFQCLSRFTKVYTCLPESLKCDGNIDCLDLGDEIDCDVPTCGQWLKYFYGTFNSPNYPDFYPPGSNCTWLIDTGDHRKVILRFTDFKLDGTGYGDYVKIYDGLEENPHKLLRVLTAFDSHAPLTVVSSSGQIRVHFCADKVNAARGFNATYQVDGFCLPWEIPCGGNWGCYTEQQRCDGYWHCPNGRDETNCTMCQKEEFPCSRNGVCYPRSDRCNYQNHCPNGSDEKNCFFCQPGNFHCKNNRCVFESWVCDSQDDCGDGSDEENCPVIVPTRVITAAVIGSLICGLLLVIALGCTCKLYSLRMFERRSFETQLSRVEAELLRREAPPSYGQLIAQGLIPPVEDFPVCSPNQASVLENLRLAVRSQLGFTSVRLPMAGRSSNIWNRIFNFARSRHSGSLALVSADGDEVVPSQSTSREPERNHTHRSLFSVESDDTDTENERRDMAGASGGVAAPLPQKVPPTTAVEATVGACASSSTQSTRGGHADNGRDVTSVEPPSVSPARHQLTSALSRMTQGLRWVRFTLGRSSSLSQNQSPLRQLDNGVSGREDDDDVEMLIPISDGSSDFDVNDCSRPLLDLASDQGQGLRQPYNATNPGVRPSNRDGPCERCGIVHTAQIPDTCLEVTLKNETSDDEALLLC

SEQ ID NO: 36292 - protein, 366 aa, Homo sapiens
MAGPAWISKVSRLLGAFHNPKQVTRGFTGGVQTVTLIPGDGIGPEISAAVMKIFDAAKAPIQWEERNVTAIQGPGGKWMIPSEAKESMDKNKMGLKGPLKTPIAAGHPSMNLLLRKTFDLYANVRPCVSIEGYKTPYTDVNIVTIRENTEGEYSGIEHVIVDGVVQSIKLITEGASKRIAEFAFEYARNNHRSNVTAVHKANIMRMSDGLFLQKCREVAESCKDIKFNEMYLDTVCLNMVQDPSQFDVLVMPNLYGDILSDLCAGLIGGLGVTPSGNIGANGVAIFESVHGTAPDIAGKDMANPTALLLSAVMMLRHMGLFDHAARIEAACFATIKDGKSLTKDLGGNAKCSDFTEEICRRVKDLD

SEQ ID NO: 36293 - protein, 288 aa, Homo sapiens
MIPSEAKESMDKNKMGLKGPLKTPIAAGHPSMNLLLRKTFDLYANVRPCVSIEGYKTPYTDVNIVTIRENTEGEYSGIEHVIVDGVVQSIKLITEGASKRIAEFAFEYARNNHRSNVTAVHKANIMRMSDGLFLQKCREVAESCKDIKFNEMYLDTVCLNMVQDPSQFDVLVMPNLYGDILSDLCAGLIGGLGVTPSGNIGANGVAIFESVHGTAPDIAGKDMANPTALLLSAVMMLRHMGLFDHAARIEAACFATIKDGKSLTKDLGGNAKCSDFTEEICRRVKDLD

SEQ ID NO: 36294 - protein, 302 aa, Homo sapiens
MRLGSPGLLFLLFSSLRADTQEKEVRAMVGSDVELSCACPEGSRFDLNDVYVYWQTSESKTVVTYHIPQNSSLENVDSRYRNRALMSPAGMLRGDFSLRLFNVTPQDEQKFHCLVLSQSLGFQEVLSVEVTLHVAANFSVPVVSAPHSPSQDELTFTCTSINGYPRPNVYWINKTDNSLLDQALQNDTVFLNMRGLYDVVSVLRIARTPSVNIGCCIENVLLQQNLTVGSQTGNDIGERDKITENPVSTGEKNAATWSILAVLCLLVVVAVAIGWVCRDRCLQHSYAGAWAVSPETELTGHV

SEQ ID NO: 36295 - protein, 309 aa, Homo sapiens
MRLGSPGLLFLLFSSLRADTQEKEVRAMVGSDVELSCACPEGSRFDLNDVYVYWQTSESKTVVTYHIPQNSSLENVDSRYRNRALMSPAGMLRGDFSLRLFNVTPQDEQKFHCLVLSQSLGFQEVLSVEVTLHVAANFSVPVVSAPHSPSQDELTFTCTSINGYPRPNVYWINKTDNSLLDQALQNDTVFLNMRGLYDVVSVLRIARTPSVNIGCCIENVLLQQNLTVGSQTGNDIGERDKITENPVSTGEKNAATWSILAVLCLLVVVAVAIGWVCRDRCLQHSYAGAWAVSPETELTESWNLLLLLS

SEQ ID NO: 36296 - protein, 185 aa, Homo sapiens
MRLGSPGLLFLLFSSLRAANFSVPVVSAPHSPSQDELTFTCTSINGYPRPNVYWINKTDNSLLDQALQNDTVFLNMRGLYDVVSVLRIARTPSVNIGCCIENVLLQQNLTVGSQTGNDIGERDKITENPVSTGEKNAATWSILAVLCLLVVVAVAIGWVCRDRCLQHSYAGAWAVSPETELTGHV

SEQ ID NO: 36297 - protein, 296 aa, Homo sapiens
MRHEELLTKTFQGPAVVCGTPTSHVYMFKNGSGDSGDSSEEESHRVVLRPRGKERHKSGVHQPPQAGAGDVVLLQRELAQEDSLNKLALQYGCKVADIKKVNNFIREQDLYALKSVKIPVRNHGILMETHKELKPLLSPSSETTVTVELPEADRAGAGTGAQAGQLMGFFKGIDQDIERAVQSEIFLHESYCMDTSHQPLLPAPPKTPMDGADCGIQWWNAVFIMLLIGIVLPVFYLVYFKIQASGETPNSLNTTVIPNGSMAMGTVPGQAPRLAVAVPAVTSADSQFSQTTQAGS

SEQ ID NO: 36298 - protein, 297 aa, Homo sapiens
MAVGTRGTLLKKSLTVWFCGPGARSATRAVSTSLPRREQVTWCCCSGSWPRRTASTSWRCSMAANTFYFRPNGAGDTRQNLIPDFYAFRVINNGKVADIKKVNNFIREQDLYALKSVKIPVRNHGILMETHKELKPLLSPSSETTVTVELPEADRAGAGTGAQAGQLMGFFKGIDQDIERAVQSEIFLHESYCMDTSHQPLLPAPPKTPMDGADCGIQWWNAVFIMLLIGIVLPVFYLVYFKIQASGETPNSLNTTVIPNGSMAMGTVPGQAPRLAVAVPAVTSADSQFSQTTQAGS

SEQ ID NO: 36299 - protein, 130 aa, Homo sapiens
MRQKAVSLFLCYLLLFTCSGVEAGKKKCSESSDSGSGFWKALTFMAVGGGLAVAGLPALGFTGAGIAANSVAASLMSWSAILNGGGVPAGGLVATLQSLGAGGSSVVIGNIGALMGYATHKYLDSEEDEE

SEQ ID NO: 36300 - protein, 134 aa, Homo sapiens
MRQKAVSLFLCYLLLFTCSGVEAGENAGKKKCSESSDSGSGFWKALTFMAVGGGLAVAGLPALGFTGAGIAANSVAASLMSWSAILNGGGVPAGGLVATLQSLGAGGSSVVIGNIGALMGYATHKYLDSEEDEE

SEQ ID NO: 36301 - protein, 138 aa, Homo sapiens
MRQKAVSLFLCYLLLFTCSGVEAGENAGKDAGKKKCSESSDSGSGFWKALTFMAVGGGLAVAGLPALGFTGAGIAANSVAASLMSWSAILNGGGVPAGGLVATLQSLGAGGSSVVIGNIGALMGYATHKYLDSEEDEE

SEQ ID NO: 36302 - protein, 431 aa, Homo sapiens
MTSQRSPLAPLLLLSLHGVAASLEVSESPGSIQVARGQPAVLPCTFTTSAALINLNVIWMVTPLSNANQPEQVILYQGGQMFDGAPRFHGRVGFTGTMPATNVSIFINNTQLSDTGTYQCLVNNLPDIGGRNIGVTGLTVLVPPSAPHCQIQGSQDIGSDVILLCSSEEGIPRPTYLWEKLDNTLKLPPTATQDQVQGTVTIRNISALSSGLYQCVASNAIGTSTCLLDLQVISPQPRNIGLIAGAIGTGAVIIIFCIALILGAFFYWRSKNKEEEEEEIPNEIREDDLPPKCSSAKAFHTEISSSDNNTLTSSNAYNSRYWSNNPKVHRNTESVSHFSDLGQSFSFHSGNANIPSIYANGTHLVPGQHKTLVVTANRGSSPQVMSRSNGSVSRKPRPPHTHSYTISHATLERIGAVPVMVPAQSRAGSLV

SEQ ID NO: 36303 - protein, 430 aa, Homo sapiens
MSLVELLLWWNCFSRTGVAASLEVSESPGSIQVARGQPAVLPCTFTTSAALINLNVIWMVTPLSNANQPEQVILYQGGQMFDGAPRFHGRVGFTGTMPATNVSIFINNTQLSDTGTYQCLVNNLPDIGGRNIGVTGLTVLVPPSAPHCQIQGSQDIGSDVILLCSSEEGIPRPTYLWEKLDNTLKLPPTATQDQVQGTVTIRNISALSSGLYQCVASNAIGTSTCLLDLQVISPQPRNIGLIAGAIGTGAVIIIFCIALILGAFFYWRSKNKEEEEEEIPNEIREDDLPPKCSSAKAFHTEISSSDNNTLTSSNAYNSRYWSNNPKVHRNTESVSHFSDLGQSFSFHSGNANIPSIYANGTHLVPGQHKTLVVTANRGSSPQVMSRSNGSVSRKPRPPHTHSYTISHATLERIGAVPVMVPAQSRAGSLV

SEQ ID NO: 36304 - protein, 406 aa, Homo sapiens
MSLVELLLWWNCFSRTGVAASLEVSESPGSIQVARGQPAVLPCTFTTSAALINLNVIWMVTPLSNANQPEQVILYQGGQMFDGAPRFHGRVGFTGTMPATNVSIFINNTQLSDTGTYQCLVNNLPDIGGRNIGVTGLTVLVPPSAPHCQIQGSQDIGSDVILLCSSEEGIPRPTYLWEKLDNTLKLPPTATQDQVQGTVTIRNISALSSAQPRNIGLIAGAIGTGAVIIIFCIALILGAFFYWRSKNKEEEEEEIPNEIREDDLPPKCSSAKAFHTEISSSDNNTLTSSNAYNSRYWSNNPKVHRNTESVSHFSDLGQSFSFHSGNANIPSIYANGTHLVPGQHKTLVVTANRGSSPQVMSRSNGSVSRKPRPPHTHSYTISHATLERIGAVPVMVPAQSRAGSLV

SEQ ID NO: 36305 - protein, 7388 aa, Homo sapiens
MSSSDEETLSERSCRSERSCRSERSYRSERSGSLSPCPPGDTLPWNLPLHEQKKRKSQDSVLDPAERAVVRVADERDRVQKKTFTKWVNKHLMKVRKHINDLYEDLRDGHNLISLLEVLSGIKLPREKGRMRFHRLQNVQIALDFLKQRQVKLVNIRNDDITDGNPKLTLGLIWTIILHFQISDIYISGESGDMSAKEKLLLWTQKVTAGYTGIKCTNFSSCWSDGKMFNALIHRYRPDLVDMERVQIQSNRENLEQAFEVAERLGVTRLLDAEDVDVPSPDEKSVITYVSSIYDAFPKVPEGGEGISATEVDSRWQEYQSRVDSLIPWIKQHTILMSDKTFPQNPVELKALYNQYIHFKETEILAKEREKGRIEELYKLLEVWIEFGRIKLPQGYHPNDVEEEWGKLIIEMLEREKSLRPAVERLELLLQIANKIQNGALNCEEKLTLAKNTLQADAAHLESGQPVQCESDVIMYIQECEGLIRQLQVDLQILRDENYYQLEELAFRVMRLQDELVTLRLECTNLYRKGHFTSLELVPPSTLTTTHLKAEPLTKATHSSSTSWFRKPMTRAELVAISSSEDEGNLRFVYELLSWVEEMQMKLERAEWGNDLPSVELQLETQQHIHTSVEELGSSVKEARLYEGKMSQNFHTSYAETLGKLETQYCKLKETSSFRMRHLQSLHKFVSRATAELIWLNEKEEEELAYDWSDNNSNISAKRNYFSELTMELEEKQDVFRSLQDTAELLSLENHPAKQTVEAYSAAVQSQLQWMKQLCLCVEQHVKENTAYFQFFSDARELESFLRNLQDSIKRKYSCDHNTSLSRLEDLLQDSMDEKEQLIQSKSSVASLVGRSKTIVQLKPRSPDHVLKNTISVKAVCDYRQIEITICKNDECVLEDNSQRTKWKVISPTGNEAMVPSVCFLIPPPNKDAIEMASRVEQSYQKVMALWHQLHVNTKSLISWNYLRKDLDLVQTWNLEKLRSSAPGECHQIMKNLQAHYEDFLQDSRDSVLFSVADRLRLEEEVEACKARFQHLMKSMENEDKEETVAKMYISELKNIRLRLEEYEQRVVKRIQSLASSRTDRDAWQDNALRIAEQEHTQEDLQQLRSDLDAVSMKCDSFLHQSPSSSSVPTLRSELNLLVEKMDHVYGLSTVYLNKLKTVDVIVRSIQDAELLVKGYEIKLSQEEVVLADLSALEAHWSTLRHWLSDVKDKNSVFSVLDEEIAKAKVVAEQMSRLTPERNLDLERYQEKGSQLQERWHRVIAQLEIRQSELESIQEVLGDYRACHGTLIKWIEETTAQQEMMKPGQAEDSRVLSEQLSQQTALFAEIERNQTKLDQCQKFSQQYSTIVKDYELQLMTYKAFVESQQKSPGKRRRMLSSSDAITQEFMDLRTRYTALVTLTTQHVKYISDALRRLEEEEKVVEEEKQEHVEKVKELLGWVSTLARNTQGKATSSETKESTDIEKAILEQQVLSEELTTKKEQVSEAIKTSQIFLAKHGHKLSEKEKKQISEQLNALNKAYHDLCDGSANQLQQLQSQLAHQTEQKECRAVAGVIDLGTVEIFPIFKAMQKGLLDQDTGLVLLESQVIMSGLIAPETGENLSLEEGIARNLINPQMYQQLRELQDALALISRLTESRGPLSVVEAIEKRIISETVGLKILEAHLATGGFSLSPSENCINLEEAFHQGLISAWLHSVLESYLRTSKNLIDPNTAEKIGLLDLMQRCIVHQESGFKLLPVKQLAGGMVSLKSGRKVSIFRAVQEGLIDRQVTVRLLEAQLFAGGIVDPRTGHRLTVEEAVRHNLIDQDMACAILIRQLQTGGIIDTVTGQRLTIDEAVSNDLVAAKIALVILESLWSFMGLLWPESGEILPITDALEQGIVSTELAHKILSNRQHIKALFLPATTEILSWKKAIESGILDRDLANNLKSICIPDVMPHMQLADSAEQNINPGAAVLPCSKSHPKATASQSENLLFQLMTHSYINVQNGQRLLLLDKELMETLTSRDEYQTSPPKVVEIGHQRQKTPEGLQESANVKISGTFSSGWTVRLPEFQFSSQNKEYPDREDCTTEKGKKTTVETEDSSVENPEQDLFVEQKERNPNIDALKVINKVKLEVQRQLIGTQREDQTAVSVRENASRGHLLTIPPAEAEGVPLVVDKDVFSVETPKKEHQPLRNTSFTCQNEQAHTLETEYIHDETGGSHIKPQSKKLQVQVKKTLGIKLELKSETDGNVHPLDKKEMLKKTFLAKDDHKESQEAQNIAGGSMMMSEKTDEEDSGREIFLSCSHPLELLEEATLNVLSAQLLDGGIFHEQTGQKLLLNEAISRGIVPSHTAVKLMEKLNMFQGFFDSQTCESLTTEEVINEGLMDEKLLHNVLMADKAISGVLDPRTQTLCSVKDAVTVGLLDKETATRILERQVVTGGIIDLKRGKKVSVTLASTLGLVDVADQPELINLEKASKGRDAEKTVRERLISLQMETTGLIDPDSKAPLTVVQSIDRGLLEREEAVRLLTKQVVDGGIIHHISGMRLSVDNAFRHGLIGEDLAEKLKRVENLNIHQIFNPETKENISLPKAIKLDLITSDLKREIQEVQAFTGNFVDLISGQRLTLAEAKKEGLLTNEAVLSPGMMHGIVDPENCRIVPYSELVKKCKIDIESGQRYLEVIPFSDIKDGVSDKVLTLSQAIQLGKVDFASTLKVLEAQANTGGIIDTATGKRLTLASALEEKLVDENMVRIIASHQVLNGGIVDIFSDQRVTLVEAIEKRLISPELANMIQIDSSEFSDHRAQIEKQEGIEVCALQNEFLGKDMLIACNQTAEMSCNKVEESERLFQVENQSAQEKVKVRVSDGEQAKKSREISLKEFGCKDQRKPRMSSDAKEFISIINPHNLKGKSLGQVSLTHPYSECDFKLKEVARNNMGNDTNEEQEKAVTKIEIISHMKQSTSCLDSEEIRENQGEVILEVQETYCETSGKLPSEQVLQQPMNARVKSKREKREVIVEESIRTCKPAFLSEEKLYQETAIRDEHDSHIKSQPREMTSSEKGKEADTEMGFSITFKIEESSSQVVPQGISVKHLDALTLFSSKQANEGKVNNLSLCLTLKPEENLSREIACGAQSEPFPCMTPRPEGLHYQESDGKAQVTGPSQISKTDKSFQGTTRQETNYQDSWVTSKTKETKHQISSSNECKEKSYQEVSFDPARGLKLEEITVSRPDSKEVRYLEFSDRKDLHHQGSKSDDKLCGTLKSEIATQELTGEKFLEMANPNVAGLEAGSIEDIVTQRGSRVLGSFLPEKLFKGVSQKENTGQQNAIISPTVLETSEEKTVSLTVCSAVKTEKTPQEKLRESPGSEQTPFMTAPEGKGNGGVNPEPFRATQNVFTRQLCLEHDEKLVSYLSLLRNIEMRTKQIQPLELNLAELQDLLCQAKVLERELKDLTTLVSQELECVNQIIISQPQEVPAQLLKALEKDAKNLQKSLSSVSDTWNSRLLHFQNAVEIEKTKVLNQHTQLEGRLQDLRAWVGNKNLILNSKGSNSEIDVDSLNLCLQQYEDLKQPMAERKAQLDALAFDIQFFISEHAQDLSPQQNRQMLRLLNELQRSFQDILEQTAAQVDALQGHLQQMEQEALVKTLQKQQNTCHQQLEDLCSWVGQAERALAGHQGRTTQQDLSALQKNQSDLKDLQDDIQNRATSFATVVKDIEGFMEENQTKLSPRELTALREKLHQAKEQYEALQEETRVAQKELEEAVTSALQQETEKSKAAKELAENKKKIDALLDWVTSVGSSGGQLLTNLPGMEQLSGASLEKGALDTTDGYMGVNQAPEKLDKQCEMMKARHQELLSQQQNFILATQSAQAFLDQHGHNLTPEEQQMLQQKLGELKEQYSTSLAQSEAELKQVQTLQDELQKFLQDHKEFESWLERSEKELENMHKGGSSPETLPSLLKRQGSFSEDVISHKGDLRFVTISGQKVLDMENSFKEGKEPSEIGNLVKDKLKDATERYTALHSKCTRLGSHLNMLLGQYHQFQNSADSLQAWMQACEANVEKLLSDTVASDPGVLQEQLATTKQLQEELAEHQVPVEKLQKVARDIMEIEGEPAPDHRHVQETTDSILSHFQSLSYSLAERSSLLQKAIAQSQSVQESLESLLQSIGEVEQNLEGKQVSSLSSGVIQEALATNMKLKQDIARQKSSLEATREMVTRFMETADSTTAAVLQGKLAEVSQRFEQLCLQQQEKESSLKKLLPQAEMFEHLSGKLQQFMENKSRMLASGNQPDQDITHFFQQIQELNLEMEDQQENLDTLEHLVTELSSCGFALDLCQHQDRVQNLRKDFTELQKTVKEREKDASSCQEQLDEFRKLVRTFQKWLKETEGSIPPTETSMSAKELEKQIEHLKSLLDDWASKGTLVEEINCKGTSLENLIMEITAPDSQGKTGSILPSVGSSVGSVNGYHTCKDLTEIQCDMSDVNLKYEKLGGVLHERQESLQAILNRMEEVHKEANSVLQWLESKEEVLKSMDAMSSPTKTETVKAQAESNKAFLAELEQNSPKIQKVKEALAGLLVTYPNSQEAENWKKIQEELNSRWERATEVTVARQRQLEESASHLACFQAAESQLRPWLMEKELMMGVLGPLSIDPNMLNAQKQQVQFMLKEFEARRQQHEQLNEAAQGILTGPGDVSLSTSQVQKELQSINQKWVELTDKLNSRSSQIDQAIVKSTQYQELLQDLSEKVRAVGQRLSVQSAISTQPEAVKQQLEETSEIRSDLEQLDHEVKEAQTLCDELSVLIGEQYLKDELKKRLETVALPLQGLEDLAADRINRLQAALASTQQFQQMFDELRTWLDDKQSQQAKNCPISAKLERLQSQLQENEEFQKSLNQHSGSYEVIVAEGESLLLSVPPGEEKRTLQNQLVELKNHWEELSKKTADRQSRLKDCMQKAQKYQWHVEDLVPWIEDCKAKMSELRVTLDPVQLESSLLRSKAMLNEVEKRRSLLEILNSAADILINSSEADEDGIRDEKAGINQNMDAVTEELQAKTGSLEEMTQRLREFQESFKNIEKKVEGAKHQLEIFDALGSQACSNKNLEKLRAQQEVLQALEPQVDYLRNFTQGLVEDAPDGSDASQLLHQAEVAQQEFLEVKQRVNSGCVMMENKLEGIGQFHCRVREMFSQLADLDDELDGMGAIGRDTDSLQSQIEDVRLFLNKIHVLKLDIEASEAECRHMLEEEGTLDLLGLKRELEALNKQCGKLTERGKARQEQLELTLGRVEDFYRKLKGLNDATTAAEEAEALQWVVGTEVEIINQQLADFKMFQKEQVDPLQMKLQQVNGLGQGLIQSAGKDCDVQGLEHDMEEINARWNTLNKKVAQRIAQLQEALLHCGKFQDALEPLLSWLADTEELIANQKPPSAEYKVVKAQIQEQKLLQRLLDDRKATVDMLQAEGGRIAQSAELADREKITGQLESLESRWTELLSKAAARQKQLEDILVLAKQFHETAEPISDFLSVTEKKLANSEPVGTQTAKIQQQIIRHKALNEEIVNRKKNVDQAIKNGQALLKQTTGEEVLLIQEKLDGIKTRYADITVTSSKALRTLEQARQLATKFQSTYEELTGWLREVEEELATSGGQSPTGEQIPQFQQRQKELKKEVMEHRLVLDTVNEVSRALLELVPWRAREGLDKLVSDANEQYKLVSDTIGQRVDEIDAAIQRSQQYEQAADAELAWVAETKRKLMALGPIRLEQDQTTAQLQVQKAFSIDIIRHKDSMDELFSHRSEIFGTCGEEQKTVLQEKTESLIQQYEAISLLNSERYARLERAQVLVNQFWETYEELSPWIEETRALIAQLPSPAIDHEQLRQQQEEMRQLRESIAEHKPHIDKLLKIGPQLKELNPEEGEMVEEKYQKAENMYAQIKEEVRQRALALDEAVSQSTQITEFHDKIEPMLETLENLSSRLRMPPLIPAEVDKIRECISDNKSATVELEKLQPSFEALKRRGEELIGRSQGADKDLAAKEIQDKLDQMVFFWEDIKARAEEREIKFLDVLELAEKFWYDMAALLTTIKDTQDIVHDLESPGIDPSIIKQQVEAAETIKEETDGLHEELEFIRILGADLIFACGETEKPEVRKSIDEMNNAWENLNKTWKERLEKLEDAMQAAVQYQDTLQAMFDWLDNTVIKLCTMPPVGTDLNTVKDQLNEMKEFKVEVYQQQIEMEKLNHQGELMLKKATDETDRDIIREPLTELKHLWENLGEKIAHRQHKLEGALLALGQFQHALEELMSWLTHTEELLDAQRPISGDPKVIEVELAKHHVLKNDVLAHQATVETVNKAGNELLESSAGDDASSLRSRLEAMNQCWESVLQKTEEREQQLQSTLQQAQGFHSEIEDFLLELTRMESQLSASKPTGGLPETAREQLDTHMELYSQLKAKEETYNQLLDKGRLMLLSRDDSGSGSKTEQSVALLEQKWHVVSSKMEERKSKLEEALNLATEFQNSLQEFINWLTLAEQSLNIASPPSLILNTVLSQIEEHKVFANEVNAHRDQIIELDQTGNQLKFLSQKQDVVLIKNLLVSVQSRWEKVVQRSIERGRSLDDARKRAKQFHEAWKKLIDWLEDAESHLDSELEISNDPDKIKLQLSKHKEFQKTLGGKQPVYDTTIRTGRALKEKTLLPEDSQKLDNFLGEVRDKWDTVCGKSVERQHKLEEALLFSGQFMDALQALVDWLYKVEPQLAEDQPVHGDLDLVMNLMDAHKVFQKELGKRTGTVQVLKRSGRELIENSRDDTTWVKGQLQELSTRWDTVCKLSVSKQSRLEQALKQAEVFRDTVHMLLEWLSEAEQTLRFRGALPDDTEALQSLIDTHKEFMKKVEEKRVDVNSAVAMGEVILAVCHPDCITTIKHWITIIRARFEEVLTWAKQHQQRLETALSELVANAELLEELLAWIQWAETTLIQRDQEPIPQNIDRVKALIAEHQTFMEEMTRKQPDVDRVTKTYKRKNIEPTHAPFIEKSRSGGRKSLSQPTPPPMPILSQSEAKNPRINQLSARWQQVWLLALERQRKLNDALDRLEELKEFANFDFDVWRKKYMRWMNHKKSRVMDFFRRIDKDQDGKITRQEFIDGILASKFPTTKLEMTAVADIFDRDGDGYIDYYEFVAALHPNKDAYRPTTDADKIEDEVTRQVAQCKCAKRFQVEQIGENKYRFGDSQQLRLVRILRSTVMVRVGGGWMALDEFLVKNDPCRARGRTNIELREKFILPEGASQGMTPFRSRGRRSKPSSRAASPTRSSSSASQSNHSCTSMPSSPATPASGTKVIPSSGSKLKRPTPTFHSSRTSLAGDTSNSSSPASTGAKTNRADPKKSASRPGSRAGSRAGSRASSRRGSDASDFDLLETQSACSDTSESSAAGGQGNSRRGLNKPSKIPTMSKKTTTASPRTPGPKR

SEQ ID NO: 36306 - protein, 5430 aa, Homo sapiens
MSSSDEETLSERSCRSERSCRSERSYRSERSGSLSPCPPGDTLPWNLPLHEQKKRKSQDSVLDPAERAVVRVADERDRVQKKTFTKWVNKHLMKVRKHINDLYEDLRDGHNLISLLEVLSGIKLPREKGRMRFHRLQNVQIALDFLKQRQVKLVNIRNDDITDGNPKLTLGLIWTIILHFQISDIYISGESGDMSAKEKLLLWTQKVTAGYTGIKCTNFSSCWSDGKMFNALIHRYRPDLVDMERVQIQSNRENLEQAFEVAERLGVTRLLDAEDVDVPSPDEKSVITYVSSIYDAFPKVPEGGEGISATEVDSRWQEYQSRVDSLIPWIKQHTILMSDKTFPQNPVELKALYNQYIHFKETEILAKEREKGRIEELYKLLEVWIEFGRIKLPQGYHPNDVEEEWGKLIIEMLEREKSLRPAVERLELLLQIANKIQNGALNCEEKLTLAKNTLQADAAHLESGQPVQCESDVIMYIQECEGLIRQLQVDLQILRDENYYQLEELAFRVMRLQDELVTLRLECTNLYRKGHFTSLELVPPSTLTTTHLKAEPLTKATHSSSTSWFRKPMTRAELVAISSSEDEGNLRFVYELLSWVEEMQMKLERAEWGNDLPSVELQLETQQHIHTSVEELGSSVKEARLYEGKMSQNFHTSYAETLGKLETQYCKLKETSSFRMRHLQSLHKFVSRATAELIWLNEKEEEELAYDWSDNNSNISAKRNYFSELTMELEEKQDVFRSLQDTAELLSLENHPAKQTVEAYSAAVQSQLQWMKQLCLCVEQHVKENTAYFQFFSDARELESFLRNLQDSIKRKYSCDHNTSLSRLEDLLQDSMDEKEQLIQSKSSVASLVGRSKTIVQLKPRSPDHVLKNTISVKAVCDYRQIEITICKNDECVLEDNSQRTKWKVISPTGNEAMVPSVCFLIPPPNKDAIEMASRVEQSYQKVMALWHQLHVNTKSLISWNYLRKDLDLVQTWNLEKLRSSAPGECHQIMKNLQAHYEDFLQDSRDSVLFSVADRLRLEEEVEACKARFQHLMKSMENEDKEETVAKMYISELKNIRLRLEEYEQRVVKRIQSLASSRTDRDAWQDNALRIAEQEHTQEDLQQLRSDLDAVSMKCDSFLHQSPSSSSVPTLRSELNLLVEKMDHVYGLSTVYLNKLKTVDVIVRSIQDAELLVKGYEIKLSQEEVVLADLSALEAHWSTLRHWLSDVKDKNSVFSVLDEEIAKAKVVAEQMSRLTPERNLDLERYQEKGSQLQERWHRVIAQLEIRQSELESIQEVLGDYRACHGTLIKWIEETTAQQEMMKPGQAEDSRVLSEQLSQQTALFAEIERNQTKLDQCQKFSQQYSTIVKDYELQLMTYKAFVESQQKSPGKRRRMLSSSDAITQEFMDLRTRYTALVTLTTQHVKYISDALRRLEEEEKVVEEEKQEHVEKVKELLGWVSTLARNTQGKATSSETKESTDIEKAILEQQVLSEELTTKKEQVSEAIKTSQIFLAKHGHKLSEKEKKQISEQLNALNKAYHDLCDGSANQLQQLQSQLAHQTEQKTLQKQQNTCHQQLEDLCSWVGQAERALAGHQGRTTQQDLSALQKNQSDLKDLQDDIQNRATSFATVVKDIEGFMEENQTKLSPRELTALREKLHQAKEQYEALQEETRVAQKELEEAVTSALQQETEKSKAAKELAENKKKIDALLDWVTSVGSSGGQLLTNLPGMEQLSGASLEKGALDTTDGYMGVNQAPEKLDKQCEMMKARHQELLSQQQNFILATQSAQAFLDQHGHNLTPEEQQMLQQKLGELKEQYSTSLAQSEAELKQVQTLQDELQKFLQDHKEFESWLERSEKELENMHKGGSSPETLPSLLKRQGSFSEDVISHKGDLRFVTISGQKVLDMENSFKEGKEPSEIGNLVKDKLKDATERYTALHSKCTRLGSHLNMLLGQYHQFQNSADSLQAWMQACEANVEKLLSDTVASDPGVLQEQLATTKQLQEELAEHQVPVEKLQKVARDIMEIEGEPAPDHRHVQETTDSILSHFQSLSYSLAERSSLLQKAIAQSQSVQESLESLLQSIGEVEQNLEGKQVSSLSSGVIQEALATNMKLKQDIARQKSSLEATREMVTRFMETADSTTAAVLQGKLAEVSQRFEQLCLQQQEKESSLKKLLPQAEMFEHLSGKLQQFMENKSRMLASGNQPDQDITHFFQQIQELNLEMEDQQENLDTLEHLVTELSSCGFALDLCQHQDRVQNLRKDFTELQKTVKEREKDASSCQEQLDEFRKLVRTFQKWLKETEGSIPPTETSMSAKELEKQIEHLKSLLDDWASKGTLVEEINCKGTSLENLIMEITAPDSQGKTGSILPSVGSSVGSVNGYHTCKDLTEIQCDMSDVNLKYEKLGGVLHERQESLQAILNRMEEVHKEANSVLQWLESKEEVLKSMDAMSSPTKTETVKAQAESNKAFLAELEQNSPKIQKVKEALAGLLVTYPNSQEAENWKKIQEELNSRWERATEVTVARQRQLEESASHLACFQAAESQLRPWLMEKELMMGVLGPLSIDPNMLNAQKQQVQFMLKEFEARRQQHEQLNEAAQGILTGPGDVSLSTSQVQKELQSINQKWVELTDKLNSRSSQIDQAIVKSTQYQELLQDLSEKVRAVGQRLSVQSAISTQPEAVKQQLEETSEIRSDLEQLDHEVKEAQTLCDELSVLIGEQYLKDELKKRLETVALPLQGLEDLAADRINRLQAALASTQQFQQMFDELRTWLDDKQSQQAKNCPISAKLERLQSQLQENEEFQKSLNQHSGSYEVIVAEGESLLLSVPPGEEKRTLQNQLVELKNHWEELSKKTADRQSRLKDCMQKAQKYQWHVEDLVPWIEDCKAKMSELRVTLDPVQLESSLLRSKAMLNEVEKRRSLLEILNSAADILINSSEADEDGIRDEKAGINQNMDAVTEELQAKTGSLEEMTQRLREFQESFKNIEKKVEGAKHQLEIFDALGSQACSNKNLEKLRAQQEVLQALEPQVDYLRNFTQGLVEDAPDGSDASQLLHQAEVAQQEFLEVKQRVNSGCVMMENKLEGIGQFHCRVREMFSQLADLDDELDGMGAIGRDTDSLQSQIEDVRLFLNKIHVLKLDIEASEAECRHMLEEEGTLDLLGLKRELEALNKQCGKLTERGKARQEQLELTLGRVEDFYRKLKGLNDATTAAEEAEALQWVVGTEVEIINQQLADFKMFQKEQVDPLQMKLQQVNGLGQGLIQSAGKDCDVQGLEHDMEEINARWNTLNKKVAQRIAQLQEALLHCGKFQDALEPLLSWLADTEELIANQKPPSAEYKVVKAQIQEQKLLQRLLDDRKATVDMLQAEGGRIAQSAELADREKITGQLESLESRWTELLSKAAARQKQLEDILVLAKQFHETAEPISDFLSVTEKKLANSEPVGTQTAKIQQQIIRHKALEEDIENHATDVHQAVKIGQSLSSLTSPAEQGVLSEKIDSLQARYSEIQDRCCRKAALLDQALSNARLFGEDEVEVLNWLAEVEDKLSSVFVKDFKQDVLHRQHADHLALNEEIVNRKKNVDQAIKNGQALLKQTTGEEVLLIQEKLDGIKTRYADITVTSSKALRTLEQARQLATKFQSTYEELTGWLREVEEELATSGGQSPTGEQIPQFQQRQKELKKEVMEHRLVLDTVNEVSRALLELVPWRAREGLDKLVSDANEQYKLVSDTIGQRVDEIDAAIQRSQQYEQAADAELAWVAETKRKLMALGPIRLEQDQTTAQLQVQKAFSIDIIRHKDSMDELFSHRSEIFGTCGEEQKTVLQEKTESLIQQYEAISLLNSERYARLERAQVLVNQFWETYEELSPWIEETRALIAQLPSPAIDHEQLRQQQEEMRQLRESIAEHKPHIDKLLKIGPQLKELNPEEGEMVEEKYQKAENMYAQIKEEVRQRALALDEAVSQSTQITEFHDKIEPMLETLENLSSRLRMPPLIPAEVDKIRECISDNKSATVELEKLQPSFEALKRRGEELIGRSQGADKDLAAKEIQDKLDQMVFFWEDIKARAEEREIKFLDVLELAEKFWYDMAALLTTIKDTQDIVHDLESPGIDPSIIKQQVEAAETIKEETDGLHEELEFIRILGADLIFACGETEKPEVRKSIDEMNNAWENLNKTWKERLEKLEDAMQAAVQYQDTLQAMFDWLDNTVIKLCTMPPVGTDLNTVKDQLNEMKEFKVEVYQQQIEMEKLNHQGELMLKKATDETDRDIIREPLTELKHLWENLGEKIAHRQHKLEGALLALGQFQHALEELMSWLTHTEELLDAQRPISGDPKVIEVELAKHHVLKNDVLAHQATVETVNKAGNELLESSAGDDASSLRSRLEAMNQCWESVLQKTEEREQQLQSTLQQAQGFHSEIEDFLLELTRMESQLSASKPTGGLPETAREQLDTHMELYSQLKAKEETYNQLLDKGRLMLLSRDDSGSGSKTEQSVALLEQKWHVVSSKMEERKSKLEEALNLATEFQNSLQEFINWLTLAEQSLNIASPPSLILNTVLSQIEEHKVFANEVNAHRDQIIELDQTGNQLKFLSQKQDVVLIKNLLVSVQSRWEKVVQRSIERGRSLDDARKRAKQFHEAWKKLIDWLEDAESHLDSELEISNDPDKIKLQLSKHKEFQKTLGGKQPVYDTTIRTGRALKEKTLLPEDSQKLDNFLGEVRDKWDTVCGKSVERQHKLEEALLFSGQFMDALQALVDWLYKVEPQLAEDQPVHGDLDLVMNLMDAHKVFQKELGKRTGTVQVLKRSGRELIENSRDDTTWVKGQLQELSTRWDTVCKLSVSKQSRLEQALKQAEVFRDTVHMLLEWLSEAEQTLRFRGALPDDTEALQSLIDTHKEFMKKVEEKRVDVNSAVAMGEVILAVCHPDCITTIKHWITIIRARFEEVLTWAKQHQQRLETALSELVANAELLEELLAWIQWAETTLIQRDQEPIPQNIDRVKALIAEHQTFMEEMTRKQPDVDRVTKTYKRKNIEPTHAPFIEKSRSGGRKSLSQPTPPPMPILSQSEAKNPRINQLSARWQQVWLLALERQRKLNDALDRLEELKEFANFDFDVWRKKYMRWMNHKKSRVMDFFRRIDKDQDGKITRQEFIDGILASKFPTTKLEMTAVADIFDRDGDGYIDYYEFVAALHPNKDAYRPTTDADKIEDEVTRQVAQCKCAKRFQVEQIGENKYRFGDSQQLRLVRILRSTVMVRVGGGWMALDEFLVKNDPCRARGRTNIELREKFILPEGASQGMTPFRSRGRRSKPSSRAASPTRSSSSASQSNHSCTSMPSSPATPASGTKVIPSSGSKLKRPTPTFHSSRTSLAGDTSNSSSPASTGAKTNRADPKKSASRPGSRAGSRAGSRASSRRGSDASDFDLLETQSACSDTSESSAAGGQGNSRRGLNKPSKIPTMSKKTTTASPRTPGPKR

SEQ ID NO: 36307 - protein, 5374 aa, Homo sapiens
MFPVLWAGIPGRDVGSLQPLPPGFKQFCTSASRVAVIADERDRVQKKTFTKWVNKHLMKVRKHINDLYEDLRDGHNLISLLEVLSGIKLPREKGRMRFHRLQNVQIALDFLKQRQVKLVNIRNDDITDGNPKLTLGLIWTIILHFQISDIYISGESGDMSAKEKLLLWTQKVTAGYTGIKCTNFSSCWSDGKMFNALIHRYRPDLVDMERVQIQSNRENLEQAFEVAERLGVTRLLDAEDVDVPSPDEKSVITYVSSIYDAFPKVPEGGEGISATEVDSRWQEYQSRVDSLIPWIKQHTILMSDKTFPQNPVELKALYNQYIHFKETEILAKEREKGRIEELYKLLEVWIEFGRIKLPQGYHPNDVEEEWGKLIIEMLEREKSLRPAVERLELLLQIANKIQNGALNCEEKLTLAKNTLQADAAHLESGQPVQCESDVIMYIQECEGLIRQLQVDLQILRDENYYQLEELAFRVMRLQDELVTLRLECTNLYRKGHFTSLELVPPSTLTTTHLKAEPLTKATHSSSTSWFRKPMTRAELVAISSSEDEGNLRFVYELLSWVEEMQMKLERAEWGNDLPSVELQLETQQHIHTSVEELGSSVKEARLYEGKMSQNFHTSYAETLGKLETQYCKLKETSSFRMRHLQSLHKFVSRATAELIWLNEKEEEELAYDWSDNNSNISAKRNYFSELTMELEEKQDVFRSLQDTAELLSLENHPAKQTVEAYSAAVQSQLQWMKQLCLCVEQHVKENTAYFQFFSDARELESFLRNLQDSIKRKYSCDHNTSLSRLEDLLQDSMDEKEQLIQSKSSVASLVGRSKTIVQLKPRSPDHVLKNTISVKAVCDYRQIEITICKNDECVLEDNSQRTKWKVISPTGNEAMVPSVCFLIPPPNKDAIEMASRVEQSYQKVMALWHQLHVNTKSLISWNYLRKDLDLVQTWNLEKLRSSAPGECHQIMKNLQAHYEDFLQDSRDSVLFSVADRLRLEEEVEACKARFQHLMKSMENEDKEETVAKMYISELKNIRLRLEEYEQRVVKRIQSLASSRTDRDAWQDNALRIAEQEHTQEDLQQLRSDLDAVSMKCDSFLHQSPSSSSVPTLRSELNLLVEKMDHVYGLSTVYLNKLKTVDVIVRSIQDAELLVKGYEIKLSQEEVVLADLSALEAHWSTLRHWLSDVKDKNSVFSVLDEEIAKAKVVAEQMSRLTPERNLDLERYQEKGSQLQERWHRVIAQLEIRQSELESIQEVLGDYRACHGTLIKWIEETTAQQEMMKPGQAEDSRVLSEQLSQQTALFAEIERNQTKLDQCQKFSQQYSTIVKDYELQLMTYKAFVESQQKSPGKRRRMLSSSDAITQEFMDLRTRYTALVTLTTQHVKYISDALRRLEEEEKVVEEEKQEHVEKVKELLGWVSTLARNTQGKATSSETKESTDIEKAILEQQVLSEELTTKKEQVSEAIKTSQIFLAKHGHKLSEKEKKQISEQLNALNKAYHDLCDGSANQLQQLQSQLAHQTEQKTLQKQQNTCHQQLEDLCSWVGQAERALAGHQGRTTQQDLSALQKNQSDLKDLQDDIQNRATSFATVVKDIEGFMEENQTKLSPRELTALREKLHQAKEQYEALQEETRVAQKELEEAVTSALQQETEKSKAAKELAENKKKIDALLDWVTSVGSSGGQLLTNLPGMEQLSGASLEKGALDTTDGYMGVNQAPEKLDKQCEMMKARHQELLSQQQNFILATQSAQAFLDQHGHNLTPEEQQMLQQKLGELKEQYSTSLAQSEAELKQVQTLQDELQKFLQDHKEFESWLERSEKELENMHKGGSSPETLPSLLKRQGSFSEDVISHKGDLRFVTISGQKVLDMENSFKEGKEPSEIGNLVKDKLKDATERYTALHSKCTRLGSHLNMLLGQYHQFQNSADSLQAWMQACEANVEKLLSDTVASDPGVLQEQLATTKQLQEELAEHQVPVEKLQKVARDIMEIEGEPAPDHRHVQETTDSILSHFQSLSYSLAERSSLLQKAIAQSQSVQESLESLLQSIGEVEQNLEGKQVSSLSSGVIQEALATNMKLKQDIARQKSSLEATREMVTRFMETADSTTAAVLQGKLAEVSQRFEQLCLQQQEKESSLKKLLPQAEMFEHLSGKLQQFMENKSRMLASGNQPDQDITHFFQQIQELNLEMEDQQENLDTLEHLVTELSSCGFALDLCQHQDRVQNLRKDFTELQKTVKEREKDASSCQEQLDEFRKLVRTFQKWLKETEGSIPPTETSMSAKELEKQIEHLKSLLDDWASKGTLVEEINCKGTSLENLIMEITAPDSQGKTDLTEIQCDMSDVNLKYEKLGGVLHERQESLQAILNRMEEVHKEANSVLQWLESKEEVLKSMDAMSSPTKTETVKAQAESNKAFLAELEQNSPKIQKVKEALAGLLVTYPNSQEAENWKKIQEELNSRWERATEVTVARQRQLEESASHLACFQAAESQLRPWLMEKELMMGVLGPLSIDPNMLNAQKQQVQFMLKEFEARRQQHEQLNEAAQGILTGPGDVSLSTSQVQKELQSINQKWVELTDKLNSRSSQIDQAIVKSTQYQELLQDLSEKVRAVGQRLSVQSAISTQPEAVKQQLEETSEIRSDLEQLDHEVKEAQTLCDELSVLIGEQYLKDELKKRLETVALPLQGLEDLAADRINRLQAALASTQQFQQMFDELRTWLDDKQSQQAKNCPISAKLERLQSQLQENEEFQKSLNQHSGSYEVIVAEGESLLLSVPPGEEKRTLQNQLVELKNHWEELSKKTADRQSRLKDCMQKAQKYQWHVEDLVPWIEDCKAKMSELRVTLDPVQLESSLLRSKAMLNEVEKRRSLLEILNSAADILINSSEADEDGIRDEKAGINQNMDAVTEELQAKTGSLEEMTQRLREFQESFKNIEKKVEGAKHQLEIFDALGSQACSNKNLEKLRAQQEVLQALEPQVDYLRNFTQGLVEDAPDGSDASQLLHQAEVAQQEFLEVKQRVNSGCVMMENKLEGIGQFHCRVREMFSQLADLDDELDGMGAIGRDTDSLQSQIEDVRLFLNKIHVLKLDIEASEAECRHMLEEEGTLDLLGLKRELEALNKQCGKLTERGKARQEQLELTLGRVEDFYRKLKGLNDATTAAEEAEALQWVVGTEVEIINQQLADFKMFQKEQVDPLQMKLQQVNGLGQGLIQSAGKDCDVQGLEHDMEEINARWNTLNKKVAQRIAQLQEALLHCGKFQDALEPLLSWLADTEELIANQKPPSAEYKVVKAQIQEQKLLQRLLDDRKATVDMLQAEGGRIAQSAELADREKITGQLESLESRWTELLSKAAARQKQLEDILVLAKQFHETAEPISDFLSVTEKKLANSEPVGTQTAKIQQQIIRHKALEEDIENHATDVHQAVKIGQSLSSLTSPAEQGVLSEKIDSLQARYSEIQDRCCRKAALLDQALSNARLFGEDEVEVLNWLAEVEDKLSSVFVKDFKQDVLHRQHADHLALNEEIVNRKKNVDQAIKNGQALLKQTTGEEVLLIQEKLDGIKTRYADITVTSSKALRTLEQARQLATKFQSTYEELTGWLREVEEELATSGGQSPTGEQIPQFQQRQKELKKEVMEHRLVLDTVNEVSRALLELVPWRAREGLDKLVSDANEQYKLVSDTIGQRVDEIDAAIQRSQQYEQAADAELAWVAETKRKLMALGPIRLEQDQTTAQLQVQKAFSIDIIRHKDSMDELFSHRSEIFGTCGEEQKTVLQEKTESLIQQYEAISLLNSERYARLERAQVLVNQFWETYEELSPWIEETRALIAQLPSPAIDHEQLRQQQEEMRQLRESIAEHKPHIDKLLKIGPQLKELNPEEGEMVEEKYQKAENMYAQIKEEVRQRALALDEAVSQSTQITEFHDKIEPMLETLENLSSRLRMPPLIPAEVDKIRECISDNKSATVELEKLQPSFEALKRRGEELIGRSQGADKDLAAKEIQDKLDQMVFFWEDIKARAEEREIKFLDVLELAEKFWYDMAALLTTIKDTQDIVHDLESPGIDPSIIKQQVEAAETIKEETDGLHEELEFIRILGADLIFACGETEKPEVRKSIDEMNNAWENLNKTWKERLEKLEDAMQAAVQYQDTLQAMFDWLDNTVIKLCTMPPVGTDLNTVKDQLNEMKEFKVEVYQQQIEMEKLNHQGELMLKKATDETDRDIIREPLTELKHLWENLGEKIAHRQHKLEGALLALGQFQHALEELMSWLTHTEELLDAQRPISGDPKVIEVELAKHHVLKNDVLAHQATVETVNKAGNELLESSAGDDASSLRSRLEAMNQCWESVLQKTEEREQQLQSTLQQAQGFHSEIEDFLLELTRMESQLSASKPTGGLPETAREQLDTHMELYSQLKAKEETYNQLLDKGRLMLLSRDDSGSGSKTEQSVALLEQKWHVVSSKMEERKSKLEEALNLATEFQNSLQEFINWLTLAEQSLNIASPPSLILNTVLSQIEEHKVFANEVNAHRDQIIELDQTGNQLKFLSQKQDVVLIKNLLVSVQSRWEKVVQRSIERGRSLDDARKRAKQFHEAWKKLIDWLEDAESHLDSELEISNDPDKIKLQLSKHKEFQKTLGGKQPVYDTTIRTGRALKEKTLLPEDSQKLDNFLGEVRDKWDTVCGKSVERQHKLEEALLFSGQFMDALQALVDWLYKVEPQLAEDQPVHGDLDLVMNLMDAHKVFQKELGKRTGTVQVLKRSGRELIENSRDDTTWVKGQLQELSTRWDTVCKLSVSKQSRLEQALKQAEVFRDTVHMLLEWLSEAEQTLRFRGALPDDTEALQSLIDTHKEFMKKVEEKRVDVNSAVAMGEVILAVCHPDCITTIKHWITIIRARFEEVLTWAKQHQQRLETALSELVANAELLEELLAWIQWAETTLIQRDQEPIPQNIDRVKALIAEHQTFMEEMTRKQPDVDRVTKTYKRKNIEPTHAPFIEKSRSGGRKSLSQPTPPPMPILSQSEAKNPRINQLSARWQQVWLLALERQRKLNDALDRLEELKEFANFDFDVWRKKYMRWMNHKKSRVMDFFRRIDKDQDGKITRQEFIDGILASKFPTTKLEMTAVADIFDRDGDGYIDYYEFVAALHPNKDAYRPTTDADKIEDEVTRQVAQCKCAKRFQVEQIGENKYRFGDSQQLRLVRILRSTVMVRVGGGWMALDEFLVKNDPCRARGRTNIELREKFILPEGASQGMTPFRSRGRRSKPSSRAASPTRSSSSASQSNHSCTSMPSSPATPASGTKVIPSSGSKLKRPTPTFHSSRTSLAGDTSNSSSPASTGAKTNRADPKKSASRPGSRAGSRAGSRASSRRGSDASDFDLLETQSACSDTSESSAAGGQGNSRRGLNKPSKIPTMSKKTTTASPRTPGPKR

SEQ ID NO: 36308 - protein, 5300 aa, Homo sapiens
MSSSDEETLSERSCRSERSCRSERSYRSERSGSLSPCPPGDTLPWNLPLHEQKKRKSQDSVLDPAERAVVRVADERDRVQKKTFTKWVNKHLMKVRKHINDLYEDLRDGHNLISLLEVLSGIKLPREKGRMRFHRLQNVQIALDFLKQRQVKLVNIRNDDITDGNPKLTLGLIWTIILHFQISDIYISGESGDMSAKEKLLLWTQKVTAGYTGIKCTNFSSCWSDGKMFNALIHRYRPDLVDMERVQIQSNRENLEQAFEVAERLGVTRLLDAEDVDVPSPDEKSVITYVSSIYDAFPKVPEGGEGISATEVDSRWQEYQSRVDSLIPWIKQHTILMSDKTFPQNPVELKALYNQYIHFKETEILAKEREKGRIEELYKLLEVWIEFGRIKLPQGYHPNDVEEEWGKLIIEMLEREKSLRPAVERLELLLQIANKIQNGALNCEEKLTLAKNTLQADAAHLESGQPVQCESDVIMYIQECEGLIRQLQVDLQILRDENYYQLEELAFRVMRLQDELVTLRLECTNLYRKGHFTSLELVPPSTLTTTHLKAEPLTKATHSSSTSWFRKPMTRAELVAISSSEDEGNLRFVYELLSWVEEMQMKLERAEWGNDLPSVELQLETQQHIHTSVEELGSSVKEARLYEGKMSQNFHTSYAETLGKLETQYCKLKETSSFRMRHLQSLHKFVSRATAELIWLNEKEEEELAYDWSDNNSNISAKRNYFSELTMELEEKQDVFRSLQDTAELLSLENHPAKQTVEAYSAAVQSQLQWMKQLCLCVEQHVKENTAYFQFFSDARELESFLRNLQDSIKRKYSCDHNTSLSRLEDLLQDSMDEKEQLIQSKSSVASLVGRSKTIVQLKPRSPDHVLKNTISVKAVCDYRQIEITICKNDECVLEDNSQRTKWKVISPTGNEAMVPSVCFLIPPPNKDAIEMASRVEQSYQKVMALWHQLHVNTKSLISWNYLRKDLDLVQTWNLEKLRSSAPGECHQIMKNLQAHYEDFLQDSRDSVLFSVADRLRLEEEVEACKARFQHLMKSMENEDKEETVAKMYISELKNIRLRLEEYEQRVVKRIQSLASSRTDRDAWQDNALRIAEQEHTQEDLQQLRSDLDAVSMKCDSFLHQSPSSSSVPTLRSELNLLVEKMDHVYGLSTVYLNKLKTVDVIVRSIQDAELLVKGYEIKLSQEEVVLADLSALEAHWSTLRHWLSDVKDKNSVFSVLDEEIAKAKVVAEQMSRLTPERNLDLERYQEKGSQLQERWHRVIAQLEIRQSELESIQEVLGDYRACHGTLIKWIEETTAQQEMMKPGQAEDSRVLSEQLSQQTALFAEIERNQTKLDQCQKFSQQYSTIVKDYELQLMTYKAFVESQQKSPGKRRRMLSSSDAITQEFMDLRTRYTALVTLTTQHVKYISDALRRLEEEEKVVEEEKQEHVEKVKELLGWVSTLARNTQGKATSSETKESTDIEKAILEQQVLSEELTTKKEQVSEAIKTSQIFLAKHGHKLSEKEKKQISEQLNALNKAYHDLCDGSANQLQQLQSQLAHQTEQKTLQKQQNTCHQQLEDLCSWVGQAERALAGHQGRTTQQDLSALQKNQSDLKDLQDDIQNRATSFATVVKDIEGFMEENQTKLSPRELTALREKLHQAKEQYEALQEETRVAQKELEEAVTSALQQETEKSKAAKELAENKKKIDALLDWVTSVGSSGGQLLTNLPGMEQLSGASLEKGALDTTDGYMGVNQAPEKLDKQCEMMKARHQELLSQQQNFILATQSAQAFLDQHGHNLTPEEQQMLQQKLGELKEQYSTSLAQSEAELKQVQTLQDELQKFLQDHKEFESWLERSEKELENMHKGGSSPETLPSLLKRQGSFSEDVISHKGDLRFVTISGQKVLDMENSFKEGKEPSEIGNLVKDKLKDATERYTALHSKCTRLGSHLNMLLGQYHQFQNSADSLQAWMQACEANVEKLLSDTVASDPGVLQEQLATTKQLQEELAEHQVPVEKLQKVARDIMEIEGEPAPDHRHVQETTDSILSHFQSLSYSLAERSSLLQKAIAQSQSVQESLESLLQSIGEVEQNLEGKQVSSLSSGVIQEALATNMKLKQDIARQKSSLEATREMVTRFMETADSTTAAVLQGKLAEVSQRFEQLCLQQQEKESSLKKLLPQAEMFEHLSGKLQQFMENKSRMLASGNQPDQDITHFFQQIQELNLEMEDQQENLDTLEHLVTELSSCGFALDLCQHQDRVQNLRKDFTELQKTVKEREKDASSCQEQLDEFRKLVRTFQKWLKETEGSIPPTETSMSAKELEKQIEHLKSLLDDWASKGTLVEEINCKGTSLENLIMEITAPDSQGKTDLTEIQCDMSDVNLKYEKLGGVLHERQESLQAILNRMEEVHKEANSVLQWLESKEEVLKSMDAMSSPTKTETVKAQAESNKAFLAELEQNSPKIQKVKEALAGLLVTYPNSQEAENWKKIQEELNSRWERATEVTVARQRQLEESASHLACFQAAESQLRPWLMEKELMMGVLGPLSIDPNMLNAQKQQVQFMLKEFEARRQQHEQLNEAAQGILTGPGDVSLSTSQVQKELQSINQKWVELTDKLNSRSSQIDQAIVKSTQYQELLQDLSEKVRAVGQRLSVQSAISTQPEAVKQQLEETSEIRSDLEQLDHEVKEAQTLCDELSVLIGEQYLKDELKKRLETVALPLQGLEDLAADRINRLQAALASTQQFQQMFDELRTWLDDKQSQQAKNCPISAKLERLQSQLQENEEFQKSLNQHSGSYEVIVAEGESLLLSVPPGEEKRTLQNQLVELKNHWEELSKKTADRQSRLKDCMQKAQKYQWHVEDLVPWIEDCKAKMSELRVTLDPVQLESSLLRSKAMLNEVEKRRSLLEILNSAADILINSSEADEDGIRDEKAGINQNMDAVTEELQAKTGSLEEMTQRLREFQESFKNIEKKVEGAKHQLEIFDALGSQACSNKNLEKLRAQQEVLQALEPQVDYLRNFTQGLVEDAPDGSDASQLLHQAEVAQQEFLEVKQRVNSGCVMMENKLEGIGQFHCRVREMFSQLADLDDELDGMGAIGRDTDSLQSQIEDVRLFLNKIHVLKLDIEASEAECRHMLEEEGTLDLLGLKRELEALNKQCGKLTERGKARQEQLELTLGRVEDFYRKLKGLNDATTAAEEAEALQWVVGTEVEIINQQLADFKMFQKEQVDPLQMKLQQVNGLGQGLIQSAGKDCDVQGLEHDMEEINARWNTLNKKVAQRIAQLQEALLHCGKFQDALEPLLSWLADTEELIANQKPPSAEYKVVKAQIQEQKLLQRLLDDRKATVDMLQAEGGRIAQSAELADREKITGQLESLESRWTELLSKAAARQKQLEDILVLAKQFHETAEPISDFLSVTEKKLANSEPVGTQTAKIQQQIIRHKALNEEIVNRKKNVDQAIKNGQALLKQTTGEEVLLIQEKLDGIKTRYADITVTSSKALRTLEQARQLATKFQSTYEELTGWLREVEEELATSGGQSPTGEQIPQFQQRQKELKKEVMEHRLVLDTVNEVSRALLELVPWRAREGLDKLVSDANEQYKLVSDTIGQRVDEIDAAIQRSQQYEQAADAELAWVAETKRKLMALGPIRLEQDQTTAQLQVQKAFSIDIIRHKDSMDELFSHRSEIFGTCGEEQKTVLQEKTESLIQQYEAISLLNSERYARLERAQVLVNQFWETYEELSPWIEETRALIAQLPSPAIDHEQLRQQQEEMRQLRESIAEHKPHIDKLLKIGPQLKELNPEEGEMVEEKYQKAENMYAQIKEEVRQRALALDEAVSQSTQITEFHDKIEPMLETLENLSSRLRMPPLIPAEVDKIRECISDNKSATVELEKLQPSFEALKRRGEELIGRSQGADKDLAAKEIQDKLDQMVFFWEDIKARAEEREIKFLDVLELAEKFWYDMAALLTTIKDTQDIVHDLESPGIDPSIIKQQVEAAETIKEETDGLHEELEFIRILGADLIFACGETEKPEVRKSIDEMNNAWENLNKTWKERLEKLEDAMQAAVQYQDTLQAMFDWLDNTVIKLCTMPPVGTDLNTVKDQLNEMKEFKVEVYQQQIEMEKLNHQGELMLKKATDETDRDIIREPLTELKHLWENLGEKIAHRQHKLEGALLALGQFQHALEELMSWLTHTEELLDAQRPISGDPKVIEVELAKHHVLKNDVLAHQATVETVNKAGNELLESSAGDDASSLRSRLEAMNQCWESVLQKTEEREQQLQSTLQQAQGFHSEIEDFLLELTRMESQLSASKPTGGLPETAREQLDTHMELYSQLKAKEETYNQLLDKGRLMLLSRDDSGSGSKTEQSVALLEQKWHVVSSKMEERKSKLEEALNLATEFQNSLQEFINWLTLAEQSLNIASPPSLILNTVLSQIEEHKVFANEVNAHRDQIIELDQTGNQLKFLSQKQDVVLIKNLLVSVQSRWEKVVQRSIERGRSLDDARKRAKQFHEAWKKLIDWLEDAESHLDSELEISNDPDKIKLQLSKHKEFQKTLGGKQPVYDTTIRTGRALKEKTLLPEDSQKLDNFLGEVRDKWDTVCGKSVERQHKLEEALLFSGQFMDALQALVDWLYKVEPQLAEDQPVHGDLDLVMNLMDAHKVFQKELGKRTGTVQVLKRSGRELIENSRDDTTWVKGQLQELSTRWDTVCKLSVSKQSRLEQALKQAEVFRDTVHMLLEWLSEAEQTLRFRGALPDDTEALQSLIDTHKEFMKKVEEKRVDVNSAVAMGEVILAVCHPDCITTIKHWITIIRARFEEVLTWAKQHQQRLETALSELVANAELLEELLAWIQWAETTLIQRDQEPIPQNIDRVKALIAEHQTFMEEMTRKQPDVDRVTKTYKRKNIEPTHAPFIEKSRSGGRKSLSQPTPPPMPILSQSEAKNPRINQLSARWQQVWLLALERQRKLNDALDRLEELKEFANFDFDVWRKKYMRWMNHKKSRVMDFFRRIDKDQDGKITRQEFIDGILASKFPTTKLEMTAVADIFDRDGDGYIDYYEFVAALHPNKDAYRPTTDADKIEDEVTRQVAQCKCAKRFQVEQIGENKYRFGDSQQLRLVRILRSTVMVRVGGGWMALDEFLVKNDPCRARGRTNIELREKFILPEGASQGMTPFRSRGRRSKPSSRAASPTRSSSSASQSNHSCTSMPSSPATPASGTKVIPSSGSKLKRPTPTFHSSRTSLAGDTSNSSSPASTGAKTNRADPKKSASRPGSRAGSRAGSRASSRRGSDASDFDLLETQSACSDTSESSAAGGQGNSRRGLNKPSKIPTMSKKTTTASPRTPGPKR

SEQ ID NO: 36309 - protein, 5938 aa, Homo sapiens
MQKGLLDQDTGLVLLESQVIMSGLIAPETGENLSLEEGIARNLINPQMYQQLRELQDALALISRLTESRGPLSVVEAIEKRIISETVGLKILEAHLATGGFSLSPSENCINLEEAFHQGLISAWLHSVLESYLRTSKNLIDPNTAEKIGLLDLMQRCIVHQESGFKLLPVKQLAGGMVSLKSGRKVSIFRAVQEGLIDRQVTVRLLEAQLFAGGIVDPRTGHRLTVEEAVRHNLIDQDMACAILIRQLQTGGIIDTVTGQRLTIDEAVSNDLVAAKIALVILESLWSFMGLLWPESGEILPITDALEQGIVSTELAHKILSNRQHIKALFLPATTEILSWKKAIESGILDRDLANNLKSICIPDVMPHMQLADSAEQNINPGAAVLPCSKSHPKATASQSENLLFQLMTHSYINVQNGQRLLLLDKELMETLTSRDEYQTSPPKVVEIGHQRQKTPEGLQESANVKISGTFSSGWTVRLPEFQFSSQNKEYPDREDCTTEKGKKTTVETEDSSVENPEQDLFVEQKERNPNIDALKVINKVKLEVQRQLIGTQREDQTAVSVRENASRGHLLTIPPAEAEGVPLVVDKDVFSVETPKKEHQPLRNTSFTCQNEQAHTLETEYIHDETGGSHIKPQSKKLQVQVKKTLGIKLELKSETDGNVHPLDKKEMLKKTFLAKDDHKESQEAQNIAGGSMMMSEKTDEEDSGREIFLSCSHPLELLEEATLNVLSAQLLDGGIFHEQTGQKLLLNEAISRGIVPSHTAVKLMEKLNMFQGFFDSQTCESLTTEEVINEGLMDEKLLHNVLMADKAISGVLDPRTQTLCSVKDAVTVGLLDKETATRILERQVVTGGIIDLKRGKKVSVTLASTLGLVDVADQPELINLEKASKGRDAEKTVRERLISLQMETTGLIDPDSKAPLTVVQSIDRGLLEREEAVRLLTKQVVDGGIIHHISGMRLSVDNAFRHGLIGEDLAEKLKRVENLNIHQIFNPETKENISLPKAIKLDLITSDLKREIQEVQAFTGNFVDLISGQRLTLAEAKKEGLLTNEAVLSPGMMHGIVDPENCRIVPYSELVKKCKIDIESGQRYLEVIPFSDIKDGVSDKVLTLSQAIQLGKVDFASTLKVLEAQANTGGIIDTATGKRLTLASALEEKLVDENMVRIIASHQVLNGGIVDIFSDQRVTLVEAIEKRLISPELANMIQIDSSEFSDHRAQIEKQEGIEVCALQNEFLGKDMLIACNQTAEMSCNKVEESERLFQVENQSAQEKVKVRVSDGEQAKKSREISLKEFGCKDQRKPRMSSDAKEFISIINPHNLKGKSLGQVSLTHPYSECDFKLKEVARNNMGNDTNEEQEKAVTKIEIISHMKQSTSCLDSEEIRENQGEVILEVQETYCETSGKLPSEQVLQQPMNARVKSKREKREVIVEESIRTCKPAFLSEEKLYQETAIRDEHDSHIKSQPREMTSSEKGKEADTEMGFSITFKIEESSSQVVPQGISVKHLDALTLFSSKQANEGKVNNLSLCLTLKPEENLSREIACGAQSEPFPCMTPRPEGLHYQESDGKAQVTGPSQISKTDKSFQGTTRQETNYQDSWVTSKTKETKHQISSSNECKEKSYQEVSFDPARGLKLEEITVSRPDSKEVRYLEFSDRKDLHHQGSKSDDKLCGTLKSEIATQELTGEKFLEMANPNVAGLEAGSIEDIVTQRGSRVLGSFLPEKLFKGVSQKENTGQQNAIISPTVLETSEEKTVSLTVCSAVKTEKTPQEKLRESPGSEQTPFMTAPEGKGNGGVNPEPFRATQNVFTRQLCLEHDEKLVSYLSLLRNIEMRTKQIQPLELNLAELQDLLCQAKVLERELKDLTTLVSQELECVNQIIISQPQEVPAQLLKALEKDAKNLQKSLSSVSDTWNSRLLHFQNAVEIEKTKVLNQHTQLEGRLQDLRAWVGNKNLILNSKGSNSEIDVDSLNLCLQQYEDLKQPMAERKAQLDALAFDIQFFISEHAQDLSPQQNRQMLRLLNELQRSFQDILEQTAAQVDALQGHLQQMEQEALVKTLQKQQNTCHQQLEDLCSWVGQAERALAGHQGRTTQQDLSALQKNQSDLKDLQDDIQNRATSFATVVKDIEGFMEENQTKLSPRELTALREKLHQAKEQYEALQEETRVAQKELEEAVTSALQQETEKSKAAKELAENKKKIDALLDWVTSVGSSGGQLLTNLPGMEQLSGASLEKGALDTTDGYMGVNQAPEKLDKQCEMMKARHQELLSQQQNFILATQSAQAFLDQHGHNLTPEEQQMLQQKLGELKEQYSTSLAQSEAELKQVQTLQDELQKFLQDHKEFESWLERSEKELENMHKGGSSPETLPSLLKRQGSFSEDVISHKGDLRFVTISGQKVLDMENSFKEGKEPSEIGNLVKDKLKDATERYTALHSKCTRLGSHLNMLLGQYHQFQNSADSLQAWMQACEANVEKLLSDTVASDPGVLQEQLATTKQLQEELAEHQVPVEKLQKVARDIMEIEGEPAPDHRHVQETTDSILSHFQSLSYSLAERSSLLQKAIAQSQSVQESLESLLQSIGEVEQNLEGKQVSSLSSGVIQEALATNMKLKQDIARQKSSLEATREMVTRFMETADSTTAAVLQGKLAEVSQRFEQLCLQQQEKESSLKKLLPQAEMFEHLSGKLQQFMENKSRMLASGNQPDQDITHFFQQIQELNLEMEDQQENLDTLEHLVTELSSCGFALDLCQHQDRVQNLRKDFTELQKTVKEREKDASSCQEQLDEFRKLVRTFQKWLKETEGSIPPTETSMSAKELEKQIEHLKSLLDDWASKGTLVEEINCKGTSLENLIMEITAPDSQGKTGSILPSVGSSVGSVNGYHTCKDLTEIQCDMSDVNLKYEKLGGVLHERQESLQAILNRMEEVHKEANSVLQWLESKEEVLKSMDAMSSPTKTETVKAQAESNKAFLAELEQNSPKIQKVKEALAGLLVTYPNSQEAENWKKIQEELNSRWERATEVTVARQRQLEESASHLACFQAAESQLRPWLMEKELMMGVLGPLSIDPNMLNAQKQQVQFMLKEFEARRQQHEQLNEAAQGILTGPGDVSLSTSQVQKELQSINQKWVELTDKLNSRSSQIDQAIVKSTQYQELLQDLSEKVRAVGQRLSVQSAISTQPEAVKQQLEETSEIRSDLEQLDHEVKEAQTLCDELSVLIGEQYLKDELKKRLETVALPLQGLEDLAADRINRLQAALASTQQFQQMFDELRTWLDDKQSQQAKNCPISAKLERLQSQLQENEEFQKSLNQHSGSYEVIVAEGESLLLSVPPGEEKRTLQNQLVELKNHWEELSKKTADRQSRLKDCMQKAQKYQWHVEDLVPWIEDCKAKMSELRVTLDPVQLESSLLRSKAMLNEVEKRRSLLEILNSAADILINSSEADEDGIRDEKAGINQNMDAVTEELQAKTGSLEEMTQRLREFQESFKNIEKKVEGAKHQLEIFDALGSQACSNKNLEKLRAQQEVLQALEPQVDYLRNFTQGLVEDAPDGSDASQLLHQAEVAQQEFLEVKQRVNSGCVMMENKLEGIGQFHCRVREMFSQLADLDDELDGMGAIGRDTDSLQSQIEDVRLFLNKIHVLKLDIEASEAECRHMLEEEGTLDLLGLKRELEALNKQCGKLTERGKARQEQLELTLGRVEDFYRKLKGLNDATTAAEEAEALQWVVGTEVEIINQQLADFKMFQKEQVDPLQMKLQQVNGLGQGLIQSAGKDCDVQGLEHDMEEINARWNTLNKKVAQRIAQLQEALLHCGKFQDALEPLLSWLADTEELIANQKPPSAEYKVVKAQIQEQKLLQRLLDDRKATVDMLQAEGGRIAQSAELADREKITGQLESLESRWTELLSKAAARQKQLEDILVLAKQFHETAEPISDFLSVTEKKLANSEPVGTQTAKIQQQIIRHKALEEDIENHATDVHQAVKIGQSLSSLTSPAEQGVLSEKIDSLQARYSEIQDRCCRKAALLDQALSNARLFGEDEVEVLNWLAEVEDKLSSVFVKDFKQDVLHRQHADHLALNEEIVNRKKNVDQAIKNGQALLKQTTGEEVLLIQEKLDGIKTRYADITVTSSKALRTLEQARQLATKFQSTYEELTGWLREVEEELATSGGQSPTGEQIPQFQQRQKELKKEVMEHRLVLDTVNEVSRALLELVPWRAREGLDKLVSDANEQYKLVSDTIGQRVDEIDAAIQRSQQYEQAADAELAWVAETKRKLMALGPIRLEQDQTTAQLQVQKAFSIDIIRHKDSMDELFSHRSEIFGTCGEEQKTVLQEKTESLIQQYEAISLLNSERYARLERAQVLVNQFWETYEELSPWIEETRALIAQLPSPAIDHEQLRQQQEEMRQLRESIAEHKPHIDKLLKIGPQLKELNPEEGEMVEEKYQKAENMYAQIKEEVRQRALALDEAVSQSTQITEFHDKIEPMLETLENLSSRLRMPPLIPAEVDKIRECISDNKSATVELEKLQPSFEALKRRGEELIGRSQGADKDLAAKEIQDKLDQMVFFWEDIKARAEEREIKFLDVLELAEKFWYDMAALLTTIKDTQDIVHDLESPGIDPSIIKQQVEAAETIKEETDGLHEELEFIRILGADLIFACGETEKPEVRKSIDEMNNAWENLNKTWKERLEKLEDAMQAAVQYQDTLQAMFDWLDNTVIKLCTMPPVGTDLNTVKDQLNEMKEFKVEVYQQQIEMEKLNHQGELMLKKATDETDRDIIREPLTELKHLWENLGEKIAHRQHKLEGALLALGQFQHALEELMSWLTHTEELLDAQRPISGDPKVIEVELAKHHVLKNDVLAHQATVETVNKAGNELLESSAGDDASSLRSRLEAMNQCWESVLQKTEEREQQLQSTLQQAQGFHSEIEDFLLELTRMESQLSASKPTGGLPETAREQLDTHMELYSQLKAKEETYNQLLDKGRLMLLSRDDSGSGSKTEQSVALLEQKWHVVSSKMEERKSKLEEALNLATEFQNSLQEFINWLTLAEQSLNIASPPSLILNTVLSQIEEHKVFANEVNAHRDQIIELDQTGNQLKFLSQKQDVVLIKNLLVSVQSRWEKVVQRSIERGRSLDDARKRAKQFHEAWKKLIDWLEDAESHLDSELEISNDPDKIKLQLSKHKEFQKTLGGKQPVYDTTIRTGRALKEKTLLPEDSQKLDNFLGEVRDKWDTVCGKSVERQHKLEEALLFSGQFMDALQALVDWLYKVEPQLAEDQPVHGDLDLVMNLMDAHKVFQKELGKRTGTVQVLKRSGRELIENSRDDTTWVKGQLQELSTRWDTVCKLSVSKQSRLEQALKQAEVFRDTVHMLLEWLSEAEQTLRFRGALPDDTEALQSLIDTHKEFMKKVEEKRVDVNSAVAMGEVILAVCHPDCITTIKHWITIIRARFEEVLTWAKQHQQRLETALSELVANAELLEELLAWIQWAETTLIQRDQEPIPQNIDRVKALIAEHQTFMEEMTRKQPDVDRVTKTYKRKNIEPTHAPFIEKSRSGGRKSLSQPTPPPMPILSQSEAKNPRINQLSARWQQVWLLALERQRKLNDALDRLEELKEFANFDFDVWRKKYMRWMNHKKSRVMDFFRRIDKDQDGKITRQEFIDGILASKFPTTKLEMTAVADIFDRDGDGYIDYYEFVAALHPNKDAYRPTTDADKIEDEVTRQVAQCKCAKRFQVEQIGENKYRFFLGNQFGDSQQLRLVRILRSTVMVRVGGGWMALDEFLVKNDPCRARGRTNIELREKFILPEGASQGMTPFRSRGRRSKPSSRAASPTRSSSSASQSNHSCTSMPSSPATPASGTKVIPSSGSKLKRPTPTFHSSRTSLAGDTSNSSSPASTGAKTNRADPKKSASRPGSRAGSRAGSRASSRRGSDASDFDLLETQSACSDTSESSAAGGQGNSRRGLNKPSKIPTMSKKTTTASPRTPGPKR

SEQ ID NO: 36310 - protein, 925 aa, Homo sapiens
MAEANPRRGKMRFRRNAASFPGNLHLVLVLRPTSFLQRTFTDIGFWFSQEDFMLKLPVVMLSSVSDLLTYIDDKQLTPELGGTLQYCHSEWIIFRNAIENFALTVKEMAQMLQSFGTELAETELPDDIPSIEEILAIRAERYHLLKNDITAVTKEGKILLTNLEVPDTEGAVSSRLECHRQISGDWQTINKLLTQVHDMETAFDGFWEKHQLKMEQYLQLWKFEQDFQQLVTEVEFLLNQQAELADVTGTIAQVKQKIKKLENLDENSQELLSKAQFVILHGHKLAANHHYALDLICQRCNELRYLSDILVNEIKAKRIQLSRTFKMHKLLQQARQCCDEGECLLANQEIDKFQSKEDAQKALQDIENFLEMALPFINYEPETLQYEFDVILSPELKVQMKTIQLKLENIRSIFENQQAGFRNLADKHVRPIQFVVPTPENLVTSGTPFFSSKQGKKTWRQNQSNLKIEVVPDCQEKRSSGPSSSLDNGNSLDVLKNHVLNELIQTERVYVRELYTVLLGYRAEMDNPEMFDLMPPLLRNKKDILFGNMAEIYEFHNDIFLSSLENCAHAPERVGPCFLERKDDFQMYAKYCQNKPRSETIWRKYSECAFFQECQRKLKHRLRLDSYLLKPVQRITKYQLLLKELLKYSKDCEGSALLKKALDAMLDLLKSVNDSMHQIAINGYIGNLNELGKMIMQGGFSVWIGHKKGATKMKDLARFKPMQRHLFLYEKAIVFCKRRVESGEGSDRYPSYSFKHCWKMDEVGITEYVKGDNRKFEIWYGEKEEVYIVQASNVDVKMTWLKEIRNILLKQQELLTVKKRKQQDQLTERDKFQISLQQNDEKQQGAFISTEETELEHTSTVVEVCEAIASVQAEANTVWTEASQSAEISEEPAEWSSNYFYPTYDENEEENRPLMRPVSEMALLY

SEQ ID NO: 36311 - protein, 860 aa, Homo sapiens
MAEANPRRGKMRFRRNAASFPGNLHLVLVLRPTSFLQRTFTDIGFWFSQEDFMLKLPVVMLSSVSDLLTYIDDKQLTPELGGTLQYCHSEWIIFRNAIENFALTVKEMAQMLQSFGTELAETELPDDIPSIEEILAIRAERYHLLKNDITAVTKEGKILLTNLEVPDTEGAVSSRLECHRQISGDWQTINKLLTQVHDMETAFDGFWEKHQLKMEQYLQLWKFEQDFQQLVTEVEFLLNQQAELADVTGTIAQVKQKIKKLENLDENSQELLSKAQFVILHGHKLAANHHYALDLICQRCNELRYLSDILVNEIKAKRIQLSRTFKMHKLLQQARQCCDEGECLLANQEIDKFQSKEDAQKALQDIENFLEMALPFINYEPETLQYEFDVILSPELKVQMKTIQLKLENIRSIFENQQAGFRNLADKHVRPIQFVVPTPENLVTSGTPFFSSKQGKKTWRQNQSNLKIEVVPDCQEKRSSGPSSSLDNGNSLDVLKNHVLNELIQTERVYVRELYTVLLGYRAEMDNPEMFDLMPPLLRNKKDILFGNMAEIYEFHNDIFLSSLENCAHAPERVGPCFLERKDDFQMYAKYCQNKPRSETIWRKYSECAFFQECQRKLKHRLRLDSYLLKPVQRITKYQLLLKELLKYSKDCEGSALLKKALDAMLDLLKSVNDSMHQIAINGYIGNLNELGKMIMQGGFSVWIGHKKGATKMKDLARFKPMQRHLFLYEKAIVFCKRRVESGEGSDRYPSYSFKHCWKMDEVGITEYVKGDNRKFEIWYGEKEEVYIVQASNVDVKMTWLKEIRNILLKQQELLTVKKRKQQDQLTERDKFQISLQQNDEDLCRRWLSYIDEATMSNGK

SEQ ID NO: 36312 - protein, 985 aa, Homo sapiens
MQDIAFLSGGRGKDNAWIITFPENCNFRCIPEEVIAKVLTYLTSIARQNGSDSRFTIILDRRLDTWSSLKISLQKISASFPGNLHLVLVLRPTSFLQRTFTDIGFWFSQEDFMLKLPVVMLSSVSDLLTYIDDKQLTPELGGTLQYCHSEWIIFRNAIENFALTVKEMAQMLQSFGTELAETELPDDIPSIEEILAIRAERYHLLKNDITAVTKEGKILLTNLEVPDTEGAVSSRLECHRQISGDWQTINKLLTQVHDMETAFDGFWEKHQLKMEQYLQLWKFEQDFQQLVTEVEFLLNQQAELADVTGTIAQVKQKIKKLENLDENSQELLSKAQFVILHGHKLAANHHYALDLICQRCNELRYLSDILVNEIKAKRIQLSRTFKMHKLLQQARQCCDEGECLLANQEIDKFQSKEDAQKALQDIENFLEMALPFINYEPETLQYEFDVILSPELKVQMKTIQLKLENIRSIFENQQAGFRNLADKHVRPIQFVVPTPENLVTSGTPFFSSKQGKKTWRQNQSNLKIEVVPDCQEKRSSGPSSSLDNGNSLDVLKNHVLNELIQTERVYVRELYTVLLGYRAEMDNPEMFDLMPPLLRNKKDILFGNMAEIYEFHNDIFLSSLENCAHAPERVGPCFLERKDDFQMYAKYCQNKPRSETIWRKYSECAFFQECQRKLKHRLRLDSYLLKPVQRITKYQLLLKELLKYSKDCEGSALLKKALDAMLDLLKSVNDSMHQIAINGYIGNLNELGKMIMQGGFSVWIGHKKGATKMKDLARFKPMQRHLFLYEKAIVFCKRRVESGEGSDRYPSYSFKHCWKMDEVGITEYVKGDNRKFEIWYGEKEEVYIVQASNVDVKMTWLKEIRNILLKQQELLTVKKRKQQDQLTERDKFQISLQQNDEKQQGAFISTEETELEHTSTVVEVCEAIASVQAEANTVWTEASQSAEISEEPAEWSSNYFYPTYDENEEENRPLMRPVSEMALLY

SEQ ID NO: 36313 - protein, 941 aa, Homo sapiens
MAEANPRRGKMRFRRNAASFPGNLHLVLVLRPTSFLQRTFTDIGFWFSQEDFMLKLPVVMLSSVSDLLTYIDDKQLTPELGGTLQYCHSEWIIFRNAIENFALTVKEMAQMLQSFGTELAETELPDDIPSIEEILAIRAERYHLLKNDITAVTKEGKILLTNLEVPDTEGAVSSRLECHRQISGDWQTINKLLTQVHDMETAFDGFWEKHQLKMEQYLQLWKFEQDFQQLVTEVEFLLNQQAELADVTGTIAQVKQKIKKLENLDENSQELLSKAQFVILHGHKLAANHHYALDLICQRCNELRYLSDILVNEIKAKRIQLSRTFKMHKLLQQARQCCDEGECLLANQEIDKFQSKEDAQKALQDIENFLEMALPFINYEPETLQYEFDVILSPELKVQMKTIQLKLENIRSIFENQQAGFRNLADKHVRPIQFVVPTPENLVTSGTPFFSSKQVGVGYSFFQACKLFSKGKKTWRQNQSNLKIEVVPDCQEKRSSGPSSSLDNGNSLDVLKNHVLNELIQTERVYVRELYTVLLGYRAEMDNPEMFDLMPPLLRNKKDILFGNMAEIYEFHNDIFLSSLENCAHAPERVGPCFLERKDDFQMYAKYCQNKPRSETIWRKYSECAFFQECQRKLKHRLRLDSYLLKPVQRITKYQLLLKELLKYSKDCEGSALLKKALDAMLDLLKSVNDSMHQIAINGYIGNLNELGKMIMQGGFSVWIGHKKGATKMKDLARFKPMQRHLFLYEKAIVFCKRRVESGEGSDRYPSYSFKHCWKMDEVGITEYVKGDNRKFEIWYGEKEEVYIVQASNVDVKMTWLKEIRNILLKQQELLTVKKRKQQDQLTERDKFQISLQQNDEKQQGAFISTEETELEHTSTVVEVCEAIASVQAEANTVWTEASQSAEISEEPAEWSSNYFYPTYDENEEENRPLMRPVSEMALLY

SEQ ID NO: 36314 - protein, 1001 aa, Homo sapiens
MQDIAFLSGGRGKDNAWIITFPENCNFRCIPEEVIAKVLTYLTSIARQNGSDSRFTIILDRRLDTWSSLKISLQKISASFPGNLHLVLVLRPTSFLQRTFTDIGFWFSQEDFMLKLPVVMLSSVSDLLTYIDDKQLTPELGGTLQYCHSEWIIFRNAIENFALTVKEMAQMLQSFGTELAETELPDDIPSIEEILAIRAERYHLLKNDITAVTKEGKILLTNLEVPDTEGAVSSRLECHRQISGDWQTINKLLTQVHDMETAFDGFWEKHQLKMEQYLQLWKFEQDFQQLVTEVEFLLNQQAELADVTGTIAQVKQKIKKLENLDENSQELLSKAQFVILHGHKLAANHHYALDLICQRCNELRYLSDILVNEIKAKRIQLSRTFKMHKLLQQARQCCDEGECLLANQEIDKFQSKEDAQKALQDIENFLEMALPFINYEPETLQYEFDVILSPELKVQMKTIQLKLENIRSIFENQQAGFRNLADKHVRPIQFVVPTPENLVTSGTPFFSSKQVGVGYSFFQACKLFSKGKKTWRQNQSNLKIEVVPDCQEKRSSGPSSSLDNGNSLDVLKNHVLNELIQTERVYVRELYTVLLGYRAEMDNPEMFDLMPPLLRNKKDILFGNMAEIYEFHNDIFLSSLENCAHAPERVGPCFLERKDDFQMYAKYCQNKPRSETIWRKYSECAFFQECQRKLKHRLRLDSYLLKPVQRITKYQLLLKELLKYSKDCEGSALLKKALDAMLDLLKSVNDSMHQIAINGYIGNLNELGKMIMQGGFSVWIGHKKGATKMKDLARFKPMQRHLFLYEKAIVFCKRRVESGEGSDRYPSYSFKHCWKMDEVGITEYVKGDNRKFEIWYGEKEEVYIVQASNVDVKMTWLKEIRNILLKQQELLTVKKRKQQDQLTERDKFQISLQQNDEKQQGAFISTEETELEHTSTVVEVCEAIASVQAEANTVWTEASQSAEISEEPAEWSSNYFYPTYDENEEENRPLMRPVSEMALLY

SEQ ID NO: 36315 - protein, 821 aa, Homo sapiens
MAEANPRRGKMRFRRNAASFPGNLHLVLVLRPTSFLQRTFTDIGFWFSQEDFMLKLPAIENFALTVKEMAQMLQSFGTELAETELPDDIPSIEEILAIRAERYHLLKNDITAVTKEGKILLTNLEVPDTEGAVSSRLECHRQISGDWQTINKLLTQVHDMETAFDGFWEKHQLKMEQYLQLWKFEQDFQQLVTEVEFLLNQQAELADVTGTIAQVKQKIKKLENLDENSQELLSKAQFVILHGHKLAANHHYALDLICQRCNELRYLSDILVNEIKAKRIQLSRTFKMHKLLQQARQCCDEGECLLANQEIDKFQSKEDAQKALQDIENFLEMALPFINYEPETLQYEFDVILSPELKVQMKTIQLKLENIRSIFENQQAGFRNLADKHVRPIQFVVPTPENLVTSGTPFFSSKQGKKTWRQNQSNLKIEVVPDCQEKRSSGPSSSLDNGNSLDVLKNHVLNELIQTERVYVRELYTVLLGYRAEMDNPEMFDLMPPLLRNKKDILFGNMAEIYEFHNDIFLSSLENCAHAPERVGPCFLERKDDFQMYAKYCQNKPRSETIWRKYSECAFFQECQRKLKHRLRLDSYLLKPVQRITKYQLLLKELLKYSKDCEGSALLKKALDAMLDLLKSVNDSMHQIAINGYIGNLNELGKMIMQGGFSVWIGHKKGATKMKDLARFKPMQRHLFLYEKAIVFCKRRVESGEGSDRYPSYSFKHCWKMDEVGITEYVKGDNRKFEIWYGEKEEVYIVQASNVDVKMTWLKEIRNILLKQQELLTVKKRKQQDQLTERDKFQISLQQNDEDLCRRWLSYIDEATMSNGK

SEQ ID NO: 36316 - protein, 146 aa, Homo sapiens
MTMRSLLRTPFLCGLLWAFCAPGARAEEPAASFSQPGSMGLDKNTVHDQEHIMEHLEGVINKPEAEMSPQELQLHYFKMHDYDGNNLLDGLELSTAITHVHKEEGSEQAPLMSEDELINIIDGVLRDDDKNNDGYIDYAEFAKSLQ

SEQ ID NO: 36317 - protein, 94 aa, Homo sapiens
MEHLEGVINKPEAEMSPQELQLHYFKMHDYDGNNLLDGLELSTAITHVHKEEGSEQAPLMSEDELINIIDGVLRDDDKNNDGYIDYAEFAKSLQ

SEQ ID NO: 36318 - protein, 127 aa, Homo sapiens
MLSVCSCRTSSGMRSQWPSARQRSSSLSTFRHIMEHLEGVINKPEAEMSPQELQLHYFKMHDYDGNNLLDGLELSTAITHVHKEEGSEQAPLMSEDELINIIDGVLRDDDKNNDGYIDYAEFAKSLQ

SEQ ID NO: 36319 - protein, 344 aa, Homo sapiens
MAAATELNRPSSGDRNLERRCRPNLSREVLYEIFRSLHTLVGQLDLRDDVVKITIDWNKLQSLSAFQPALLFSALEQHILYLQPFLAKLQSPIKEENTTAVEEIGRTEMGNKNEVNDKFSIGDLQEEEKHKESDLRDVKKTQIHFDPEVVQIKAGKAEIDRRISAFIERKQAEINENNVREFCNVIDCNQENSCARTDAIFTPYPGFKSHVKVSRVVNTYGPQTRPEGIPGSGHKPNSMLRDCGNQAVEERLQNIEAHLRLQTGGPVPRDIYQRIKKLEDKILELEGISPEYFQSVSFSGKRRKVQPPQQNYSLAELDEKISALKQALLRKSREAESMATHHLP

SEQ ID NO: 36320 - protein, 298 aa, Homo sapiens
MAAATELNRPSSGDRNLERRCRPNLSREVLYEIFRSLHTLVGQLDLRDDVVKITIDWNKLQSLSAFQPALLFSALEQHILYLQPFLAKLQSPIKEENTTAVEEIGRTEMGNKNEVNDKFSIGDLQEEEKHKESDLRDVKKTQIHFDPEVVQIKAGKAEIDRRISAFIERKQAEINENNVREFCNVIDCNQENSCARTDAIFTPYPGFKSHVKVSRVVNTYGPQTRPEGIPGSGHKPNSMLRDCGNQAVEERLQNIEAHLRLQTGGPVPRDIYQRIKKLEDKILELEGISPEYFQSVSL

SEQ ID NO: 36321 - protein, 282 aa, Homo sapiens
MAAATELNRPSSGDRNLERRCRPNLSREVLYEIFRSLHTLVGQLDLRDDVVKITIDWNKLQSLSAFQPALLFSALEQHILYLQPFLAKLQSPIKEENTTAVEEIGRTEMGNKNEVNDKFSIGDLQEEEKHKESDLRDVKKTQIHFDPEVVQIKAGKAEIDRRISAFIERKQAEINENNVREFCNVIDCNQENSCARTDAIFTPYPGFKSHVKVSRVVNTYGPQTRPEGIPGSGHKPNSMLRDCGNQAVEERLQNIEAHLRLQTELFWKKKKSSTTSTELFTG

SEQ ID NO: 36322 - protein, 343 aa, Homo sapiens
MAAATELNRPSSGDRNLERRCRPNLSREVLYEIFRSLHTLVGQLDLRDDVVKITIDWNKLQSLSAFQPALLFSALEQHILYLQPFLAKLQSPIKEENTTAVEEIGRTEMGNKNEVNDKFSIGDLQEEEKHKESDLRDVKKTQIHFDPEVVQIKAGKAEIDRRISAFIERKQAEINENNVREFCNVIDCNQENSCARTDAIFTPYPGFKSHVKVSRVVNTYGPQTRPEGIPGSGHKPNSMLRDCGNQAVEERLQNIEAHLRLQTGGPVPRDIYQRIKKLEDKILELEGISPEYFQSVSFSGKRRKVQPPQNYSLAELDEKISALKQALLRKSREAESMATHHLP

SEQ ID NO: 36323 - protein, 206 aa, Homo sapiens
MEVDINGESRSTLTTLPFPGAEANSPGKAEAEKPRCSSTPCSPMRRTVSGYQILHMDSNYLVGFTTGEELLKLAQKCTGGEESKAEAMPSLRSKQLDAGLARSSRLYKTRSRYYQPYEIPAVNGRRRRRMPSSGDKCTKSLPYEPYKALHGPLPLCLLKGKRAHSKSLDYLNLDKMIKEPADTEVLQYQLQHLTLRGDRVFARNNT

SEQ ID NO: 36324 - protein, 189 aa, Homo sapiens
MALSFSLLMAVLVLSYKSICSLGCDLPQTHSLGNRRALILLGQMGRISPFSCLKDRHDFRIPQEEFDGNQFQKAQAISVLHEMIQQTFNLFSTEDSSAAWEQSLLEKFSTELYQQLNDLEACVIQEVGVEETPLMNEDSILAVRKYFQRITLYLIERKYSPCAWEVVRAEIMRSLSFSTNLQKRLRRKD

SEQ ID NO: 36325 - protein, 599 aa, Homo sapiens
MMNKLYIGNLSPAVTADDLRQLFGDRKLPLAGQVLLKSGYAFVDYPDQNWAIRAIETLSGKVELHGKIMEVDYSVSKKLRSRKIQIRNIPPHLQWEVLDGLLAQYGTVENVEQVNTDTETAVVNVTYATREEAKIAMEKLSGHQFENYSFKISYIPDEEVSSPSPPQRAQRGDHSSREQGHAPGGTSQARQIDFPLRILVPTQFVGAIIGKEGLTIKNITKQTQSRVDIHRKENSGAAEKPVTIHATPEGTSEACRMILEIMQKEADETKLAEEIPLKILAHNGLVGRLIGKEGRNLKKIEHETGTKITISSLQDLSIYNPERTITVKGTVEACASAEIEIMKKLREAFENDMLAVNQQANLIPGLNLSALGIFSTGLSVLSPPAGPRGAPPAAPYHPFTTHSGYFSSLYPHHQFGPFPHHHSYPEQEIVNLFIPTQAVGAIIGKKGAHIKQLARFAGASIKIAPAEGPDVSERMVIITGPPEAQFKAQGRIFGKLKEENFFNPKEEVKLEAHIRVPSSTAGRVIGKGGKTVNELQNLTSAEVIVPRDQTPDENEEVIVRIIGHFFASQTAQRKIREIVQQVKQQEQKYPQGVASQRSK

SEQ ID NO: 36326 - protein, 556 aa, Homo sapiens
MMNKLYIGNLSPAVTADDLRQLFGDRKLPLAGQVLLKSGYAFVDYPDQNWAIRAIETLSGKVELHGKIMEVDYSVSKKLRSRKIQIRNIPPHLQWEVLDGLLAQYGTVENVEQVNTDTETAVVNVTYATREEAKIAMEKLSGHQFENYSFKISYIPDEEVSSPSPPQRAQRGDHSSREQGHAPGGTSQARQIDFPLRILVPTQFVGAIIGKEGLTIKNITKQTQSRVDIHRKENSGAAEKPVTIHATPEGTSEACRMILEIMQKEADETKLAEEIPLKILAHNGLVGRLIGKEGRNLKKIEHETGTKITISSLQDLSIYNPERTITVKGTVEACASAEIEIMKKLREAFENDMLAVNTHSGYFSSLYPHHQFGPFPHHHSYPEQEIVNLFIPTQAVGAIIGKKGAHIKQLARFAGASIKIAPAEGPDVSERMVIITGPPEAQFKAQGRIFGKLKEENFFNPKEEVKLEAHIRVPSSTAGRVIGKGGKTVNELQNLTSAEVIVPRDQTPDENEEVIVRIIGHFFASQTAQRKIREIVQQVKQQEQKYPQGVASQRSK

SEQ ID NO: 36327 - protein, 536 aa, Homo sapiens
MFSCPGHYHVDGFLNPGSRKIQIRNIPPHLQWEVLDGLLAQYGTVENVEQVNTDTETAVVNVTYATREEAKIAMEKLSGHQFENYSFKISYIPDEEVSSPSPPQRAQRGDHSSREQGHAPGGTSQARQIDFPLRILVPTQFVGAIIGKEGLTIKNITKQTQSRVDIHRKENSGAAEKPVTIHATPEGTSEACRMILEIMQKEADETKLAEEIPLKILAHNGLVGRLIGKEGRNLKKIEHETGTKITISSLQDLSIYNPERTITVKGTVEACASAEIEIMKKLREAFENDMLAVNQQANLIPGLNLSALGIFSTGLSVLSPPAGPRGAPPAAPYHPFTTHSGYFSSLYPHHQFGPFPHHHSYPEQEIVNLFIPTQAVGAIIGKKGAHIKQLARFAGASIKIAPAEGPDVSERMVIITGPPEAQFKAQGRIFGKLKEENFFNPKEEVKLEAHIRVPSSTAGRVIGKGGKTVNELQNLTSAEVIVPRDQTPDENEEVIVRIIGHFFASQTAQRKIREIVQQVKQQEQKYPQGVASQRSK

SEQ ID NO: 36328 - protein, 542 aa, Homo sapiens
MFSCPGHYHVDGFLNPGSRKIQIRNIPPHLQWEVLDGLLAQYGTVENVEQVFAFSLVNTDTETAVVNVTYATREEAKIAMEKLSGHQFENYSFKISYIPDEEVSSPSPPQRAQRGDHSSREQGHAPGGTSQARQIDFPLRILVPTQFVGAIIGKEGLTIKNITKQTQSRVDIHRKENSGAAEKPVTIHATPEGTSEACRMILEIMQKEADETKLAEEIPLKILAHNGLVGRLIGKEGRNLKKIEHETGTKITISSLQDLSIYNPERTITVKGTVEACASAEIEIMKKLREAFENDMLAVNQQANLIPGLNLSALGIFSTGLSVLSPPAGPRGAPPAAPYHPFTTHSGYFSSLYPHHQFGPFPHHHSYPEQEIVNLFIPTQAVGAIIGKKGAHIKQLARFAGASIKIAPAEGPDVSERMVIITGPPEAQFKAQGRIFGKLKEENFFNPKEEVKLEAHIRVPSSTAGRVIGKGGKTVNELQNLTSAEVIVPRDQTPDENEEVIVRIIGHFFASQTAQRKIREIVQQVKQQEQKYPQGVASQRSK

SEQ ID NO: 36329 - protein, 493 aa, Homo sapiens
MFSCPGHYHVDGFLNPGSRKIQIRNIPPHLQWEVLDGLLAQYGTVENVEQVNTDTETAVVNVTYATREEAKIAMEKLSGHQFENYSFKISYIPDEEVSSPSPPQRAQRGDHSSREQGHAPGGTSQARQIDFPLRILVPTQFVGAIIGKEGLTIKNITKQTQSRVDIHRKENSGAAEKPVTIHATPEGTSEACRMILEIMQKEADETKLAEEIPLKILAHNGLVGRLIGKEGRNLKKIEHETGTKITISSLQDLSIYNPERTITVKGTVEACASAEIEIMKKLREAFENDMLAVNTHSGYFSSLYPHHQFGPFPHHHSYPEQEIVNLFIPTQAVGAIIGKKGAHIKQLARFAGASIKIAPAEGPDVSERMVIITGPPEAQFKAQGRIFGKLKEENFFNPKEEVKLEAHIRVPSSTAGRVIGKGGKTVNELQNLTSAEVIVPRDQTPDENEEVIVRIIGHFFASQTAQRKIREIVQQVKQQEQKYPQGVASQRSK

SEQ ID NO: 36330 - protein, 531 aa, Homo sapiens
MEVDYSVSKKLRSRKIQIRNIPPHLQWEVLDGLLAQYGTVENVEQVNTDTETAVVNVTYATREEAKIAMEKLSGHQFENYSFKISYIPDEEVSSPSPPQRAQRGDHSSREQGHAPGGTSQARQIDFPLRILVPTQFVGAIIGKEGLTIKNITKQTQSRVDIHRKENSGAAEKPVTIHATPEGTSEACRMILEIMQKEADETKLAEEIPLKILAHNGLVGRLIGKEGRNLKKIEHETGTKITISSLQDLSIYNPERTITVKGTVEACASAEIEIMKKLREAFENDMLAVNQQANLIPGLNLSALGIFSTGLSVLSPPAGPRGAPPAAPYHPFTTHSGYFSSLYPHHQFGPFPHHHSYPEQEIVNLFIPTQAVGAIIGKKGAHIKQLARFAGASIKIAPAEGPDVSERMVIITGPPEAQFKAQGRIFGKLKEENFFNPKEEVKLEAHIRVPSSTAGRVIGKGGKTVNELQNLTSAEVIVPRDQTPDENEEVIVRIIGHFFASQTAQRKIREIVQQVKQQEQKYPQGVASQRSK

SEQ ID NO: 36331 - protein, 132 aa, Homo sapiens
MDTAYPREDTRAPTPSKAGAHTALTLGAPHPPPRDHLIWSVFSTLYLNLCCLGFLALAYSIKARDQKVVGDLEAARRFGSKAKCYNILAAMWTLVPPLLLLGLVVTGALHLARLAKDSAAFFSTKFDDADYD

SEQ ID NO: 36332 - protein, 605 aa, Homo sapiens
MAEDWLDCPALGPGWKRREVFRKSGATCGRSDTYYQSPTGDRIRSKVELTRYLGPACDLTLFDFKQGILCYPAPKAHPVAVASKKRKKPSRPAKTRKRQVGPQSGEVRKEAPRDETKADTDTAPASFPAPGCCENCGISFSGDGTQRQRLKTLCKDCRAQRIAFNREQRMFKRVGCGECAACQVTEDCGACSTCLLQLPHDVASGLFCKCERRRCLRIVERSRGCGVCRGCQTQEDCGHCPICLRPPRPGLRRQWKCVQRRCLRGKHARRKGGCDSKMAARRRPGAQPLPPPPPSQSPEPTEPHPRALAPSPPAEFIYYCVDEDELQPYTNRRQNRKCGACAACLRRMDCGRCDFCCDKPKFGGSNQKRQKCRWRQCLQFAMKRLLPSVWSESEDGAGSPPPYRRRKRPSSARRHHLGPTLKPTLATRTAQPDHTQAPTKQEAGGGFVLPPPGTDLVFLREGASSPVQVPGPVAASTEALLQEAQCSGLSWVVALPQVKQEKADTQDEWTPGTAVLTSPVLVPGCPSKAVDPGLPSVKQEPPDPEEDKEENKDDSASKLAPEEEAGGAGTPVITEIFSLGGTRFRDTAVWLPRSKDLKKPGARKQ

SEQ ID NO: 36333 - protein, 586 aa, Homo sapiens
MAEDWLDCPALGPGWKRREVFRKSGATCGRSDTYYQSPTGDRIRSKVELTRYLGPACDLTLFDFKQGILCYPAPKAHPVAVASKKRKKPSRPAKTRKRQVGPQSGEVRKEAPRDETKADTDTAPASFPAPGCCENCGISFSGDGTQRQRLKTLCKDCRAQRIAFNREQRMFKRVGCGECAACQVTEDCGACSTCLLQLPHDVASGLFCKCERRRCLRIVERSRGCGVCRGCQTQEDCGHCPICLRPPRPGLRRQWKCVQRRCLRGKHARRKGGCDSKMAARRRPGAQPLPPPPPSQSPEPTEPQPYTNRRQNRKCGACAACLRRMDCGRCDFCCDKPKFGGSNQKRQKCRWRQCLQFAMKRLLPSVWSESEDGAGSPPPYRRRKRPSSARRHHLGPTLKPTLATRTAQPDHTQAPTKQEAGGGFVLPPPGTDLVFLREGASSPVQVPGPVAASTEALLQAVDPGLPSVKQEPPDPEEDKEENKDDSASKLAPEEEAGGAGTPVITEIFSLGGTRFRDTAVWLPSLQGRHSGREDGCKVWETEDTVEPTSTSWNPRGWPGTHVSLSPPPASMMWVSCRRSWCPSSQS

SEQ ID NO: 36334 - protein, 503 aa, Homo sapiens
MAEDWLDCPALGPGWKRREVFRKSGATCGRSDTYYQSPTGDRIRSKVELTRYLGPACDLTLFDFKQGILCYPAPKAHPVAVASKKRKKPSRPAKTRKRQVGPQSGEVRKEAPRDETKADTDTAPASFPAPGCCENCGISFSGDGTQRQRLKTLCKDCRAQRIAFNREQRMFKRVGCGECAACQVTEDCGACSTCLLQLPHDVASGLFCKCERRRCLRIVERSRGCGVCRGCQTQEDCGHCPICLRPPRPGLRRQWKCVQRRCLRGKHARRKGGCDSKMAARRRPGAQPLPPPPPSQSPEPTEPHPRALAPSPPAEFIYYCVDEDELKRLLPSVWSESEDGAGSPPPYRRRKRPSSARRHHLGPTLKPTLATRTAQPDHTQAPTKQEAGGGFVLPPPGTDLVFLREGASSPVQVPGPVAASTEALLQAVDPGLPSVKQEPPDPEEDKEENKDDSASKLAPEEEAGGAGTPVITEIFSLGGTRFRDTAVWLPRSKDLKKPGARKQ

SEQ ID NO: 36335 - protein, 556 aa, Homo sapiens
MAEDWLDCPALGPGWKRREVFRKSGATCGRSDTYYQSPTGDRIRSKVELTRYLGPACDLTLFDFKQGILCYPAPKAHPVAVASKKRKKPSRPAKTRKRQVGPQSGEVRKEAPRDETKADTDTAPASFPAPGCCENCGISFSGDGTQRQRLKTLCKDCRAQRIAFNREQRMFKSRGCGVCRGCQTQEDCGHCPICLRPPRPGLRRQWKCVQRRCLRGKHARRKGGCDSKMAARRRPGAQPLPPPPPSQSPEPTEPHPRALAPSPPAEFIYYCVDEDELQPYTNRRQNRKCGACAACLRRMDCGRCDFCCDKPKFGGSNQKRQKCRWRQCLQFAMKRLLPSVWSESEDGAGSPPPYRRRKRPSSARRHHLGPTLKPTLATRTAQPDHTQAPTKQEAGGGFVLPPPGTDLVFLREGASSPVQVPGPVAASTEALLQEAQCSGLSWVVALPQVKQEKADTQDEWTPGTAVLTSPVLVPGCPSKAVDPGLPSVKQEPPDPEEDKEENKDDSASKLAPEEEAGGAGTPVITEIFSLGGTRFRDTAVWLPRSKDLKKPGARKQ

SEQ ID NO: 36336 - protein, 550 aa, Homo sapiens
MAEDWLDCPALGPGWKRREVFRKSGATCGRSDTYYQSPTGDRIRSKVELTRYLGPACDLTLFDFKQGILCYPAPKAHPVAVASKKRKKPSRPAKTRKRQVGPQSGEVRKEAPRDETKADTDTAPASFPAPGCCENCGISFSGDGTQRQRLKTLCKDCRAQRIAFNREQRMFKRVGCGECAACQVTEDCGACSTCLLQLPHDVASGLFCKCERRRCLRIVERSRGCGVCRGCQTQEDCGHCPICLRPPRPGLRRQWKCVQRRCLRGKHARRKGGCDSKMAARRRPGAQPLPPPPPSQSPEPTEPHPRALAPSPPAEFIYYCVDEDELQPYTNRRQNRKCGACAACLRRMDCGRCDFCCDKPKFGGSNQKRQKCRWRQCLQFAMKRLLPSVWSESEDGAGSPPPYRRRKRPSSARRHHLGPTLKPTLATRTAQPDHTQAPTKQEAGGGFVLPPPGTDLVFLREGASSPVQVPGPVAASTEALLQAVDPGLPSVKQEPPDPEEDKEENKDDSASKLAPEEEAGGAGTPVEPTTQPQYSGNFDNDLYEIYLIDI

SEQ ID NO: 36337 - protein, 549 aa, Homo sapiens
MAEDWLDCPALGPGWKRREVFRKSGATCGRSDTYYQSPTGDRIRSKVELTRYLGPACDLTLFDFKQGILCYPAPKAHPVAVASKKRKKPSRPAKTRKRQVGPQSGEVRKEAPRDETKADTDTAPASFPAPGCCENCGISFSGDGTQRQRLKTLCKDCRAQRIAFNREQRMFKRVGCGECAACQVTEDCGACSTCLLQLPHDVASGLFCKCERRRCLRIVERSRGCGVCRGCQTQEDCGHCPICLRPPRPGLRRQWKCVQRRCLRGKHARRKGGCDSKMAARRRPGAQPLPPPPPSQSPEPTEPHPRALAPSPPAEFIYYCVDEDELKRLLPSVWSESEDGAGSPPPYRRRKRPSSARRHHLGPTLKPTLATRTAQPDHTQAPTKQEAGGGFVLPPPGTDLVFLREGASSPVQVPGPVAASTEALLQEAQCSGLSWVVALPQVKQEKADTQDEWTPGTAVLTSPVLVPGCPSKAVDPGLPSVKQEPPDPEEDKEENKDDSASKLAPEEEAGGAGTPVITEIFSLGGTRFRDTAVWLPRSKDLKKPGARKQ

SEQ ID NO: 36338 - protein, 536 aa, Homo sapiens
MAEDWLDCPALGPGWKRREVFRKSGATCGRSDTYYQSPTGDRIRSKVELTRYLGPACDLTLFDFKQGILCYPAPKAHPVAVASKKRKKPSRPAKTRKRQVGPQSGEVRKEAPRDETKADTDTAPASFPAPGCCENCGISFSGDGTQRQRLKTLCKDCRAQRIAFNREQRMFKRVGCGECAACQVTEDCGACSTCLLQLPHDVASGLFCKCERRRCLRIVERSRGCGVCRGCQTQEDCGHCPICLRPPRPGLRRQWKCVQRRCLRGKHARRKGGCDSKMAARRRPGAQPLPPPPPSQSPEPTEPQPYTNRRQNRKCGACAACLRRMDCGRCDFCCDKPKFGGSNQKRQKCRWRQCLQFAMKRLLPSVWSESEDGAGSPPPYRRRKRPSSARRHHLGPTLKPTLATRTAQPDHTQAPTKQEAGGGFVLPPPGTDLVFLREGASSPVQVPGPVAASTEALLQAVDPGLPSVKQEPPDPEEDKEENKDDSASKLAPEEEAGGAGTPVITEIFSLGGTRFRDTAVWLPRSKDLKKPGARKQ

SEQ ID NO: 36339 - protein, 630 aa, Homo sapiens
MAEDWLDCPALGPGWKRREVFRKSGATCGRSDTYYQSPTGDRIRSKVELTRYLGPACDLTLFDFKQGILCYPAPKAHPVAVASKKRKKPSRPAKTRKRQVGPQSGEVRKEAPRDETKADTDTAPASFPAPGCCENCGISFSGDGTQRQRLKTLCKDCRAQRIAFNREQRMFKRVGCGECAACQVTEDCGACSTCLLQLPHDVASGLFCKCERRRCLRIVERSRGCGVCRGCQTQEDCGHCPICLRPPRPGLRRQWKCVQRRCLRHLAHRLRRRHQRCQRRTPLAVAPPTGKHARRKGGCDSKMAARRRPGAQPLPPPPPSQSPEPTEPHPRALAPSPPAEFIYYCVDEDELQPYTNRRQNRKCGACAACLRRMDCGRCDFCCDKPKFGGSNQKRQKCRWRQCLQFAMKRLLPSVWSESEDGAGSPPPYRRRKRPSSARRHHLGPTLKPTLATRTAQPDHTQAPTKQEAGGGFVLPPPGTDLVFLREGASSPVQVPGPVAASTEALLQEAQCSGLSWVVALPQVKQEKADTQDEWTPGTAVLTSPVLVPGCPSKAVDPGLPSVKQEPPDPEEDKEENKDDSASKLAPEEEAGGAGTPVITEIFSLGGTRFRDTAVWLPRSKDLKKPGARKQ

SEQ ID NO: 36340 - protein, 567 aa, Homo sapiens
MAEDWLDCPALGPGWKRREVFRKSGATCGRSDTYYQSPTGDRIRSKVELTRYLGPACDLTLFDFKQGILCYPAPKAHPVAVASKKRKKPSRPAKTRKRQVGPQSGEVRKEAPRDETKADTDTAPASFPAPGCCENCGISFSGDGTQRQRLKTLCKDCRAQRIAFNREQRMFKSRGCGVCRGCQTQEDCGHCPICLRPPRPGLRRQWKCVQRRCLRGKHARRKGGCDSKMAARRRPGAQPLPPPPPSQSPEPTEPHPRALAPSPPAEFIYYCVDEDELPYTNRRQNRKCGACAACLRRMDCGRCDFCCDKPKFGGSNQKRQKCRWRQCLQFAMKRLLPSVWSESEDGAGSPPPYRRRKRPSSARRHHLGPTLKPTLATRTAQPDHTQAPTKQEAGGGFVLPPPGTDLVFLREGASSPVQVPGPVAASTEALLQEAQCSGLSWVVALPQVKQEKADTQDEWTPGTAVLTSPVLVPGCPSKAVDPGLPSVKQEPPDPEEDKEENKDDSASKLAPEEEAGGAGTPVITEIFSLGGTRFRDTAVWLPRYYHLALDWKCNCGYHLCCRSVLVP

SEQ ID NO: 36341 - protein, 535 aa, Homo sapiens
MAEDWLDCPALGPGWKRREVFRKSGATCGRSDTYYQSPTGDRIRSKVELTRYLGPACDLTLFDFKQGILCYPAPKAHPVAVASKKRKKPSRPAKTRKRQVGPQSGEVRKEAPRDETKADTDTAPASFPAPGCCENCGISFSGDGTQRQRLKTLCKDCRAQRIAFNREQRMFKRVGCGECAACQVTEDCGACSTCLLQLPHDVASGLFCKCERRRCLRIVERSRGCGVCRGCQTQEDCGHCPICLRPPRPGLRRQWKCVQRRCLRGKHARRKGGCDSKMAARRRPGAQPLPPPPPSQSPEPTEPHPRALAPSPPAEFIYYCVDEDELKRLLPSVWSESEDGAGSPPPYRRRKRPSSARRHHLGPTLKPTLATRTAQPDHTQAPTKQEAGGGFVLPPPGTDLVFLREGASSPVQVPGPVAASTEALLQAVDPGLPSVKQEPPDPEEDKEENKDDSASKLAPEEEAGGAGTPVITEIFSLGGTRFRDTAVWLPRAGTREGKMDVKCGRPRTQWSPRARAGTHEDGLEPMSVSHHLQLR

SEQ ID NO: 36342 - protein, 655 aa, Homo sapiens
MAEDWLDCPALGPGWKRREVFRKSGATCGRSDTYYQSPTGDRIRSKVELTRYLGPACDLTLFDFKQGILCYPAPKAHPVAVASKKRKKPSRPAKTRKRQVGPQSGEVRKEAPRDETKADTDTAPASFPAPGCCENCGISFSGDGTQRQRLKTLCKDCRAQRIAFNREQRMFKRVGCGECAACQVTEDCGACSTCLLQLPHDVASGLFCKCERRRCLRIVERSRGCGVCRGCQTQEDCGHCPICLRPPRPGLRRQWKCVQRRCLRGKHARRKGGCDSKMAARRRPGAQPLPPPPPSQSPEPTEPHPRALAPSPPAEFIYYCVDEDELQPYTNRRQNRKCGACAACLRRMDCGRCDFCCDKPKFGGSNQKRQKCRWRQCLQFAMKRLLPSVWSESEDGAGSPPPYRRRKRPSSARRHHLGPTLKPTLATRTAQPDHTQAPTKQEAGGGFVLPPPGTDLVFLREGASSPVQVPGPVAASTEALLQEAQCSGLSWVVALPQVKQEKADTQDEWTPGTAVLTSPVLVPGCPSKAVDPGLPSVKQEPPDPEEDKEENKDDSASKLAPEEEAGGAGTPVITEIFSLGGTRFRDTAVWLPSLQGRHSGREDGCKVWETEDTVEPTSTSWNPRGWPGTHVSLSPPPASMMWVSCRRSWCPSSQS

SEQ ID NO: 36343 - protein, 199 aa, Homo sapiens
MNCVCRLVLVVLSLWPDTAVAPGPPPGPPRVSPDPRAELDSTVLLTRSLLADTRQLAAQLRDKFPADGDHNLDSLPTLAMSAGALGALQLPGVLTRLRADLLSYLRHVQWLRRAGGSSLKTLEPELGTLQARLDRLLRRLQLLMSRLALPQPPPDPPAPPLAPPSSAWGGIRAAHAILGGLHLTLDWAVRGLLLLKTRL

SEQ ID NO: 36344 - protein, 120 aa, Homo sapiens
MSAGALGALQLPGVLTRLRADLLSYLRHVQWLRRAGGSSLKTLEPELGTLQARLDRLLRRLQLLMSRLALPQPPPDPPAPPLAPPSSAWGGIRAAHAILGGLHLTLDWAVRGLLLLKTRL

SEQ ID NO: 36345 - protein, 304 aa, Homo sapiens
MFNSVNLGNFCSPSRKERGADFGERGSCASNLYLPSCTYYMPEFSTVSSFLPQAPSRQISYPYSAQVPPVREVSYGLEPSGKWHHRNSYSSCYAAADELMHRECLPPSTVTEILMKNEGSYGGHHHPSAPHATPAGFYSSVNKNSVLPQAFDRFFDNAYCGGGDPPAEPPCSGKGEAKGEPEAPPASGLASRAEAGAEAEAEEENTNPSSSGSAHSVAKEPAKGAAPNAPRTRKKRCPYSKFQIRELEREFFFNVYINKEKRLQLSRMLNLTDRQVKIWFQNRRMKEKKLSRDRLQYFSGNPLL

SEQ ID NO: 36346 - protein, 796 aa, Homo sapiens
MSAAQVSSSRRQSCYLCDLPRMPWAMIWDFSEPVCRGCVNYEGADRIEFVIETARQLKRAHGCFQDGRSPGPPPPVGVKTVALSAKEAAAAAAAAAAAAAAAQQQQQQQQQQQQQQQQQQQQQQQQQLNHVDGSSKPAVLAAPSGLERYGLSAAAAAAAAAAAAVEQRSRFEYPPPPVSLGSSSHTARLPNGLGGPNGFPKPTPEEGPPELNRQSPNSSSAAASVASRRGTHGGLVTGLPNPGGGGGPQLTVPPNLLPQTLLNGPASAAVLPPPPPHALGSRGPPTPAPPGAPGGPACLGGTPGVSATSSSASSSTSSSVAEVGVGAGGKRPGSVSSTDQERELKEKQRNAEALAELSESLRNRAEEWASKPKMVRDTLLTLAGCTPYEVRFKKDHSLLGRVFAFDAVSKPGMDYELKLFIEYPTGSGNVYSSASGVAKQMYQDCMKDFGRGLSSGFKYLEYEKKHGSGDWRLLGDLLPEAVRFFKEGVPGADMLPQPYLDASCPMLPTALVSLSRAPSAPPGTGALPPAAPSGRGAAASLRKRKASPEPPDSAEGALKLGEEQQRQQWMANQSEALKLTMSAGGFAAPGHAAGGPPPPPPPLGPHSNRTTPPESAPQNGPSPMAALMSVADTLGTAHSPKDGSSVHSTTASARRNSSSPVSPASVPGQRRLASRNGDLNLQVAPPPPSAHPGMDQVHPQNIPDSPMANSGPLCCTICHERLEDTHFVQCPSVPSHKFCFPCSRESIKAQGATGEVYCPSGEKCPLVGSNVPWAFMQGEIATILAGDVKVKKERDP

SEQ ID NO: 36347 - protein, 749 aa, Homo sapiens
MAELGAGGDGHRGGDGAVRSETAPDSYKVQDKKNASSRPASAISGQNNNHSGNKPDPPPVLRVDDRQRLARERREEREKQLAAREIVWLEREERARQHYEKHLEERKKRLEEQRQKEERRRAAVEEKRRQRLEEDKERHEAVVRRTMERSQKPKQKHNRWSWGGSLHGSPSIHSADPDRRSVSTMNLSKYVDPVISKRLSSSSATLLNSPDRARRLQLSPWESSVVNRLLTPTHSFLARSKSTAALSGEAASCSPIIMPYKAAHSRNSMDRPKLFVTPPEGSSRRRIIHGTASYKKERERENVLFLTSGTRRAVSPSNPKARQPARSRLWLPSKSLPHLPGTPRPTSSLPPGSVKAAPAQVRPPSPGNIRPVKREVKVEPEKKDPEKEPQKVANEPSLKGRAPLVKVEEATVEERTPAEPEVGPAAPAMAPAPASAPAPASAPAPAPVPTPAMVSAPSSTVNASASVKTSAGTTDPEEATRLLAEKRRLAREQREKEERERREQEELERQKREELAQRVAEERTTRREEESRRLEAEQAREKEEQLQRQAEERALREREEAERAQRQKEEEARVREEAERVRQEREKHFQREEQERLERKKRLEEIMKRTRRTEATDKKTSDQRNGDIAKGALTGGTEVSALPCTTNAPGNGKPVGSPHVVTSHQSKVTVESTPDLEKQPNENGVSVQNENFEEIINLPIGSKPSRLDVTNSESPEIPLNPILAFDDEGTLGPLPQVDGVQTQQTAEVI

SEQ ID NO: 36348 - protein, 712 aa, Homo sapiens
MAELGAGGDGHRGGDGAVRSETAPDSYKVQDKKNASSRPASAISGQNNNHSGNKPDPPPVLRVDDRQRLARERREEREKQLAAREIVWLEREERARQHYEKHLEERKKRLEEQRQKEERRRAAVEEKRRQRLEEDKERHEAVVRRTMERSQKPKQKHNRWSWGGSLHGSPSIHSAARRLQLSPWESSVVNRLLTPTHSFLARSKSTAALSGEAASCSPIIMPYKAAHSRNSMDRPKLFVTPPEGSSRRRIIHGTASYKKERERENVLFLTSGTRRAVSPSNPKARQPARSRLWLPSKSLPHLPGTPRPTSSLPPGSVKAAPAQVRPPSPGNIRPVKREVKVEPEKKDPEKEPQKVANEPSLKGRAPLVKVEEATVEERTPAEPEVGPAAPAMAPAPASAPAPASAPAPAPVPTPAMVSAPSSTVNASASVKTSAGTTDPEEATRLLAEKRRLAREQREKEERERREQEELERQKREELAQRVAEERTTRREEESRRLEAEQAREKEEQLQRQAEERALREREEAERAQRQKEEEARVREEAERVRQEREKHFQREEQERLERKKRLEEIMKRTRRTEATDKKTSDQRNGDIAKGALTGGTEVSALPCTTNAPGNGKPVGSPHVVTSHQSKVTVESTPDLEKQPNENGVSVQNENFEEIINLPIGSKPSRLDVTNSESPEIPLNPILAFDDEGTLGPLPQVDGVQTQQTAEVI

SEQ ID NO: 36349 - protein, 655 aa, Homo sapiens
MAELGAGGDGHRGGDGAVRSETAPDSYKVQDKKNASSRPASAISGQNNNHSGNKPDPPPVLRVDDRQRLARERREEREKQLDPDRRSVSTMNLSKYVDPVISKRLSSSSATLLNSPDRARRLQLSPWESSVVNRLLTPTHSFLARSKSTAALSGEAASCSPIIMPYKAAHSRNSMDRPKLFVTPPEGSSRRRIIHGTASYKKERERENVLFLTSGTRRAVSPSNPKARQPARSRLWLPSKSLPHLPGTPRPTSSLPPGSVKAAPAQVRPPSPGNIRPVKREVKVEPEKKDPEKEPQKVANEPSLKGRAPLVKVEEATVEERTPAEPEVGPAAPAMAPAPASAPAPASAPAPAPVPTPAMVSAPSSTVNASASVKTSAGTTDPEEATRLLAEKRRLAREQREKEERERREQEELERQKREELAQRVAEERTTRREEESRRLEAEQAREKEEQLQRQAEERALREREEAERAQRQKEEEARVREEAERVRQEREKHFQREEQERLERKKRLEEIMKRTRRTEATDKKTSDQRNGDIAKGALTGGTEVSALPCTTNAPGNGKPVGSPHVVTSHQSKVTVESTPDLEKQPNENGVSVQNENFEEIINLPIGSKPSRLDVTNSESPEIPLNPILAFDDEGTLGPLPQVDGVQTQQTAEVI

SEQ ID NO: 36350 - protein, 734 aa, Homo sapiens
MPGSATALRHERLKKTNARPIPLGLFTINEEDEQQKNGNSRRPKAPDSYKVQDKKNASSRPASAISGQNNNHSGNKPDPPPVLRVDDRQRLARERREEREKQLAAREIVWLEREERARQHYEKHLEERKKRLEEQRQKEERRRAAVEEKRRQRLEEDKERHEAVVRRTMERSQKPKQKHNRWSWGGSLHGSPSIHSAARRLQLSPWESSVVNRLLTPTHSFLARSKSTAALSGEAASCSPIIMPYKAAHSRNSMDRPKLFVTPPEGSSRRRIIHGTASYKKERERENVLFLTSGTRRAVSPSNPKARQPARSRLWLPSKSLPHLPGTPRPTSSLPPGSVKAAPAQVRPPSPGNIRPVKREVKVEPEKKDPEKEPQKVANEPSLKGRAPLVKVEEATVEERTPAEPEVGPAAPAMAPAPASAPAPASAPAPAPVPTPAMVSAPSSTVNASASVKTSAGTTDPEEATRLLAEKRRLAREQREKEERERREQEELERQKREELAQRVAEERTTRREEESRRLEAEQAREKEEQLQRQAEERALREREEAERAQRQKEEEARVREEAERVRQEREKHFQREEQERLERKKRLEEIMKRTRRTEATDKKTSDQRNGDIAKGALTGGTEVSALPCTTNAPGNGKPVGSPHVVTSHQSKVTVESTPDLEKQPNENGVSVQNENFEEIINLPIGSKPSRLDVTNSESPEIPLNPILAFDDEGTLGPLPQVDGVQTQQTAEVI

SEQ ID NO: 36351 - protein, 603 aa, Homo sapiens
MERSQKPKQKHNRWSWGGSLHGSPSIHSADPDRRSVSTMNLSKYVDPVISKRLSSSSATLLNSPDRARRLQLSPWESSVVNRLLTPTHSFLARSKSTAALSGEAASCSPIIMPYKAAHSRNSMDRPKLFVTPPEGSSRRRIIHGTASYKKERERENVLFLTSGTRRAVSPSNPKARQPARSRLWLPSKSLPHLPGTPRPTSSLPPGSVKAAPAQVRPPSPGNIRPVKREVKVEPEKKDPEKEPQKVANEPSLKGRAPLVKVEEATVEERTPAEPEVGPAAPAMAPAPASAPAPASAPAPAPVPTPAMVSAPSSTVNASASVKTSAGTTDPEEATRLLAEKRRLAREQREKEERERREQEELERQKREELAQRVAEERTTRREEESRRLEAEQAREKEEQLQRQAEERALREREEAERAQRQKEEEARVREEAERVRQEREKHFQREEQERLERKKRLEEIMKRTRRTEATDKKTSDQRNGDIAKGALTGGTEVSALPCTTNAPGNGKPVGSPHVVTSHQSKVTVESTPDLEKQPNENGVSVQNENFEEIINLPIGSKPSRLDVTNSESPEIPLNPILAFDDEGTLGPLPQVDGVQTQQTAEVI

SEQ ID NO: 36352 - protein, 734 aa, Homo sapiens
MEDTKLYSPDSYKVQDKKNASSRPASAISGQNNNHSGNKPDPPPVLRVDDRQRLARERREEREKQLAAREIVWLEREERARQHYEKHLEERKKRLEEQRQKEERRRAAVEEKRRQRLEEDKERHEAVVRRTMERSQKPKQKHNRWSWGGSLHGSPSIHSADPDRRSVSTMNLSKYVDPVISKRLSSSSATLLNSPDRARRLQLSPWESSVVNRLLTPTHSFLARSKSTAALSGEAASCSPIIMPYKAAHSRNSMDRPKLFVTPPEGSSRRRIIHGTASYKKERERENVLFLTSGTRRAVSPSNPKARQPARSRLWLPSKSLPHLPGTPRPTSSLPPGSVKAAPAQVRPPSPGNIRPVKREVKVEPEKKDPEKEPQKVANEPSLKGRAPLVKVEEATVEERTPAEPEVGPAAPAMAPAPASAPAPASAPAPAPVPTPAMVSAPSSTVNASASVKTSAGTTDPEEATRLLAEKRRLAREQREKEERERREQEELERQKREELAQRVAEERTTRREEESRRLEAEQAREKEEQLQRQAEERALREREEAERAQRQKEEEARVREEAERVRQEREKHFQREEQERLERKKRLEEIMKRTRRTEATDKKTSDQRNGDIAKGALTGGTEVSALPCTTNAPGNGKPVGSPHVVTSHQSKVTVESTPDLEKQPNENGVSVQNENFEEIINLPIGSKPSRLDVTNSESPEIPLNPILAFDDEGTLGPLPQVDGVQTQQTAEVI

SEQ ID NO: 36353 - protein, 771 aa, Homo sapiens
MPGSATALRHERLKKTNARPIPLGLFTINEEDEQQKNGNSRRPKAPDSYKVQDKKNASSRPASAISGQNNNHSGNKPDPPPVLRVDDRQRLARERREEREKQLAAREIVWLEREERARQHYEKHLEERKKRLEEQRQKEERRRAAVEEKRRQRLEEDKERHEAVVRRTMERSQKPKQKHNRWSWGGSLHGSPSIHSADPDRRSVSTMNLSKYVDPVISKRLSSSSATLLNSPDRARRLQLSPWESSVVNRLLTPTHSFLARSKSTAALSGEAASCSPIIMPYKAAHSRNSMDRPKLFVTPPEGSSRRRIIHGTASYKKERERENVLFLTSGTRRAVSPSNPKARQPARSRLWLPSKSLPHLPGTPRPTSSLPPGSVKAAPAQVRPPSPGNIRPVKREVKVEPEKKDPEKEPQKVANEPSLKGRAPLVKVEEATVEERTPAEPEVGPAAPAMAPAPASAPAPASAPAPAPVPTPAMVSAPSSTVNASASVKTSAGTTDPEEATRLLAEKRRLAREQREKEERERREQEELERQKREELAQRVAEERTTRREEESRRLEAEQAREKEEQLQRQAEERALREREEAERAQRQKEEEARVREEAERVRQEREKHFQREEQERLERKKRLEEIMKRTRRTEATDKKTSDQRNGDIAKGALTGGTEVSALPCTTNAPGNGKPVGSPHVVTSHQSKVTVESTPDLEKQPNENGVSVQNENFEEIINLPIGSKPSRLDVTNSESPEIPLNPILAFDDEGTLGPLPQVDGVQTQQTAEVI

SEQ ID NO: 36354 - protein, 1104 aa, Homo sapiens
MEPSRALLGCLASAAAAAPPGEDGAGAGAEEEEEEEEEAAAAVGPGELGCDAPLPYWTAVFEYEAAGEDELTLRLGDVVEVLSKDSQVSGDEGWWTGQLNQRVGIFPSNYVTPRSAFSSRCQPGGEDPSCYPPIQLLEIDFAELTLEEIIGIGGFGKVYRAFWIGDEVAVKAARHDPDEDISQTIENVRQEAKLFAMLKHPNIIALRGVCLKEPNLCLVMEFARGGPLNRVLSGKRIPPDILVNWAVQIARGMNYLHDEAIVPIIHRDLKSSNILILQKVENGDLSNKILKITDFGLAREWHRTTKMSAAGTYAWMAPEVIRASMFSKGSDVWSYGVLLWELLTGEVPFRGIDGLAVAYGVAMNKLALPIPSTCPEPFAKLMEDCWNPDPHSRPSFTNILDQLTTIEESGFFEMPKDSFHCLQDNWKHEIQEMFDQLRAKEKELRTWEEELTRAALQQKNQEELLRRREQELAEREIDILERELNIIIHQLCQEKPRVKKRKGKFRKSRLKLKDGNRISLPSDFQHKFTVQASPTMDKRKSLINSRSSPPASPTIIPRLRAIQLTPGESSKTWGRSSVVPKEEGEEEEKRAPKKKGRTWGPGTLGQKELASGDEGSPQRREKANGLSTPSESPHFHLGLKSLVDGYKQWSSSAPNLVKGPRSSPALPGFTSLMEMEDEDSEGPGSGESRLQHSPSQSYLCIPFPRGEDGDGPSSDGIHEEPTPVNSATSTPQLTPTNSLKRGGAHHRRCEVALLGCGAVLAATGLGFDLLEAGKCQLLPLEEPEPPAREEKKRREGLFQRSSRPRRSTSPPSRKLFKKEEPMLLLGDPSASLTLLSLSSISECNSTRSLLRSDSDEIVVYEMPVSPVEAPPLSPCTHNPLVNVRVERFKRDPNQSLTPTHVTLTTPSQPSSHRRTPSDGALKPETLLASRSPSSNGLSPSPGAGMLKTPSPSRDPGEFPRLPDPNVVFPPTPRRWNTQQDSTLERPKTLEFLPRPRPSANRQRLDPWWFVSPSHARSTSPANSSSTETPSNLDSCFASSSSTVEERPGLPALLPFQAGPLPPTERTLLDLDAEGQSQDSTVPLCRAELNTHRPAPYEIQQEFWS

SEQ ID NO: 36355 - protein, 1118 aa, Homo sapiens
MEPSRALLGCLASAAAAAPPGEDGAGAGAEEEEEEEEEAAAAVGPGELGCDAPLPYWTAVFEYEAAGEDELTLRLGDVVEVLSKDSQVSGDEGWWTGQLNQRVGIFPSNYVTPRSAFSSRCQPGGEDPSCYPPIQLLEIDFAELTLEEIIGIGGFGKVYRAFWIGDEVAVKAARHDPDEDISQTIENVRQEAKLFAMLKHPNIIALRGVCLKEPNLCLVMEFARGGPLNRVLSGKRIPPDILVNWAVQIARGMNYLHDEAIVPIIHRDLKSSNILILQKVENGDLSNKILKITDFGLAREWHRTTKMSAAGTYAWMAPEVIRASMFSKGSDVWSYGVLLWELLTGEVPFRGIDGLAVAYGVAMNKLALPIPSTCPEPFAKLMEDCWNPDPHSRPSFTNILDQLTTIEESGFFEMPKDSFHCLQDNWKHEIQEMFDQLRAKEKELRTWEEELTRAALQQKNQEELLRRREQELAEREIDILERELNIIIHQLCQEKPRVKKRKGKFRKSRLKLKDGNRISLPSDFQHKFTVQASPTMDKRKSLINSRSSPPASPTIIPRLRAIQLTPGESSKTWGRSSVVPKEEGEEEEKRAPKKKGRTWGPGTLGQKELASGDEGSPQRREKANGLSTPSESPHFHLGLKSLVDGYKQWSSSAPNLVKGPRSSPALPGFTSLMEMALLAASWVVPIDIEEDEDSEGPGSGESRLQHSPSQSYLCIPFPRGEDGDGPSSDGIHEEPTPVNSATSTPQLTPTNSLKRGGAHHRRCEVALLGCGAVLAATGLGFDLLEAGKCQLLPLEEPEPPAREEKKRREGLFQRSSRPRRSTSPPSRKLFKKEEPMLLLGDPSASLTLLSLSSISECNSTRSLLRSDSDEIVVYEMPVSPVEAPPLSPCTHNPLVNVRVERFKRDPNQSLTPTHVTLTTPSQPSSHRRTPSDGALKPETLLASRSPSSNGLSPSPGAGMLKTPSPSRDPGEFPRLPDPNVVFPPTPRRWNTQQDSTLERPKTLEFLPRPRPSANRQRLDPWWFVSPSHARSTSPANSSSTETPSNLDSCFASSSSTVEERPGLPALLPFQAGPLPPTERTLLDLDAEGQSQDSTVPLCRAELNTHRPAPYEIQQEFWS

SEQ ID NO: 36356 - protein, 159 aa, Homo sapiens
MRLEELKRLQNPLEQVNDGKYSFENHQLAMDAENNIEKYPLNLQPLESKVKIIQRAWREYLQRQEPLGKRSPSPPSVSSEKLSSSVSMNTFSDSSTPFARAPVGKIHPYISWRLQSPGDKLPGGRKVILLYLDQLARPTGFIHTLKEPQIERLGFLTLQ

SEQ ID NO: 36357 - protein, 112 aa, Homo sapiens
MRLEELKRLQNPLEQVNDGKYSFENHQLAMDAENNIEKYPLNLQPLESKVKIIQRAWREYLQRQEPLGKRSPSPPSVSSEKLSSSVSMNTFSDSSTPVSVMFLFLCPDLTFN

SEQ ID NO: 36358 - protein, 132 aa, Homo sapiens
MRLEELKRLQNPLEQVNDGKYSFENIQRAWREYLQRQEPLGKRSPSPPSVSSEKLSSSVSMNTFSDSSTPFARAPVGKIHPYISWRLQSPGDKLPGGRKVILLYLDQLARPTGFIHTLKEPQIERLGFLTLQ

SEQ ID NO: 36359 - protein, 818 aa, Homo sapiens
MSEGAYQRLWESSHATLQELLDQEQLLLEPAPDRERQSFQYRLASLYLHYLGLLRRFDTVYDQMVQPQKRRLLRRLLDGVAGRVLELKDELVRADLCENHCLDRVLQDFKLTPADLEVPIPKYFLLEQSTTVRERGLILAEILSRLEPVSSQKSFTGMHRTEAIILVQKAERARQGRLRATFMREIRRDEEQDGRIREDGWHKFSQGQAAVTIQKVWKGYLQRKRTQQDRRMEMEFIGMLPSPNQVEHLSIISQPCLVEDVQRLRQMEKEEEFRAAMVKAHDSLVETEGPDMKEKMKEQIRQWFIECHDLTGRFPDYPDASSGGSYSIFADKTPEQVRMELEMQMQENRKKEQEKSKEKGKDEKEKKKGKEEKAKKGEVDAVLQVLPSKCIPMICAGHEEYLNTWKNRCESIHPSQNYDSETLREEKRKEVELEIRIQVDELMRQELRKLRLAVDKEEERPLRAPKKTPGKKTGKKKEKDLTSDRSVESLYEELVISGLLRKSESVALKDYIGDFLYLGSTLSLVKKLPMPSLFDIRQNVALYAVLRLGSPDIHIMAPLIRSILLVGPSGMGKKMLVKAVCTETGANLFDLSPENLLGKYPGRNGAQMMVHIVFKVARLLQPSVIWIGNAEKNFYKKTPKEDKEMDPKRIKKDLTKALRLLTPGDRVMLIGTTSRPQLAEMRGLCRVYERILFMPRPDYASRYVLWKRMIEARGIQPTQHLDISALAKVSDGYTPGHILQAIQSVLSERRFLQLSKRPLVASEFLGQLVKLDPVYREEEESLKDWYFKTPLGKKSMKHRMDQLEAEEAKLDKEKKKRK

SEQ ID NO: 36360 - protein, 123 aa, Homo sapiens
MAWTPLLLLFLSHCTGSLSQAVLTQPSSLSASPGASASLTCTLCSGINVGTYRIYWYQQKPGSPPQYLLRYKSDSDKQQGSGVPSRFSGSKDASANAGILLISGLQSEDEADYYCMIWHSSAS

SEQ ID NO: 36361 - protein, 293 aa, Homo sapiens
MNIRGAPDLGQPSDDPSSGGERERIRQRMKMVIGQLEGILRELKEVAKELREVVSQIDKLTSDFDFELEPDDWTTATVSSTSSSDKAGMGGPFDLGHLDFMTADILSDSWEFCSFLDVSTPSDSVDGPESTRPGAGPDYRLMNGGTPIPNGPRVETPDSSSEEAFGAGPTVKSQLPQRTPGTRERVRFSDKVLYHALCCDDEEGDGEQEVEEEEVGLPPEPAHTEAHAGPHKPSPAPYKSRRSPLTSRHSGSTLAPEQTRRVTRNSSTQTVSDKSTQTVLPYTATRQKARGKN

SEQ ID NO: 36362 - protein, 124 aa, Homo sapiens
MAWTLLLLVLLSHCTGSLSQPVLTQPSSHSASSGASVRLTCMLSSGFSVGDFWIRWYQQKPGNPPRYLLYYHSDSNKGQGSGVPSRFSGSNDASANAGILRISGLQPEDEADYYCGTWHSNSKT

SEQ ID NO: 36363 - protein, 501 aa, Homo sapiens
MTTEEAMPEKAKCPTLEITKQDFFQEAKTLIAQHYEKINENKVQGTSINVFRKKHQKPKSGKYIPLEIDKKVTRDVVQEHRAALRRICFPKELSKSEHLQEPPQRISFKEPHIFSRRERCRPIDLITKGQVKLDKIMTIIEPVSKKMETAKQQHFEESRNRMLELLYPFPVHLYLQPGTSNLELLKEPDKAFYDWRGFVLTRSFRLACDSRRVSFSQSSSIFRDYYSKTFKTLIKKERQPIKPEPKSQPRIKGTPNKTDKLDSKVKRIGPHIEIFQVFRERKKFMITPKLIRMVTVMQAHVRGWLERKRLQRVMTKALDHGPDMKAVINMYGRLIHRVRYRRGLWRTRQILNLAELEEWMDRKKFYEIMFAKREDWPKIERNELPNFFSDCGHFPTQKQVDDTWDLVHQDGKEKYSELIKKSKAIEMLFTLYPPEGAHVPDSTLLKSTWLRPIVNGEEGYRYIVNGHPALKRANIRVVGKLVARSIRERKMRQHYKSCKVE

SEQ ID NO: 36364 - protein, 451 aa, Homo sapiens
MEAGPPGSARPAEPGPCLSGQRGADHTASASLQSVAGTEPGRHPQAVAAVLPAGGCGERMGVPTPKQFCPILERPLISYTLQALERVCWIKDIVVAVTGENMEVMKSIIQKYQHKRISLVEAGVTRHRSIFNGLKALAEDQINSKLSKPEVVIIHDAVRPFVEEGVLLKVVTAAKEHGAAGAIRPLVSTVVSPSADGCLDYSLERARHRASEMPQAFLFDVIYEAYQQCSDYDLEFGTECLQLALKYCCTKAKLVEGSPDLWKVTYKRDLYAAESIIKERISQEICVVMDTEEDNKHVGHLLEEVLKSELNHVKVTSEALGHAGRHLQQIILDQCYNFVCVNVTTSDFQETQKLLSMLEESSLCILYPVVVVSVHFLDFKLVPPSQKMENLMQIREFAKEVKERNILLYGLLISYPQDDQKLQESLRQGAIIIASLIKERNSGLIGQLLIA

SEQ ID NO: 36365 - protein, 401 aa, Homo sapiens
MEAGPPGSARPAEPGPCLSGQRGADHTASASLQSVAGTEPGRHPQAVAAVLPAGGCGERMGVPTPKQFCPILERPLISYTLQALERVCWIKDIVVAVTGENMEVMKSIIQKYQHKRISLVEAGVTRHRSIFNGLKALAEDQINSKLSKPEVVIIHDAVRPFVEEGVLLKVVTAAKEHGCSDYDLEFGTECLQLALKYCCTKAKLVEGSPDLWKVTYKRDLYAAESIIKERISQEICVVMDTEEDNKHVGHLLEEVLKSELNHVKVTSEALGHAGRHLQQIILDQCYNFVCVNVTTSDFQETQKLLSMLEESSLCILYPVVVVSVHFLDFKLVPPSQKMENLMQIREFAKEVKERNILLYGLLISYPQDDQKLQESLRQGAIIIASLIKERNSGLIGQLLIA

SEQ ID NO: 36366 - protein, 466 aa, Homo sapiens
MEPELLVRKVSALQACVRGFLVRRQFQSLRAEYEAIVREVEGDLGTLQWTEGRIPRPRFLPEKAKSHQTWKAGDRVANPEQGLWNHFPCEESEGEATWEEMVLKKSGESSANQGSLCRDHSSWLQMKQNRKPSQEKTRDTTRMENPEATDQRLPHSQPQLQELQYHRSHLAMELLWLQQAINSRKEYLLLKQTLRSPEAGPIREEPRVFLEHGEQACERDQSQPSAPLEDQSYRDRTTGELEQEDDSCHRVKSPHRSPGSLATTQKNIAGAKCREPCYSKSGPPSSIPSNSQALGDRLTKGPDDGRQTFGGTCLLQMKILEDQTPRGLKPRNHCPRKSRTQLSALYEDSNIKEMSPRKLDHKEPDCRTVRTQELGLSEDHIIWDGTLGGPEHSVLDLWRTKPPKGQAPTDRSSRDGTSNEPSHEGQKKQRTIPWRSKSPEILSSTKAGCTGEEQWRGRPWKTEPPG

SEQ ID NO: 36367 - protein, 230 aa, Homo sapiens
MEPELLVRKVSALQACVRGFLVRRQFQSLRAEYEAIVREVEGDLGTLQWTEGRIPRPRFLPEKAKSHQTWKAGDRVANPEQGLWNHFPCEESEGEATWEEMVLKKSGESSANQGSLCRDHSSWLQMKQNRKPSQEKTRDTTRMENPEATDQRLPHSQPQLQELQYHRSHLAMELLWLQQAINSRKEYLLLKQTLRSPEAGPIREEPRVFLEHGEQACERDQSQPSAPLED

SEQ ID NO: 36368 - protein, 546 aa, Homo sapiens
MEPELLVRKVSALQVRGRARGSQDFSFREIMGSRTWTSQRDATTFSPLTARQPLEIPAVPNRAEESWDPRTPCPARPHSHHTLAPDQGNGKSLKACVRGFLVRRQFQSLRAEYEAIVREVEGDLGTLQWTEGRIPRPRFLPEKAKSHQTWKAGDRVANPEQGLWNHFPCEESEGEATWEEMVLKKSGESSANQGSLCRDHSSWLQMKQNRKPSQEKTRDTTRMENPEATDQRLPHSQPQLQELQYHRSHLAMELLWLQQAINSRKEYLLLKQTLRSPEAGPIREEPRVFLEHGEQACERDQSQPSAPLEDQSYRDRTTGELEQEDDSCHRVKSPHRSPGSLATTQKNIAGAKCREPCYSKSGPPSSIPSNSQALGDRLTKGPDDGRQTFGGTCLLQMKILEDQTPRGLKPRNHCPRKSRTQLSALYEDSNIKEMSPRKLDHKEPDCRTVRTQELGLSEDHIIWDGTLGGPEHSVLDLWRTKPPKGQAPTDRSSRDGTSNEPSHEGQKKQRTIPWRSKSPEILSSTKAGCTGEEQWRGRPWKTEPPG

SEQ ID NO: 36369 - protein, 278 aa, Homo sapiens
MPDQALQQMLDRSCWVCFATDEDDRTAEWVRPCRCRGSTKWVHQACLQRWVDEKQRGNSTARVACPQCNAEYLIVFPKLGPVVYVLDLADRLISKACPFAAAGIMVGSIYWTAVTYGAVTVMQVVGHKEGLDVMERADPLFLLIGLPTIPVMLILGKMIRWEDYVLRLWRKYSNKLQILNSIFPGIGCPVPRIPAEANPLADHVSATRILCGALVFPTIATIVGKLMFSSVNSNLQRTILGGIAFVAIKGAFKVYFKQQQYLRQAHRKILNYPEQEEA

SEQ ID NO: 36370 - protein, 117 aa, Homo sapiens
MAWAPLLLTLLAHCTGSWANFMLTQPHSVSESPGKTVTISCTGSSGSIASNYVQWYQQRPGSAPTTVIYEDNQRPSGVPDRFSGSIDSSSNSASLTISGLKTEDEADYYCQSYDSSN

SEQ ID NO: 36371 - protein, 910 aa, Homo sapiens
MDTAEEDICRVCRSEGTPEKPLYHPCVCTGSIKFIHQECLVQWLKHSRKEYCELCKHRFAFTPIYSPDMPSRLPIQDIFAGLVTSIGTAIRYWFHYTLVAFAWLGVVPLTACRIYKCLFTGSVSSLLTLPLDMLSTENLLADCLQGCFVVTCTLCAFISLVWLREQIVHGGAPIWLEHAAPPFNAAGHHQNEAPAGGNGAENVAADQPANPPAENAVVGENPDAQDDQAEEEEEDNEEEDDAGVEDAADANNGAQDDMNWNALEWDRAAEELTWERMLGLDGSLVFLEHVFWVVSLNTLFILVFAFCPYHIGHFSLVGLGFEEHVQASHFEGLITTIVGYILLAITLIICHGLATLVKFHRSRRLLGVCYIVVKVSLLVVVEIGVFPLICGWWLDICSLEMFDATLKDRELSFQSAPGTTMFLHWLVGMVYVFYFASFILLLREVLRPGVLWFLRNLNDPDFNPVQEMIHLPIYRHLRRFILSVIVFGSIVLLMLWLPIRIIKSVLPNFLPYNVMLYSDAPVSELSLELLLLQVVLPALLEQGHTRQWLKGLVRAWTVTAGYLLDLHSYLLGDQEENENSANQQVNNNQHARNNNAIPVVGEGLHAAHQAILQQGGPVGFQPYRRPLNFPLRIFLLIVFMCITLLIASLICLTLPVFAGRWLMSFWTGTAKIHELYTAACGLYVCWLTIRAVTVMVAWMPQGRRVIFQKVKEWSLMIMKTLIVAVLLAGVVPLLLGLLFELVIVAPLRVPLDQTPLFYPWQDWALGVLHAKIIAAITLMGPQWWLKTVIEQVYANGIRNIDLHYIVRKLAAPVISVLLLSLCVPYVIASGVVPLLGVTAEMQNLVHRRIYPFLLMVVVLMAILSFQVRQFKRLYEHIKNDKYLVGQRLVNYERKSGKQGSSPPPPQSSQE

SEQ ID NO: 36372 - protein, 862 aa, Homo sapiens
MDTAEEDICRVCRSEGTPEKPLYHPCVCTGSIKFIHQECLVQWLKHSRKEYCELCKHRFAFTPSRIYKCLFTGSVSSLLTLPLDMLSTENLLADCLQGCFVVTCTLCAFISLVWLREQIVHGGAPIWLEHAAPPFNAAGHHQNEAPAGGNGAENVAADQPANPPAENAVVGENPDAQDDQAEEEEEDNEEEDDAGVEDAADANNGAQDDMNWNALEWDRAAEELTWERMLGLDGSLVFLEHVFWVVSLNTLFILVFAFCPYHIGHFSLVGLGFEEHVQASHFEGLITTIVGYILLAITLIICHGLATLVKFHRSRRLLGVCYIVVKVSLLVVVEIGVFPLICGWWLDICSLEMFDATLKDRELSFQSAPGTTMFLHWLVGMVYVFYFASFILLLREVLRPGVLWFLRNLNDPDFNPVQEMIHLPIYRHLRRFILSVIVFGSIVLLMLWLPIRIIKSVLPNFLPYNVMLYSDAPVSELSLELLLLQVVLPALLEQGHTRQWLKGLVRAWTVTAGYLLDLHSYLLGDQEENENSANQQVNNNQHARNNNAIPVVGEGLHAAHQAILQQGGPVGFQPYRRPLNFPLRIFLLIVFMCITLLIASLICLTLPVFAGRWLMSFWTGTAKIHELYTAACGLYVCWLTIRAVTVMVAWMPQGRRVIFQKVKEWSLMIMKTLIVAVLLAGVVPLLLGLLFELVIVAPLRVPLDQTPLFYPWQDWALGVLHAKIIAAITLMGPQWWLKTVIEQVYANGIRNIDLHYIVRKLAAPVISVLLLSLCVPYVIASGVVPLLGVTAEMQNLVHRRIYPFLLMVVVLMAILSFQVRQFKRLYEHIKNDKYLVGQRLVNYERKSGKQGSSPPPPQSSQE

SEQ ID NO: 36373 - protein, 805 aa, Homo sapiens
MDTAEEGRIYKCLFTGSVSSLLTLPLDMLSTENLLADCLQGCFVVTCTLCAFISLVWLREQIVHGGAPIWLEHAAPPFNAAGHHQNEAPAGGNGAENVAADQPANPPAENAVVGENPDAQDDQAEEEEEDNEEEDDAGVEDAADANNGAQDDMNWNALEWDRAAEELTWERMLGLDGSLVFLEHVFWVVSLNTLFILVFAFCPYHIGHFSLVGLGFEEHVQASHFEGLITTIVGYILLAITLIICHGLATLVKFHRSRRLLGVCYIVVKVSLLVVVEIGVFPLICGWWLDICSLEMFDATLKDRELSFQSAPGTTMFLHWLVGMVYVFYFASFILLLREVLRPGVLWFLRNLNDPDFNPVQEMIHLPIYRHLRRFILSVIVFGSIVLLMLWLPIRIIKSVLPNFLPYNVMLYSDAPVSELSLELLLLQVVLPALLEQGHTRQWLKGLVRAWTVTAGYLLDLHSYLLGDQEENENSANQQVNNNQHARNNNAIPVVGEGLHAAHQAILQQGGPVGFQPYRRPLNFPLRIFLLIVFMCITLLIASLICLTLPVFAGRWLMSFWTGTAKIHELYTAACGLYVCWLTIRAVTVMVAWMPQGRRVIFQKVKEWSLMIMKTLIVAVLLAGVVPLLLGLLFELVIVAPLRVPLDQTPLFYPWQDWALGVLHAKIIAAITLMGPQWWLKTVIEQVYANGIRNIDLHYIVRKLAAPVISVLLLSLCVPYVIASGVVPLLGVTAEMQNLVHRRIYPFLLMVVVLMAILSFQVRQFKRLYEHIKNDKYLVGQRLVNYERKSGKQGSSPPPPQSSQE

SEQ ID NO: 36374 - protein, 202 aa, Homo sapiens
MSCVPWKGDKAKSESLELPQAAPPQIYHEKQRRELCALHALNNVFQDSNAFTRDTLQEIFQRLSPNTMVTPHKKSMLGNGNYDVNVIMAALQTKGYEAVWWDKRRDVGVIALTNVMGFIMNLPSSLCWGPLKLPLKRQHWICVREVGGAYYNLDSKLKMPEWIGGESELRKFLKHHLRGKNCELLLVVPEEVEAHQSWRTDV

SEQ ID NO: 36375 - protein, 110 aa, Homo sapiens
MALWMRLLPLLALLALWGPDPAAAFVNQHLCGSHLVEALYLVCGERGFFYTPKTRREAEDLQVGQVELGGGPGAGSLQPLALEGSLQKRGIVEQCCTSICSLYQLENYCN

SEQ ID NO: 36376 - protein, 167 aa, Homo sapiens
MAAAGAFRLRRAASALLLRSPRLPARELSAPARLYHKKVVDHYENPRNVGSLDKTSKNVGTGLVGAPACGDVMKLQIQVDEKGKIVDARFKTFGCGSAIASSSLATEWVKGKTVEEALTIKNTDIAKELCLPPVKLHCSMLAEDAIKAALADYKLKQEPKKGEAEKK

SEQ ID NO: 36377 - protein, 142 aa, Homo sapiens
MVLIDMSVDLSTQVVDHYENPRNVGSLDKTSKNVGTGLVGAPACGDVMKLQIQVDEKGKIVDARFKTFGCGSAIASSSLATEWVKGKTVEEALTIKNTDIAKELCLPPVKLHCSMLAEDAIKAALADYKLKQEPKKGEAEKK

SEQ ID NO: 36378 - protein, 661 aa, Homo sapiens
MTGGRFDFDDGGTYCGGWEEGKAHGHGICTGPKGQGEYSGSWSHGFEVVGGYTWPSGNTYQGYWAQGKRHGLGVETKGKWMYRGEWSHGFKGRYGVRQSLCTPARYEGTWSNGLQDGYGVETYGDGGTYQGQWAGGMRHGYGVRQSVPYGMATVIRSPLRTSLASLRSEQSNGSVLHDAAAAADSPAGTRGGFVLNFHADAELAGKKKGGLFRRGSLLGSMKLRKSESKSSISSKRSSVRSDAAMSRISSSDANSTISFGDVDCDFCPVEDHVDATTTETYMGEWKNDKRNGFGVSERSNGMKYEGEWANNKRHGYGCTVFPDGSKEEGKYKNNILVRGIRKQLIPIRHTKTREKVDRAIEGAQRAAAMARTKVEIANSRTAHARAKADAADQAALAARQECDIARAVARELSPDFYQPGPDYVKQRFQEGVDAKENPEEKVPEKPPTPKESPHFYRKGTTPPRSPEASPKHSHSPASSPKPLKKQNPSSGARLNQDKRSVADEQVTAIVNKPLMSKAPTKEAGAVVPQSKYSGRHHIPNPSNGELHSQYHGYYVKLNAPQHPPVDVEDGDGSSQSSSALVHKPSANKWSPSKSVTKPVAKESKAEPKAKKSELAIPKNPASNDSCPALEKEANSGPNSIMIVLVMLLNIGLAILFVHFLT

SEQ ID NO: 36379 - protein, 249 aa, Homo sapiens
MAAGMYLEHYLDSIENLPFELQRNFQLMRDLDQRTEDLKAEIDKLATEYMSSARSLSSEEKLALLKQIQEAYGKCKEFGDDKVQLAMQTYEMVDKHIRRLDTDLARFEADLKEKQIESSDYDSSSSKGKKKGRTQKEKKAARARSKGKNSDEEAPKTAQKKLKLVRTSPEYGMPSVTFGSVHPSDVLDMPVDPNEPTYCLCHQVSYGEMIGCDNPDCSIEWFHFACVGLTTKPRGKWFCPRCSQERKKK

SEQ ID NO: 36380 - protein, 248 aa, Homo sapiens
MAAGMYLEHYLDSIENLPFELQRNFQLMRDLDQRTEDLKAEIDKLATEYMSSARSLSSEEKLALLKQIQEAYGKCKEFGDDKVQLAMQTYEMVDKHIRRLDTDLARFEADLKEKQIESSDYDSSSSKGKKSRTQKEKKAARARSKGKNSDEEAPKTAQKKLKLVRTSPEYGMPSVTFGSVHPSDVLDMPVDPNEPTYCLCHQVSYGEMIGCDNPDCSIEWFHFACVGLTTKPRGKWFCPRCSQERKKK

SEQ ID NO: 36381 - protein, 225 aa, Homo sapiens
MAAGMYLEHYLDNLKAEIDKLATEYMSSARSLSSEEKLALLKQIQEAYGKCKEFGDDKVQLAMQTYEMVDKHIRRLDTDLARFEADLKEKQIESSDYDSSSSKGKKKGRTQKEKKAARARSKGKNSDEEAPKTAQKKLKLVRTSPEYGMPSVTFGSVHPSDVLDMPVDPNEPTYCLCHQVSYGEMIGCDNPDCSIEWFHFACVGLTTKPRGKWFCPRCSQERKKK

SEQ ID NO: 36382 - protein, 245 aa, Homo sapiens
MAAGMYLEHYLDSIENLPFELQRNFQLMRDLDQRTEDLKAEIDKLATEYMSSARSLSSEEKLALLKQIQEAYGKCKEFGDDKVQLAMQTYEMVDKHIRRLDTDLARFEADLKEKQIESSDYDSSSSKGRTQKEKKAARARSKGKNSDEEAPKTAQKKLKLVRTSPEYGMPSVTFGSVHPSDVLDMPVDPNEPTYCLCHQVSYGEMIGCDNPDCSIEWFHFACVGLTTKPRGKWFCPRCSQERKKK

SEQ ID NO: 36383 - protein, 246 aa, Homo sapiens
MAAGMYLEHYLDSIENLPFELQRNFQLMRDLDQRTEDLKAEIDKLATEYMSSARSLSSEEKLALLKQIQEAYGKCKEFGDDKVQLAMQTYEMVDKHIRRLDTDLARFEADLKEKQIESSDYDSSSSKEGRTQKEKKAARARSKGKNSDEEAPKTAQKKLKLVRTSPEYGMPSVTFGSVHPSDVLDMPVDPNEPTYCLCHQVSYGEMIGCDNPDCSIEWFHFACVGLTTKPRGKWFCPRCSQERKKK

SEQ ID NO: 36384 - protein, 248 aa, Homo sapiens
MAAGMYLEHYLDSIENLPFELQRNFQLMRDLDQRTEDLKAEIDKLATEYMSSARSLSSEEKLALLKQIQEAYGKCKEFGDDKVQLAMQTYEMVDKHIRRLDTDLARFEADLKEKQIESSDYDSSSSKGKKGRTQKEKKAARARSKGKNSDEEAPKTAQKKLKLVRTSPEYGMPSVTFGSVHPSDVLDMPVDPNEPTYCLCHQVSYGEMIGCDNPDCSIEWFHFACVGLTTKPRGKWFCPRCSQERKKK

SEQ ID NO: 36385 - protein, 246 aa, Homo sapiens
MAAGMYLEHYLDSIENLPFELQRNFQLMRDLDQRTEDLKAEIDKLATEYMSSARSLSSEEKLALLKQIQEAYGKCKEFGDDKVQLAMQTYEMVDKHIRRLDTDLARFEADLKEKQIESSDYDSSSSKKGRTQKEKKAARARSKGKNSDEEAPKTAQKKLKLVRTSPEYGMPSVTFGSVHPSDVLDMPVDPNEPTYCLCHQVSYGEMIGCDNPDCSIEWFHFACVGLTTKPRGKWFCPRCSQERKKK

SEQ ID NO: 36386 - protein, 179 aa, Homo sapiens
MAAGMYLEHYLDSIENLPFELQRNFQLMRDLDQRTEDLKAEIDKLATEYMSSARSLSSEEKLALLKQIQEAYGKCKEFGDDKVQLAMQTYEMVDKHIRRLDTDLARFEADLKEKQIESSDYDSSSSKGKKKGRTQKEKKAARARSKGKNSDEEAPKTAQKKLKLVRTVPLSGSILPVWG

SEQ ID NO: 36387 - protein, 514 aa, Homo sapiens
MADYLISGGTGYVPEDGLTAQQLFASADGLTYNDFLILPGFIDFIADEVDLTSALTRKITLKTPLISSPMDTVTEADMAIAMALMGGIGFIHHNCTPEFQANEVRKVKKFEQGFITDPVVLSPSHTVGDVLEAKMRHGFSGIPITETGTMGSKLVGIVTSRDIDFLAEKDHTTLLSEVMTPRIELVVAPAGVTLKEANEILQRSKKGKLPIVNDCDELVAIIARTDLKKNRDYPLASKDSQKQLLCGAAVGTREDDKYRLDLLTQAGVDVIVLDSSQGNSVYQIAMVHYIKQKYPHLQVIGGNVVTAAQAKNLIDAGVDGLRVGMGCGSICITQEVMACGRPQGTAVYKVAEYARRFGVPIIADGGIQTVGHVVKALALGASTVMMGSLLAATTEAPGEYFFSDGVRLKKYRGMGSLDAMEKSSSSQKRYFSEGDKVKIAQGVSGSIQDKGSIQKFVPYLIAGIQHGCQDIGARSLSVLRSMMYSGELKFEKRTMSAQIEGGVHGLHSYEKRLY

SEQ ID NO: 36388 - protein, 489 aa, Homo sapiens
MADYLISGGTGYVPEDGLTAQQLFASADGLTYNDFLILPGFIDFIADEVDLTSALTRKITLKTPLISSPMDTVTEADMAIAMAKFEQGFITDPVVLSPSHTVGDVLEAKMRHGFSGIPITETGTMGSKLVGIVTSRDIDFLAEKDHTTLLSEVMTPRIELVVAPAGVTLKEANEILQRSKKGKLPIVNDCDELVAIIARTDLKKNRDYPLASKDSQKQLLCGAAVGTREDDKYRLDLLTQAGVDVIVLDSSQGNSVYQIAMVHYIKQKYPHLQVIGGNVVTAAQAKNLIDAGVDGLRVGMGCGSICITQEVMACGRPQGTAVYKVAEYARRFGVPIIADGGIQTVGHVVKALALGASTVMMGSLLAATTEAPGEYFFSDGVRLKKYRGMGSLDAMEKSSSSQKRYFSEGDKVKIAQGVSGSIQDKGSIQKFVPYLIAGIQHGCQDIGARSLSVLRSMMYSGELKFEKRTMSAQIEGGVHGLHSYEKRLY

SEQ ID NO: 36389 - protein, 563 aa, Homo sapiens
MEGPLTPPPLQGGGAAAVPEPGARQHPGHETAAQRYSARLLQAGYEPESMADYLISGGTGYVPEDGLTAQQLFASADGLTYNDFLILPGFIDFIADEVDLTSALTRKITLKTPLISSPMDTVTEADMAIAMALMGGIGFIHHNCTPEFQANEVRKVKKFEQGFITDPVVLSPSHTVGDVLEAKMRHGFSGIPITETGTMGSKLVGIVTSRDIDFLAEKDHTTLLSEVMTPRIELVVAPAGVTLKEANEILQRSKKGKLPIVNDCDELVAIIARTDLKKNRDYPLASKDSQKQLLCGAAVGTREDDKYRLDLLTQAGVDVIVLDSSQGNSVYQIAMVHYIKQKYPHLQVIGGNVVTAAQAKNLIDAGVDGLRVGMGCGSICITQEVMACGRPQGTAVYKVAEYARRFGVPIIADGGIQTVGHVVKALALGASTVMMGSLLAATTEAPGEYFFSDGVRLKKYRGMGSLDAMEKSSSSQKRYFSEGDKVKIAQGVSGSIQDKGSIQKFVPYLIAGIQHGCQDIGARSLSVLRSMMYSGELKFEKRTMSAQIEGGVHGLHSYEKRLY

SEQ ID NO: 36390 - protein, 509 aa, Homo sapiens
MADYLISGGTGYVPEDGLTAQQLFASADGLTYNDFLILPGFIDFIADEVDLTSALTRKITLKTPLISSPMDTVTEADMAIAMALMGGIGFIHHNCTPEFQANEKFEQGFITDPVVLSPSHTVGDVLEAKMRHGFSGIPITETGTMGSKLVGIVTSRDIDFLAEKDHTTLLSEVMTPRIELVVAPAGVTLKEANEILQRSKKGKLPIVNDCDELVAIIARTDLKKNRDYPLASKDSQKQLLCGAAVGTREDDKYRLDLLTQAGVDVIVLDSSQGNSVYQIAMVHYIKQKYPHLQVIGGNVVTAAQAKNLIDAGVDGLRVGMGCGSICITQEVMACGRPQGTAVYKVAEYARRFGVPIIADGGIQTVGHVVKALALGASTVMMGSLLAATTEAPGEYFFSDGVRLKKYRGMGSLDAMEKSSSSQKRYFSEGDKVKIAQGVSGSIQDKGSIQKFVPYLIAGIQHGCQDIGARSLSVLRSMMYSGELKFEKRTMSAQIEGGVHGLHSYEKRLY

SEQ ID NO: 36391 - protein, 589 aa, Homo sapiens
MEGPLTPPPLQGGGAAAVPEPGARQHPGHETAAQRYSARLLQAGYEPESCFLLELSSVVLLAGVGVQMDRLRRASMADYLISGGTGYVPEDGLTAQQLFASADGLTYNDFLILPGFIDFIADEVDLTSALTRKITLKTPLISSPMDTVTEADMAIAMALMGGIGFIHHNCTPEFQANEVRKVKKFEQGFITDPVVLSPSHTVGDVLEAKMRHGFSGIPITETGTMGSKLVGIVTSRDIDFLAEKDHTTLLSEVMTPRIELVVAPAGVTLKEANEILQRSKKGKLPIVNDCDELVAIIARTDLKKNRDYPLASKDSQKQLLCGAAVGTREDDKYRLDLLTQAGVDVIVLDSSQGNSVYQIAMVHYIKQKYPHLQVIGGNVVTAAQAKNLIDAGVDGLRVGMGCGSICITQEVMACGRPQGTAVYKVAEYARRFGVPIIADGGIQTVGHVVKALALGASTVMMGSLLAATTEAPGEYFFSDGVRLKKYRGMGSLDAMEKSSSSQKRYFSEGDKVKIAQGVSGSIQDKGSIQKFVPYLIAGIQHGCQDIGARSLSVLRSMMYSGELKFEKRTMSAQIEGGVHGLHSYEKRLY

SEQ ID NO: 36392 - protein, 599 aa, Homo sapiens
MEGPLTPPPLQGGGAAAVPEPGARQHPGHETAAQRYSARLLQAGYEPESPRLDLATHPTTPRSELSSVVLLAGVGVQMDRLRRASMADYLISGGTGYVPEDGLTAQQLFASADGLTYNDFLILPGFIDFIADEVDLTSALTRKITLKTPLISSPMDTVTEADMAIAMALMGGIGFIHHNCTPEFQANEVRKVKKFEQGFITDPVVLSPSHTVGDVLEAKMRHGFSGIPITETGTMGSKLVGIVTSRDIDFLAEKDHTTLLSEVMTPRIELVVAPAGVTLKEANEILQRSKKGKLPIVNDCDELVAIIARTDLKKNRDYPLASKDSQKQLLCGAAVGTREDDKYRLDLLTQAGVDVIVLDSSQGNSVYQIAMVHYIKQKYPHLQVIGGNVVTAAQAKNLIDAGVDGLRVGMGCGSICITQEVMACGRPQGTAVYKVAEYARRFGVPIIADGGIQTVGHVVKALALGASTVMMGSLLAATTEAPGEYFFSDGVRLKKYRGMGSLDAMEKSSSSQKRYFSEGDKVKIAQGVSGSIQDKGSIQKFVPYLIAGIQHGCQDIGARSLSVLRSMMYSGELKFEKRTMSAQIEGGVHGLHSYEKRLY

SEQ ID NO: 36393 - protein, 566 aa, Homo sapiens
MEGPLTPPPLQGGGAAAVPEPGARQHPGHETAAQRYSARLLQAGYEPESPRLDLATHPTTPRSELSSVVLLAGVGVQMDRLRRASDFLILPGFIDFIADEVDLTSALTRKITLKTPLISSPMDTVTEADMAIAMALMGGIGFIHHNCTPEFQANEVRKVKKFEQGFITDPVVLSPSHTVGDVLEAKMRHGFSGIPITETGTMGSKLVGIVTSRDIDFLAEKDHTTLLSEVMTPRIELVVAPAGVTLKEANEILQRSKKGKLPIVNDCDELVAIIARTDLKKNRDYPLASKDSQKQLLCGAAVGTREDDKYRLDLLTQAGVDVIVLDSSQGNSVYQIAMVHYIKQKYPHLQVIGGNVVTAAQAKNLIDAGVDGLRVGMGCGSICITQEVMACGRPQGTAVYKVAEYARRFGVPIIADGGIQTVGHVVKALALGASTVMMGSLLAATTEAPGEYFFSDGVRLKKYRGMGSLDAMEKSSSSQKRYFSEGDKVKIAQGVSGSIQDKGSIQKFVPYLIAGIQHGCQDIGARSLSVLRSMMYSGELKFEKRTMSAQIEGGVHGLHSYEKRLY

SEQ ID NO: 36394 - protein, 791 aa, Homo sapiens
MSNQQEKYEAQNIVNSTEESDDAFDTVTIPVPSEEPQESDQTEEHESGIEQFSESHAIHVEEQSDQSFSSLEPDNEQLMEEVISPRQVSYTPQHHEKQYAMQRPNDDSLAFLDKIKSVKESLQESVEDSLATVKVVLIPVGQEIVIPFKVDTILKYLKDHFSHLLGIPHSVLQIRYSGKILKNNETLVQHGVKPQEIVQVEIFSTNPDLYPVRRIDGLTDVSQIITVTVQTGLDQYQQVPVEIVKSDFHKPFLGGFRHKVTGVEYHNAGTQTVPKRIPERLSIFCRDTQTVFQKKNLQQTTNTTSTQMTNIGVYVSNMTDKLVTPGKYFSAAEYHAQRLKAVIVIQTYYRQWHAKIFVENLRRQKSLRLEWETQQELRKIREKEEWIKLDYHRRHNPKTNEDFEFLYNALEFWRQEELTRINQSFTGAERKAALCELLEKETQIIASIGRHRYIAYMANQEAAIQAFLDKCSAPKIWRTPNGKTIEMDTQFTIRARELQNIYKCIMLKNISQDERLDVLLTLKHTVKEHECKLTQEILELIDREVDLMMRGVKHHNLEGLRKRIATLFFHYIKTPLFNPEVAKYLKVPQDPLKFYKKIYFCHSCQLYLPSTEFSVSSTSRRIYRCRNCINLQNEAQKRESFLKYKCLLQQLYYTEADYEDDSKIAFLMQLQDIQYLTENIWASQSVLSACDNLSDLVMVRWNKSLEWSPWNCILLTKDEAAAHLKLTSIEEGYERSFIHKIKHKHILAKNYFSQVPVLASFILDDGEIDEIRWKYHSDTTPKIIESQRPPH

SEQ ID NO: 36395 - protein, 596 aa, Homo sapiens
MSNQQEKYEAQNIVNSTEESDDAFDTVTIPVPSEEPQESDQTEEHESGIEQFSESHAIHVEEQSDQSFSSLEPDNEQLMEEVISPRQVSYTPQHHEKQYAMQRPNDDSLAFLDKIKSVKESLQESVEDSLATVKVVLIPVGQEIVIPFKVDTILKYLKDHFSHLLGIPHSVLQIRYSGKILKNNETLVQHGVKPQEIVQVEIFSTNPDLYPVRRIDGLTDVSQIITVTVQTGLDQYQQVPVEIVKSDFHKPFLGGFRHKVTGVEYHNAGTQTVPKRIPERLSIFCRDTQTVFQKKNLQQTTNTTSTQMTNIGVYVSNMTDKLVTPGKYFSAAEYHAQRLKAVIVIQTYYRQWHAKIFVENLRRQKSLRLEWETQQELRKIREKEEWIKLDYHRRHNPKTNEDFEFLYNALEFWRQEELTRINQSFTGAERKAALCELLEKETQIIASIGRHRYIAYMANQEAAIQAFLDKCSAPKIWRTPNGKTIEMDTQFTIRARELQNIYKCIMLKNISQDERLDVLLTLKHTVKEHECKLTQEILELIDREVDLMMRGVKHHNLEGLRKRIATLFFHYIKTPLFNPEVAKYLKMGGEYLSMAL

SEQ ID NO: 36396 - protein, 679 aa, Homo sapiens
MESTSQDRRATHVITIKPNETVLTAFPYRPHSSLLDFLKGEPRVLGATQILLALIIVGFGTIFALNYIGFSQRLPLVVLTGYPFWGALIFILTGYLTVTDKKSKLLGQGVTGMNVISSLVAITGITFTILSYRHQDKYCQMPSFEEICVFSRTLFIVLFFLPSDVTQNSEQPAPEENDQLQFVLQEEFSSDDSTTNAQSVIFGGYAFFKLTLSRSPLVSQPGNKGREFVPDEQKQSILPSPKFSEEEIEPLPPTLEKKPSENMSIQLDSTFKQMKDEDLQSAIVQPSQMQTKLLQDQAASLQVFPSHSALKLEDISPEDLPSQALPVEGLSEQTMPSKSTSSHVKQSSNLTANDLPPQGILSQDTSSQDMLFHDMTSQDMQSLDMLSQDTPSHAMPPQDIPSQDMLSQALSAHAILPEASTSHIVQFPEIQHLLQQPPDLQPENTEPQNQQILQMSYQDIRSEVMEETKEWKSEEELHRRKSSRRHSLNQQTKALQYLRRHSLDVQAKGQKSSKRHSLDQQSKGWQSPKQKSLDQQIKDWLSPKRHSVDKQAQLNQTKEQLPDQQAEDQQAKGEQYPEGQSKDGQVKDQQTDKEQNSKKQTQDQQTEDQPAQEKKSPKGQFQNVQAEGQQAQVEKVPKLLCQDSESQIQQYQFWQFHKGNLQAGQPRTVNLLAKNPLTG

SEQ ID NO: 36397 - protein, 662 aa, Homo sapiens
MESTSQDRRATHVITIKPNETVLTAFPYRPHSSLLDFLKGEPRVLGATQILLALIIVGFGTIFALNYIGFSQRLPLVVLTGYPFWGALIGQGVTGMNVISSLVAITGITFTILSYRHQDKYCQMPSFEEICVFSRTLFIVLFFLPSDVTQNSEQPAPEENDQLQFVLQEEFSSDDSTTNAQSVIFGGYAFFKLTLSRSPLVSQPGNKGREFVPDEQKQSILPSPKFSEEEIEPLPPTLEKKPSENMSIQLDSTFKQMKDEDLQSAIVQPSQMQTKLLQDQAASLQVFPSHSALKLEDISPEDLPSQALPVEGLSEQTMPSKSTSSHVKQSSNLTANDLPPQGILSQDTSSQDMLFHDMTSQDMQSLDMLSQDTPSHAMPPQDIPSQDMLSQALSAHAILPEASTSHIVQFPEIQHLLQQPPDLQPENTEPQNQQILQMSYQDIRSEVMEETKEWKSEEELHRRKSSRRHSLNQQTKALQYLRRHSLDVQAKGQKSSKRHSLDQQSKGWQSPKQKSLDQQIKDWLSPKRHSVDKQAQLNQTKEQLPDQQAEDQQAKGEQYPEGQSKDGQVKDQQTDKEQNSKKQTQDQQTEDQPAQEKKSPKGQFQNVQAEGQQAQVEKVPKLLCQDSESQIQQYQFWQFHKGNLQAGQPRTVNLLAKNPLTG

SEQ ID NO: 36398 - protein, 58 aa, Homo sapiens
MNVISSLVAITGITFTILSYRHQDKYCQMPSFEEICVFSRTLFIDFILLTPPHSSHFL

SEQ ID NO: 36399 - protein, 712 aa, Homo sapiens
MESTSQDRRATHVITIKPNETVLTAFPYRPHSSLLDFLKGEPRVLGATQILLALIIVGFGTIFALNYIGFSQRLPLVVLTGYPFWGALIFILTGYLTVTDKKSKLLGQGVTGMNVISSLVAITGITFTILSYRHQDKYCQMPSFEEICVFSRTLFIGILLILLIISIAELSISVTIASFRSKCWTQSDEVLFFLPSDVTQNSEQPAPEENDQLQFVLQEEFSSDDSTTNAQSVIFGGYAFFKLTLSRSPLVSQPGNKGREFVPDEQKQSILPSPKFSEEEIEPLPPTLEKKPSENMSIQLDSTFKQMKDEDLQSAIVQPSQMQTKLLQDQAASLQVFPSHSALKLEDISPEDLPSQALPVEGLSEQTMPSKSTSSHVKQSSNLTANDLPPQGILSQDTSSQDMLFHDMTSQDMQSLDMLSQDTPSHAMPPQDIPSQDMLSQALSAHAILPEASTSHIVQFPEIQHLLQQPPDLQPENTEPQNQQILQMSYQDIRSEVMEETKEWKSEEELHRRKSSRRHSLNQQTKALQYLRRHSLDVQAKGQKSSKRHSLDQQSKGWQSPKQKSLDQQIKDWLSPKRHSVDKQAQLNQTKEQLPDQQAEDQQAKGEQYPEGQSKDGQVKDQQTDKEQNSKKQTQDQQTEDQPAQEKKSPKGQFQNVQAEGQQAQVEKVPKLLCQDSESQIQQYQFWQFHKGNLQAGQPRTVNLLAKNPLTG

SEQ ID NO: 36400 - protein, 240 aa, Homo sapiens
MSAAPASNGVFVVIPPNNASGLCPPPAILPTSMCQPPGIMQFEEPPLGAQTPRATQPPDLRPVETFLTGEPKVLGTVQILIGLIHLGFGSVLLMVRRGHVGIFFIEGGVPFWGGACFIISGSLSVAAEKNHTSCLVRSSLGTNILSVMAAFAGTAILLMDFGVTNRDVDRGYLAVLTIFTVLEFFTAVIAMHFGCQAIHAQASAPVIFLPNAFSADFNIPSPAASAPPAYDNVAYAQGVV

SEQ ID NO: 36401 - protein, 147 aa, Homo sapiens
MVRRGHVGIFFIEGGVPFWGGACFIISGSLSVAAEKNHTSCLVRSSLGTNILSVMAAFAGTAILLMDFGVTNRDVDRGYLAVLTIFTVLEFFTAVIAMHFGCQAIHAQASAPVIFLPNAFSADFNIPSPAASAPPAYDNVAYAQGVV

SEQ ID NO: 36402 - protein, 199 aa, Homo sapiens
MSAAPASNGVFVVIPPNNASGLCPPPAILPTSMCQPPGIMQFEEPPLGAQTPRATQPPDLRPVETFLTGEPKVLGFIISGSLSVAAEKNHTSCLVRSSLGTNILSVMAAFAGTAILLMDFGVTNRDVDRGYLAVLTIFTVLEFFTAVIAMHFGCQAIHAQASAPVIFLPNAFSADFNIPSPAASAPPAYDNVAYAQGVV

SEQ ID NO: 36403 - protein, 346 aa, Homo sapiens
MLKSRLRMFLNELKLLVLTGGGRPRAEPQPRGGRGGGCGWAPFAGCSTRDGDGDEEEYYGSEPRARGLAGDKEPRAGPLPPPAPPLPPPGALDALSLSSSLDSGLRTPQCRICFQGPEQGELLSPCRCDGSVRCTHQPCLIRWISERGSWSCELCYFKYQVLAISTKNPLQWQAISLTVIEKVQIAAIVLGSLFLVASISWLIWSSLSPSAKWQRQDLLFQICYGMYGFMDVVCIGLIIHEGSSVYRIFKRWQAVNQQWKVLNYDKTKDIGGDAGGGTAGKSGPRNSRTGPTSGATSRPPAAQRMRTLLPQRCGYTILHLLGQLRPPDARSSSHSGREVVMRVTTV

SEQ ID NO: 36404 - protein, 233 aa, Homo sapiens
MVSDKCHILDLIKAQRRQMLILPEGFREGSWSTLLFRATHHLALHPFLGLFGALSPTQWQAISLTVIEKVQIAAIVLGSLFLVASISWLIWSSLSPSAKWQRQDLLFQICYGMYGFMDVVCIGLIIHEGSSVYRIFKRWQAVNQQWKVLNYDKTKDIGGDAGGGTAGKSGPRNSRTGPTSGATSRPPAAQRMRTLLPQRCGYTILHLLGQLRPPDARSSSHSGREVVMRVTTV

SEQ ID NO: 36405 - protein, 400 aa, Homo sapiens
MTEQVIGANSVPGIIAPDNVHVIQPSNPVASGNHLQPSEVTTYPISPKVIHCDTGRANLQNLLVVNQNSAAGVQSQPIGYQRQYPVGTASLQTVPGVIQYTQGTTNLQTWPGDLQNPLNANPGLTHTSNSSQWNTSFASFTSFNPKKFINEEVRTLGVSAIQILIGLTHIFSAINPVLYYYPFVTWLSGYPLWGGLSYIVSGSLSVWAAKDPSPCVVNSSISFNIISALFAFAGIFIIITDLSLYYVTTYSKAVSGGLLPFALLEFILTCVVSHFGCQATCCRQFENVAVIPTVFSFNPANTTTSPVNATTGPVNAATGPVSATNGPVNTTIHPVNTTTSPVNTTTSPVNVTTGPVNANIGPVNVTTGPVNTTTAPAKATTSCVNAIHTSNVPPNPRTKK

SEQ ID NO: 36406 - protein, 117 aa, Homo sapiens
MPWALLLLTLLTHSAVSVVQAGLTQPPSVSKGLRQTATLTCTGNSNIVGNQGAAWLQQHQGHPPKLLSYRNNNRPSGISERFSASRSGNTASLTITGLQPEDEADYYCSALDSSLSA

SEQ ID NO: 36407 - protein, 239 aa, Homo sapiens [sequence omitted]

SEQ ID NO: 36408 - protein, 186 aa, Homo sapiens
MHQTYSRHCRPEESTFSAAMTTMQGMEQAMPGAGPGVPQLGNMAVIHSHLWKGLQEKFLKGEPKVLGVVQILTALMSLSMGITMMCMASNTYGSNPISVYIGYTIWGSVMFIISGSLSIAAGIRTTKGLGLDGMVLLLSVLEFCIAVSLSAFGCKVLCCTPGGVVLILPSHSHMAETASPTPLNEV

SEQ ID NO: 36409 - protein, 808 aa, Homo sapiens
MLHDARDRQKFFSDVQYLRDMQHKVDSEYQACLRRQEYRRDPNEKKRDQFWGQETSFERSRFSSRSSSKQSSSEEDALTEPRSSIKISAFKCDSKLPAIDQTSVKQKHKSTMTVRKAEKVDPSEPSPADQAPMVLLRKRKPNLRRFTVSPESHSPRASGDRSRQKQQWPAKVPVPRGADQVVQQEGLMCNTKLKRPNQERRNLVPSSQPMTENAPDRAKKGDPSAPSQSELHPALSQAFQGKNSPQVLSEFSGPPLTPTTVGGPRKASFRFRDEDFYSILSLNSRRESDDTEEETQSEECLWVGVRSPCSPSHHKRSRFGGTSTPQAKNKNFEENAENCRGHSSRRSEPSHGSLRISNAMEPATERPSAGQRLSQDPGLPDRESATEKDRGGSENAKKSPLSWDTKSEPRQEVGVNAENVWSDCISVEHRPGTHDSEGYWKDYLNSSQNSLDYFISGRPISPRSSVNSSYNPPASFMHSALRDDIPVDLSMSSTSVHSSDSEGNSGFHVCQPLSPIRNRTPFASAENHNYFPVNSAHEFAVREAEDTTLTSQPQGAPLYTDLLLNPQGNLSLVDSSSSSPSRMNSEGHLHVSGSLQENTPFTFFAVSHFPNQNDNGSRMAASGFTDEKETSKIKADPEKLKKLQESLLEEDSEEEGDLCRICQIAGGSPSNPLLEPCGCVGSLQFVHQECLKKWLKVKITSGADLGAVKTCEMCKQGLLVDLGDFNMIEFYQKHQQSQAQNELMNSGLYLVLLLHLYEQRFAELMRLNHNQVERERLSRNYPQPRTEENENSELGDGNEGSISQSQVV

SEQ ID NO: 36410 - protein, 132 aa, Homo sapiens
MTTMQGMEQTTPGAGPDVPQLGNIDVIHSYLCKGLQEKFFKRKPKVLGVVRILIALMSLSMGIIMMCVAFSSYEEHPIFVYVAYTIWGSVMYPYQLQQELEQQKVWNYLKNLSWRIMGSYLCFGERSELKPL

SEQ ID NO: 36411 - protein, 89 aa, Homo sapiens
MTTMQGMEQTTPGAGPDVPQLGNIDVIHSYLCKGLQEKFFKRKPKVLGYPYQLQQELEQQKVWNYLKNLSWRIMGSYLCFGERSELKPL

SEQ ID NO: 36412 - protein, 110 aa, Homo sapiens
MTTMQGMEQTTPGAGPDVPQLGNIDVIHSYLCKGLQEKFFKRKPKVLGVLCGHKFSTHSVSLSVAAGIRTTKGLELSEEFKLENNGIIFVFWREIRVETTIRRQVRRLLK

SEQ ID NO: 36413 - protein, 248 aa, Homo sapiens
MTSQPVPNETIIVLPSNVINFSQAEKPEPTNQGQDSLKKHLHAEIKVIGTIQILCGMMVLSLGIILASASFSPNFTQVTSTLLNSAYPFIGPFFFIISGSLSIATEKRLTKLLVHSSLVGSILSALSALVGFIILSVKQATLNPASLQCELDKNNIPTRSYVSYFYHDSLYTTDCYTAKASLAGTLSLMLICTLLEFCLAVLTAVLRWKQAYSDFPGSVLFLPHSYIGNSGMSSKMTHDCGYEELLTS

SEQ ID NO: 36414 - protein, 225 aa, Homo sapiens
MTSQPVPNETIIVLPSNVINFSQAEKPEPTNQGQDSLKKHLHAEIKVIGTIQILCGMMVLSLGIILASASFSPNFTQVTSTLLNSAYPFIGPFFFIISGSLSIATEKRLTKLLVHSSLVGSILSALSALVGFIILSVKQATLNPASLQCELDKNNIPTRSYVSYFYHDSLYTTDCYTAKASLAGTLSLMLICTLLEFCLAVLTAVLRWKQAYSDFPGVSVLAGFT

SEQ ID NO: 36415 - protein, 178 aa, Homo sapiens
MTSQPVPNETIIVLPSNVINFSQAEKPEPTNQGQDSLKKHLHAEIKVIGTIQILCGMMVLSLGIILASASFSPNFTQVTSTLLNSAYPFIGPFFFIISGSLSIATEKRLTKLLVHSSLVGSILSALSALVGFIILSVKQATLNPASLQWNSLSDADLHSAGILPSCAHCCAAVETGLL

SEQ ID NO: 36416 - protein, 141 aa, Homo sapiens
MTSQPVPNETIIVLPSNVINFSQAEKPEPTNQGQDSLKKHLHAEIKVIGTIQILCGMMVLSLGIILASASFSPNFTQVTSTLLNSAYPFIGPFFVSRVSEEGRMGQRGEEDANSLDFPPASLLCLICQEQGVNGESCSPVG

SEQ ID NO: 36417 - protein, 253 aa, Homo sapiens
MVLLKLLEVYRKGSAGTFHKSTIFGNTIMTSQPVPNETIIVLPSNVINFSQAEKPEPTNQGQDSLKKHLHAEIKVIGTIQILCGMMVLSLGIILASASFSPNFTQVTSTLLNSAYPFIGPFFFIISGSLSIATEKRLTKLLVHSSLVGSILSALSALVGFIILSVKQATLNPASLQCELDKNNIPTRSYVSYFYHDSLYTTDCYTAKASLAGTLSLMLICTLLEFCLAVLTAVLRWKQAYSDFPGVSVLAGFT

SEQ ID NO: 36418 - protein, 402 aa, Homo sapiens
MSFEGGHGGSRCRGAESGDAEPPPQPPPPPPPTPPPGEPAPVPAAPRYLPPLPASPETPERAAGPSEPLGEVAPRCRGADELPPPPLPLQPAGQEVAAAGDSGEGPRRLPEAAAAKGGPGESEAGAGGERERRGAGDQPETRSVCSSRSSSSGGGDQRAGHQHQHHQPICKICFQGAEQGELLNPCRCDGSVRYTHQLCLLKWISERGSWTCELCCYRYHVIAIKMKQPCQWQSISITLVEKVQMIAVILGSLFLIASVTWLLWSAFSPYAVWQRKDILFQICYGMYGFMDLVCIGLIVHEGAAVYRVFKRWRAVNLHWDVLNYDKATDIEESSRGESSTSRTLWLPLTALRNRNLVHPTQLTSPRFQCGYVLLHLFNRMRPHEDLSEDNSSGEVVMRVTSV

SEQ ID NO: 36419 - protein, 158 aa, Homo sapiens
MIAVILGSLFLIASVTWLLWSAFSPYAVWQRKDILFQICYGMYGFMDLVCIGLIVHEGAAVYRVFKRWRAVNLHWDVLNYDKATDIEESSRGESSTSRTLWLPLTALRNRNLVHPTQLTSPRFQCGYVLLHLFNRMRPHEDLSEDNSSGEVVMRVTSV

SEQ ID NO: 36420 - protein, 147 aa, Homo sapiens
MTSQPISNETIIMLPSNVINFSQAEKPEPTNQGQDSLKKRLQAKVKVIGVHSSLAGSILSALSALVGFILLSVNPAALNPASLQCKLDEKDIPTRLLLSYDYHSPYTMDCHRAKASLAGTLSLMLVSTVLEFCLAVLTAVLQWKQTV

SEQ ID NO: 36421 - protein, 250 aa, Homo sapiens
MNSMTSAVPVANSVLVVAPHNGYPVTPGIMSHVPLYPNSQPQVHLVPGNPPSLVSNVNGQPVQKALKEGKTLGAIQIIIGLAHIGLGSIMATVLVGEYLSISFYGGFPFWGGLWFIISGSLSVAAENQPYSYCLLSGSLGLNIVSAICSAVGVILFITDLSIPHPYAYPDYYPYAWGVNPGMAISGVLLVFCLLEFGIACASSHFGCQLVCCQSSNVSVIYPNIYAANPVITPEPVTSPPSYSSEIQANK

SEQ ID NO: 36422 - protein, 701 aa, Homo sapiens
MATYKVRVATGTDLLSGTRDSISLTIVGTQGESHKQLLNHFGRDFATGAVGQYTVQCPQDLGELIIIRLHKERYAFFPKDPWYCNYVQICAPNGRIYHFPAYQWMDGYETLALREATGKTTADDSLPVLLEHRKEEIRAKQDFYHWRVFLPGLPSYVHIPSYRPPVRRHRNPNRPEWNGYIPGFPILINFKATKFLNLNLRYSFLKTASFFVRLGPMALAFKVRGLLDCKHSWKRLKDIRKIFPGKKSVVSEYVAEHWAEDTFFGYQYLNGVNPGLIRRCTRIPDKFPVTDDMVAPFLGEGTCLQAELEKGNIYLADYRIMEGIPTVELSGRKQHHCAPLCLLHFGPEGKMMPIAIQLSQTPGPDCPIFLPSDSEWDWLLAKTWVRYAEFYSHEAIAHLLETHLIAEAFCLALLRNLPMCHPLYKLLIPHTRYTVQINSIGRAVLLNEGGLSAKGMSLGVEGFAGVMVRALSELTYDSLYLPNDFVERGVQDLPGYYYRDDSLAVWNALEKYVTEIITYYYPSDAAVEGDPELQSWVQEIFKECLLGRESSGFPRCLRTVPELIRYVTIVIYTCSAKHAAVNTGQMEFTAWMPNFPASMRNPPIQTKGLTTLETFMDTLPDVKTTCITLLVLWTLSREPDDRRPLGHFPDIHFVEEAPRRSIEAFRQRLNQISHDIRQRNKCLPIPYYYLDPVLIENSISI

SEQ ID NO: 36423 - protein, 1211 aa, Homo sapiens
MLSLAAKLVAFFWRTADTPREEAGQLEPELAEGDTKLKTVRGVVTRYCSDYGMIDDMIYFSSDAVTSRVLLNVGQEVIAVVEENKVSNGLKAIRVEAVSDKWEDDSRNHGSPSDCGPRVLIGCVTSLVEGAGCISQTTYFSLESVCEGFEPCKGDWVEAEYRIRPGTWSSEATSVKPLRYKRVDKVCISSLCGRNGVLEESIFFTLDSLKLPDGYTPRRGDVVNAVVVESSQSCYVWRALCMTLVKRRDAAPVHEATHFYGTILLKNKGDIEVTQVTHFGTLKEGRSKTMVIWIENKGDIPQNLVSCKLAGWDKSKQFRFQMLDKDQMCPVVSFVSVPEKENSSDENINSLNSHTKNKTSQMSESSLVNNRGISPGDCTCKGENGEKDNILSRKQMTEPEPGGLVPPGGKTFIVVICDGKNPGRCKELLLLCFSDFLIGRYLEVNVISGEESLIAAREPFSWKKLKSSQALTSAKTTVVVTAQKRNSRRQLPSFLPQYPIPDRLRKCVEQKIDILTFQPLLAELLNMSNYKEKFSTLLWLEEIYAEMELKEYNMSGIILRRNGDLLVLEVPGLAEGRPSLYAGDKLILKTQEYNGHAIEYISYVTEIHEEDVTLKINPEFEQAYNFEPMDVEFTYNRTTSRRCHFALEHVIHLGVKVLFPEEIILQSPQVTGNWNHAQDTKSSGQSTSKKNRKTMTDQAEHGTEERRVGDKDLPVLAPFTAEMSDWVDEIQTPKARKMEFFNPVLNENQKLAVKRILSGDCRPLPYILFGPPGTGKTVTIIEAVLQVHFALPDSRILVCAPSNSAADLVCLRLHESKVLQPATMVRVNATCRFEEIVIDAVKPYCRDGEDIWKASRFRIIITTCSSSGLFYQIGVRVGHFTHVFVDEAGQASEPECLIPLGLMSDISGQIVLAGDPMQLGPVIKSRLAMAYGLNVSFLERLMSRPAYQRDENAFGACGAHNPLLVTKLVKNYRSHEALLMLPSRLFYHRELEVCADPTVVTSLLGWEKLPKKGFPLIFHGVRGSEAREGKSPSWFNPAEAVQVLRYCCLLAHSISSQVSASDIGVITPYRKQVEKIRILLRNVDLMDIKVGSVEEFQGQEYLVIIISTVRSNEDRFEDDRYFLGFLSNSKRFNVAITRPKALLIVLGNPHVLVRDPCFGALLEYSITNGVYMGCDLPPALQSLQNCGEGVADPSYPVVPESTGPEKHQEPS

SEQ ID NO: 36424 - protein, 338 aa, Homo sapiens
MFRVGHFTHVFVDEAGQASEPECLIPLGLMSDISGQIVLAGDPMQLGPVIKSRLAMAYGLNVSFLERLMSRPAYQRDENAFGACGAHNPLLVTKLVKNYRSHEALLMLPSRLFYHRELEVCADPTVVTSLLGWEKLPKKGFPLIFHGVRGSEAREGKSPSWFNPAEAVQVLRYCCLLAHSISSQVSASDIGVITPYRKQVEKIRILLRNVDLMDIKVGSVEEFQGQEYLVIIISTVRSNEDRFEDDRYFLGFLSNSKRFNVAITRPKALLIVLGNPHVLVRDPCFGALLEYSITNGVYMGCDLPPALQSLQNCGEGVADPSYPVVPESTGPEKHQEPS

SEQ ID NO: 36425 - protein, 125 aa, Homo sapiens
MSDISGQVTKLVKNYRSHEALLMLPSRLFYHRELEVCADPTVVTSLLGWEKLPKKGFPLIFHGVRGSEAREGKSPSWFNPAEAVQVLRYCCLLAHSISSQVSASDIGVITPYRKQVRPAQARLVL

SEQ ID NO: 36426 - protein, 1165 aa, Homo sapiens
MLSLAAKLVAFFWRTADTPREEAGQLEPELAEGDTKLKTVRGVVTRYCSDYGMIDDMIYFSSDAVTSRVLLNVGQEVIAVVEENKVSNGLKAIRVEAVSDKWEDDSRNHGSPSDCGPRVLIGCVTSLVEGAGCISQTTYFSLESVCEGFEPCKGDWVEAEYRIRPGTWSSEATSVKPLRYKRVDKVCISSLCGRNGVLEESIFFTLDSLKLPDGYTPRRGDVVNAVVVESSQSCYVWRALCMTLVKRRDAAPVHEATHFYGTILLKNKGDIEVTQVTHFGTLKEGRSKTMVIWIENKGDIPQNLVSCKLAGWDKSKQFRFQMLDKDQMCPVVSFVSVPEKENSSDENINSLNSHTKNKTSQMSESSLVNNRGISPGDCTCKGENGEKDNILSRKQMTEPEPGGLVPPGGKTFIVVICDGKNPGRCKELLLLCFSDFLIGRYLEVNVISGEESLIAAREPFSWKKLKSSQALTSAKTTVVVTAQKRNSRRQLPSFLPQYPIPDRLRKCVEQKIDILTFQPLLAELLNMSNYKEKFSTLLWLEEIYAEMELKEYNMSGIILRRNGDLLVLEVPGLAEGRPSLYAGDKLILKTQEYNGHAIEYISYVTEIHEEDVTLKINPEFEQAYNFEPMDVEFTYNRTTSRRCHFALEHVIHLGVKVLFPEEIILQSPQVTGNWNHAQDTKSSGQSTSKKNRKTMTDQAEHGTEERRVGDKDLPVLAPFTAEMSDWVDEIQTPKARKMEFFNPVLNENQKLAVKRILSGDCRPLPYILFGPPGTGKTVTIIEAVLQVHFALPDSRILVCAPSNSAADLVCLRLHESKVLQPATMVRVNATCRFEEIVIDAVKPYCRDGEDIWKASRFRIIITTCSSSGLFYQIGVRVGHFTHVFVDEAGQASEPECLIPLGLMSDISGQIVLAGDPMQLGPVIKSRLAMAYGLNVSFLERLMSRPAYQRDENAFGACGAHNPLLVTKLVKNYRSHEALLMLPSRLFYHRELEVCADPTVVTSLLGWEKLPKKGFPLIFHGVRGSEAREGKSPSWFNPAEAVQVLRYCCLLAHSISSQVSASDIGVITPYRKQVEKIRILLRNVDLMDIKVGSVEEFQGQEYLVIIISTDPCFGALLEYSITNGVYMGCDLPPALQSLQNCGEGVADPSYPVVPESTGPEKHQEPS

SEQ ID NO: 36427 - protein, 1165 aa, Homo sapiens
MSFLPVRSVIGGGDTKLKTVRGVVTRYCSDYGMIDDMIYFSSDAVTSRVLLNVGQEVIAVVEENKVSNGLKAIRVEAVSDKWEDDSRNHGSPSDCGPRVLIGCVTSLVEGAGCISQTTYFSLESVCEGFEPCKGDWVEAEYRIRPGTWSSEATSVKPLRYKRVDKVCISSLCGRNGVLEESIFFTLDSLKLPDGYTPRRGDVVNAVVVESSQSCYVWRALCMTLVKRRDAAPVHEATHFYGTILLKNKGDIEVTQVTHFGTLKEGRSKTMVIWIENKGDIPQNLVSCKLAGWDKSKQFRFQMLDKDQMCPVVSFVSVPEKENSSDENINSLNSHTKNKTSQMSESSLVNNRGISPGDCTCKGENGEKDNILSRKQMTEPEPGGLVPPGGKTFIVVICDGKNPGRCKELLLLCFSDFLIGRYLEVNVISGEESLIAAREPFSWKKLKSSQALTSAKTTVVVTAQKRNSRRQLPSFLPQYPIPDRLRKCVEQKIDILTFQPLLAELLNMSNYKEKFSTLLWLEEIYAEMELKEYNMSGIILRRNGDLLVLEVPGLAEGRPSLYAGDKLILKTQEYNGHAIEYISYVTEIHEEDVTLKINPEFEQAYNFEPMDVEFTYNRTTSRRCHFALEHVIHLGVKVLFPEEIILQSPQVTGNWNHAQDTKSSGQSTSKKNRKTMTDQAEHGTEERRVGDKDLPVLAPFTAEMSDWVDEIQTPKARKMEFFNPVLNENQKLAVKRILSGDCRPLPYILFGPPGTGKTVTIIEAVLQVHFALPDSRILVCAPSNSAADLVCLRLHESKVLQPATMVRVNATCRFEEIVIDAVKPYCRDGEDIWKASRFRIIITTCSSSGLFYQIGVRVGHFTHVFVDEAGQASEPECLIPLGLMSDISGQIVLAGDPMQLGPVIKSRLAMAYGLNVSFLERLMSRPAYQRDENAFGACGAHNPLLVTKLVKNYRSHEALLMLPSRLFYHRELEVCADPTVVTSLLGWEKLPKKGFPLIFHGVRGSEAREGKSPSWFNPAEAVQVLRYCCLLAHSISSQVSASDIGVITPYRKQVEKIRILLRNVDLMDIKVGSVEEFQGQEYLVIIISTVRSNEDRFEDDRYFLGFLSNSKRFNVAITRPKALLIVLGNPHVLVRLWRGGGRPLLPSGARIHRTREASGAQLICSG

SEQ ID NO: 36428 - protein, 392 aa, Homo sapiens [sequence omitted]

SEQ ID NO: 36429 - protein, 399 aa, Homo sapiens
MEPPGRRECPFPSWRFPGLLLAAMVLLLYSFSDACEEPPTFEAMELIGKPKPYYEIGERVDYKCKKGYFYIPPLATHTICDRNHTWLPVSDDACYRETCPYIRDPLNGQAVPANGTYEFGYQMHFICNEGYYLIGEEILYCELKGSVAIWSGKPPICEKVLCTPPPKIKNGKHTFSEVEVFEYLDAVTYSCDPAPGPDPFSLIGESTIYCGDNSVWSRAAPECKVVKCRFPVVENGKQISGFGKKFYYKATVMFECDKGFYLDGSDTIVCDSNSTWDPPVPKCLKVLPPSSTKPPALSHSVSTSSTTKSPASSASGPRPTYKPPVSNYPGYPKPEEGILDSLDVWVIAVIVIAIVVGVAVICVVPYRYLQRRKKKGKADGGAEYATYQTKSTTPAEQRG

SEQ ID NO: 36430 - protein, 377 aa, Homo sapiens
MEPPGRRECPFPSWRFPGLLLAAMVLLLYSFSDACEEPPTFEAMELIGKPKPYYEIGERVDYKCKKGYFYIPPLATHTICDRNHTWLPVSDDACYRETCPYIRDPLNGQAVPANGTYEFGYQMHFICNEGYYLIGEEILYCELKGSVAIWSGKPPICEKVLCTPPPKIKNGKHTFSEVEVFEYLDAVTYSCDPAPGPDPFSLIGESTIYCGDNSVWSRAAPECKVVKCRFPVVENGKQISGFGKKFYYKATVMFECDKGFYLDGSDTIVCDSNSTWDPPVPKCLKVSTSSTTKSPASSASGPRPTYKPPVSNYPGYPKPEEGILDSLDVWVIAVIVIAIVVGVAVICVVPYRYLQRRKKKGTYLTDETHREVKFTSL

SEQ ID NO: 36431 - protein, 384 aa, Homo sapiens
MEPPGRRECPFPSWRFPGLLLAAMVLLLYSFSDACEEPPTFEAMELIGKPKPYYEIGERVDYKCKKGYFYIPPLATHTICDRNHTWLPVSDDACYRETCPYIRDPLNGQAVPANGTYEFGYQMHFICNEGYYLIGEEILYCELKGSVAIWSGKPPICEKVLCTPPPKIKNGKHTFSEVEVFEYLDAVTYSCDPAPGPDPFSLIGESTIYCGDNSVWSRAAPECKVVKCRFPVVENGKQISGFGKKFYYKATVMFECDKGFYLDGSDTIVCDSNSTWDPPVPKCLKVSTSSTTKSPASSASGPRPTYKPPVSNYPGYPKPEEGILDSLDVWVIAVIVIAIVVGVAVICVVPYRYLQRRKKKGKADGGAEYATYQTKSTTPAEQRG

SEQ ID NO: 36432 - protein, 362 aa, Homo sapiens
MEPPGRRECPFPSWRFPGLLLAAMVLLLYSFSDACEEPPTFEAMELIGKPKPYYEIGERVDYKCKKGYFYIPPLATHTICDRNHTWLPVSDDACYRETCPYIRDPLNGQAVPANGTYEFGYQMHFICNEGYYLIGEEILYCELKGSVAIWSGKPPICEKVLCTPPPKIKNGKHTFSEVEVFEYLDAVTYSCDPAPGPDPFSLIGESTIYCGDNSVWSRAAPECKVVKCRFPVVENGKQISGFGKKFYYKATVMFECDKGFYLDGSDTIVCDSNSTWDPPVPKCLKGPRPTYKPPVSNYPGYPKPEEGILDSLDVWVIAVIVIAIVVGVAVICVVPYRYLQRRKKKGTYLTDETHREVKFTSL

SEQ ID NO: 36433 - protein, 369 aa, Homo sapiens
MEPPGRRECPFPSWRFPGLLLAAMVLLLYSFSDACEEPPTFEAMELIGKPKPYYEIGERVDYKCKKGYFYIPPLATHTICDRNHTWLPVSDDACYRETCPYIRDPLNGQAVPANGTYEFGYQMHFICNEGYYLIGEEILYCELKGSVAIWSGKPPICEKVLCTPPPKIKNGKHTFSEVEVFEYLDAVTYSCDPAPGPDPFSLIGESTIYCGDNSVWSRAAPECKVVKCRFPVVENGKQISGFGKKFYYKATVMFECDKGFYLDGSDTIVCDSNSTWDPPVPKCLKGPRPTYKPPVSNYPGYPKPEEGILDSLDVWVIAVIVIAIVVGVAVICVVPYRYLQRRKKKGKADGGAEYATYQTKSTTPAEQRG

SEQ ID NO: 36434 - protein, 378 aa, Homo sapiens
MEPPGRRECPFPSWRFPGLLLAAMVLLLYSFSDACEEPPTFEAMELIGKPKPYYEIGERVDYKCKKGYFYIPPLATHTICDRNHTWLPVSDDACYRETCPYIRDPLNGQAVPANGTYEFGYQMHFICNEGYYLIGEEILYCELKGSVAIWSGKPPICEKVLCTPPPKIKNGKHTFSEVEVFEYLDAVTYSCDPAPGPDPFSLIGESTIYCGDNSVWSRAAPECKVVKCRFPVVENGKQISGFGKKFYYKATVMFECDKGFYLDGSDTIVCDSNSTWDPPVPKCLKVLPPSSTKPPALSHSVSTSSTTKSPASSASGYPKPEEGILDSLDVWVIAVIVIAIVVGVAVICVVPYRYLQRRKKKGTYLTDETHREVKFTSL

SEQ ID NO: 36435 - protein, 385 aa, Homo sapiens
MEPPGRRECPFPSWRFPGLLLAAMVLLLYSFSDACEEPPTFEAMELIGKPKPYYEIGERVDYKCKKGYFYIPPLATHTICDRNHTWLPVSDDACYRETCPYIRDPLNGQAVPANGTYEFGYQMHFICNEGYYLIGEEILYCELKGSVAIWSGKPPICEKVLCTPPPKIKNGKHTFSEVEVFEYLDAVTYSCDPAPGPDPFSLIGESTIYCGDNSVWSRAAPECKVVKCRFPVVENGKQISGFGKKFYYKATVMFECDKGFYLDGSDTIVCDSNSTWDPPVPKCLKVLPPSSTKPPALSHSVSTSSTTKSPASSASGYPKPEEGILDSLDVWVIAVIVIAIVVGVAVICVVPYRYLQRRKKKGKADGGAEYATYQTKSTTPAEQRG

SEQ ID NO: 36436 - protein, 363 aa, Homo sapiens
MEPPGRRECPFPSWRFPGLLLAAMVLLLYSFSDACEEPPTFEAMELIGKPKPYYEIGERVDYKCKKGYFYIPPLATHTICDRNHTWLPVSDDACYRETCPYIRDPLNGQAVPANGTYEFGYQMHFICNEGYYLIGEEILYCELKGSVAIWSGKPPICEKVLCTPPPKIKNGKHTFSEVEVFEYLDAVTYSCDPAPGPDPFSLIGESTIYCGDNSVWSRAAPECKVVKCRFPVVENGKQISGFGKKFYYKATVMFECDKGFYLDGSDTIVCDSNSTWDPPVPKCLKVSTSSTTKSPASSASGYPKPEEGILDSLDVWVIAVIVIAIVVGVAVICVVPYRYLQRRKKKGTYLTDETHREVKFTSL

SEQ ID NO: 36437 - protein, 370 aa, Homo sapiens
MEPPGRRECPFPSWRFPGLLLAAMVLLLYSFSDACEEPPTFEAMELIGKPKPYYEIGERVDYKCKKGYFYIPPLATHTICDRNHTWLPVSDDACYRETCPYIRDPLNGQAVPANGTYEFGYQMHFICNEGYYLIGEEILYCELKGSVAIWSGKPPICEKVLCTPPPKIKNGKHTFSEVEVFEYLDAVTYSCDPAPGPDPFSLIGESTIYCGDNSVWSRAAPECKVVKCRFPVVENGKQISGFGKKFYYKATVMFECDKGFYLDGSDTIVCDSNSTWDPPVPKCLKVSTSSTTKSPASSASGYPKPEEGILDSLDVWVIAVIVIAIVVGVAVICVVPYRYLQRRKKKGKADGGAEYATYQTKSTTPAEQRG

SEQ ID NO: 36438 - protein, 348 aa, Homo sapiens
MEPPGRRECPFPSWRFPGLLLAAMVLLLYSFSDACEEPPTFEAMELIGKPKPYYEIGERVDYKCKKGYFYIPPLATHTICDRNHTWLPVSDDACYRETCPYIRDPLNGQAVPANGTYEFGYQMHFICNEGYYLIGEEILYCELKGSVAIWSGKPPICEKVLCTPPPKIKNGKHTFSEVEVFEYLDAVTYSCDPAPGPDPFSLIGESTIYCGDNSVWSRAAPECKVVKCRFPVVENGKQISGFGKKFYYKATVMFECDKGFYLDGSDTIVCDSNSTWDPPVPKCLKGYPKPEEGILDSLDVWVIAVIVIAIVVGVAVICVVPYRYLQRRKKKGTYLTDETHREVKFTSL

SEQ ID NO: 36439 - protein, 355 aa, Homo sapiens
MEPPGRRECPFPSWRFPGLLLAAMVLLLYSFSDACEEPPTFEAMELIGKPKPYYEIGERVDYKCKKGYFYIPPLATHTICDRNHTWLPVSDDACYRETCPYIRDPLNGQAVPANGTYEFGYQMHFICNEGYYLIGEEILYCELKGSVAIWSGKPPICEKVLCTPPPKIKNGKHTFSEVEVFEYLDAVTYSCDPAPGPDPFSLIGESTIYCGDNSVWSRAAPECKVVKCRFPVVENGKQISGFGKKFYYKATVMFECDKGFYLDGSDTIVCDSNSTWDPPVPKCLKGYPKPEEGILDSLDVWVIAVIVIAIVVGVAVICVVPYRYLQRRKKKGKADGGAEYATYQTKSTTPAEQRG

SEQ ID NO: 36440 - protein, 364 aa, Homo sapiens
MEPPGRRECPFPSWRFPGLLLAAMVLLLYSFSDACEEPPTFEAMELIGKPKPYYEIGERVDYKCKKGYFYIPPLATHTICDRNHTWLPVSDDACYRETCPYIRDPLNGQAVPANGTYEFGYQMHFICNEGYYLIGEEILYCELKGSVAIWSGKPPICEKVLCTPPPKIKNGKHTFSEVEVFEYLDAVTYSCDPAPGPDPFSLIGESTIYCGDNSVWSRAAPECKVVKCRFPVVENGKQISGFGKKFYYKATVMFECDKGFYLDGSDTIVCDSNSTWDPPVPKCLKVSTSSTTKSPASSASGPRPTYKPPVSNYPGYPKPEEGILDSLDVWVIAVIVIAIGKQMVELNMPLTRLNQPLQQSREAE

SEQ ID NO: 36441 - protein, 349 aa, Homo sapiens
MEPPGRRECPFPSWRFPGLLLAAMVLLLYSFSDACEEPPTFEAMELIGKPKPYYEIGERVDYKCKKGYFYIPPLATHTICDRNHTWLPVSDDACYRETCPYIRDPLNGQAVPANGTYEFGYQMHFICNEGYYLIGEEILYCELKGSVAIWSGKPPICEKVLCTPPPKIKNGKHTFSEVEVFEYLDAVTYSCDPAPGPDPFSLIGESTIYCGDNSVWSRAAPECKVVKCRFPVVENGKQISGFGKKFYYKATVMFECDKGFYLDGSDTIVCDSNSTWDPPVPKCLKGPRPTYKPPVSNYPGYPKPEEGILDSLDVWVIAVIVIAIGKQMVELNMPLTRLNQPLQQSREAE

SEQ ID NO: 36442 - protein, 387 aa, Homo sapiens
MEPPGRRECPFPSWRFPGLLLAAMVLLLYSFSDACEEPPTFEAMELIGKPKPYYEIGERVDYKCKKGYFYIPPLATHTICDRNHTWLPVSDDACYRETCPYIRDPLNGQAVPANGTYEFGYQMHFICNEGYYLIGEEILYCELKGSVAIWSGKPPICEKVLCTPPPKIKNGKHTFSEVEVFEYLDAVTYSCDPAPGPDPFSLIGESTIYCGDNSVWSRAAPECKVVKCRFPVVENGKQISGFGKKFYYKATVMFECDKGFYLDGSDTIVCDSNSTWDPPVPKCLKVLPPSSTKPPALSHSTTKSPASSASGPRPTYKPPVSNYPGYPKPEEGILDSLDVWVIAVIVIAIVVGVAVICVVPYRYLQRRKKKGTYLTDETHREVKFTSL

SEQ ID NO: 36443 - protein, 336 aa, Homo sapiens
MEPPGRRECPFPSWRFPGLLLAAMVLLLYSFSGETCPYIRDPLNGQAVPANGTYEFGYQMHFICNEGYYLIGEEILYCELKGSVAIWSGKPPICEKVLCTPPPKIKNGKHTFSEVEVFEYLDAVTYSCDPAPGPDPFSLIGESTIYCGDNSVWSRAAPECKVVKCRFPVVENGKQISGFGKKFYYKATVMFECDKGFYLDGSDTIVCDSNSTWDPPVPKCLKVLPPSSTKPPALSHSVSTSSTTKSPASSASGPRPTYKPPVSNYPGYPKPEEGILDSLDVWVIAVIVIAIVVGVAVICVVPYRYLQRRKKKGKADGGAEYATYQTKSTTPAEQRG

SEQ ID NO: 36444 - protein, 795 aa, Homo sapiens
MSARTPLPTVNERDTENHTSVDGYTEPHIQPTKSSSRQNIPRCRNSITSATDEQPHIGNYRLQKTIGKGNFAKVKLARHVLTGREVAVKIIDKTQLNPTSLQKLFREVRIMKILNHPNIVKLFEVIETEKTLYLVMEYASGGEVFDYLVAHGRMKEKEARAKFRQIVSAVQYCHQKYIVHRDLKAENLLLDGDMNIKIADFGFSNEFTVGNKLDTFCGSPPYAAPELFQGKKYDGPEVDVWSLGVILYTLVSGSLPFDGQNLKELRERVLRGKYRIPFYMSTDCENLLKKLLVLNPIKRGSLEQIMKDRWMNVGHEEEELKPYTEPDPDFNDTKRIDIMVTMGFARDEINDALINQKYDEVMATYILLGRKPPEFEGGESLSSGNLCQRSRPSSDLNNSTLQSPAHLKVQRSISANQKQRRFSDHAGPSIPPAVSYTKRPQANSVESEQKEEWDKDVARKLGSTTVGSKSEMTASPLVGPERKKSSTIPSNNVYSGGSMARRNTYVCERTTDRYVALQNGKDSSLTEMSVSSISSAGSSVASAVPSARPRHQKSMSTSGHPIKVTLPTIKDGSEAYRPGTTQRVPAASPSAHSISTATPDRTRFPRGSSSRSTFHGEQLRERRSVAYNGPPASPSHETGAFAHARRGTSTGIISKITSKFVRRDPSEGEASGRTDTSRSTSGEPKERDKEEGKDSKPRSLRFTWSMKTTSSMDPNDMMREIRKVLDANNCDYEQKERFLLFCVHGDARQDSLVQWEMEVCKLPRLSLNGVRFKRISGTSIAFKNIASKIANELKL

SEQ ID NO: 36445 - protein, 645 aa, Homo sapiens
MEYASGGEVFDYLVAHGRMKEKEARAKFRQIVSAVQYCHQKYIVHRDLKAENLLLDGDMNIKIADFGFSNEFTVGNKLDTFCGSPPYAAPELFQGKKYDGPEVDVWSLGVILYTLVSGSLPFDGQNLKELRERVLRGKYRIPFYMSTDCENLLKKLLVLNPIKRGSLEQIMKDRWMNVGHEEEELKPYTEPDPDFNDTKRIDIMVTMGFARDEINDALINQKYDEVMATYILLGRKPPEFEGGESLSSGNLCQRSRPSSDLNNSTLQSPAHLKVQRSISANQKQRRFSDHAGPSIPPAVSYTKRPQANSVESEQKEEWDKDVARKLGSTTVGSKSEMTASPLVGPERKKSSTIPSNNVYSGGSMARRNTYVCERTTDRYVALQNGKDSSLTEMSVSSISSAGSSVASAVPSARPRHQKSMSTSGHPIKVTLPTIKDGSEAYRPGTTQRVPAASPSAHSISTATPDRTRFPRGSSSRSTFHGEQLRERRSVAYNGPPASPSHETGAFAHARRGTSTGIISKITSKFVRRSTSGEPKERDKEEGKDSKPRSLRFTWSMKTTSSMDPNDMMREIRKVLDANNCDYEQKERFLLFCVHGDARQDSLVQWEMEVCKLPRLSLNGVRFKRISGTSIAFKNIASKIANELKL

SEQ ID NO: 36446 - protein, 758 aa, Homo sapiens
MSARTPLPTVNERDTENHTSVDGYTEPHIQPTKSSSRQNIPRCRNSITSATDEQPHIGNYRLQKTIGKGNFAKVKLARHVLTGREVAVKIIDKTQLNPTSLQKLFREVRIMKILNHPNIGEVFDYLVAHGRMKEKEARAKFRQIVSAVQYCHQKYIVHRDLKAENLLLDGDMNIKIADFGFSNEFTVGNKLDTFCGSPPYAAPELFQGKKYDGPEVDVWSLGVILYTLVSGSLPFDGQNLKELRERVLRGKYRIPFYMSTDCENLLKKLLVLNPIKRGSLEQIMKDRWMNVGHEEEELKPYTEPDPDFNDTKRIDIMVTMGFARDEINDALINQKYDEVMATYILLGRKPPEFEGGESLSSGNLCQRSRPSSDLNNSTLQSPAHLKVQRSISANQKQRRFSDHAGPSIPPAVSYTKRPQANSVESEQKEEWDKDVARKLGSTTVGSKSEMTASPLVGPERKKSSTIPSNNVYSGGSMARRNTYVCERTTDRYVALQNGKDSSLTEMSVSSISSAGSSVASAVPSARPRHQKSMSTSGHPIKVTLPTIKDGSEAYRPGTTQRVPAASPSAHSISTATPDRTRFPRGSSSRSTFHGEQLRERRSVAYNGPPASPSHETGAFAHARRGTSTGIISKITSKFVRRSTSGEPKERDKEEGKDSKPRSLRFTWSMKTTSSMDPNDMMREIRKVLDANNCDYEQKERFLLFCVHGDARQDSLVQWEMEVCKLPRLSLNGVRFKRISGTSIAFKNIASKIANELKL

SEQ ID NO: 36447 - protein, 833 aa, Homo sapiens
MDVVDPDIFNRDPRDHYDLLQRLGGGTYGEVFKARDKVSGDLVALKMVKMEPDDDVSTLQKEILILKTCRHANIVAYHGSYLWLQKLWICMEFCGAGSLQDIYQVTGSLSELQISYVCREVLQGLAYLHSQKKIHRDIKGANILINDAGEVRLADFGISAQIGATLARRLSFIGTPYWMAPEVAAVALKGGYNELCDIWSLGITAIELAELQPPLFDVHPLRVLFLMTKSGYQPPRLKEKGKWSAAFHNFIKVTLTKSPKKRPSATKMLSHQLVSQPGLNRGLILDLLDKLKNPGKGPSIGDIEDEEPELPPAIPRRIRSTHRSSSLGIPDADCCRRHMEFRKLRGMETRPPANTARLQPPRDLRSSSPRKQLSESSDDDYDDVDIPTPAEDTPPPLPPKPKFRSPSDEGPGSMGDDGQLSPGVLVRCASGPPPNSPRPGPPPSTSSPHLTAHSEPSLWNPPSRELDKPPLLPPKKEKMKRKGCALLVKLFNGCPLRIHSTAAWTHPSTKDQHLLLGAEEGIFILNRNDQEATLEMLFPSRTTWVYSINNVLMSLSGKTPHLYSHSILGLLERKETRAGNPIAHISPHRLLARKNMVSTKIQDTKGCRACCVAEGASSGGPFLCGALETSVVLLQWYQPMNKFLLVRQVLFPLPTPLSVFALLTGPGSELPAVCIGVSPGRPGKSVLFHTVRFGALSCWLGEMSTEHRGPVQVTQVEEDMVMVLMDGSVKLVTPEGSPVRGLRTPEIPMTEAVEAVAMVGGQLQAFWKHGVQVWALGSDQLLQELRDPTLTFRLLGSPRLECSGTISPHCNLLLPGSSNSPASASRVAGITGL

SEQ ID NO: 36448 - protein, 821 aa, Homo sapiens
MDVVDPDIFNRDPRDHYDLLQRLGGGTYGEVFKARDKVSGDLVALKMVKMEPDDDVSTLQKEILILKTCRHANIVAYHGSYLWLQKLWICMEFCGAGSLQDIYQVTGSLSELQISYVCREVLQGLAYLHSQKKIHRDIKGANILINDAGEVRLADFGISAQIGATLARRLSFIGTPYWMAPEVAAVALKGGYNELCDIWSLGITAIELAELQPPLFDVHPLRVLFLMTKSGYQPPRLKEKGKWSAAFHNFIKVTLTKSPKKRPSATKMLSHQLVSQPGLNRGLILDLLDKLKNPGKGPSIGDIEDEEPELPPAIPRRIRSTHRSSSLGIPDADCCRRHMEFRKLRGMETRPPANTARLQPPRDLRSSSPRKQLSESSDDDYDDVDIPTPAEDTPPPLPPKPKFRSPSDEGPGSMGDDGQLSPGVLVRCASGPPPNSPRPGPPPSTSSPHLTAHSEPSLWNPPSRELDKPPLLPPKKEKMKRKGCALLVKLFNGCPLRIHSTAAWTHPSTKDQHLLLGAEEGIFILNRNDQEATLEMLFPSRTTWVYSINNVLMSLSGKTPHLYSHSILGLLERKETRAGNPIAHISPHRLLARKNMVSTKIQDTKGCRACCVAEGASSGGPFLCGALETSVVLLQWYQPMNKFLLVRQVLFPLPTPLSVFALLTGPGSELPAVCIGVSPGRPGKSVLFHTVRFGALSCWLGEMSTEHRGPVQVTQVEEDMVMVLMDGSVKLVTPEGSPVRGLRTPEIPMTEAVEAVAMVGGQLQAFWKHGVQVWALGSDQLLQELRDPTLTFRLLGSPRPVVVETRPVDDPTAPSNLYIQE

SEQ ID NO: 36449 - protein, 676 aa, Homo sapiens
MAEFRVRVSTGEAFGAGTWDKVSVSIVGTRGESPPLPLDNLGKEFTAGAEEDFQVTLPEDVGRVLLLRVHKAPPVLPLLGPLAPDAWFCRWFQLTPPRGGHLLFPCYQWLEGAGTLVLQEGTAKVSWADHHPVLQQQRQEELQARQEMYQWKAYNPGWPHCLDEKTVEDLELNIKYSTAKNANFYLQAGSAFAEMKIKGLLDRKGLWRSLNEMKRIFNFRRTPAAEHAFEHWQEDAFFASQFLNGLNPVLIRRCHYLPKNFPVTDAMVASVLGPGTSLQAELEKGSLFLVDHGILSGIQTNVINGKPQFSAAPMTLLYQSPGCGPLLPLAIQLSQTPGPNSPIFLPTDDKWDWLLAKTWVRNAEFSFHEALTHLLHSHLLPEVFTLATLRQLPHCHPLFKLLIPHTRYTLHINTLARELLIVPGQVVDRSTGIGIEGFSELIQRNMKQLNYSLLCLPEDIRTRGVEDIPGYYYRDDGMQIWGAVERFVSEIIGIYYPSDESVQDDRELQAWVREIFSKGFLNQESSGIPSSLETREALVQYVTMVIFTCSAKHAAVSAGQFDSCAWMPNLPPSMQLPPPTSKGLATCEGFIATLPPVNATCDVILALWLLSKEPGDQRPLGTYPDEHFTEEAPRRSIATFQSRLAQISRGIQERNQGLVLPYTYLDPPLIENSVSI

SEQ ID NO: 36450 - protein, 602 aa, Homo sapiens
MAEFRVRVSTGEAFGAGTWDKVSVSIVGTRGESPPLPLDNLGKEFTAGAEEDFQVTLPEDVGRVLLLRVHKAPPVLPLLGPLAPDAWFCRWFQLTPPRGGHLLFPCYQWLEGAGTLVLQEGTAKVSWADHHPVLQQQRQEELQARQEMYQWKAYNPGWPHCLDEKTVEDLELNIKYSTAKNANFYLQAGSAFAEMKIKGLLDRKGLWRSLNEMKRIFNFRRTPAAEHAFEHWQEDAFFASQFLNGLNPVLIRRCHYLPKNFPVTDAMVASVLGPGTSLQAELEKGSLFLVDHGILSGIQTNVINGKPQFSAAPMTLLYQSPGCGPLLPLAIQLSQTPGPNSPIFLPTDDKWDWLLAKTWVRNAEFSFHEALTHLLHSHLLPEVFTLATLRQLPHCHPLFKSTGIGIEGFSELIQRNMKQLNYSLLCLPEDIRTRGVEDIPGYYYRDDGMQIWGIPSSLETREALVQYVTMVIFTCSAKHAAVSAGQFDSCAWMPNLPPSMQLPPPTSKGLATCEGFIATLPPVNATCDVILALWLLSKEPGDQRPLGTYPDEHFTEEAPRRSIATFQSRLAQISRGIQERNQGLVLPYTYLDPPLIENSVSI

SEQ ID NO: 36451 - protein, 617 aa, Homo sapiens
MAEFRVRVSTGEAFGAGTWDKVSVSIVGTRGESPPLPLDNLGKEFTAGAEEDFQVTLPEDVGRVLLLRVHKAPPVLPLLGPLAPDAWFCRWFQLTPPRGGHLLFPCYQWLEGAGTLVLQEGTAKVSWADHHPVLQQQRQEELQARQEMYQWKAYNPGWPHCLDEKTVEDLELNIKYSTAKNANFYLQAGSAFAEMKIKGLLDRKGLWRSLNEMKRIFNFRRTPAAEHAFEHWQEDAFFASQFLNGLNPVLIRRCHYLPKNFPVTDAMVASVLGPGTSLQAELEKGSLFLVDHGILSGIQTNVINGKPQFSAAPMTLLYQSPGCGPLLPLAIQLSQTPGPNSPIFLPTDDKWDWLLAKTWVRNAEFSFHEALTHLLHSHLLPEVFTLATLRQLPHCHPLFKLLIPHTRYTLHINTLARELLIVPGQVVDRSTGIGIEGFSELIQRNMKQLNYSLLCLPEDIRTRGVEDIPGYYYRDDGMQIWGAVERFVSEIIGIYYPSDESVQDDRELQAWVREIFSKGFLNQESSGIPSSLETREALVQYVTMVIFTCSAKHAAVSAGQVRKGQRPRWQAGGDPAPQPHSALSAFSLTPVLGCPTCHPACSCHHPPPKAWQHARAS

SEQ ID NO: 36452 - protein, 647 aa, Homo sapiens
MAEFRVRVSTGEAFGAGTWDKVSVSIVGTRGESPPLPLDNLGKEFTAGAEEDFQVTLPEDVGRVLLLRVHKAPPVLPLLGPLAPDAWFCRWFQLTPPRGGHLLFPCYQWLEGAGTLVLQEGTAKVSWADHHPVLQQQRQEELQARQEMYQWKAYNPGWPHCLDEKTVEDLELNIKYSTAKNANFYLQAGSAFAEMKIKGLLDRKGLWRSLNEMKRIFNFRRTPAAEHAFEHWQEDAFFASQFLNGLNPVLIRRCHYLPKNFPVTDAMVASVLGPGTSLQAELEKGSLFLVDHGILSGIQTNVINGKPQFSAAPMTLLYQSPGCGPLLPLAIQLSQTPGPNSPIFLPTDDKWDWLLAKTWVRNAEFSFHEALTHLLHSHLLPEVFTLATLRQLPHCHPLFKSTGIGIEGFSELIQRNMKQLNYSLLCLPEDIRTRGVEDIPGYYYRDDGMQIWGAVERFVSEIIGIYYPSDESVQDDRELQAWVREIFSKGFLNQESSGIPSSLETREALVQYVTMVIFTCSAKHAAVSAGQFDSCAWMPNLPPSMQLPPPTSKGLATCEGFIATLPPVNATCDVILALWLLSKEPGDQRPLGTYPDEHFTEEAPRRSIATFQSRLAQISRGIQERNQGLVLPYTYLDPPLIENSVSI

SEQ ID NO: 36453 - protein, 788 aa, Homo sapiens
MSSARTPLPTLNERDTEQPTLGHLDSKPSSKSNMIRGRNSATSADEQPHIGNYRLLKTIGKGNFAKVKLARHILTGKEVAVKIIDKTQLNSSSLQKLFREVRIMKVLNHPNIVKLFEVIETEKTLYLVMEYASGGEVFDYLVAHGRMKEKEARAKFRQIVSAVQYCHQKFIVHRDLKAENLLLDADMNIKIADFGFSNEFTFGNKLDTFCGSPPYAAPELFQGKKYDGPEVDVWSLGVILYTLVSGSLPFDGQNLKELRERVLRGKYRIPFYMSTDCENLLKKFLILNPSKRGTLEQIMKDRWMNVGHEDDELKPYVEPLPDYKDPRRTELMVSMGYTREEIQDSLVGQRYNEVMATYLLLGYKSSELEGDTITLKPRPSADLTNSSAPSPSHKVQRSVSANPKQRRFSDQAAGPAIPTSNSYSKKTQSNNAENKRPEEDRESGRKASSTAKVPASPLPGLERKKTTPTPSTNSVLSTSTNRSRNSPLLERASLGQASIQNGKDSLTMPGSRASTASASAAVSAARPRQHQKSMSASVHPNKASGLPPTESNCEVPRPSTAPQRVPVASPSAHNISSSGGAPDRTNFPRGVSSRSTFHAGQLRQVRDQQNLPYGVTPASPSGHSQGRRGASGSIFSKFTSKFVRRNLSFRFARRNLNEPESKDRVETLRPHVVGSGGNDKEKEEFREAKPRSLRFTWSMKTTSSMEPNEMMREIRKVLDANSCQSELHEKYMLLCMHGTPGHEDFVQWEMEVCKLPRLSLNGVRFKRISGTSMAFKNIASKIANELKL

SEQ ID NO: 36454 - protein, 701 aa, Homo sapiens
MIRGRNSATSADEQPHIGNYRLLKTIGKGNFAKVKLARHILTGKEVAVKIIDKTQLNSSSLQKLFREVRIMKVLNHPNIVKLFEVIETEKTLYLVMEYASGGEVFDYLVAHGRMKEKEARAKFRQIVSAVQYCHQKFIVHRDLKAENLLLDADMNIKIADFGFSNEFTFGNKLDTFCGSPPYAAPELFQGKKYDGPEVDVWSLGVILYTLVSGSLPFDGQNLKELRERVLRGKYRIPFYMSTDCENLLKKFLILNPSKRGTLEQIMKDRWMNVGHEDDELKPYVEPLPDYKDPRRTELMVSMGYTREEIQDSLVGQRYNEVMATYLLLGYKSSELEGDTITLKPRPSADLTNSSAPSPSHKVQRSVSANPKQRRFSDQAAGPAIPTSNSYSKKTQSNNAENKRPEEDRESGRKASSTAKVPASPLPGLERKKTTPTPSTNSVLSTSTNRSRNSPLLERASLGQASIQNGKDSTAPQRVPVASPSAHNISSSGGAPDRTNFPRGVSSRSTFHAGQLRQVRDQQNLPYGVTPASPSGHSQGRRGASGSIFSKFTSKFVRRNLSFRFARRNLNEPESKDRVETLRPHVVGSGGNDKEKEEFREAKPRSLRFTWSMKTTSSMEPNEMMREIRKVLDANSCQSELHEKYMLLCMHGTPGHEDFVQWEMEVCKLPRLSLNGVRFKRISGTSMAFKNIASKIANELKL

SEQ ID NO: 36455 - protein, 746 aa, Homo sapiens
MIRGRNSATSADEQPHIGNYRLLKTIGKGNFAKVKLARHILTGKEVAVKIIDKTQLNSSSLQKLFREVRIMKVLNHPNIVKLFEVIETEKTLYLVMEYASGGEVFDYLVAHGRMKEKEARAKFRQIVSAVQYCHQKFIVHRDLKAENLLLDADMNIKIADFGFSNEFTFGNKLDTFCGSPPYAAPELFQGKKYDGPEVDVWSLGVILYTLVSGSLPFDGQNLKELRERVLRGKYRIPFYMSTDCENLLKKFLILNPSKRGTLEQIMKDRWMNVGHEDDELKPYVEPLPDYKDPRRTELMVSMGYTREEIQDSLVGQRYNEVMATYLLLGYKSSELEGDTITLKPRPSADLTNSSAPSPSHKVQRSVSANPKQRRFSDQAAGPAIPTSNSYSKKTQSNNAENKRPEEDRESGRKASSTAKVPASPLPGLERKKTTPTPSTNSVLSTSTNRSRNSPLLERASLGQASIQNGKDSLTMPGSRASTASASAAVSAARPRQHQKSMSASVHPNKASGLPPTESNCEVPRPSTAPQRVPVASPSAHNISSSGGAPDRTNFPRGVSSRSTFHAGQLRQVRDQQNLPYGVTPASPSGHSQGRRGASGSIFSKFTSKFVRRNLNEPESKDRVETLRPHVVGSGGNDKEKEEFREAKPRSLRFTWSMKTTSSMEPNEMMREIRKVLDANSCQSELHEKYMLLCMHGTPGHEDFVQWEMEVCKLPRLSLNGVRFKRISGTSMAFKNIASKIANELKL

SEQ ID NO: 36456 - protein, 725 aa, Homo sapiens
MSSARTPLPTLNERDTEQPTLGHLDSKPSSKSNMIRGRNSATSADEQPHIGNYRLLKTIGKGNFAKVKLARHILTGKEVAVKIIDKTQLNSSSLQKLFREVRIMKVLNHPNIVKLFEVIETEKTLYLVMEYASGGEVFDYLVAHGRMKEKEARAKFRQIVSAVQYCHQKFIVHRDLKAENLLLDADMNIKIADFGFSNEFTFGNKLDTFCGSPPYAAPELFQGKKYDGPEVDVWSLGVILYTLVSGSLPFDGQNLKELRERVLRGKYRIPFYMSTDCENLLKKFLILNPSKRGTLEQIMKDRWMNVGHEDDELKPYVEPLPDYKDPRRTELMVSMGYTREEIQDSLVGQRYNEVMATYLLLGYKSSELEGDTITLKPRPSADLTNSSAPSPSHKVQRSVSANPKQRRFSDQAAGPAIPTSNSYSKKTQSNNAENKRPEEDRESGRKASSTAKVPASPLPGLERKKTTPTPSTNSVLSTSTNRSRNSPLLERASLGQASIQNGKDSTAPQRVPVASPSAHNISSSGGAPDRTNFPRGVSSRSTFHAGQLRQVRDQQNLPYGVTPASPSGHSQGRRGASGSIFSKFTSKFVRRNLNEPESKDRVETLRPHVVGSGGNDKEKEEFREAKPRSLRFTWSMKTTSSMEPNEMMREIRKVLDANSCQSELHEKYMLLCMHGTPGHEDFVQWEMEVCKLPRLSLNGVRFKRISGTSMAFKNIASKIANELKL

SEQ ID NO: 36457 - protein, 719 aa, Homo sapiens
MSSARTPLPTLNERDTEQPTLGHLDSKPSSKSNMIRGRNSATSADEQPHIGNYRLLKTIGKGNFAKVKLARHILTGKEVAVKIIDKTQLNSSSLQKLFREVRIMKVLNHPNIVKLFEVIETEKTLYLVMEYASGGEVFDYLVAHGRMKEKEARAKFRQIVSAVQYCHQKFIVHRDLKAENLLLDADMNIKIADFGFSNEFTFGNKLDTFCGSPPYAAPELFQGKKYDGPEVDVWSLGVILYTLVSGSLPFDGQNLKELRERVLRGKYRIPFYMSTDCENLLKKFLILNPSKRGTLEQIMKDRWMNVGHEDDELKPYVEPLPDYKDPRRTELMVSMGYTREEIQDSLVGQRYNEVMATYLLLGYKSSELEGDTITLKPRPSADLTNSSAPSPSHKVQRSVSANPKQRRFSDQAAGPAIPTSNSYSKKTQSNNAENKRPEEDRESGRKASSTAKVPASPLPGLERKKTTPTPSTNSVLSTSTNRSRNSPLLERASLGQASIQNGKDSTAPQRVPVASPSAHNISSSGGAPDRTNFPRGVSSRSTFHAGQLRQVRDQQNLPYGVTPASPSGHSQGRRGASGSIFSKFTSKFVRRNLSFRFARRPHVVGSGGNDKEKEEFREAKPRSLRFTWSMKTTSSMEPNEMMREIRKVLDANSCQSELHEKYMLLCMHGTPGHEDFVQWEMEVCKLPRLSLNGVRFKRISGTSMAFKNIASKIANELKL

SEQ ID NO: 36458 - protein, 755 aa, Homo sapiens
MIRGRNSATSADEQPHIGNYRLLKTIGKGNFAKVKLARHILTGKEVAVKIIDKTQLNSSSLQKLFREVRIMKVLNHPNIVKLFEVIETEKTLYLVMEYASGGEVFDYLVAHGRMKEKEARAKFRQIVSAVQYCHQKFIVHRDLKAENLLLDADMNIKIADFGFSNEFTFGNKLDTFCGSPPYAAPELFQGKKYDGPEVDVWSLGVILYTLVSGSLPFDGQNLKELRERVLRGKYRIPFYMSTDCENLLKKFLILNPSKRGTLEQIMKDRWMNVGHEDDELKPYVEPLPDYKDPRRTELMVSMGYTREEIQDSLVGQRYNEVMATYLLLGYKSSELEGDTITLKPRPSADLTNSSAPSPSHKVQRSVSANPKQRRFSDQAAGPAIPTSNSYSKKTQSNNAENKRPEEDRESGRKASSTAKVPASPLPGLERKKTTPTPSTNSVLSTSTNRSRNSPLLERASLGQASIQNGKDSLTMPGSRASTASASAAVSAARPRQHQKSMSASVHPNKASGLPPTESNCEVPRPSTAPQRVPVASPSAHNISSSGGAPDRTNFPRGVSSRSTFHAGQLRQVRDQQNLPYGVTPASPSGHSQGRRGASGSIFSKFTSKFVRRNLSFRFARRNLNEPESKDRVETLRPHVVGSGGNDKEKEEFREAKPRSLRFTWSMKTTSSMEPNEMMREIRKVLDANSCQSELHEKYMLLCMHGTPGHEDFVQWEMEVCKLPRLSLNGVRFKRISGTSMAFKNIASKIANELKL

SEQ ID NO: 36459 - protein, 692 aa, Homo sapiens
MIRGRNSATSADEQPHIGNYRLLKTIGKGNFAKVKLARHILTGKEVAVKIIDKTQLNSSSLQKLFREVRIMKVLNHPNIVKLFEVIETEKTLYLVMEYASGGEVFDYLVAHGRMKEKEARAKFRQIVSAVQYCHQKFIVHRDLKAENLLLDADMNIKIADFGFSNEFTFGNKLDTFCGSPPYAAPELFQGKKYDGPEVDVWSLGVILYTLVSGSLPFDGQNLKELRERVLRGKYRIPFYMSTDCENLLKKFLILNPSKRGTLEQIMKDRWMNVGHEDDELKPYVEPLPDYKDPRRTELMVSMGYTREEIQDSLVGQRYNEVMATYLLLGYKSSELEGDTITLKPRPSADLTNSSAPSPSHKVQRSVSANPKQRRFSDQAAGPAIPTSNSYSKKTQSNNAENKRPEEDRESGRKASSTAKVPASPLPGLERKKTTPTPSTNSVLSTSTNRSRNSPLLERASLGQASIQNGKDSTAPQRVPVASPSAHNISSSGGAPDRTNFPRGVSSRSTFHAGQLRQVRDQQNLPYGVTPASPSGHSQGRRGASGSIFSKFTSKFVRRNLNEPESKDRVETLRPHVVGSGGNDKEKEEFREAKPRSLRFTWSMKTTSSMEPNEMMREIRKVLDANSCQSELHEKYMLLCMHGTPGHEDFVQWEMEVCKLPRLSLNGVRFKRISGTSMAFKNIASKIANELKL

SEQ ID NO: 36460 - protein, 779 aa, Homo sapiens
MSSARTPLPTLNERDTEQPTLGHLDSKPSSKSNMIRGRNSATSADEQPHIGNYRLLKTIGKGNFAKVKLARHILTGKEVAVKIIDKTQLNSSSLQKLFREVRIMKVLNHPNIVKLFEVIETEKTLYLVMEYASGGEVFDYLVAHGRMKEKEARAKFRQIVSAVQYCHQKFIVHRDLKAENLLLDADMNIKIADFGFSNEFTFGNKLDTFCGSPPYAAPELFQGKKYDGPEVDVWSLGVILYTLVSGSLPFDGQNLKELRERVLRGKYRIPFYMSTDCENLLKKFLILNPSKRGTLEQIMKDRWMNVGHEDDELKPYVEPLPDYKDPRRTELMVSMGYTREEIQDSLVGQRYNEVMATYLLLGYKSSELEGDTITLKPRPSADLTNSSAPSPSHKVQRSVSANPKQRRFSDQAAGPAIPTSNSYSKKTQSNNAENKRPEEDRESGRKASSTAKVPASPLPGLERKKTTPTPSTNSVLSTSTNRSRNSPLLERASLGQASIQNGKDSLTMPGSRASTASASAAVSAARPRQHQKSMSASVHPNKASGLPPTESNCEVPRPSTAPQRVPVASPSAHNISSSGGAPDRTNFPRGVSSRSTFHAGQLRQVRDQQNLPYGVTPASPSGHSQGRRGASGSIFSKFTSKFVRRNLNEPESKDRVETLRPHVVGSGGNDKEKEEFREAKPRSLRFTWSMKTTSSMEPNEMMREIRKVLDANSCQSELHEKYMLLCMHGTPGHEDFVQWEMEVCKLPRLSLNGVRFKRISGTSMAFKNIASKIANELKL

SEQ ID NO: 36461 - protein, 734 aa, Homo sapiens
MSSARTPLPTLNERDTEQPTLGHLDSKPSSKSNMIRGRNSATSADEQPHIGNYRLLKTIGKGNFAKVKLARHILTGKEVAVKIIDKTQLNSSSLQKLFREVRIMKVLNHPNIVKLFEVIETEKTLYLVMEYASGGEVFDYLVAHGRMKEKEARAKFRQIVSAVQYCHQKFIVHRDLKAENLLLDADMNIKIADFGFSNEFTFGNKLDTFCGSPPYAAPELFQGKKYDGPEVDVWSLGVILYTLVSGSLPFDGQNLKELRERVLRGKYRIPFYMSTDCENLLKKFLILNPSKRGTLEQIMKDRWMNVGHEDDELKPYVEPLPDYKDPRRTELMVSMGYTREEIQDSLVGQRYNEVMATYLLLGYKSSELEGDTITLKPRPSADLTNSSAPSPSHKVQRSVSANPKQRRFSDQAAGPAIPTSNSYSKKTQSNNAENKRPEEDRESGRKASSTAKVPASPLPGLERKKTTPTPSTNSVLSTSTNRSRNSPLLERASLGQASIQNGKDSTAPQRVPVASPSAHNISSSGGAPDRTNFPRGVSSRSTFHAGQLRQVRDQQNLPYGVTPASPSGHSQGRRGASGSIFSKFTSKFVRRNLSFRFARRNLNEPESKDRVETLRPHVVGSGGNDKEKEEFREAKPRSLRFTWSMKTTSSMEPNEMMREIRKVLDANSCQSELHEKYMLLCMHGTPGHEDFVQWEMEVCKLPRLSLNGVRFKRISGTSMAFKNIASKIANELKL

SEQ ID NO: 36462 - protein, 686 aa, Homo sapiens
MIRGRNSATSADEQPHIGNYRLLKTIGKGNFAKVKLARHILTGKEVAVKIIDKTQLNSSSLQKLFREVRIMKVLNHPNIVKLFEVIETEKTLYLVMEYASGGEVFDYLVAHGRMKEKEARAKFRQIVSAVQYCHQKFIVHRDLKAENLLLDADMNIKIADFGFSNEFTFGNKLDTFCGSPPYAAPELFQGKKYDGPEVDVWSLGVILYTLVSGSLPFDGQNLKELRERVLRGKYRIPFYMSTDCENLLKKFLILNPSKRGTLEQIMKDRWMNVGHEDDELKPYVEPLPDYKDPRRTELMVSMGYTREEIQDSLVGQRYNEVMATYLLLGYKSSELEGDTITLKPRPSADLTNSSAPSPSHKVQRSVSANPKQRRFSDQAAGPAIPTSNSYSKKTQSNNAENKRPEEDRESGRKASSTAKVPASPLPGLERKKTTPTPSTNSVLSTSTNRSRNSPLLERASLGQASIQNGKDSTAPQRVPVASPSAHNISSSGGAPDRTNFPRGVSSRSTFHAGQLRQVRDQQNLPYGVTPASPSGHSQGRRGASGSIFSKFTSKFVRRNLSFRFARRPHVVGSGGNDKEKEEFREAKPRSLRFTWSMKTTSSMEPNEMMREIRKVLDANSCQSELHEKYMLLCMHGTPGHEDFVQWEMEVCKLPRLSLNGVRFKRISGTSMAFKNIASKIANELKL

SEQ ID NO: 36463 - protein, 773 aa, Homo sapiens
MSSARTPLPTLNERDTEQPTLGHLDSKPSSKSNMIRGRNSATSADEQPHIGNYRLLKTIGKGNFAKVKLARHILTGKEVAVKIIDKTQLNSSSLQKLFREVRIMKVLNHPNIVKLFEVIETEKTLYLVMEYASGGEVFDYLVAHGRMKEKEARAKFRQIVSAVQYCHQKFIVHRDLKAENLLLDADMNIKIADFGFSNEFTFGNKLDTFCGSPPYAAPELFQGKKYDGPEVDVWSLGVILYTLVSGSLPFDGQNLKELRERVLRGKYRIPFYMSTDCENLLKKFLILNPSKRGTLEQIMKDRWMNVGHEDDELKPYVEPLPDYKDPRRTELMVSMGYTREEIQDSLVGQRYNEVMATYLLLGYKSSELEGDTITLKPRPSADLTNSSAPSPSHKVQRSVSANPKQRRFSDQAAGPAIPTSNSYSKKTQSNNAENKRPEEDRESGRKASSTAKVPASPLPGLERKKTTPTPSTNSVLSTSTNRSRNSPLLERASLGQASIQNGKDSLTMPGSRASTASASAAVSAARPRQHQKSMSASVHPNKASGLPPTESNCEVPRPSTAPQRVPVASPSAHNISSSGGAPDRTNFPRGVSSRSTFHAGQLRQVRDQQNLPYGVTPASPSGHSQGRRGASGSIFSKFTSKFVRRNLSFRFARRPHVVGSGGNDKEKEEFREAKPRSLRFTWSMKTTSSMEPNEMMREIRKVLDANSCQSELHEKYMLLCMHGTPGHEDFVQWEMEVCKLPRLSLNGVRFKRISGTSMAFKNIASKIANELKL

SEQ ID NO: 36464 - protein, 740 aa, Homo sapiens
MIRGRNSATSADEQPHIGNYRLLKTIGKGNFAKVKLARHILTGKEVAVKIIDKTQLNSSSLQKLFREVRIMKVLNHPNIVKLFEVIETEKTLYLVMEYASGGEVFDYLVAHGRMKEKEARAKFRQIVSAVQYCHQKFIVHRDLKAENLLLDADMNIKIADFGFSNEFTFGNKLDTFCGSPPYAAPELFQGKKYDGPEVDVWSLGVILYTLVSGSLPFDGQNLKELRERVLRGKYRIPFYMSTDCENLLKKFLILNPSKRGTLEQIMKDRWMNVGHEDDELKPYVEPLPDYKDPRRTELMVSMGYTREEIQDSLVGQRYNEVMATYLLLGYKSSELEGDTITLKPRPSADLTNSSAPSPSHKVQRSVSANPKQRRFSDQAAGPAIPTSNSYSKKTQSNNAENKRPEEDRESGRKASSTAKVPASPLPGLERKKTTPTPSTNSVLSTSTNRSRNSPLLERASLGQASIQNGKDSLTMPGSRASTASASAAVSAARPRQHQKSMSASVHPNKASGLPPTESNCEVPRPSTAPQRVPVASPSAHNISSSGGAPDRTNFPRGVSSRSTFHAGQLRQVRDQQNLPYGVTPASPSGHSQGRRGASGSIFSKFTSKFVRRNLSFRFARRPHVVGSGGNDKEKEEFREAKPRSLRFTWSMKTTSSMEPNEMMREIRKVLDANSCQSELHEKYMLLCMHGTPGHEDFVQWEMEVCKLPRLSLNGVRFKRISGTSMAFKNIASKIANELKL

SEQ ID NO: 36465 - protein, 691 aa, Homo sapiens
MIRGRNSATSADEQPHIGNYRLLKTIGKGNFAKVKLARHILTGKEVAVKIIDKTQLNSSSLQKLFREVRIMKVLNHPNIVKLFEVIETEKTLYLVMEYASGGEVFDYLVAHGRMKEKEARAKFRQIVSAVQYCHQKFIVHRDLKAENLLLDADMNIKIADFGFSNEFTFGNKLDTFCGSPPYAAPELFQGKKYDGPEVDVWSLGVILYTLVSGSLPFDGQNLKELRERVLRGKYRIPFYMSTDCENLLKKFLILNPSKRGTLEQIMKDRWMNVGHEDDELKPYVEPLPDYKDPRRTELMVSMGYTREEIQDSLVGQRYNEVMATYLLLGYKSSELEGDTITLKPRPSADLTNSSAPSPSHKVQRSVSANPKQRRFSDQAGPAIPTSNSYSKKTQSNNAENKRPEEDRESGRKASSTAKVPASPLPGLERKKTTPTPSTNSVLSTSTNRSRNSPLLERASLGQASIQNGKDSTAPQRVPVASPSAHNISSSGGAPDRTNFPRGVSSRSTFHAGQLRQVRDQQNLPYGVTPASPSGHSQGRRGASGSIFSKFTSKFVRRNLNEPESKDRVETLRPHVVGSGGNDKEKEEFREAKPRSLRFTWSMKTTSSMEPNEMMREIRKVLDANSCQSELHEKYMLLCMHGTPGHEDFVQWEMEVCKLPRLSLNGVRFKRISGTSMAFKNIASKIANELKL

SEQ ID NO: 36466 - protein, 745 aa, Homo sapiens
MIRGRNSATSADEQPHIGNYRLLKTIGKGNFAKVKLARHILTGKEVAVKIIDKTQLNSSSLQKLFREVRIMKVLNHPNIVKLFEVIETEKTLYLVMEYASGGEVFDYLVAHGRMKEKEARAKFRQIVSAVQYCHQKFIVHRDLKAENLLLDADMNIKIADFGFSNEFTFGNKLDTFCGSPPYAAPELFQGKKYDGPEVDVWSLGVILYTLVSGSLPFDGQNLKELRERVLRGKYRIPFYMSTDCENLLKKFLILNPSKRGTLEQIMKDRWMNVGHEDDELKPYVEPLPDYKDPRRTELMVSMGYTREEIQDSLVGQRYNEVMATYLLLGYKSSELEGDTITLKPRPSADLTNSSAPSPSHKVQRSVSANPKQRRFSDQAGPAIPTSNSYSKKTQSNNAENKRPEEDRESGRKASSTAKVPASPLPGLERKKTTPTPSTNSVLSTSTNRSRNSPLLERASLGQASIQNGKDSLTMPGSRASTASASAAVSAARPRQHQKSMSASVHPNKASGLPPTESNCEVPRPSTAPQRVPVASPSAHNISSSGGAPDRTNFPRGVSSRSTFHAGQLRQVRDQQNLPYGVTPASPSGHSQGRRGASGSIFSKFTSKFVRRNLNEPESKDRVETLRPHVVGSGGNDKEKEEFREAKPRSLRFTWSMKTTSSMEPNEMMREIRKVLDANSCQSELHEKYMLLCMHGTPGHEDFVQWEMEVCKLPRLSLNGVRFKRISGTSMAFKNIASKIANELKL

SEQ ID NO: 36467 - protein, 709 aa, Homo sapiens
MSSARTPLPTLNERDTEQPTLGHLDSKPSSKSNMIRGRNSATSADEQPHIGNYRLLKTIGKGNFAKVKLARHILTGKEVAVKIIDKTQLNSSSLQKLFREVRIMKVLNHPNIVKLFEVIETEKTLYLVMEYASGGEVFDYLVAHGRMKEKEARAKFRQIVSAVQYCHQKFIVHRDLKAENLLLDADMNIKIADFGFSNEFTFGNKLDTFCGSPPYAAPELFQGKKYDGPEVDVWSLGVILYTLVSGSLPFDGQNLKELRERVLRGKYRIPFYMSTDCENLLKKFLILNPSKRGTLEQIMKDRWMNVGHEDDELKPYVEPLPDYKDPRRTELMVSMGYTREEIQDSLVGQRYNEVMATYLLLGYKSSELEGDTITLKPRPSADLTNSSAPSPSHKVQRSVSANPKQRRFSDQAGPAIPTSNSYSKKTQSNNAENKRPEEDRESGRKASSTAKVPASPLPGLERKKTTPTPSTNSVLSTSTNRSRNSPLLERASLGQASIQNGKDSTAPQRVPVASPSAHNISSSGGAPDRTNFPRGVSSRSTFHAGQLRQVRDQQNLPYGVTPASPSGHSQGRRGASGSIFSKFTSKFVRRPHVVGSGGNDKEKEEFREAKPRSLRFTWSMKTTSSMEPNEMMREIRKVLDANSCQSELHEKYMLLCMHGTPGHEDFVQWEMEVCKLPRLSLNGVRFKRISGTSMAFKNIASKIANELKL

SEQ ID NO: 36468 - protein, 724 aa, Homo sapiens
MSSARTPLPTLNERDTEQPTLGHLDSKPSSKSNMIRGRNSATSADEQPHIGNYRLLKTIGKGNFAKVKLARHILTGKEVAVKIIDKTQLNSSSLQKLFREVRIMKVLNHPNIVKLFEVIETEKTLYLVMEYASGGEVFDYLVAHGRMKEKEARAKFRQIVSAVQYCHQKFIVHRDLKAENLLLDADMNIKIADFGFSNEFTFGNKLDTFCGSPPYAAPELFQGKKYDGPEVDVWSLGVILYTLVSGSLPFDGQNLKELRERVLRGKYRIPFYMSTDCENLLKKFLILNPSKRGTLEQIMKDRWMNVGHEDDELKPYVEPLPDYKDPRRTELMVSMGYTREEIQDSLVGQRYNEVMATYLLLGYKSSELEGDTITLKPRPSADLTNSSAPSPSHKVQRSVSANPKQRRFSDQAGPAIPTSNSYSKKTQSNNAENKRPEEDRESGRKASSTAKVPASPLPGLERKKTTPTPSTNSVLSTSTNRSRNSPLLERASLGQASIQNGKDSTAPQRVPVASPSAHNISSSGGAPDRTNFPRGVSSRSTFHAGQLRQVRDQQNLPYGVTPASPSGHSQGRRGASGSIFSKFTSKFVRRNLNEPESKDRVETLRPHVVGSGGNDKEKEEFREAKPRSLRFTWSMKTTSSMEPNEMMREIRKVLDANSCQSELHEKYMLLCMHGTPGHEDFVQWEMEVCKLPRLSLNGVRFKRISGTSMAFKNIASKIANELKL

SEQ ID NO: 36469 - protein, 820 aa, Homo sapiens
MALLRDVSLQDPRDRFELLQRVGAGTYGDVYKARDTVTSELAAVKIVKLDPGDDISSLQQEITILRECRHPNVVAYIGSYLRNDRLWICMEFCGGGSLQEIYHATGPLEERQIAYVCREALKGLHHLHSQGKIHRDIKGANLLLTLQGDVKLADFGVSGELTASVAKRRSFIGTPYWMAPEVAAVERKGGYNELCDVWALGITAIELGELQPPLFHLHPMRALMLMSKSSFQPPKLRDKTRWTQNFHHFLKLALTKNPKKRPTAEKLLQHPFTTQQLPRALLTQLLDKASDPHLGTPSPEDCELETYDMFPDTIHSRGQHGPAERTPSEIQFHQVKFGAPRRKETDPLNEPWEEEWTLLGKEELSGSLLQSVQEALEERSLTIRSASEFQELDSPDDTMGTIKRAPFLGPLPTDPPAEEPLSSPPGTLPPPPSGPNSSPLLPTAWATMKQREDPERSSCHGLPPTPKVHMGACFSKVFNGCPLRIHAAVTWIHPVTRDQFLVVGAEEGIYTLNLHELHEDTLEKLISHRCSWLYCVNNVLLSLSGKSTHIWAHDLPGLFEQRRLQQQVPLSIPTNRLTQRIIPRRFALSTKIPDTKGCLQCRVVRNPYTGATFLLAALPTSLLLLQWYEPLQKFLLLKNFSSPLPSPAGMLEPLVLDGKELPQVCVGAEGPEGPGCRVLFHVLPLEAGLTPDILIPPEGIPGSAQQVIQVDRDTILVSFERCVRIVNMQGEPTATLAPELTFDFPIETVVCLQDSVLAFWSHGMQGRSLDTNEVTQEITDETRIFRVLGAHRDIILESIPTDNPEAHSNLYILTGHQSTY

SEQ ID NO: 36470 - protein, 812 aa, Homo sapiens
MALLRDVSLQDPRDRFELLQRVGAGTYGDVYKARDTVTSELAAVKIVKLDPGDDISSLQQEITILRECRHPNVVAYIGSYLRNDRLWICMEFCGGGSLQEIYHATGPLEERQIAYVCREALKGLHHLHSQGKIHRDIKGANLLLTLQGDVKLADFGVSGELTASVAKRRSFIGTPYWMAPEVAAVERKGGYNELCDVWALGITAIELGELQPPLFHLHPMRALMLMSKSSFQPPKLRDKTRWTQNFHHFLKLALTKNPKKRPTAEKLLQHPFTTQQLPRALLTQLLDKASDPHLGTPSPEDCELETYDMFPDTIHSRGQHGPAERTPSEIQFHQVKFGAPRRKETDPLNEPWEEEWTLLGKEELSGSLLQSVQEALEERSLTIRSASEFQELDSPDDTMGTIKRAPFLGPLPTDPPAEEPLSSPPGPNSSPLLPTAWATMKQREDPERSSCHGLPPTPKVHMGACFSKVFNGCPLRIHAAVTWIHPVTRDQFLVVGAEEGIYTLNLHELHEDTLEKLISHRCSWLYCVNNVLLSLSGKSTHIWAHDLPGLFEQRRLQQQVPLSIPTNRLTQRIIPRRFALSTKIPDTKGCLQCRVVRNPYTGATFLLAALPTSLLLLQWYEPLQKFLLLKNFSSPLPSPAGMLEPLVLDGKELPQVCVGAEGPEGPGCRVLFHVLPLEAGLTPDILIPPEGIPGSAQQVIQVDRDTILVSFERCVRIVNMQGEPTATLAPELTFDFPIETVVCLQDSVLAFWSHGMQGRSLDTNEVTQEITDETRIFRVLGAHRDIILESIPTDNPEAHSNLYILTGHQSTY

SEQ ID NO: 36471 - protein, 457 aa, Homo sapiens
MARRRRRACIALFLVLLFAFGTLMGLRTLKAPDGLPALGPGLELAPFERRPEGAPAPAARAPAAPAAPPPPPPPPRTADPGGSPGPAPAEAEPAPVQSLRVYSDLHAFYYSWYGSPRREGHYIHWDHVMVPHWDPKISASYPRGRHSPPDDLGSSFYPELGPYSSRDPEVLREHMTQLKEAAIGVLVLSWYPPGMADDNGEPSDDLVPAILDTAHQYSIQVAFHIQPYKGRDDITVHDNIKYIIDTYGSHGAFYRYKNSMGKSLPLFYIYDSYLTSPEAWAHLLTPNGPHSIRNTPYDGVFIALLVEEGHTHDILAAGFDGMYTYFASNGFSFGSSHQNWKAVKNFCDANNLMFIPSVGPGYIDTSIRPWNNHNTRNRVNGKYYETALQAALTVRPEIVSITSFNEWHEGTQIEKAIPKKTPTRLYLDYLPHQPSLYLELTRRWAEHFIKEKEQWLM

SEQ ID NO: 36472 - protein, 235 aa, Homo sapiens
MITGSPQMTWCPPFWTPPISTASRYGSHGAFYRYKNSMGKSLPLFYIYDSYLTSPEAWAHLLTPNGPHSIRNTPYDGVFIALLVEEGHTHDILAAGFDGMYTYFASNGFSFGSSHQNWKAVKNFCDANNLMFIPSVGPGYIDTSIRPWNNHNTRNRVNGKYYETALQAALTVRPEIVSITSFNEWHEGTQIEKAIPKKTPTRLYLDYLPHQPSLYLELTRRWAEHFIKEKEQWLM

SEQ ID NO: 36473 - protein, 250 aa, Homo sapiens
MARRRRRACIALFLVLLFAFGTLMGLRTLKAPDGLPALGPGLELAPFERRPEGAPAPAARAPAAPAAPPPPPPPPRTADPGGSPGPAPAEAEPAPVQSLRVYSDLHAFYYSWYGSPRREGHYIHWDHVMVPHWDPKISASYPRGRHSPPDDLGSSFYPELGPYSSRDPEVLREHMTQLKEAAIGVLVLSWYPPGMADDNGEPSDDLVPAILDTAHQYSIQVAFHIQPYKGRDDITVHDNIKYIIDTTGKL

SEQ ID NO: 36474 - protein, 182 aa, Homo sapiens
MRRMWATQGLAVALALSVLPGSRALRPGDCEVCISYLGRFYQDLKDRDVTFSPATIENELIKFCREARGKENRLCYYIGATDDAATKIINEVSKPLAHHIPVEKICEKLKKKDSQICELKYDKQIDLSTVDLKKLRVKELKKILDDWGETCKGCAEKSDYIRKINELMPKYAPKAASARTDL

SEQ ID NO: 36475 - protein, 297 aa, Homo sapiens
MAVLFLLLFLCGTPQAADNMQAIYVALGEAVELPCPSPPTLHGDEHLSWFCSPAAGSFTTLVAQVQVGRPAPDPGKPGRESRLRLLGNYSLWLEGSKEEDAGRYWCAVLGQHHNYQNWRVYDVLVLKGSQLSARAADGSPCNVLLCSVVPSRRMDSVTWQEGKGPVRGRVQSFWGSEAALLLVCPGEGLSEPRSRRPRIIRCLMTHNKGVSFSLAASIDASPALCAPSTGWDMPWILMLLLTMGQGVVILALSIVLWRQRVRGAPGRDASIPQFKPEIQVYENIHLARLGPPAHKPR

SEQ ID NO: 36476 - protein, 382 aa, Homo sapiens
MAVLFLLLFLCGTPQAADNMQAIYVALGEAVELPCPSPPTLHGDEHLSWFCSPAAGSFTTLVAQVQVGRPAPDPGKPGRESRLRLLGNYSLWLEGSKEEDAGRYWCAVLGQHHNYQNWRVYDVLVLKGSQLSARAADGSPCNVLLCSVVPSRRMDSVTWQEGKGPVRGRVQSFWGSEAALLLVCPGEGLSEPRSRRPRIIRCLMTHNKGVSFSLAASIDASPALCAPSTGWDMPWILMLLLTMGQGVVILALSIVLWRQRVRGAPGRGNRMRCYNCGGSPSSSCKEAVTTCGEGRPQPGLEQIKLPGNPPVTLIHQHPACVAAHHCNQVETESVGDVTYPAHRDCYLGDLCNSAVASHVAPAGILAAAATALTCLLPGLWSG

SEQ ID NO: 36477 - protein, 489 aa, Homo sapiens
MALLFLLPLVMQGVSRAEMGTADLGPSSVPTPTNVTIESYNMNPIVYWEYQIMPQVPVFTVEVKNYGVKNSEWIDACINISHHYCNISDHVGDPSNSLWVRVKARVGQKESAYAKSEEFAVCRDGKIGPPKLDIRKEEKQIMIDIFHPSVFVNGDEQEVDYDPETTCYIRVYNVYVRMNGSEIQYKILTQKEDDCDEIQCQLAIPVSSLNSQYCVSAEGVLHVWGVTTEKSKEVCITIFNSSIKGSLWIPVVAALLLFLVLSLVFICFYIKKINPLKEKSIILPKSLISVVRSATLETKPESKYVSLITSYQPFSLEKEVVCEEPLSPATVPGMHTEDNPGKVEHTEELSSITEVVTTEENIPDVVPGSHLTPIERESSSPLSSNQSEPGSIALNSYHSRNCSESDHSRNGFDTDSSCLESHSSLSDSEFPPNNKGEIKTEGQELITVIKAPTSFGYDKPHVLVDLLVDDSGKESLIGYRPTEDSKEFS

SEQ ID NO: 36478 - protein, 186 aa, Homo sapiens
MLLKSPENSLLQFQFKYGVPTPTNVTIESYNMNPIVYWEYQIMPQVPVFTVEVKNYGVKNSEWIDACINISHHYCNISDHVGDPSNSLWVRVKARVGQKESAYAKSEEFAVCRDGKIGPPKLDIRKEEKQIMIDIFHPSVFVNGDEQEVDYDPETTCYIRVYNVYVRMNGSEIKRSCAFSLFSFFI

SEQ ID NO: 36479 - protein, 297 aa, Homo sapiens
MTMESREMDCYLRRLKQELMSMKEVGDGLQDQMNCMMGALQELKLLQVQTALEQLEISGGGPVPGSPEGPRTQCEHPCWEGGRGPARPTVCSPSSQPSLGSSTKFPSHRSVCGRDLAPLPRTQPHQSCAQQGPERVEPDDWTSTLMSRGRNRQPLVLGDNVFADLVGNWLDLPELEKGGEKGETGGAREPKGEKGQPQELGRRFALTANIFKKFLRSVRPDRDRLLKEKPGWVTPMVPESRTGRSQKVKKRSLSKGSGHFPFPGTGEHRRGENPPTSCPKALEHSPSGFDINTAVWV

SEQ ID NO: 36480 - protein, 277 aa, Homo sapiens
MADPWQECMDYAVTLARQAGEVVCEAIKNEMNVMLKSSPVDLVTATDQKVEKMLISSIKEKYPSHSFIGEESVAAGEKSILTDNPTWIIDPIDGTTNFVHRFPFVAVSIGFAVNKKIEFGVVYSCVEGKMYTARKGKGAFCNGQKLQVSQQEDITKSLLVTELGSSRTPETVRMVLSNMEKLFCIPVHGIRSVGTAAVNMCLVATGGADAYYEMGIHCWDVAGAGIIVTEAGGVLMDVTGGPFDLMSRRVIAANNRILAERIAKEIQVIPLQRDDED

SEQ ID NO: 36481 - protein, 198 aa, Homo sapiens
MADPWQECMDYAVTLARQAGEVVCEAIKNEMNVMLKSSPVDLVTATDQKVEKMLISSIKEKYPSHSFIGEESVAAGEKSILTDNPTWIIDPIDGTTNFVHRFPFVAVSIGFAVNKKIEFGVVYSCVEGKMYTARKGKGAFCNGQKLQVSQQEGSGVLEQQLLICALWQLAEQMHIMKWEFTAGMLQELALLLLKLVAC

SEQ ID NO: 36482 - protein, 336 aa, Homo sapiens
MGQRPGPVLPAVAVLGQVAKRKVAWLLRWKAVTRTETAGNSSGVYGFGKMKIFVKYFQKMADPWQECMDYAVTLARQAGEVVCEAIKNEMNVMLKSSPVDLVTATDQKVEKMLISSIKEKYPSHSFIGEESVAAGEKSILTDNPTWIIDPIDGTTNFVHRFPFVAVSIGFAVNKKIEFGVVYSCVEGKMYTARKGKGAFCNGQKLQVSQQEDITKSLLVTELGSSRTPETVRMVLSNMEKLFCIPVHGIRSVGTAAVNMCLVATGGADAYYEMGIHCWDVAGAGIIVTEAGGVLMDVTGGPFDLMSRRVIAANNRILAERIAKEIQVIPLQRDDED

SEQ ID NO: 36483 - protein, 503 aa, Homo sapiens
MALAPERAAPRVLFGEWLLGEISSGCYEGLQWLDEARTCFRVPWKHFARKDLSEADARIFKAWAVARGRWPPSSRGGGPPPEAETAERAGWKTNFRCALRSTRRFVMLRDNSGDPADPHKVYALSRELCWREGPGTDQTEAEAPAAVPPPQGGPPGPFLAHTHAGLQAPGPLPAPAGDKGDLLLQAVQQSCLADHLLTASWGADPVPTKAPGEGQEGLPLTGACAGGPGLPAGELYGWAVETTPSPGPQPAALTTGEAAAPESPHQAEPYLSPSPSACTAVQEPSPGALDVTIMYKGRTVLQKVVGHPSCTFLYGPPDPAVRATDPQQVAFPSPAELPDQKQLRYTEELLRHVAPGLHLELRGPQLWARRMGKCKVYWEVGGPPGSASPSTPACLLPRNCDTPIFDFRVFFQELVEFRARQRRGSPRYTIYLGFGQDLSAGRPKEKSLVLVKLEPWLCRVHLEGTQREGVSSLDSSSLSLCLSSANSLYDDIECFLMELEQPA

SEQ ID NO: 36484 - protein, 474 aa, Homo sapiens
MALAPERAAPRVLFGEWLLGEISSGCYEGLQWLDEARTCFRVPWKHFARKDLSEADARIFKAWAVARGRWPPSSRGGGPPPEAETAERAGWKTNFRCALRSTRRFVMLRDNSGDPADPHKVYALSRELCWREGPGTDQTEAEAPAAVPPPQGGPPGPFLAHTHAGLQAPGPLPAPAGDKGDLLLQAVQQSCLADHLLTASWGADPVPTKAPGEGQEGLPLTGACAGGEAAAPESPHQAEPYLSPSPSACTAVQEPSPGALDVTIMYKGRTVLQKVVGHPSCTFLYGPPDPAVRATDPQQVAFPSPAELPDQKQLRYTEELLRHVAPGLHLELRGPQLWARRMGKCKVYWEVGGPPGSASPSTPACLLPRNCDTPIFDFRVFFQELVEFRARQRRGSPRYTIYLGFGQDLSAGRPKEKSLVLVKLEPWLCRVHLEGTQREGVSSLDSSSLSLCLSSANSLYDDIECFLMELEQPA

SEQ ID NO: 36485 - protein, 164 aa, Homo sapiens
MALAPERAAPRVLFGEWLLGEISSGCYEGLQWLDEARTCFRVPWKHFARKDLSEADARIFKAWAVARGRWPPSSRGGGPPPEAETAERAGWKTNFRCALRSTRRFVMLRDNSGDPADPHKVYALSRELCWREGPGTDQTEAEAPAAVPPPQAQGSLLGSCTGGQ

SEQ ID NO: 36486 - protein, 516 aa, Homo sapiens
MPVPERPAAGPDSPRPGTRRAAPRVLFGEWLLGEISSGCYEGLQWLDEARTCFRVPWKHFARKDLSEADARIFKAWAVARGRWPPSSRGGGPPPEAETAERAGWKTNFRCALRSTRRFVMLRDNSGDPADPHKVYALSRELCWREGPGTDQTEAEAPAAVPPPQGGPPGPFLAHTHAGLQAPGPLPAPAGDKGDLLLQAVQQSCLADHLLTASWGADPVPTKAPGEGQEGLPLTGACAGGPGLPAGELYGWAVETTPSPGPQPAALTTGEAAAPESPHQAEPYLSPSPSACTAVQEPSPGALDVTIMYKGRTVLQKVVGHPSCTFLYGPPDPAVRATDPQQVAFPSPAELPDQKQLRYTEELLRHVAPGLHLELRGPQLWARRMGKCKVYWEVGGPPGSASPSTPACLLPRNCDTPIFDFRVFFQELVEFRARQRRGSPRYTIYLGFGQDLSAGRPKEKSLVLVKLEPWLCRVHLEGTQREGVSSLDSSSLSLCLSSANSLYDDIECFLMELEQPA

SEQ ID NO: 36487 - protein, 1038 aa, Homo sapiens
MDPNTIIEALRGTMDPALREAAERQLNEAHKSLNFVSTLLQITMSEQLDLPVRQAGVIYLKNMITQYWPDRETAPGDISPYTIPEEDRHCIRENIVEAIIHSPELIRVQLTTCIHHIIKHDYPSRWTAIVDKIGFYLQSDNSACWLGILLCLYQLVKNYEYKKPEERSPLVAAMQHFLPVLKDRFIQLLSDQSDQSVLIQKQIFKIFYALVQYTLPLELINQQNLTEWIEILKTVVNRDVPNETLQVEEDDRPELPWWKCKKWALHILARLFERYGSPGNVSKEYNEFAEVFLKAFAVGVQQVLLKVLYQYKEKQYMAPRVLQQTLNYINQGVSHALTWKNLKPHIQGIIQDVIFPLMCYTDADEELWQEDPYEYIRMKFDVFEDFISPTTAAQTLLFTACSKRKEVLQKTMGFCYQILTEPNADPRKKDGALHMIGSLAEILLKKKIYKDQMEYMLQNHVFPLFSSELGYMRARACWVLHYFCEVKFKSDQNLQTALELTRRCLIDDREMPVKVEAAIALQVLISNQEKAKEYITPFIRPVMQALLHIIRETENDDLTNVIQKMICEYSEEVTPIAVEMTQHLAMTFNQVIQTGPDEEGSDDKAVTAMGILNTIDTLLSVVEDHKEITQQLEGICLQVIGTVLQQHVLEFYEEIFSLAHSLTCQQVSPQMWQLLPLVFEVFQQDGFDYFTDMMPLLHNYVTVDTDTLLSDTKYLEMIYSMCKKVLTGVAGEDAECHAAKLLEVIILQCKGRGIDQCIPLFVEAALERLTREVKTSELRTMCLQVAIAALYYNPHLLLNTLENLRFPNNVEPVTNHFITQWLNDVDCFLGLHDRKMCVLGLCALIDMEQIPQVLNQVSGQILPAFILLFNGLKRAYACHAEHENDSDDDDEAEDDDETEELGSDEDDIDEDGQEYLEILAKQAGEDGDDEDWEEDDAEETALEGYSTIIDDEDNPVDEYQIFKAIFQTIQNRNPVWYQALTHGLNEEQRKQLQDIATLADQRRAAHESKMIEKHGGYKFSAPVVPSSFNFGGPAPGMN

SEQ ID NO: 36488 - protein, 481 aa, Homo sapiens
MMLKSITESFATAIHGLKVGHLTDRVIQRSKRMILDTLGAGFLGTTTEVFHIASQYSKIYSSNISSTVWGQPDIRLPPTYAAFVNGVAIHSMDFDDTWHPATHPSGAVLPVLTALAEALPRSPKFSGLDLLLAFNVGIEVQGRLLHFAKEANDMPKRFHPPSVVGTLGSAAAASKFLGLSSTKCREALAIAVSHAGAPMANAATQTKPLHIGNAAKHGIEAAFLAMLGLQGNKQVLDLEAGFGAFYANYSPKVLPSIASYSWLLDQQDVAFKRFPAHLSTHWVADAAASVRKHLVAERALLPTDYIKRIVLRIPNVQYVNRPFPVSEHEARHSFQYVACAMLLDGGITVPSFHECQINRPQVRELLSKVELEYPPDNLPSFNILYCEISVTLKDGATFTDRSDTFYGHWRKPLSQEDLEEKFRANASKMLSWDTVESLIKIVKNLEDLEDCSVLTTLLKGPSPPEVASNSPACNNSITNLS

SEQ ID NO: 36489 - protein, 535 aa, Homo sapiens
MAQQNMKVRPVLLKRNSLESVEFVKQPHHRRSKSQQVRFKEDGTTKNPTGLAEVDVQTPEDPAVMGKTQATRHHLPPTYSLSFPRSQKAGGFRNIAIQTSPSLRKHFPVFKRKRLTASKSLVEMPTASQSAIQVNGNLSEQDIVSSDLAYLRLAQHLEDGPRRVKVSHAFLPRVPKVQSNGPVSICLEAGTWRSLEKATAAIQVPDDIYHSPSWEARESALSPDRSAEVSNSIHPLDDTRPGDGRRVTPLDSEKSTSCLNATSVASHTPGTEELKPELLLPKDNSDDKDLGSLSSQSKETCVPSSPRTHSSPSQGSHSQPAHPGRASDCPSSSNNHQNLVSLKTNSASKSAPGCQEQTANNPTESDTLEFPNCPGSNHLPSSLSRSETKLQSNREISDINQIHLARGELCDLQGRLQSVEESLHSNQEKIKVLLNVIQDLEKARALTEGRNFYRTGQDLNNCSTCQNTACIIYSVEYDFRQQEGRFHEVLQSLEEAEPVEEASPPPKSPAEPPAPEKQDLRRKTKKVKKKCFWWI

SEQ ID NO: 36490 - protein, 273 aa, Homo sapiens
  MOD_RES (133)..(133): Selenocysteine
  MOD_RES (266)..(266): Selenocysteine
MGILSVDLLITLQILPVFFSNCLFLALYDSVILLKHVVLLLSRSKSTRGEWRRMLTSEGLRCVWKSFLLDAYKQVKLGEDAPNSSVVHVSSTEGGDNSGNGTQEKIAEGATCHLLDFASPERPLVVNFGSATXPPFTSQLPAFRKLVEEFSSVADFLLVYIDEAHPSDGWAIPGDSSLSFEVKKHQNQEDRCAAAQQLLERFSLPPQCRVVADRMDNNANIAYGVAFERVCIVQRQKIAYLGGKGPFSYNLQEVRHWLEKNFSKRXKKTRLAG

SEQ ID NO: 36491 - protein, 309 aa, Homo sapiens
  MOD_RES (169)..(169): Selenocysteine
  MOD_RES (302)..(302): Selenocysteine
MGILSVDLLITLQILPVFFSNCLFLALYDSVILLKHVVLLLSRSKSTRGEWRRMLTSEGLRCVWKSFLLDAYKQLNCPPSGFSKDGHILCLVYEAYKSRLLVYSHLDLWMVKLGEDAPNSSVVHVSSTEGGDNSGNGTQEKIAEGATCHLLDFASPERPLVVNFGSATXPPFTSQLPAFRKLVEEFSSVADFLLVYIDEAHPSDGWAIPGDSSLSFEVKKHQNQEDRCAAAQQLLERFSLPPQCRVVADRMDNNANIAYGVAFERVCIVQRQKIAYLGGKGPFSYNLQEVRHWLEKNFSKRXKKTRLAG

SEQ ID NO: 36492 - protein, 93 aa, Homo sapiens
  MOD_RES (37)..(37): Selenocysteine
MLTSEGLRCVWKSFLLDAYKQLNCPPSGFSKDGHILXLVYEAYKSRLLVYSHLDLWMTDSVVLTLNFPRQISLCFGKNSAAELYIVSKKEKVP

SEQ ID NO: 36493 - protein, 1242 aa, Homo sapiens
MASPPESDGFSDVRKVGYLRKPKSMHKRFFVLRAASEAGGPARLEYYENEKKWRHKSSAPKRSIPLESCFNINKRADSKNKHLVALYTRDEHFAIAADSEAEQDSWYQALLQLHNRAKGHHDGAAALGAGGGGGSCSGSSGLGEAGEDLSYGDVPPGPAFKEVWQVILKPKGLGQTKNLIGIYRLCLTSKTISFVKLNSEAAAVVLQLMNIRRCGHSENFFFIEVGRSAVTGPGEFWMQVDDSVVAQNMHETILEAMRAMSDEFRPRSKSQSSSNCSNPISVPLRRHHLNNPPPSQVGLTRRSRTESITATSPASMVGGKPGSFRVRASSDGEGTMSRPASVDGSPVSPSTNRTHAHRHRGSARLHPPLNHSRSIPMPASRCSPSATSPVSLSSSSTSGHGSTSDCLFPRRSSASVSGSPSDGGFISSDEYGSSPCDFRSSFRSVTPDSLGHTPPARGEEELSNYICMGGKGPSTLTAPNGHYILSRGGNGHRCTPGTGLGTSPALAGDEAASAADLDNRFRKRTHSAGTSPTITHQKTPSQSSVASIEEYTEMMPAYPPGGGSGGRLPGHRHSAFVPTRSYPEEGLEMHPLERRGGHHRPDSSTLHTDDGYMPMSPGVAPVPSGRKGSGDYMPMSPKSVSAPQQIINPIRRHPQRVDPNGYMMMSPSGGCSPDIGGGPSSSSSSSNAVPSGTSYGKLWTNGVGGHHSHVLPHPKPPVESSGGKLLPCTGDYMNMSPVGDSNTSSPSDCYYGPEDPQHKPVLSYYSLPRSFKHTQRPGEPEEGARHQHLRLSTSSGRLLYAATADDSSSSTSSDSLGGGYCGARLEPSLPHPHHQVLQPHLPRKVDTAAQTNSRLARPTRLSLGDPKASTLPRAREQQQQQQPLLHPPEPKSPGEYVNIEFGSDQSGYLSGPVAFHSSPSVRCPSQLQPAPREEETGTEEYMKMDLGPGRRAAWQESTGVEMGRLGPAPPGAASICRPTRAVPSSRGDYMTMQMSCPRQSYVDTSPAAPVSYADMRTGIAAEEVSLPRATMAAASSSSAASASPTGPQGAAELAAHSSLLGGPQGPGGMSAFTRVNLSPNRNQSAKVIRADPQGCRRRHSSETFSSTPSATRVGNTVPFGAGAAVGGGGGSSSSSEDVKRHSSASFENVWLRPGELGGAPKEPAKLCGAAGGLENGLNYIDLDLVKDFKQCPQECTPEPQPPPPPPPHQPLGSGESSSTRRSSEDLSAYASISFQKQPEDRQ

SEQ ID NO: 36494 - protein, 411 aa, Homo sapiens
METPEVPVGSLIDFGPEAPTSSPLEAPPPVLQDGDGSLGDGASESETTESADSENDMGESPSHPSWDQDRRSSSNESFSSNQSTESTQDEETLALRDFMRGYVEKIFSGGEDLDQEEKAKFGEYCSSENGKGREWFARYVSAQRCNSKCVSEATFYRLVQSFAVVLFECHQMDDFGPAKNLMTMCFTYYHIGKPQLLPPESREKPAGSIDSYLKSANSWLAEKKDIAERLLKNTSARTENVKGFFGGLETKLKGPLARRNEEDENKPQEKRPRAVTAYSPEDEKKGEKIYLYTHLKQQPIWHTLRFWNAAFFDAVHCERTKRSPTTRGDAGEEEEKREKWCHMTQEERDDSLRFNENITFGQLGTFTHNMLAFGLNKKLCNDFLKKQAVIGNLDEEQYKLLSDHIEQMATE

SEQ ID NO: 36495 - protein, 301 aa, Homo sapiens
METPEVPVGSLIDFGPEAPTSSPLEAPPPVLQDGDGSLGDGASESETTESADSENDMGESPSHPSWDQDRRSSSNESFSSNQSTESTQDEETLALRDFMRGYVEKIFSGGEDLDQEEKAKFGEYCSSENGKGREWFARYVSAQRCNSKCVSEATFYRLVQSFAVVLFECHQMDDFGPAKNLMTMCFTYYHIGKPQLLPPESREKPAGSIDSYLKSANSWLAEKKDIAERLLKNTSARTENVKGFFGGLETKLKGPLARRNEEDENKPQEKRPRAVTAYSPEDEKKGEKIYLYTHLKQQPIW

SEQ ID NO: 36496 - protein, 401 aa, Homo sapiens
METPEVPVGSLIDFGPEAPTSSPLEAPPPVLQDGDGSLGDGASESETTESADSENDMGESPSHPSWDQDRRSSSNESFSSNQSTESTQDEETLALRDFMRGYVEKIFSGGEDLDQEEKAKFGEYCSSENGKGREWFARYVSAQRCNSKCVSEATFYRLVQSFAVVLFECHQMDDFGPAKNLMTMCFTYYHIGKPQLLPPESREKPAGSIDSYLKSANSWLAEKKDIAERLLKNTSARTENVKGFFGGLETKLKGPLARRNEEDENKPQEKRPRAVTAYSPEDEKKGEKIYLYTHLKQQPIWHTLRFWNAAFFDAVHCERTKRSPTTREKWCHMTQEERDDSLRFNENITFGQLGTFTHNMLAFGLNKKLCNDFLKKQAVIGNLDEEQYKLLSDHIEQMATE

SEQ ID NO: 36497 - protein, 2103 aa, Homo sapiens
MSVPGTPGAMEPAGEEERPPPAAEGEDDEEEVAAAAQTSGPAHGRSASSLEDADDQEEEMEAMVIGGGCCKEQELTYELQQGYRILGEFLQEKHRGLTAPFLQPLGGVATAEEEVAEGPRSGGRGGRAFPQQPGQGMCLLQMEEKFASGQYGGITEFVADFRLMLETCYRLHGVDHWISKQGQKLEMMLEQKLALLSRHLREKTTIAVTSRGYYGLEDEKGTACTSTRRRSTPRSLAGLTSGVFESIMVQVLRQEEQLRAKEEKRLREQERKEAEEASQKEIEEWERKLLAQAAPTCMETMWEIPAIGHFLCLAQQILNLPEIVFYELERCLLMPQCNAFLSKIMTSLLSPPHRRPTLHRRPTLPYRTWEAALRQKVQQWYTAVGQTENPDNCAEKLGLCPQFFKVLGEVNPLEEKPFHELPFYQKVWLLKGLCDFVYETQKEVQDAVLGQPIHECREVILGYDYLENAYVHFPQFCGADVRIYKQRPFQAPEFPIPPIKIQRVPRIKLEKLKCDYVSTSNGEHRCSRDSLPSSFKKEQENNFDPACCPAKMILDNHDISVEMGVKSNYEIRIRRPCEIKKTDCCKENLEKPRSPGEVTGFGEPLSPGEIRFIENQEKYGEASRIKIEPSPLKENTLKSCQIHVNGSHSDHPEINCHKVVRDILLEQSLQSHKKLKLTKMRAKKKKKKKKKLKDVLNENLQRKREGLHSLAFKSYKPEIQNKLLIIKKKAKHKKHKSGKKSVSKKAITKKRKTVIKSPTVPEFQLICTNLDELRELITKIENELKDLENSRKKSGKWYHRRQAVKELHSTLIRLLNELLPWEPKLMKAFQRNRSRLKKDYDDFRRQPDHDTFNRELWTTDEGEGDLGKDSPKGEISKSIDSTEPLDILEKDHFDSDDMKLSEIDFPMARSKLLKKELPSKDLPKTLLKTLKRQSKQTDYVDDSTKELSPRKKAKLSTNETTVENLESDVQIDCFSESKHTEPSFPESFASLDSVPVSTLQKGTKPIQALLAKNIGNKVTLTNQLPPSTGRNALAVEKPVLSPPEASPIKPALTCHTNTKGPLQMVYKMPCGQWLPIDLQNSSVKIQVQPMVDPKTGEKIMQQVLILPKNFVIQHKEGKAVAKEVPPLQQKGTEQHCSSFPQTTNINSSLASVFVNSPGTVSTQLPNTAFNKTITPLSNISSARPQPLSPVTSVSNLLTPSVKTSQSEAGKAKNAVSAATFSLPSASPTISSTGQPLSSTTTLNGSTNPGSSFNCFAQQTADSSEAKQELKTVCIRDSQSILVRTRGGNTGVVKVQTNPDQNSPNTVSSSSVFTFAPQLQAFLVPKSTTSSSAFSPVAGTTTTSSLSPFSQTPTSVSIPASFAPSMGKNLKLTLGHTTGSGDLGHVIDKTSHMPSSPLKSSICSSTLLPSTTSSSVSVISISAANFGQNNANIIHTPTKQQQVDYITKSYPVTRSEATAATNGDVISGTPVQKLMLVSAPSILSSGNGTAINMTPALTSTGVSAQKLVFINAPVPSGTSTPTLVAESLKQTLPPPLHKAYVKTPEQPQIVLIPSTVGTPIKINSSPAVSQIKDVKIGLNIGQAIVNTSGTVPAIPSINILQNVTPKGEDKSSKGYILPLSTSGNSVPVSSNFVSQNITPVNESVVSSARAVNVLSVTGANLSLGSFPVTSASASAGAQPPVLVSGNDTSSRIMPILSNRLCSSSLGNTVAISTVKTGHLASSVLISTTQPVVSPKCLTSALQIPVTVALPTPATTSPKIINTVPHSAAVPGATRSVSISKRQSRTSLQFHSPGISTTVPTNVNTNKPQTELSSLSTSPGKITNTSNFASLPNQQALVKTPSYSSAPGGTTIHTASAPSNVTSLVGSQFSEPCIQQKIVINTSTPLAPGTQIMINGTRFIVPPQGLGAGSHVLLISTNPKYGAPLVLNSGQGIQSTPIDNSAQKITLASNNSLSGQPLQHPLRSPTKFINSFGNASSIPTVHTSPQLINTTAKVPVPPPVPTVSLTSVIKSPATLLAKTSLVSAICPSNPPLPSSTSVFHLDPPVKKLLVSPEGAILNTINTPASKVSSLSPSLSQIVVSASRSPASVFPAFQSSGLEKPDRAAS

SEQ ID NO: 36498 - protein, 2073 aa, Homo sapiens
MSVPGTPGAMEPAGEEERPPPAAEGEDDEEEVAAAAQTSGPAHGRSASSLEDADDQEEEMEAMVIGGGCCKEQELTYELQQGYRILGEFLQEKHRGLTAPFLQPLGGVATAEEEVAEGPRSGGRGGRAFPQQPGQGMCLLQMEEKFASGQYGGITEFVADFRLMLETCYRLHGVDHWISKQGQKLEMMLEQKLALLSRHLREKTTIAVTSRGYYGLEDEKGTACTSTRRRSTPRSLAGLTSGVFESIMVQVLRQEEQLRAKEEKRLREQERKEAEEASQKEIEEWERKLLAQAAPTCMETMWEIPAIGHFLCLAQQILNLPEIVFYELERCLLMPQCNAFLSKIMTSLLSPPHRRPTLHRRPTLPYRTWEAALRQKVQQWYTAVGQTENPDNCAEKLGLCPQFFKVLGEVNPLEEKPFHELPFYQKVWLLKGLCDFVYETQKEVQDAVLGQPIHECREVILGYDYLENAYVHFPQFCGADVRIYKQRPFQAPEFPIPPIKIQRVPRIKLEKLKCDYVSTSNGEHRCSRDSLPSSFKKEQENNFDPACCPAKMILDNHDISVEMGVKSNYEIRIRRPCEIKKTDCCKENLEKPRSPGEVTGFGEPLSPGEIRFIENQEKYGEASRIKIEPSPLKENTLKSCQIHVNGSHSDHPEINCHKVVRDILLEQSLQSHKKLKLTKMRAKKKKKKKKKLKDVLNENLQRKREGLHSLAFKSYKPEIQNKLLIIKKKAKHKKHKSGKKSVSKKAITKKRKTVIKSPTVPEFQGKWYHRRQAVKELHSTLIRLLNELLPWEPKLMKAFQRNRSRLKKDYDDFRRQPDHDTFNRELWTTDEGEGDLGKDSPKGEISKSIDSTEPLDILEKDHFDSDDMKLSEIDFPMARSKLLKKELPSKDLPKTLLKTLKRQSKQTDYVDDSTKELSPRKKAKLSTNETTVENLESDVQIDCFSESKHTEPSFPESFASLDSVPVSTLQKGTKPIQALLAKNIGNKVTLTNQLPPSTGRNALAVEKPVLSPPEASPIKPALTCHTNTKGPLQMVYKMPCGQWLPIDLQNSSVKIQVQPMVDPKTGEKIMQQVLILPKNFVIQHKEGKAVAKEVPPLQQKGTEQHCSSFPQTTNINSSLASVFVNSPGTVSTQLPNTAFNKTITPLSNISSARPQPLSPVTSVSNLLTPSVKTSQSEAGKAKNAVSAATFSLPSASPTISSTGQPLSSTTTLNGSTNPGSSFNCFAQQTADSSEAKQELKTVCIRDSQSILVRTRGGNTGVVKVQTNPDQNSPNTVSSSSVFTFAPQLQAFLVPKSTTSSSAFSPVAGTTTTSSLSPFSQTPTSVSIPASFAPSMGKNLKLTLGHTTGSGDLGHVIDKTSHMPSSPLKSSICSSTLLPSTTSSSVSVISISAANFGQNNANIIHTPTKQQQVDYITKSYPVTRSEATAATNGDVISGTPVQKLMLVSAPSILSSGNGTAINMTPALTSTGVSAQKLVFINAPVPSGTSTPTLVAESLKQTLPPPLHKAYVKTPEQPQIVLIPSTVGTPIKINSSPAVSQIKDVKIGLNIGQAIVNTSGTVPAIPSINILQNVTPKGEDKSSKGYILPLSTSGNSVPVSSNFVSQNITPVNESVVSSARAVNVLSVTGANLSLGSFPVTSASASAGAQPPVLVSGNDTSSRIMPILSNRLCSSSLGNTVAISTVKTGHLASSVLISTTQPVVSPKCLTSALQIPVTVALPTPATTSPKIINTVPHSAAVPGATRSVSISKRQSRTSLQFHSPGISTTVPTNVNTNKPQTELSSLSTSPGKITNTSNFASLPNQQALVKTPSYSSAPGGTTIHTASAPSNVTSLVGSQFSEPCIQQKIVINTSTPLAPGTQIMINGTRFIVPPQGLGAGSHVLLISTNPKYGAPLVLNSGQGIQSTPIDNSAQKITLASNNSLSGQPLQHPLRSPTKFINSFGNASSIPTVHTSPQLINTTAKVPVPPPVPTVSLTSVIKSPATLLAKTSLVSAICPSNPPLPSSTSVFHLDPPVKKLLVSPEGAILNTINTPASKVSSLSPSLSQIVVSASRSPASVFPAFQSSGLEKPDRAAS

SEQ ID NO: 36499 - protein, 1048 aa, Homo sapiens
MAFPPRRRLRLGPRGLPLLLSGLLLPLCRAFNLDVDSPAEYSGPEGSYFGFAVDFFVPSASSRMFLLVGAPKANTTQPGIVEGGQVLKCDWSSTRRCQPIEFDATGNRDYAKDDPLEFKSHQWFGASVRSKQDKILACAPLYHWRTEMKQEREPVGTCFLQDGTKTVEYAPCRSQDIDADGQGFCQGGFSIDFTKADRVLLGGPGSFYWQGQLISDQVAEIVSKYDPNVYSIKYNNQLATRTAQAIFDDSYLGYSVAVGDFNGDGIDDFVSGVPRAARTLGMVYIYDGKNMSSLYNFTGEQMAAYFGFSVAATDINGDDYADVFIGAPLFMDRGSDGKLQEVGQVSVSLQRASGDFQTTKLNGFEVFARFGSAIAPLGDLDQDGFNDIAIAAPYGGEDKKGIVYIFNGRSTGLNAVPSQILEGQWAARSMPPSFGYSMKGATDIDKNGYPDLIVGAFGVDRAILYRARPVITVNAGLEVYPSILNQDNKTCSLPGTALKVSCFNVRFCLKADGKGVLPRKLNFQVELLLDKLKQKGAIRRALFLYSRSPSHSKNMTISRGGLMQCEELIAYLRDESEFRDKLTPITIFMEYRLDYRTAADTTGLQPILNQFTPANISRQAHILLDCGEDNVCKPKLEVSVDSDQKKIYIGDDNPLTLIVKAQNQGEGAYEAELIVSIPLQADFIGVVRNNEALARLSCAFKTENQTRQVVCDLGNPMKAGTQLLAGLRFSVHQQSEMDTSVKFDLQIQSSNLFDKVSPVVSHKVDLAVLAAVEIRGVSSPDHVFLPIPNWEHKENPETEEDVGPVVQHIYELRNNGPSSFSKAMLHLQWPYKYNNNTLLYILHYDIDGPMNCTSDMEINPLRIKISSLQTTEKNDTVAGQGERDHLITKRDLALSEGDIHTLGCGVAQCLKIVCQVGRLDRGKSAILYVKSLLWTETFMNKENQNHSYSLKSSASFNVIEFPYKNLPIEDITNSTLVTTNVTWGIQPAPMPVPVWVIILAVLAGLLLLAVLVFVMYRMGFFKRVRPPQEEQEREQLQPHENGEGNSET

SEQ ID NO: 36500 - protein, 1012 aa, Homo sapiens
MAFPPRRRLRLGPRGLPLLLSGLLLPLCRAFNLDVDSPAEYSGPEGSYFGFAVDFFVPSASSRMFLLVGAPKANTTQPGIVEGGQVLKCDWSSTRRCQPIEFDATGNRDYAKDDPLEFKSHQWFGASVRSKQDKILACAPLYHWRTEMKQEREPVGTCFLQDGTKTVEYAPCRSRQLISDQVAEIVSKYDPNVYSIKYNNQLATRTAQAIFDDSYLGYSVAVGDFNGDGIDDFVSGVPRAARTLGMVYIYDGKNMSSLYNFTGEQMAAYFGFSVAATDINGDDYADVFIGAPLFMDRGSDGKLQEVGQVSVSLQRASGDFQTTKLNGFEVFARFGSAIAPLGDLDQDGFNDIAIAAPYGGEDKKGIVYIFNGRSTGLNAVPSQILEGQWAARSMPPSFGYSMKGATDIDKNGYPDLIVGAFGVDRAILYRARPVITVNAGLEVYPSILNQDNKTCSLPGTALKVSCFNVRFCLKADGKGVLPRKLNFQVELLLDKLKQKGAIRRALFLYSRSPSHSKNMTISRGGLMQCEELIAYLRDESEFRDKLTPITIFMEYRLDYRTAADTTGLQPILNQFTPANISRQAHILLDCGEDNVCKPKLEVSVDSDQKKIYIGDDNPLTLIVKAQNQGEGAYEAELIVSIPLQADFIGVVRNNEALARLSCAFKTENQTRQVVCDLGNPMKAGTQLLAGLRFSVHQQSEMDTSVKFDLQIQSSNLFDKVSPVVSHKVDLAVLAAVEIRGVSSPDHVFLPIPNWEHKENPETEEDVGPVVQHIYELRNNGPSSFSKAMLHLQWPYKYNNNTLLYILHYDIDGPMNCTSDMEINPLRIKISSLQTTEKNDTVAGQGERDHLITKRDLALSEGDIHTLGCGVAQCLKIVCQVGRLDRGKSAILYVKSLLWTETFMNKENQNHSYSLKSSASFNVIEFPYKNLPIEDITNSTLVTTNVTWGIQPAPMPVPVWVIILAVLAGLLLLAVLVFVMYRMGFFKRVRPPQEEQEREQLQPHENGEGNSET

SEQ ID NO: 36501 - protein, 1002 aa, Homo sapiens
MLLGTLLLILYILMLCRMFLLVGAPKANTTQPGIVEGGQVLKCDWSSTRRCQPIEFDATGNRDYAKDDPLEFKSHQWFGASVRSKQDKILACAPLYHWRTEMKQEREPVGTCFLQDGTKTVEYAPCRSQDIDADGQGFCQGGFSIDFTKADRVLLGGPGSFYWQGQLISDQVAEIVSKYDPNVYSIKYNNQLATRTAQAIFDDSYLGYSVAVGDFNGDGIDDFVSGVPRAARTLGMVYIYDGKNMSSLYNFTGEQMAAYFGFSVAATDINGDDYADVFIGAPLFMDRGSDGKLQEVGQVSVSLQRASGDFQTTKLNGFEVFARFGSAIAPLGDLDQDGFNDIAIAAPYGGEDKKGIVYIFNGRSTGLNAVPSQILEGQWAARSMPPSFGYSMKGATDIDKNGYPDLIVGAFGVDRAILYRARPVITVNAGLEVYPSILNQDNKTCSLPGTALKVSCFNVRFCLKADGKGVLPRKLNFQVELLLDKLKQKGAIRRALFLYSRSPSHSKNMTISRGGLMQCEELIAYLRDESEFRDKLTPITIFMEYRLDYRTAADTTGLQPILNQFTPANISRQAHILLDCGEDNVCKPKLEVSVDSDQKKIYIGDDNPLTLIVKAQNQGEGAYEAELIVSIPLQADFIGVVRNNEALARLSCAFKTENQTRQVVCDLGNPMKAGTQLLAGLRFSVHQQSEMDTSVKFDLQIQSSNLFDKVSPVVSHKVDLAVLAAVEIRGVSSPDHVFLPIPNWEHKENPETEEDVGPVVQHIYELRNNGPSSFSKAMLHLQWPYKYNNNTLLYILHYDIDGPMNCTSDMEINPLRIKISSLQTTEKNDTVAGQGERDHLITKRDLALSEGDIHTLGCGVAQCLKIVCQVGRLDRGKSAILYVKSLLWTETFMNKENQNHSYSLKSSASFNVIEFPYKNLPIEDITNSTLVTTNVTWGIQPAPMPVPVWVIILAVLAGLLLLAVLVFVMYRMGFFKRVRPPQEEQEREQLQPHENGEGNSET

SEQ ID NO: 36502 - protein, 1072 aa, Homo sapiens
MAPPTGVLSSLLLLVTIAGCARKQCSEGRTYSNAVISPNLETTRIMRVSHTFPVVDCTAACCDLSSCDLAWWFEGRCYLVSCPHKENCEPKKMGPIRSYLTFVLRPVQRPAQLLDYGDMMLNRGSPSGIWGDSPEDIRKDLTFLGKDWGLEEMSEYSDDYRELEKDLLQPSGKQEPRGSAEYTDWGLLPGSEGAFNSSVGDSPAVPAETQQDPELHYLNESASTPAPKLPERSVLLPLPTTPSSGEVLEKEKASQLQEQSSNSSGKEVLMPSHSLPPASLELSSVTVEKSPVLTVTPGSTEHSIPTPPTSAAPSESTPSELPISPTTAPRTVKELTVSAGDNLIITLPDNEVELKAFVAPAPPVETTYNYEWNLISHPTDYQGEIKQGHKQTLNLSQLSVGLYVFKVTVSSENAFGEGFVNVTVKPARRVNLPPVAVVSPQLQELTLPLTSALIDGSQSTDDTEIVSYHWEEINGPFIEEKTSVDSPVLRLSNLDPGNYSFRLTVTDSDGATNSTTAALIVNNAVDYPPVANAGPNHTITLPQNSITLNGNQSSDDHQIVLYEWSLGPGSEGKHVVMQGVQTPYLHLSAMQEGDYTFQLKVTDSSRQQSTAVVTVIVQPENNRPPVAVAGPDKELIFPVESATLDGSSSSDDHGIVFYHWEHVRGPSAVEMENIDKAIATVTGLQVGTYHFRLTVKDQQGLSSTSTLTVAVKKENNSPPRARAGGRHVLVLPNNSITLDGSRSTDDQRIVSYLWIRDGQSPAAGDVIDGSDHSVALQLTNLVEGVYTFHLRVTDSQGASDTDTATVEVQPDPRKSGLVELTLQVGVGQLTEQRKDTLVRQLAVLLNVLDSDIKVQKIRAHSDLSTVIVFYVQSRPPFKVLKAAEVARNLHMRLSKEKADFLLFKVLRVDTAGCLLKCSGHGHCDPLTKRCICSHLWMENLIQRYIWDGESNCEWSIFYVTVLAFTLIVLTGGFTWLCICCCKRQKRTKIRKKTKYTILDNMDEQERMELRPKYGIKHRSTEHNSSLMVSESEFDSDQDTIFSREKMERGNPKVSMNGSIRNGASFSYCSKDR

SEQ ID NO: 36503 - protein, 1063 aa, Homo sapiens
MTRLGWPSPCCARKQCSEGRTYSNAVISPNLETTRIMRVSHTFPVVDCTAACCDLSSCDLAWWFEGRCYLVSCPHKENCEPKKMGPIRSYLTFVLRPVQRPAQLLDYGDMMLNRGSPSGIWGDSPEDIRKDLTFLGKDWGLEEMSEYSDDYRELEKDLLQPSGKQEPRGSAEYTDWGLLPGSEGAFNSSVGDSPAVPAETQQDPELHYLNESASTPAPKLPERSVLLPLPTTPSSGEVLEKEKASQLQEQSSNSSGKEVLMPSHSLPPASLELSSVTVEKSPVLTVTPGSTEHSIPTPPTSAAPSESTPSELPISPTTAPRTVKELTVSAGDNLIITLPDNEVELKAFVAPAPPVETTYNYEWNLISHPTDYQGEIKQGHKQTLNLSQLSVGLYVFKVTVSSENAFGEGFVNVTVKPARRVNLPPVAVVSPQLQELTLPLTSALIDGSQSTDDTEIVSYHWEEINGPFIEEKTSVDSPVLRLSNLDPGNYSFRLTVTDSDGATNSTTAALIVNNAVDYPPVANAGPNHTITLPQNSITLNGNQSSDDHQIVLYEWSLGPGSEGKHVVMQGVQTPYLHLSAMQEGDYTFQLKVTDSSRQQSTAVVTVIVQPENNRPPVAVAGPDKELIFPVESATLDGSSSSDDHGIVFYHWEHVRGPSAVEMENIDKAIATVTGLQVGTYHFRLTVKDQQGLSSTSTLTVAVKKENNSPPRARAGGRHVLVLPNNSITLDGSRSTDDQRIVSYLWIRDGQSPAAGDVIDGSDHSVALQLTNLVEGVYTFHLRVTDSQGASDTDTATVEVQPDPRKSGLVELTLQVGVGQLTEQRKDTLVRQLAVLLNVLDSDIKVQKIRAHSDLSTVIVFYVQSRPPFKVLKAAEVARNLHMRLSKEKADFLLFKVLRVDTAGCLLKCSGHGHCDPLTKRCICSHLWMENLIQRYIWDGESNCEWSIFYVTVLAFTLIVLTGGFTWLCICCCKRQKRTKIRKKTKYTILDNMDEQERMELRPKYGIKHRSTEHNSSLMVSESEFDSDQDTIFSREKMERGNPKVSMNGSIRNGASFSYCSKDR

SEQ ID NO: 36504 - protein, 1027 aa, Homo sapiens
MRVSHTFPVVDCTAACCDLSSCDLAWWFEGRCYLVSCPHKENCEPKKMGPIRSYLTFVLRPVQRPAQLLDYGDMMLNRGSPSGIWGDSPEDIRKDLTFLGKDWGLEEMSEYSDDYRELEKDLLQPSGKQEPRGSAEYTDWGLLPGSEGAFNSSVGDSPAVPAETQQDPELHYLNESASTPAPKLPERSVLLPLPTTPSSGEVLEKEKASQLQEQSSNSSGKEVLMPSHSLPPASLELSSVTVEKSPVLTVTPGSTEHSIPTPPTSAAPSESTPSELPISPTTAPRTVKELTVSAGDNLIITLPDNEVELKAFVAPAPPVETTYNYEWNLISHPTDYQGEIKQGHKQTLNLSQLSVGLYVFKVTVSSENAFGEGFVNVTVKPARRVNLPPVAVVSPQLQELTLPLTSALIDGSQSTDDTEIVSYHWEEINGPFIEEKTSVDSPVLRLSNLDPGNYSFRLTVTDSDGATNSTTAALIVNNAVDYPPVANAGPNHTITLPQNSITLNGNQSSDDHQIVLYEWSLGPGSEGKHVVMQGVQTPYLHLSAMQEGDYTFQLKVTDSSRQQSTAVVTVIVQPENNRPPVAVAGPDKELIFPVESATLDGSSSSDDHGIVFYHWEHVRGPSAVEMENIDKAIATVTGLQVGTYHFRLTVKDQQGLSSTSTLTVAVKKENNSPPRARAGGRHVLVLPNNSITLDGSRSTDDQRIVSYLWIRDGQSPAAGDVIDGSDHSVALQLTNLVEGVYTFHLRVTDSQGASDTDTATVEVQPDPRKSGLVELTLQVGVGQLTEQRKDTLVRQLAVLLNVLDSDIKVQKIRAHSDLSTVIVFYVQSRPPFKVLKAAEVARNLHMRLSKEKADFLLFKVLRVDTAGCLLKCSGHGHCDPLTKRCICSHLWMENLIQRYIWDGESNCEWSIFYVTVLAFTLIVLTGGFTWLCICCCKRQKRTKIRKKTKYTILDNMDEQERMELRPKYGIKHRSTEHNSSLMVSESEFDSDQDTIFSREKMERGNPKVSMNGSIRNGASFSYCSKDR

SEQ ID NO: 36505 - protein, 1011 aa, Homo sapiens
MAPPTGVLSSLLLLVTIAGCARKQCSEGRTYSNAVISPNLETTRIMRVSHTFPVVDCTAACCDLSSCDLAWWFEGRCYLVSCPHKENCEPKKMGPIRSYLTFVLRPVQRPAQLLDYGDMMLNRGSPSGIWGDSPEDIRKDLTFLGKDWGLEEMSEYSDDYRELEKDLLQPSGKQEPRGSAEYTDWGLLPGSEGAFNSSVGDSPAVPAETQQDPELHYLNESASTPAPKLPERSVLLPLPTTPSSGEVLEKEKASQLQEQSSNSSGKEVLMPSHSLPPASLELSSVTVEKSPVLTVTPGSTEHSIPTPPTSAAPSESTPSELPISPTTAPRTVKELTVSAGDNLIITLPDNEVELKAFVAPAPPVETTYNYEWNLISHPTDYQGEIKQGHKQTLNLSQLSVGLYVFKVTVSSENAFGEGFVNVTVKPARRVNLPPVAVVSPQLQELTLPLTSALIDGSQSTDDTEIVSYHWEEINGPFIEEKTSVDSPVLRLSNLDPGNYSFRLTVTDSDGATNSTTAALIVNNAVDYPPVANAGPNHTITLPQNSITLNGNQSSDDHQIVLYEWSLGPGSEGKHVVMQGVQTPYLHLSAMQEGDYTFQLKVTDSSRQQSTAVVTVIVQPENNRPPVAVAGPDKELIFPVESATLDGSSSSDDHGIVFYHWEHVRGPSAVEMENIDKAIATVTGLQVGTYHFRLTVKDQQGLSSTSTLTVAVKKENNSPPRARAGGRHVLVLPNNSITLDGSRSTDDQRIVSYLWIRDGQSPAAGDVIDGSDHSVALQLTNLVEGVYTFHLRVTDSQGASDTDTATVEVQPDPRKSGLVELTLQVGVGQLTEQRKDTLVRQLAVLLNVLDSDIKVQKIRAHSDLSTVIVFYVQSRPPFKVLKAAEVARNLHMRLSKEKADFLLFKVLRVDTAGCLLKCSGHGHCDPLTKRCICSHLWMENLIQRYIWDGESNCGIKHRSTEHNSSLMVSESEFDSDQDTIFSREKMERGNPKVSMNGSIRNGASFSYCSKDR

SEQ ID NO: 36506 - protein, 1180 aa, Homo sapiens
MFTLSLLSRGHGKLGQDKQKLEVYFEPEDYLNWRSPEDYVPVSKPQDKNNASQHSWSLFLPKTFSTRKGALILYSEGFAISAWTPKERRKGPYCPRGPWRKLDLELHTLQDLKEAILAYGRQQGEQDRAWQPYLHFRSQLESQAQRQIQPGHSAKRYLRGLLRTWPPDAMYRLWCAGYIKDSVLLQDSQLNVPKKLRPQQDLSGVPPKYHLLPVFPSFWIQQGKSFEQRQQGLDEGEAGAAGHVDQGPLAKNHGSQGTRLPPRRKQPWQEDETQAEDTSIENHLCLYASKESYNEKTQQTSRKAFGHGRIDHSWLPSDKSHITFCGGAFPNRKADLSDKQRNVKLHKARSSHLLQVLPAERSLFPPVASATGSRIITPGEVKKKKAPKALKLPPISEEPPRVLEPLKSQFKANEPPTELFILPVEIHYHTKQPPKEKAHRRGAPHPESEPESSEESTPVWRPPLKHASLETPWELTVHLPVDASRDTLSPQGSSSLPPASLGNLTLKGSKARHTRVHSQGKGVWKGDDDAPPHDVAPPLDLLPPIKGKKSPESQKGVDSPRTSDHNSPPSLPNMRVPRRALPAAQEDSSDPTLGHFLLGPDGEKVCLSLPGHTQTEALPSGKAYESVNSNISHEEEGPSSQHFLKANTEPRANLHMNLYETSPLTQTTEKQGAQQSLEAAAQKTGEPQSCINKALICSNRKEFYTRKLHIDMTPFLKESGNALDYQEEAGRPLRETHHNDQDPEPRSMTLDSPRASRTEHIQTPEADIVQKVGRDYDVHHLHRGLLGYGPESPERLSAVYTSLLPREREGKAEPRLFSQETSANISHERDLINEAKRKEKPKKDKTKGPKSEREGKVYGQAEAAIGKSKDSKAKKKLEKKTRPQRKRTQKERNLEIAAELSGPDVSYEETEDTSNRGSFASDSFVEDPWLSPKYDAQESQVSLDGRSSPSQIATVTGNMESKEERRCEDPSKALLTKREQEKASWDRLRAERAEMRWLEVEKKRREQEEQRQLQQEQLERAKKMEEELELEQQRRTEEIRLRKQRLQEEQQRQEEEERKQQLRLKAAQERARQQQEEFRRKLRELQRKKQQEEAERAEAEKQRQEELEMQLEEEQKHLMEMAEEERLEYQRRKQEAEEKARLEAEERRQKEEEAARLALEEATKQAQEQARYWIFGQQLP

SEQ ID NO: 36507 - protein, 553 aa, Homo sapiens
MRSRSDHLDLFSSLIFTTANTEPRANLHMNLYETSPLTQTTEKQGAQQSLEAAAQKTGEPQSCINKALICSNRKEFYTRKLHIDMTPFLKESGNALDYQEEAGRPLRETHHNDQDPEPRSMTLDSPRASRTEHIQTPEADIVQKVGRDYDVHHLHRGLLGYGPESPERLSAVYTSLLPREREGKAEPRLFSQETSANISHERDLINEAKRKEKPKKDKTKGPKSEREGKVYGQAEAAIGKSKDSKAKKKLEKKTRPQRKRTQKERNLEIAAELSGPDVSYEETEDTSNRGSFASDSFVEDPWLSPKYDAQESQVSLDGRSSPSQIATVTGNMESKEERRCEDPSKALLTKREQEKASWDRLRAERAEMRWLEVEKKRREQEEQRQLQQEQLERAKKMEEELELEQQRRTEEIRLRKQRLQEEQQRQEEEERKQQLRLKAAQERARQQQEEFRRKLRELQRKKQQEEAERAEAEKQRQEELEMQLEEEQKHLMEMAEEERLEYQRRKQEAEEKARLEAEERRQKEEEAARLALEEATKQAQEQARYWIFGQQLP

SEQ ID NO: 36508 - protein, 819 aa, Homo sapiens
MDSEYYSGDQSDDGGATPVQDERDSGSDGEDDVNEQHSGSDTGSVERHSENETSDREDGLPKGHHVTDSENDEPLNLNASDSESEELHRQKDSDSESEERAEPPASDSENEDVNQHGSDSESEETRKLPGSDSENEELLNGHASDSENEDVGKHPASDSEIEELQKSPASDSETEDALKPQISDSESEEPPRHQASDSENEEPPKPRMSDSESEELPKPQVSDSESEEPPRHQASDSENEELPKPRISDSESEDPPRHQASDSENEELPKPRISDSESEDPPRNQASDSENEELPKPRVSDSESEGPQKGPASDSETEDASRHKQKPESDDDSDRENKGEDTEMQNDSFHSDSHMDRKKFHSSDSEEEEHKKQKMDSDEDEKEGEEEKVAKRKAAVLSDSEDEEKASAKKSRVVSDADDSDSDAVSDKSGKREKTIASDSEEEAGKELSDKKNEEKDLFGSDSESGNEEENLIADIFGESGDEEEEEFTGFNQEDLEEEKGETQVKEAEDSDSDDNIKRGKHMDFLSDFEMMLQRKKSMSGKRRRNRDGGTFISDADDVVSAMIVKMNEAAEEDRQLNNQKKPALKKLTLLPAVVMHLKKQDLKETFIDSGVMSAIKEWLSPLPDRSLPALKIREELLKILQELPSVSQETLKHSGIGRAVMYLYKHPKESRSNKDMAGKLINEWSRPIFGLTSNYKGMTREEREQRDLEQMPQRRRMNSTGGQTPRRDLEKVLTGEEKALRPGDPGFCARARVPMPSNKDYVVRPKWNVEMESSRFQATSKKGISRLDKQMRKFTDIRKKSRSAHAVKISIEGNKMPL

SEQ ID NO: 36509 - protein, 494 aa, Homo sapiens
MDSEYYSGDQSDDGGATPVQNDSFHSDSHMDRKKFHSSDSEEEEHKKQKMDSDEDEKEGEEEKVAKRKAAVLSDSEDEEKASAKKSRVVSDADDSDSDAVSDKSGKREKTIASDSEEEAGKELSDKKNEEKDLFGSDSESGNEEENLIADIFGESGDEEEEEFTGFNQEDLEEEKGETQVKEAEDSDSDDNIKRGKHMDFLSDFEMMLQRKKSMSGKRRRNRDGGTFISDADDVVSAMIVKMNEAAEEDRQLNNQKKPALKKLTLLPAVVMHLKKQDLKETFIDSGVMSAIKEWLSPLPDRSLPALKIREELLKILQELPSVSQETLKHSGIGRAVMYLYKHPKESRSNKDMAGKLINEWSRPIFGLTSNYKGMTREEREQRDLEQMPQRRRMNSTGGQTPRRDLEKVLTGEEKALRPGDPGFCARARVPMPSNKDYVVRPKWNVEMESSRFQATSKKGISRLDKQMRKFTDIRKKSRSAHAVKISIEGNKMPL

SEQ ID NO: 36510 - protein, 612 aa, Homo sapiens
MDSEYYSGDQSDDGGATPVQDERDSGSDGEDDVNEQHSGSDTGSVERHSENETSDSENEELPKPRISDSESEDPPRNQASDSENEELPKPRVSDSESEGPQKGPASDSETEDASRHKQKPESDDDSDRENKGEDTEMQNDSFHSDSHMDRKKFHSSDSEEEEHKKQKMDSDEDEKEGEEEKVAKRKAAVLSDSEDEEKASAKKSRVVSDADDSDSDAVSDKSGKREKTIASDSEEEAGKELSDKKNEEKDLFGSDSESGNEEENLIADIFGESGDEEEEEFTGFNQEDLEEEKGETQVKEAEDSDSDDNIKRGKHMDFLSDFEMMLQRKKSMSGKRRRNRDGGTFISDADDVVSAMIVKMNEAAEEDRQLNNQKKPALKKLTLLPAVVMHLKKQDLKETFIDSGVMSAIKEWLSPLPDRSLPALKIREELLKILQELPSVSQETLKHSGIGRAVMYLYKHPKESRSNKDMAGKLINEWSRPIFGLTSNYKGMTREEREQRDLEQMPQRRRMNSTGGQTPRRDLEKVLTGEEKALRPGDPGFCARARVPMPSNKDYVVRPKWNVEMESSRFQATSKKGISRLDKQMRKFTDIRKKSRSAHAVKISIEGNKMPL

SEQ ID NO: 36511 - protein, 1019 aa, Homo sapiens
MSALCDPPGAPGPPGPAPATHGPAPLSAQELSQEIKAFLTGVDPILGHQLSAREHARCGLLLLRSLPPARAAVLDHLRGVFDESVRAHLAALDETPVAGPPHLRPPPPSHVPAGGPGLEDVVQEVQQVLSEFIRANPKAWAPVISAWSIDLMGQLSSTYSGQHQRVPHATGALNELLQLWMGCRATRTLMDIYVQCLSALIGSCPDACVDALLDTSVQHSPHFDWVVAHIGSSFPGTIISRVLSCGLKDFCVHGGAGGGAGSSGGSSSQTPSTDPFPGSPAIPAEKRVPKIASVVGILGHLASRHGDSIRRELLRMFHDSLAGGSGGRSGDPSLQATVPFLLQLAVMSPALLGTVSGELVDCLKPPAVLSQLQQHLQGFPREELDNMLNLAVHLVSQASGAGAYRLLQFLVDTAMPASVITTQGLAVPDTVREACDRLIQLLLLHLQKLVHHRGGSPGEGVLGPPPPPRLVPFLDALKNHVGELCGETLRLERKRFLWQHQLLGLLSVYTRPSCGPEALGHLLSRARSPEELSLATQLYAGLVVSLSGLLPLAFRSCLARVHAGTLQPPFTARFLRNLALLVGWEQQGGEGPAALGAHFGESASAHLSDLAPLLLHPEEEVAEAAASLLAICPFPSEALSPSQLLGLVRAGVHRFFASLRLHGPPGVASACQLLTRLSQTSPAGLKAVLQLLVEGALHRGNTELFGGQVDGDNETLSVVSASLASASLLDTNRRHTAAVPGPGGIWSVFHAGVIGRGLKPPKFVQSRNQQEVIYNTQSLLSLLVHCCSAPGGTECGECWGAPILSPEAAKAVAVTLVESVCPDAAGAELAWPPEEHARATVERDLRIGRRFREQPLLFELLKLVAAAPPALCYCSVLLRGLLAALLGHWEASRHPDTTHSPWHLEASCTLVAVMAEGSLLPPALGNMHEVFSQLAPFEVRLLLLSVWGFLREHGPLPQKFIFQSERGRFIRDFSREGGGEGGPHLAVLHSVLHRNIDRLGLFSGRFQAPSPSTLLRQGT

SEQ ID NO: 36512 - protein, 1163 aa, Homo sapiens
MTRTRAALLLFTALATSLGFNLDTEELTAFRVDSAGFGDSVVQYANSWVVVGAPQKITAANQTGGLYQCGYSTGACEPIGLQVPPEAVNMSLGLSLASTTSPSQLLACGPTVHHECGRNMYLTGLCFLLGPTQLTQRLPVSRQECPRQEQDIVFLIDGSGSISSRNFATMMNFVRAVISQFQRPSTQFSLMQFSNKFQTHFTFEEFRRSSNPLSLLASVHQLQGFTYTATAIQNVVHRLFHASYGARRDAAKILIVITDGKKEGDSLDYKDVIPMADAAGIIRYAIGVGLAFQNRNSWKELNDIASKPSQEHIFKVEDFDALKDIQNQLKEKIFAIEGTETTSSSSFELEMAQEGFSAVFTPDGPVLGAVGSFTWSGGAFLYPPNMSPTFINMSQENVDMRDSYLGYSTELALWKGVQSLVLGAPRYQHTGKAVIFTQVSRQWRMKAEVTGTQIGSYFGASLCSVDVDSDGSTDLVLIGAPHYYEQTRGGQVSVCPLPRGWRRWWCDAVLYGEQGHPWGRFGAALTVLGDVNGDKLTDVVIGAPGEEENRGAVYLFHGVLGPSISPSHSQRIAGSQLSSRLQYFGQALSGGQDLTQDGLVDLAVGARGQVLLLRTRPVLWVGVSMQFIPAEIPRSAFECREQVVSEQTLVQSNICLYIDKRSKNLLGSRDLQSSVTLDLALDPGRLSPRATFQETKNRSLSRVRVLGLKAHCENFNLLLPSCVEDSVTPITLRLNFTLVGKPLLAFRNLRPMLAADAQRYFTASLPFEKNCGADHICQDNLGISFSFPGLKSLLVGSNLELNAEVMVWNDGEDSYGTTITFSHPAGLSYRYVAEGQKQGQLRSLHLTCDSAPVGSQGTWSTSCRINHLIFRGGAQITFLATFDVSPKAVLGDRLLLTANVSSENNTPRTSKTTFQLELPVKYAVYTVVSSHEQFTKYLNFSESEEKESHVAMHRYQVNNLGQRDLPVSINFWVPVELNQEAVWMDVEVSHPQNPSLRCSSEKIAPPASDFLAHIQKNPVLDCSIAGCLRFRCDVPSFSVQEELDFTLKGNLSFGWVRQILQKKVSVVSVAEITFDTSVYSQLPGQEAFMRAQTTTVLEKYKVHNPTPLIVGSSIGGLLLLALITAVLYKVGFFKRQYKEMMEEANGQIAPENGTQTPSPPSEK

SEQ ID NO: 36513 - protein, 501 aa, Homo sapiens
MSFPQLGYQYIRPLYPSERPGAAGGSGGSAGARGGLGAGASELNASGSLSNVLSSVYGAPYAAAAAAAAAQGYGAFLPYAAELPIFPQLGAQYELKDSPGVQHPAAAAAFPHPHPAFYPYGQYQFGDPSRPKNATRESTSTLKAWLNEHRKNPYPTKGEKIMLAIITKMTLTQVSTWFANARRRLKKENKMTWAPRSRTDEEGNAYGSEREEEDEEEDEEDGKRELELEEEELGGEEEDTGGEGLADDDEDEEIDLENLDGAATEPELSLAGAARRDGDLGLGPISDSKNSDSEDSSEGLEDRPLPVLSLAPAPPPVAVASPSLPSPPVSLDPCAPAPAPASALQKPKIWSLAETATSPDNPRRSPPGAGGSPPGAAVAPSALQLSPAAAAAAAHRLVSAPLGKFPAWTNRPFPGPPPGPRLHPLSLLGSAPPHLLGLPGAAGHPAAAAAFARPAEPEGGTDRCSALEVEKKLLKTAFQPVPRRPQNHLDAALVLSALSSS

SEQ ID NO: 36514 - protein, 942 aa, Homo sapiens
MASVASCDSRPSSDELPGDPSSQEEDEDYDFEDRVSDSGSYSSASSDYDDLEPEWLDSVQKNGELFYLELSEDEEESLLPETPTVNHVRFSENEIIIEDDYKERKKYEPKLKQFTKILRRKRLLPKRCNKKNSNDNGPVSILKHQSNQKTGVIVQQRYKDVNVYVNPKKLTVIKAKEQLKLLEVLVGIIHQTKWSWRRTGKQGDGERLVVHGLLPGGSAMKSGQVLIGDVLVAVNDVDVTTENIERVLSCIPGPMQVKLTFENAYDVKRETSHPRQKKTQSNTSDLVKLLWGEEVEGIQQSGLNTPHIIMYLTLQLDSETSKEEQEILYHYPMSEASQKLKSVRGIFLTLCDMLENVTGTQVTSSSLLLNGKQIHVAYWKESDKLLLIGLPAEEVPLPRLRNMIENVIQTLKFMYGSLDSAFCQIENVPRLDHFFNLFFQRALQPAKLHSSASPSAQQYDASSAVLLDNLPGVRWLTLPLEIKMELDMALSDLEAADFAELSEDYYDMRRLYTILGSSLFYKGYLICSHLPKDDLIDIAVYCRHYCLLPLAAKQRIGQLIIWREVFPQHHLRPLADSSTEVFPEPEGRYFLLVVGLKHYMLCVLLEAGGCASKAIGSPGPDCVYVDQVKTTLHQLDGVDSRIDERLASSPVPCLSCADWFLTGSREKTDSLTTSPILSRLQGTSKVATSPTCRRTLFGDYSLKTRKPSPSCSSGGSDNGCEGGEDDGFSPHTTPDAVRKQRESQGSDGLEESGTLLKVTKKKSTLPNPFHLGNLKKDLPEKELEIYNTVKLTSGPENTLFHYVALETVQGIFITPTLEEVAQLSGSIHPQLIKNFHQCCLSIRAVFQQTLVEEKKKGLNSGDHSDSAKSVSSLNPVKEHGVLFECSPGNWTDQKKAPPVMAYWVVGRLFLHPKPQELYVCFHDSVTEIAIEIAFKLFFGLTL

SEQ ID NO: 36515 - protein, 408 aa, Homo sapiens
MASVASCDSRPSSDELPGDPSSQEEDEDYDFEDRVSDSGSYSSASSDYDDLEPEWLDSVQKNGELFYLELSEDEEESLLPETPTVNHVRFSENEIIIEDDYKERKKYEPKLKQFTKILRRKRLLPKRCNKKNSNDNGPVSILKHQSNQKTGVIVQQRYKDVNVYVNPKKLTVIKAKEQLKLLEVLVGIIHQTKWSWRRTGKQGDGERLVVHGLLPGGSAMKSGQVLIGDVLVAVNDVDVTTENIERVLSCIPGPMQVKLTFENAYDVKRETSHPRQKKTQSNTSDLVKLLWGEEVEGIQQSGLNTPHIIMYLTLQLDSETSKEEQEILYHYPMSEASQKLKSVRGIFLTLCDMLENVTGTQVTSSSLLLNGKQIHVAYWKESDKLLLIGLPAEEIELPSSAHTHGERN

SEQ ID NO: 36516 - protein, 435 aa, Homo sapiens
MASVASCDSRPSSDELPGDPSSQEEDEDYDFEDRVSDSGSYSSASSDYDDLEPEWLDSVQKNGELFYLELSEDEEESLLPETPTVNHVRFSENEIIIEDDYKERKKYEPKLKQFTKILRRKRLLPKRCNKKNSNDNGPVSILKHQSNQKTGVIVQQRYKDVNVYVNPKKLTVIKAKEQLKLLEVLVGIIHQTKWSWRRTGKQGDGERLVVHGLLPGGSAMKSGQVLIGDVLVAVNDVDVTTENIERVLSCIPGPMQVKLTFENAYDVKRETSHPRQKKTQSNTSDLVKLLWGEEVEGIQQSGLNTPHIIMYLTLQLDSETSKEEQEILYHYPMSEASQKLKSVRGIFLTLCDMLENVTGTQVTSSSLLLNGKQIHVAYWKESDKLLLIGLPAEEVPLPRLRNMIENVIQTLKFMYGSLDSIMKEFSVIVSSGKII

SEQ ID NO: 36517 - protein, 923 aa, Homo sapiens
MFQVGRSSIPKPAPRSLEDLDSVQRVLLHSDLEPEWLDSVQKNGELFYLELSEDEEESLLPETPTVNHVRFSENEIIIEDDYKERKKYEPKLKQFTKILRRKRLLPKRCNKKNSNDNGPVSILKHQSNQKTGVIVQQRYKDVNVYVNPKKLTVIKAKEQLKLLEVLVGIIHQTKWSWRRTGKQGDGERLVVHGLLPGGSAMKSGQVLIGDVLVAVNDVDVTTENIERVLSCIPGPMQVKLTFENAYDVKRETSHPRQKKTQSNTSDLVKLLWGEEVEGIQQSGLNTPHIIMYLTLQLDSETSKEEQEILYHYPMSEASQKLKSVRGIFLTLCDMLENVTGTQVTSSSLLLNGKQIHVAYWKESDKLLLIGLPAEEVPLPRLRNMIENVIQTLKFMYGSLDSAFCQIENVPRLDHFFNLFFQRALQPAKLHSSASPSAQQYDASSAVLLDNLPGVRWLTLPLEIKMELDMALSDLEAADFAELSEDYYDMRRLYTILGSSLFYKGYLICSHLPKDDLIDIAVYCRHYCLLPLAAKQRIGQLIIWREVFPQHHLRPLADSSTEVFPEPEGRYFLLVVGLKHYMLCVLLEAGGCASKAIGSPGPDCVYVDQVKTTLHQLDGVDSRIDERLASSPVPCLSCADWFLTGSREKTDSLTTSPILSRLQGTSKVATSPTCRRTLFGDYSLKTRKPSPSCSSGGSDNGCEGGEDDGFSPHTTPDAVRKQRESQGSDGLEESGTLLKVTKKKSTLPNPFHLGNLKKDLPEKELEIYNTVKLTSGPENTLFHYVALETVQGIFITPTLEEVAQLSGSIHPQLIKNFHQCCLSIRAVFQQTLVEEKKKGLNSGDHSDSAKSVSSLNPVKEHGVLFECSPGNWTDQKKAPPVMAYWVVGRLFLHPKPQELYVCFHDSVTEIAIEIAFKLFFGLTL

SEQ ID NO: 36518 - protein, 535 aa, Homo sapiens
MRSSVSRQTYSTKGGFSSNSASGGSGSQARTSFSSVTVSRSSGSGGGAHCGPGTGGFGSRSLYNLGGHKSISVSVAGGALLGRALGGFGFGSRAFMGQGAGRQTFGPACPPGGIQEVTVNQSLLTPLHVEIDPEIQRVRTQEREQIKTLNNKFASFIDKVRFLEQQNKVLETKWALLQEQGQNLGVTRNNLEPLFEAYLGSMRSTLDRLQSERGRLDSELRNVQDLVEDFKNKYEDEINKHTAAENEFVVLKKDVDAAYMGRMDLHGKVGTLTQEIDFLQQLYEMELSQVQTHVSNTNVVLSMDNNRNLDLDSIIAEVKAQYELIAQRSRAEAEAWYQTKYEELQVTAGKHGDNLRDTKNEIAELTRTIQRLQGEADAAKKQCQQLQTAIAEAEQRGELALKDAQKKLGDLDVALHQAKEDLTRLLRDYQELMNVKLALDVEIATYRKLLESEESRMSGECPSAVSISVTGNSTTVCGGGAASFGGGISLGGSGGATKGGFSTNVGYSTVKGGPVSAGTSILRKTTTVKTSSQRY

SEQ ID NO: 36519 - protein, 1049 aa, Homo sapiens
MEKRLGVKPNPASWILSGYYWQTSAKWLRSLYLFYTCFCFSVLWLSTDASESRCQQGKTQFGVGLRSGGENHLWLLEGTPSLQSCWAACCQDSACHVFWWLEGMCIQADCSRPQSCRAFRTHSSNSMLVFLKKFQTADDLGFLPEDDVPHLLGLGWNWASWRQSPPRAALRPAVSSSDQQSLIRKLQKRGSPSDVVTPIVTQHSKVNDSNELGGLTTSGSAEVHKAITISSPLTTDLTAELSGGPKNVSVQPEISEGLATTPSTQQVKSSEKTQIAVPQPVAPSYSYATPTPQASFQSTSAPYPVIKELVVSAGESVQITLPKNEVQLNAYVLQEPPKGETYTYDWQLITHPRDYSGEMEGKHSQILKLSKLTPGLYEFKVIVEGQNAHGEGYVNVTVKPEPRKNRPPIAIVSPQFQEISLPTTSTVIDGSQSTDDDKIVQYHWEELKGPLREEKISEDTAILKLSKLVPGNYTFSLTVVDSDGATNSTTANLTVNKAVDYPPVANAGPNQVITLPQNSITLFGNQSTDDHGITSYEWSLSPSSKGKVVEMQGVRTPTLQLSAMQEGDYTYQLTVTDTIGQQATAQVTVIVQPENNKPPQADAGPDKELTLPVDSTTLDGSKSSDDQKIISYLWEKTQGPDGVQLENANSSVATVTGLQVGTYVFTLTVKDERNLQSQSSVNVIVKEEINKPPIAKITGNVVITLPTSTAELDGSKSSDDKGIVSYLWTRDEGSPAAGEVLNHSDHHPILFLSNLVEGTYTFHLKVTDAKGESDTDRTTVEVKPDPRKNNLVEIILDINVSQLTERLKGMFIRQIGVLLGVLDSDIIVQKIQPYTEQSTKMVFFVQNEPPHQIFKGHEVAAMLKSELRKQKADFLIFRALEVNTVTCQLNCSDHGHCDSFTKRCICDPFWMENFIKVQLRDGDSNCEWSVLYVIIATFVIVVALGILSWTVICCCKRQKGKPKRKSKYKILDATDQESLELKPTSRAGIKQKGLLLSSSLMHSESELDSDDAIFTWPDREKGKLLHGQNGSVPNGQTPLKARSPREEIL

SEQ ID NO: 36520 - protein, 996 aa, Homo sapiens
MEKRLGVKPNPASWILSGYYWQTSAKWLRSLYLFYTCFCFSVLWLSTDASESRCQQGKTQFGVGLRSGGENHLWLLEGTPSLQSCWAACCQDSACHVFWWLEGMCIQADCSRPQSCRAFRTHSSNSMLVFLKKFQTADDLGFLPEDDVPHLLGLGWNWASWRQSPPRAALRPAVSSSDQQSLIRKLQKRGSPSDVVTPIVTQHSKVNDSNELGGLTTSGSAEVHKAITISSPLTTDLTAELSGGPKNVSVQPEISEGLATTPSTQQVKSSEKTQIAVPQPVAPSYSYATPTPQASFQSTSAPYPVIKELVVSAGESVQITLPKNEVQLNAYVLQEPPKGETYTYDWQLITHPRDYSGEMEGKHSQILKLSKLTPGLYEFKVIVEGQNAHGEGYVNVTVKPEPRKNRPPIAIVSPQFQEISLPTTSTVIDGSQSTDDDKIVQYHWEELKGPLREEKISEDTAILKLSKLVPGNYTFSLTVVDSDGATNSTTANLTVNKAVDYPPVANAGPNQVITLPQNSITLFGNQSTDDHGITSYEWSLSPSSKGKVVEMQGVRTPTLQLSAMQEGDYTYQLTVTDTIGQQATAQVTVIVQPENNKPPQADAGPDKELTLPVDSTTLDGSKSSDDQKIISYLWEKTQGPDGVQLENANSSVATVTGLQVGTYVFTLTVKDERNLQSQSSVNVIVKEEINKPPIAKITGNVVITLPTSTAELDGSKSSDDKGIVSYLWTRDEGSPAAGEVLNHSDHHPILFLSNLVEGTYTFHLKVTDAKGESDTDRTTVEVKPDPRKNNLVEIILDINVSQLTERLKGMFIRQIGVLLGVLDSDIIVQKIQPYTEQSTKMVFFVQNEPPHQIFKGHEVAAMLKSELRKQKADFLIFRALEVNTVTCQLNCSDHGHCDSFTKRCICDPFWMENFIKVQLRDGDSNCEWSVLYVIIATFVIVVALGILSWTVICCCKRQKGKPKRKSKYKILDATDQESLELKPTSRAGRGPGCQSF

SEQ ID NO: 36521 - protein, 491 aa, Homo sapiens
MQEGDYTYQLTVTDTIGQQATAQVTVIVQPENNKPPQADAGPDKELTLPVDSTTLDGSKSSDDQKIISYLWEKTHFFFCRGPDGVQLENANSSVATVTGLQVGTYVFTLTVKDERNLQSQSSVNVIVKEEINKPPIAKITGNVVITLPTSTAELDGSKSSDDKGIVSYLWTRDEGSPAAGEVLNHSDHHPILFLSNLVEGTYTFHLKVTDAKGESDTDRTTVEVKPDPRKNNLVEIILDINVSQLTERLKGMFIRQIGVLLGVLDSDIIVQKIQPYTEQSTKMVFFVQNEPPHQIFKGHEVAAMLKSELRKQKADFLIFRALEVNTVTCQLNCSDHGHCDSFTKRCICDPFWMENFIKVQLRDGDSNCEWSVLYVIIATFVIVVALGILSWTVICCCKRQKGKPKRKSKYKILDATDQESLELKPTSRAGIKQKGLLLSSSLMHSESELDSDDAIFTWPDREKGKLLHGQNGSVPNGQTPLKARSPREEIL

SEQ ID NO: 36522 - protein, 1709 aa, Homo sapiens
MRAGWTPRGFSAFHASLLPGRHPYLAHLGPRDRGARIGSRAYSQGCCSCLWLTYKGKKEGSTKGELGPAAVTDLEIPSYSRGFLPCTPRFPTTWCRGPGCFCGTAVIAGNLGDLARIVGPSHHASQLLLLQEQDSGNHPTMAESLSEISDSLDVLEAGDEGKKKCKFKALKSFFVKKKEKEAEDTQEEEMLELSLSSSNINISSLQPVRENQPTKARAKSSMGSKALSHDSIFMLGPEPERSASKMFPSMDPQRGRPQQRSHISRTLPKPRSKVPGVVSGAMSGAVLQNVPTSAVWVAGPKITENPPSRRRRLSIIPPVIQPEIISKNLVEISLDDESPKNPQKKALPHKSLTATQSFSELSSGPDCSQSLTAFATLASTSSTQLPIGFSTPATTQGCLDSSAARHKMTLNPRKQKKNLQVIIRGLPVWFSHFQGILEGSLQCVTQTLETPNLDEPLPVEPKEEEPNLPLVSEEEKSITKPKEINEKKLGMDSADSSSQKQNNKTEMYDKKTTDQAPNTDASRSQGYPMSAAYGRRWRRKGASVSGLSGCEFKGRSLKQSSEGYGLGDRAGSSPTNKTARNVPFSHLSLEKDNMEQPTTSQPETTTPQGLLSDKDDMGRRNAGIDFGSRKASAAQPIPENMDNSMVSDPQPYHEDAASGAEKTEARASLSLMVESLSTTQEEAILSVAAEAQVFMNPSHIQLEDQEAFSFDLQKAQSKMESAQDVQTICKEKPSGNVHQTFTASVLGMTSTTAKGDVYAKTLPPRSLFQSSRKPDAEEVSSDSENIPEEGDGSEELAHGHSSQSLGKFEDEQEVFSESKSFVEDLSSSEEELDLRCLSQALEEPEDAEVFTESSSYVEKYNTSDDCSSSEEDLPLRHPAQALGKPKNQQEVSSASNNTPEEQNDFMQQLPSRCPSQPIMNPTVQQQVPTSSVGTSIKQSDSVEPIPPRHPFQPWVNPKVEQEVSSSPKSMAVEESISMKPLPPKLLCQPLMNPKVQQNMFSGSEDIAVERVISVEPLLPRYSPQSLTDPQIRQISESTAVEEGTYVEPLPPRCLSQPSERPKFLDSMSTSAEWSSPVAPTPSKYTSPPWVTPKFEELYQLSAHPESTTVEEDISKEQLLPRHLSQLTVGNKVQQLSSNFERAAIEADISGSPLPPQYATQFLKRSKVQEMTSRLEKMAVEGTSNKSPIPRRPTQSFVKFMAQQIFSESSALKRGSDVAPLPPNLPSKSLSKPEVKHQVFSDSGSANPKGGISSKMLPMKHPLQSLGRPEDPQKVFSYSERAPGKCSSFKEQLSPRQLSQALRKPEYEQKVSPVSASSPKEWRNSKKQLPPKHSSQASDRSKFQPQMSSKGPVNVPVKQSSGEKHLPSSSPFQQQVHSSSVNAAARRSVFESNSDNWFLGRDEAFAIKTKKFSQGSKNPIKSIPAPATKPGKFTIAPVRQTSTSGGIYSKKEDLESGDGNNNQHANLSNQDDVEKLFGVRLKRAPPSQKYKSEKQDNFTQLASVPSGPISSSVGRGHKIRSTSQGLLDAAGNLTKISYVADKQQSRPKSESMAKKQPACKTPGKPAGQQSDYAVSEPVWITMAKQKQKSFKAHISVKELKTKSNAGADAETKEPKYEGAGSANENQPKKMFTSSVHKQEKTAQMKPPKPTKSVGFEAQKILQVPAMEKETKRSSTLPAKFQNPVEPIEPVWFSLARKKAKAWSHMAEITQ

SEQ ID NO: 36523 - protein, 671 aa, Homo sapiens
MADPAAGPPPSEGEESTVRFARKGALRQKNVHEVKNHKFTARFFKQPTFCSHCTDFIWGFGKQGFQCQVCCFVVHKRCHEFVTFSCPGADKGPASDDPRSKHKFKIHTYSSPTFCDHCGSLLYGLIHQGMKCDTCMMNVHKRCVMNVPSLCGTDHTERRGRIYIQAHIDRDVLIVLVRDAKNLVPMDPNGLSDPYVKLKLIPDPKSESKQKTKTIKCSLNPEWNETFRFQLKESDKDRRLSVEIWDWDLTSRNDFMGSLSFGISELQKASVDGWFKLLSQEEGEYFNVPVPPEGSEANEELRQKFERAKISQGTKVPEEKTTNTVSKFDNNGNRDRMKLTDFNFLMVLGKGSFGKVMLSERKGTDELYAVKILKKDVVIQDDDVECTMVEKRVLALPGKPPFLTQLHSCFQTMDRLYFVMEYVNGGDLMYHIQQVGRFKEPHAVFYAAEIAIGLFFLQSKGIIYRDLKLDNVMLDSEGHIKIADFGMCKENIWDGVTTKTFCGTPDYIAPEIIAYQPYGKSVDWWAFGVLLYEMLAGQAPFEGEDEDELFQSIMEHNVAYPKSMSKEAVAICKGLMTKHPGKRLGCGPEGERDIKEHAFFRYIDWEKLERKEIQPPYKPKARDKRDTSNFDKEFTRQPVELTPTDKLFIMNLDQNEFAGFSYTNPEFVINV

SEQ ID NO: 36524 - protein, 673 aa, Homo sapiens
MADPAAGPPPSEGEESTVRFARKGALRQKNVHEVKNHKFTARFFKQPTFCSHCTDFIWGFGKQGFQCQVCCFVVHKRCHEFVTFSCPGADKGPASDDPRSKHKFKIHTYSSPTFCDHCGSLLYGLIHQGMKCDTCMMNVHKRCVMNVPSLCGTDHTERRGRIYIQAHIDRDVLIVLVRDAKNLVPMDPNGLSDPYVKLKLIPDPKSESKQKTKTIKCSLNPEWNETFRFQLKESDKDRRLSVEIWDWDLTSRNDFMGSLSFGISELQKASVDGWFKLLSQEEGEYFNVPVPPEGSEANEELRQKFERAKISQGTKVPEEKTTNTVSKFDNNGNRDRMKLTDFNFLMVLGKGSFGKVMLSERKGTDELYAVKILKKDVVIQDDDVECTMVEKRVLALPGKPPFLTQLHSCFQTMDRLYFVMEYVNGGDLMYHIQQVGRFKEPHAVFYAAEIAIGLFFLQSKGIIYRDLKLDNVMLDSEGHIKIADFGMCKENIWDGVTTKTFCGTPDYIAPEIIAYQPYGKSVDWWAFGVLLYEMLAGQAPFEGEDEDELFQSIMEHNVAYPKSMSKEAVAICKGLMTKHPGKRLGCGPEGERDIKEHAFFRYIDWEKLERKEIQPPYKPKACGRNAENFDRFFTRHPPVLTPPDQEVIRNIDQSEFEGFSFVNSEFLKPEVKS

SEQ ID NO: 36525 - protein, 169 aa, Homo sapiens
MGCCGCSGGCGSSCGGCDSSCGSCGSGCRGCGPSCCAPVYCCKPVCCCVPACSCSSCGKRGCGSCGGSKGGCGSCGCSQCSCCKPCCCSSGCGSSCCQCSCCKPYCSQCSCCKPCCSSSGRGSSCCQSSCCKPCCSSSGCGSSCCQSSCCKPCCSQSRCCVPVCYQCKI

SEQ ID NO: 36526 - protein, 389 aa, Homo sapiens
MRRVTLFLNGSPKNGKVVAVYGTLSDLLSVASSKLGIKATSVYNGKGGLIDDIALIRDDDVLFVCEGEPFIDPQTDSKPPEGLLGFHTDWLTLNVGGRYFTTTRSTLVNKEPDSMLAHMFKDKGVWGNKQDHRGAFLIDRSPEYFEPILNYLRHGQLIVNDGINLLGVLEEARFFGIDSLIEHLEVAIKNSQPPEDHSPISRKEFVRFLLATPTKSELRCQGLNFSGADLSRLDLRYINFKMANLSRCNLAHANLCCANLERADLSGSVLDCANLQGVKMLCSNAEGASLKLCNFEDPSGLKANLEGANLKGVDMEGSQMTGINLRVATLKNAKLKNCNLRGATLAGTDLENCDLSGCDLQEANLRGSNVKGAIFEEMLTPLHMSQSVR

SEQ ID NO: 36527 - protein, 174 aa, Homo sapiens
MTCCQTSFCGYPSFSISGTCGSSCCQPSCCETSCCQPRSCQTSFCGFPSFSTSGTCSSSCCQPSCCETSCCQPSCCETSCCQPSCCQISSCGTGCGIGGGISYGQEGSSGAVSTRIRWCRPDSRVEGTYLPPCCVVSCTPPSCCQLHHAQASCCRPSYCGQSCCRPVCCCEPTC

SEQ ID NO: 36528 - protein, 154 aa, Homo sapiens
MTHCCSPCCQPTCCRTTCCRTTCWKPTTVTTCSSTPCCQPSCCVSSCCQPCCRPTCCQNTCCQPTCVTSCCQPSCCSTPCCQPTCCGSSCDQSSSCAPVYCRRTCYYPTTVCLPGCLNQSCGSNCCQPCCRPACCETTCFQPTCVSSCCQPFCC

SEQ ID NO: 36529 - protein, 402 aa, Homo sapiens
MNIHMKRKTIKNINTFENRMLMLDGMPAVRVKTELLESEQGSPNVHNYPDMEAVPLLLNNVKGEPPEDSLSVDHFQTQTEPVDLSINKARTSPTAVSSSPVSMTASASSPSSTSTSSSSSSRLASSPTVITSVSSASSSSTVLTPGPLVASASGVGGQQFLHIIHPVPPSSPMNLQSNKLSHVHRIPVVVQSVPVVYTAVRSPGNVNNTIVVPLLEDGRGHGKAQMDPRGLSPRQSKSDSDDDDLPNVTLDSVNETGSTALSIARAVQEVHPSPVSRVRGNRMNNQKFPCSISPFSIESTRRQRRSESPDSRKRRIHRCDFEGCNKVYTKSSHLKAHRRTHTGEKPYKCTWEGCTWKFARSDELTRHYRKHTGVKPFKCADCDRSFSRSDHLALHRRRHMLV

SEQ ID NO: 36530 - protein, 269 aa, Homo sapiens
MNIHMKRKTIKNINTFENRMLMLDGMPAVRVKTELLESEQGSPNVHNYPDMEAVPLLLNNVKGEPPEDSLSVDHFQTQTEPVDLSINKARTSPTAVSSSPVSMTASASSPSSTSTSSSSSSRLASSPTVITSVSSASSSSTVLTPGPLVASASGVGGQQFLHIIHPVPPSSPMNLQSNKLSHVHRIPVVVQSVPVVYTAVRSPGNVNNTIVVPLLEDGRGHGKAQMDPRGLSPRQSKSDSDDDDLPNVTLDSVNETGSTALSIARAVQE

SEQ ID NO: 36531 - protein, 309 aa, Homo sapiens
MNIHMKRKTIKNINTFENRMLMLDGMPAVRVKTELLESEQGSPNVHNYPDMEAVPLLLNNVKGEPPEDSLSVDHFQTQTEPVDLSINKARTSPTAVSSSPVSMTASASSPSSTSTSSSSSSRLASSPTVITSVSSASSSSTVLTPGPLVASASGVGGQQFLHIIHPVPPSSPMNLQSNKLSHVHRIPVVVQSVPVVYTAVRSPGNVNNTIVVPLLEDGRGHGKAQMDPRGLSPRQSKSDSDDDDLPNVTLDSVNETGSTALSIARAVQEVHPSPVSRVRGNRMNNQKFPWRETLQVYLGRLHLEVRSFR

SEQ ID NO: 36532 - protein, 442 aa, Homo sapiens
MSAAQGWDRNRRRGGGAAGAGGGGSGAGGGSGGSGGRGTGQLNRFVQLSGRPHLPGKKKIRWDPVRRRFIQSCPIIRIPNRFLRGHRPPPARSGHRCVADNTNLYVFGGYNPDYDESGGPDNEDYPLFRELWRYHFATGVWHQMGTDGYMPRELASMSLVLHGNNLLVFGGTGIPFGESNGNDVHVCNVKYKRWALLSCRGKKPSRIYGQAMAIINGSLYVFGGTTGYIYSTDLHKLDLNTREWTQLKPNNLSCDLPEERYRHEIAHDGQRIYILGGGTSWTAYSLNKIHAYNLETNAWEEIATKPHEKIGFPAARRCHSCVQIKNDVFICGGYNGEVILGDIWKLNLQTFQWVKLPATMPEPVYFHCAAVTPAGCMYIHGGVVNIHENKRTGSLFKIWLVVPSLLELAWEKLLAAFPNLANLSRTQLLHLGLTQGLIERLK

SEQ ID NO: 36533 - protein, 299 aa, Homo sapiens
MGTDGYMPRELASMSLVLHGNNLLVFGGTGIPFGESNGNDVHVCNVKYKRWALLSCRGKKPSRIYGQAMAIINGSLYVFGGTTGYIYSTDLHKLDLNTREWTQLKPNNLSCDLPEERYRHEIAHDGQRIYILGGGTSWTAYSLNKIHAYNLETNAWEEIATKPHEKIGFPAARRCHSCVQIKNDVFICGGYNGEVILGDIWKLNLQTFQWVKLPATMPEPVYFHCAAVTPAGCMYIHGGVVNIHENKRTGSLFKIWLVVPSLLELAWEKLLAAFPNLANLSRTQLLHLGLTQGLIERLK

SEQ ID NO: 36534 - protein, 362 aa, Homo sapiens
MATAETALPSISTLTALGPFPDTQDDFLKWWRSEEAQDMGPGPPDPTEPPLHVKSEDQPGEEEDDERGADATWDLDLLLTNFSGPEPGGAPQTCALAPSEASGAQYPPPPETLGAYAGGPGLVAGLLGSEDHSGWVRPALRARAPDAFVGPALAPAPAPEPKALALQPVYPGPGAGSSGGYFPRTGLSVPAASGAPYGLLSGYPAMYPAPQYQGHFQLFRGLQGPAPGPATSPSFLSCLGPGTVGTGLGGTAEDPGVIAETAPSKRGRRSWARKRQAAHTCAHPGCGKSYTKSSHLKAHLRTHTGEKPYACTWEGCGWRFARSDELTRHYRKHTGQRPFRCQLCPRAFSRSDHLALHMKRHL

SEQ ID NO: 36535 - protein, 520 aa, Homo sapiens
MGKKGKKEKKGRGAEKTAAKMEKKVSKRSRKEEEDLEALIAHFQTLDAKRTQTVELPCPPPSPRLNASLSVHPEKDELILFGGEYFNGQKTFLYNELYVYNTRKDTWTKVDIPSPPPRRCAHQAVVVPQGGGQLWVFGGEFASPNGEQFYHYKDLWVLHLATKTWEQVKSTGGPSGRSGHRMVAWKRQLILFGGFHESTRDYIYYNDVYAFNLDTFTWSKLSPSGTGPTPRSGCQMSVTPQGGIVVYGGYSKQRVKKDVDKGTRHSDMFLLKPEDGREDKWVWTRMNPSGVKPTPRSGFSVAMAPNHQTLFFGGVCDEEEEESLSGEFFNDLYFYDATRNRWFEGQLKGPKSEKKKRRRGRKEEPEGGSRPACGGAGTQGPVQLVKEVVAEDGTVVTIKQVLTAPGSAGQPRSEDEDSLEEAGSPAPGPCPRSNAMLAVKHGVLYVYGGMFEAGDRQVTLSDLHCLDLHRMEAWKALVEMDPETQEWLEETDSEEDSEEVEGAEGGVDDEDSGEESGAED

SEQ ID NO: 36536 - protein, 463 aa, Homo sapiens
MGKKGKKEKKGRGAEKTAAKMEKKVSKRSRKEETFLYNELYVYNTRKDTWTKVDIPSPPPRRCAHQAVVVPQGGGQLWVFGGEFASPNGEQFYHYKDLWVLHLATKTWEQVKSTGGPSGRSGHRMVAWKRQLILFGGFHESTRDYIYYNDVYAFNLDTFTWSKLSPSGTGPTPRSGCQMSVTPQGGIVVYGGYSKQRVKKDVDKGTRHSDMFLLKPEDGREDKWVWTRMNPSGVKPTPRSGFSVAMAPNHQTLFFGGVCDEEEEESLSGEFFNDLYFYDATRNRWFEGQLKGPKSEKKKRRRGRKEEPEGGSRPACGGAGTQGPVQLVKEVVAEDGTVVTIKQVLTAPGSAGQPRSEDEDSLEEAGSPAPGPCPRSNAMLAVKHGVLYVYGGMFEAGDRQVTLSDLHCLDLHRMEAWKALVEMDPETQEWLEETDSEEDSEEVEGAEGGVDDEDSGEESGAED

SEQ ID NO: 36537 - protein, 489 aa, Homo sapiens
MGKKGKKEKKGRGAEKTAAKMEKKVSKRSRKEEEDLEALIAHFQTLDAKRTQTVELPCPPPSPRLNASLSVHPEKDELILFGGEYFNGQKTFLYNELYVYNTRKDTWTKVDIPSPPPRRCAHQAVVVPQGGGQLWVFGGEFASPNGEQFYHYKDLWVLHLATKTWEQVKDYIYYNDVYAFNLDTFTWSKLSPSGTGPTPRSGCQMSVTPQGGIVVYGGYSKQRVKKDVDKGTRHSDMFLLKPEDGREDKWVWTRMNPSGVKPTPRSGFSVAMAPNHQTLFFGGVCDEEEEESLSGEFFNDLYFYDATRNRWFEGQLKGPKSEKKKRRRGRKEEPEGGSRPACGGAGTQGPVQLVKEVVAEDGTVVTIKQVLTAPGSAGQPRSEDEDSLEEAGSPAPGPCPRSNAMLAVKHGVLYVYGGMFEAGDRQVTLSDLHCLDLHRMEAWKALVEMDPETQEWLEETDSEEDSEEVEGAEGGVDDEDSGEESGAED

SEQ ID NO: 36538 - protein, 708 aa, Homo sapiens
MAAAAVAAAAAAAAAASLQVLEMESMETAAAGSAGLAAEVRGSGTVDFGPGPGISAMEASGGDPGPEAEDFECSSHCSELSWRQNEQRRQGLFCDITLCFGGAGGREFRAHRSVLAAATEYFTPLLSGQFSESRSGRVEMRKWSSEPGPEPDTVEAVIEYMYTGRIRVSTGSVHEVLELADRFLLIRLKEFCGEFLKKKLHLSNCVAIHSLAHMYTLSQLALKAADMIRRNFHKVIQDEEFYTLPFHLIRDWLSDLEITVDSEEVLFETVLKWVQRNAEERERYFEELFKLLRLSQMKPTYLTRHVKPERLVANNEVCVKLVADAVERHALRAENIQSGTCQHPTSHVSLLPRYGQNMDVIMVIGGVSEGGDYLSECVGYFVDEDRWVNLPHIHNHLDGHAVAVTESYVYVAGSMEPGFAKTVERYNPNLNTWEHVCSLMTRKHSFGLTEVKGKLYSIGGHGNFSPGFKDVTVYNPELDKWHNLESAPKILRDVKALAIEDRFVYIAARTPVDRDTEDGLKAVITCYDTETRQWQDVESLPLIDNYCFFQMSVVNSNFYQTASCCPKSYCLENEEAVRKIASQVSDEILESLPPEVLSIEGAAICYYKDDVFIIGGWKNSDDIDKQYRKEAYRYCAERKRWMLLPPMPQPRCRATACHVRIPYRYLHGTQRYPMPQNLMWQKDRIRQMQEIHRHALNMRRVPSSQIEC

SEQ ID NO: 36539 - protein, 574 aa, Homo sapiens
MVEDGAEELEDLVHFSVSELPSRGYGVMEEIRRQGKLCDVTLKIGDHKFSAHRIVLAASIPYFHAMFTNDMMECKQDEIVMQGMDPSALEALINFAYNGNLAIDQQNVQSLLMGASFLQLQSIKDACCTFLRERLHPKNCLGVRQFAETMMCAVLYDAANSFIHQHFVEVSMSEEFLALPLEDVLELVSRDELNVKSEEQVFEAALAWVRYDREQRGPYLPELLSNIRLPLCRPQFLSDRVQQDDLVRCCHKCRDLVDEAKDYHLMPERRPHLPAFRTRPRCCTSIAGLIYAVGGLNSAGDSLNVVEVFDPIANCWERCRPMTTARSRVGVAVVNGLLYAIGGYDGQLRLSTVEAYNPETDTWTRVGSMNSKRSAMGTVVLDGQIYVCGGYDGNSSLSSVETYSPETDKWTVVTSMSSNRSAAGVTVFEGRIYVSGGHDGLQIFSSVEHYNHHTATWHPAAGMLNKRCRHGAASLGSKMFVCGGYDGSGFLSIAEMYSSVADQWCLIVPMHTRRSRVSLVASCGRLYAVGGYDGQSNLSSVEMYDPETDCWTFMAPMACHEGGVGVGCIPLLTI

SEQ ID NO: 36540 - protein, 509 aa, Homo sapiens
MFTNDMMECKQDEIVMQGMDPSALEALINFAYNGNLAIDQQNVQSLLMGASFLQLQSIKDACCTFLRERLHPKNCLGVRQFAETMMCAVLYDAANSFIHQHFVEVSMSEEFLALPLEDVLELVSRDELNVKSEEQVFEAALAWVRYDREQRGPYLPELLSNIRLPLCRPQFLSDRVQQDDLVRCCHKCRDLVDEAKDYHLMPERRPHLPAFRTRPRCCTSIAGLIYAVGGLNSAGDSLNVVEVFDPIANCWERCRPMTTARSRVGVAVVNGLLYAIGGYDGQLRLSTVEAYNPETDTWTRVGSMNSKRSAMGTVVLDGQIYVCGGYDGNSSLSSVETYSPETDKWTVVTSMSSNRSAAGVTVFEGRIYVSGGHDGLQIFSSVEHYNHHTATWHPAAGMLNKRCRHGAASLGSKMFVCGGYDGSGFLSIAEMYSSVADQWCLIVPMHTRRSRVSLVASCGRLYAVGGYDGQSNLSSVEMYDPETDCWTFMAPMACHEGGVGVGCIPLLTI

SEQ ID NO: 36541 - protein, 422 aa, Homo sapiens
MDHPSREKDERQRTTKPMAQRSAHCSRPSGSSSSSGVLMVGPNFRVGKKIGCGNFGELRLGKNLYTNEYVAIKLEPIKSRAPQLHLEYRFYKQLGSAGEGLPQVYYFGPCGKYNAMVLELLGPSLEDLFDLCDRTFTLKTVLMIAIQLLSRMEYVHSKNLIYRDVKPENFLIGRQGNKKEHVIHIIDFGLAKEYIDPETKKHIPYREHKSLTGTARYMSINTHLGKEQSRRDDLEALGHMFMYFLRGSLPWQGLKADTLKERYQKIGDTKRNTPIEALCENFPEEMATYLRYVRRLDFFEKPDYEYLRTLFTDLFEKKGYTFDYAYDWVGRPIPTPVGSVHVDSGASAITRESHTHRDRPSQQQPLRNQVVSSTNGELNVDDPTGAHSNAPITAHAEVEVVEEAKCCCFFKRKRKKTAQRHK

SEQ ID NO: 36542 - protein, 393 aa, Homo sapiens
MDHPSREKDERQRTTKPMAQRSAHCSRPSGSSSSSGVLMVGPNFRVGKKIGCGNFGELRLGKNLYTNEYVAIKLEPIKSRAPQLHLEYRFYKQLGSAGEGLPQVYYFGPCGKYNAMVLELLGPSLEDLFDLCDRTFTLKTVLMIAIQLLSRMEYVHSKNLIYRDVKPENFLIGRQGNKKEHVIHIIDFGLAKEYIDPETKKHIPYREHKSLTGTARYMSINTHLGKEQSRRDDLEALGHMFMYFLRGSLPWQGLKADTLKERYQKIGDTKRNTPIEALCENFPEEMATYLRYVRRLDFFEKPDYEYLRTLFTDLFEKKGYTFDYAYDWVGRPIPTPVGSVHVDSGASAITRESHTHRDRPSQQQPLRNQSLRTVTAEHYDVNNSAIWHRGRGT

SEQ ID NO: 36543 - protein, 620 aa, Homo sapiens
MASDSMSSKQARNHITKGKRQQQHQQIKNRSSISDGDGEDSFIFEANEAWKDFHGSLLRFYENGELCDVTLKVGSKLISCHKLVLACVIPYFRAMFLSEMAEAKQTLIEIRDFDGDAIEDLVKFVYSSRLTLTVDNVQPLLYAACILQVELVARACCEYMKLHFHPSNCLAVRAFAESHNRIDLMDMADQYACDHFTEVVECEDFVSVSPQHLHKLLSSSDLNIENEKQVYNAAIKWLLANPQHHSKWLDETLAQVRLPLLPVDFLMGVVAKEQIVKQNLKCRDLLDEARNYHLHLSSRAVPDFEYSIRTTPRKHTAGVLFCVGGRGGSGDPFRSIECYSINKNSWFFGPEMNSRRRHVGVISVEGKVYAVGGHDGNEHLGSMEMFDPLTNKWMMKASMNTKRRGIALASLGGPIYAIGGLDDNTCFNDVERYDIESDQWSTVAPMNTPRGGVGSVALVNHVYAVGGNDGMASLSSVERYDPHLDKWIEVKEMGQRRAGNGVSKLHGCLYVVGGFDDNSPLSSVERYDPRSNKWDYVAALTTPRGGVGIATVMGKIFAVGGHNGNAYLNTVEAFDPVLNRWELVGSVSHCRAGAGVAVCSCLTSQIRDVGHGSNNVVDCM

SEQ ID NO: 36544 - protein, 544 aa, Homo sapiens
MASDSMSSKQARNHITKGKRQQQHQQIKNRSSISDGDGEDSFIFEANEAWKDFHGSLLRFYENGELCDVTLKVELVARACCEYMKLHFHPSNCLAVRAFAESHNRIDLMDMADQYACDHFTEVVECEDFVSVSPQHLHKLLSSSDLNIENEKQVYNAAIKWLLANPQHHSKWLDETLAQVRLPLLPVDFLMGVVAKEQIVKQNLKCRDLLDEARNYHLHLSSRAVPDFEYSIRTTPRKHTAGVLFCVGGRGGSGDPFRSIECYSINKNSWFFGPEMNSRRRHVGVISVEGKVYAVGGHDGNEHLGSMEMFDPLTNKWMMKASMNTKRRGIALASLGGPIYAIGGLDDNTCFNDVERYDIESDQWSTVAPMNTPRGGVGSVALVNHVYAVGGNDGMASLSSVERYDPHLDKWIEVKEMGQRRAGNGVSKLHGCLYVVGGFDDNSPLSSVERYDPRSNKWDYVAALTTPRGGVGIATVMGKIFAVGGHNGNAYLNTVEAFDPVLNRWELVGSVSHCRAGAGVAVCSCLTSQIRDVGHGSNNVVDCM

SEQ ID NO: 36545 - protein, 499 aa, Homo sapiens
MASTTTCTRFTDEYQLFEELGKGAFSVVRRCMKIPTGQEYAAKIINTKKLSARDHQKLEREARICRLLKHPNIVRLHDSISEEGFHYLVFDLVTGGELFEDIVAREYYSEADASHCIQQILESVNHCHLNGIVHRDLKPENLLLASKSKGAAVKLADFGLAIEVQGDQQAWFGFAGTPGYLSPEVLRKDPYGKPVDMWACGVILYILLVGYPPFWDEDQHRLYQQIKAGAYDFPSPEWDTVTPEAKDLINKMLTINPAKRITASEALKHPWICQRSTVASMMHRQETVDCLKKFNARRKLKGAILTTMLATRNFSAAKSLLKKPDGVKESTESSNTTIEDEDVKARKQEIIKVTEQLIEAINNGDFEAYTKICDPGLTAFEPEALGNLVEGMDFHRFYFENALSKSNKPIHTIILNPHVHLVGDDAACIAYIRLTQYMDGSGMPKTMQSEETRVWHRRDGKWQNVHFHRSGSPTVPIKPPCIPNGKENFSGGTSLWQNI

SEQ ID NO: 36546 - protein, 510 aa, Homo sapiens
MASTTTCTRFTDEYQLFEELGKGAFSVVRRCMKIPTGQEYAAKIINTKKLSARDHQKLEREARICRLLKHPNIVRLHDSISEEGFHYLVFDLVTGGELFEDIVAREYYSEADASHCIQQILESVNHCHLNGIVHRDLKPENLLLASKSKGAAVKLADFGLAIEVQGDQQAWFGFAGTPGYLSPEVLRKDPYGKPVDMWACGVILYILLVGYPPFWDEDQHRLYQQIKAGAYDFPSPEWDTVTPEAKDLINKMLTINPAKRITASEALKHPWICQRSTVASMMHRQETVDCLKKFNARRKLKGAILTTMLATRNFSAAKSLLKKPDGVKKRKSSSSVQMMESTESSNTTIEDEDVKARKQEIIKVTEQLIEAINNGDFEAYTKICDPGLTAFEPEALGNLVEGMDFHRFYFENALSKSNKPIHTIILNPHVHLVGDDAACIAYIRLTQYMDGSGMPKTMQSEETRVWHRRDGKWQNVHFHRSGSPTVPIKPPCIPNGKENFSGGTSLWQNI

SEQ ID NO: 36547 - protein, 519 aa, Homo sapiens
MASTTTCTRFTDEYQLFEELGKGAFSVVRRCMKIPTGQEYAAKIINTKKLSARDHQKLEREARICRLLKHPNIVRLHDSISEEGFHYLVFDLVTGGELFEDIVAREYYSEADASHCIQQILESVNHCHLNGIVHRDLKPENLLLASKSKGAAVKLADFGLAIEVQGDQQAWFGFAGTPGYLSPEVLRKDPYGKPVDMWACGVILYILLVGYPPFWDEDQHRLYQQIKAGAYDFPSPEWDTVTPEAKDLINKMLTINPAKRITASEALKHPWICQRSTVASMMHRQETVDCLKKFNARRKLKGAILTTMLATRNFSAAKSLLKKPDGVKINNKANVVTSPKENIPTPALESTESSNTTIEDEDVKARKQEIIKVTEQLIEAINNGDFEAYTKICDPGLTAFEPEALGNLVEGMDFHRFYFENALSKSNKPIHTIILNPHVHLVGDDAACIAYIRLTQYMDGSGMPKTMQSEETRVWHRRDGKWQNVHFHRSGSPTVPIKPPCIPNGKENFSGGTSLWQNI

SEQ ID NO: 36548 - protein, 478 aa, Homo sapiens
MASTTTCTRFTDEYQLFEELGKGAFSVVRRCMKIPTGQEYAAKIINTKKLSARDHQKLEREARICRLLKHPNIVRLHDSISEEGFHYLVFDLVTGGELFEDIVAREYYSEADASHCIQQILESVNHCHLNGIVHRDLKPENLLLASKSKGAAVKLADFGLAIEVQGDQQAWFGFAGTPGYLSPEVLRKDPYGKPVDMWACGVILYILLVGYPPFWDEDQHRLYQQIKAGAYDFPSPEWDTVTPEAKDLINKMLTINPAKRITASEALKHPWICQRSTVASMMHRQETVDCLKKFNARRKLKGAILTTMLATRNFSAAKSLLKKPDGVKESTESSNTTIEDEDVKARKQEIIKVTEQLIEAINNGDFEAYTKICDPGLTAFEPEALGNLVEGMDFHRFYFENALSKSNKPIHTIILNPHVHLVGDDAACIAYIRLTQYMDGSGMPKTMQSEETRVWHRRDGKWQNVHFHRSGSPTVPIK

SEQ ID NO: 36549 - protein, 489 aa, Homo sapiens
MASTTTCTRFTDEYQLFEELGKGAFSVVRRCMKIPTGQEYAAKIINTKKLSARDHQKLEREARICRLLKHPNIVRLHDSISEEGFHYLVFDLVTGGELFEDIVAREYYSEADASHCIQQILESVNHCHLNGIVHRDLKPENLLLASKSKGAAVKLADFGLAIEVQGDQQAWFGFAGTPGYLSPEVLRKDPYGKPVDMWACGVILYILLVGYPPFWDEDQHRLYQQIKAGAYDFPSPEWDTVTPEAKDLINKMLTINPAKRITASEALKHPWICQRSTVASMMHRQETVDCLKKFNARRKLKGAILTTMLATRNFSAAKSLLKKPDGVKKRKSSSSVQMMESTESSNTTIEDEDVKARKQEIIKVTEQLIEAINNGDFEAYTKICDPGLTAFEPEALGNLVEGMDFHRFYFENALSKSNKPIHTIILNPHVHLVGDDAACIAYIRLTQYMDGSGMPKTMQSEETRVWHRRDGKWQNVHFHRSGSPTVPIK

SEQ ID NO: 36550 - protein, 498 aa, Homo sapiens
MASTTTCTRFTDEYQLFEELGKGAFSVVRRCMKIPTGQEYAAKIINTKKLSARDHQKLEREARICRLLKHPNIVRLHDSISEEGFHYLVFDLVTGGELFEDIVAREYYSEADASHCIQQILESVNHCHLNGIVHRDLKPENLLLASKSKGAAVKLADFGLAIEVQGDQQAWFGFAGTPGYLSPEVLRKDPYGKPVDMWACGVILYILLVGYPPFWDEDQHRLYQQIKAGAYDFPSPEWDTVTPEAKDLINKMLTINPAKRITASEALKHPWICQRSTVASMMHRQETVDCLKKFNARRKLKGAILTTMLATRNFSAAKSLLKKPDGVKINNKANVVTSPKENIPTPALESTESSNTTIEDEDVKARKQEIIKVTEQLIEAINNGDFEAYTKICDPGLTAFEPEALGNLVEGMDFHRFYFENALSKSNKPIHTIILNPHVHLVGDDAACIAYIRLTQYMDGSGMPKTMQSEETRVWHRRDGKWQNVHFHRSGSPTVPIK

SEQ ID NO: 36551 - protein, 513 aa, Homo sapiens
MASTTTCTRFTDEYQLFEELGKGAFSVVRRCMKIPTGQEYAAKIINTKKLSARDHQKLEREARICRLLKHPNIVRLHDSISEEGFHYLVFDLVTGGELFEDIVAREYYSEADASHCIQQILESVNHCHLNGIVHRDLKPENLLLASKSKGAAVKLADFGLAIEVQGDQQAWFGFAGTPGYLSPEVLRKDPYGKPVDMWACGVILYILLVGYPPFWDEDQHRLYQQIKAGAYDFPSPEWDTVTPEAKDLINKMLTINPAKRITASEALKHPWICQRSTVASMMHRQETVDCLKKFNARRKLKGAILTTMLATRNFSAAKSLLKKPDGVKEPQTTVIHNPDGNKESTESSNTTIEDEDVKARKQEIIKVTEQLIEAINNGDFEAYTKICDPGLTAFEPEALGNLVEGMDFHRFYFENALSKSNKPIHTIILNPHVHLVGDDAACIAYIRLTQYMDGSGMPKTMQSEETRVWHRRDGKWQNVHFHRSGSPTVPIKPPCIPNGKENFSGGTSLWQNI

SEQ ID NO: 36552 - protein, 492 aa, Homo sapiens
MASTTTCTRFTDEYQLFEELGKGAFSVVRRCMKIPTGQEYAAKIINTKKLSARDHQKLEREARICRLLKHPNIVRLHDSISEEGFHYLVFDLVTGGELFEDIVAREYYSEADASHCIQQILESVNHCHLNGIVHRDLKPENLLLASKSKGAAVKLADFGLAIEVQGDQQAWFGFAGTPGYLSPEVLRKDPYGKPVDMWACGVILYILLVGYPPFWDEDQHRLYQQIKAGAYDFPSPEWDTVTPEAKDLINKMLTINPAKRITASEALKHPWICQRSTVASMMHRQETVDCLKKFNARRKLKGAILTTMLATRNFSAAKSLLKKPDGVKEPQTTVIHNPDGNKESTESSNTTIEDEDVKARKQEIIKVTEQLIEAINNGDFEAYTKICDPGLTAFEPEALGNLVEGMDFHRFYFENALSKSNKPIHTIILNPHVHLVGDDAACIAYIRLTQYMDGSGMPKTMQSEETRVWHRRDGKWQNVHFHRSGSPTVPIK

SEQ ID NO: 36553 - protein, 524 aa, Homo sapiens
MASTTTCTRFTDEYQLFEELGKGAFSVVRRCMKIPTGQEYAAKIINTKKLSARDHQKLEREARICRLLKHPNIVRLHDSISEEGFHYLVFDLVTGGELFEDIVAREYYSEADASHCIQQILESVNHCHLNGIVHRDLKPENLLLASKSKGAAVKLADFGLAIEVQGDQQAWFGFAGTPGYLSPEVLRKDPYGKPVDMWACGVILYILLVGYPPFWDEDQHRLYQQIKAGAYDFPSPEWDTVTPEAKDLINKMLTINPAKRITASEALKHPWICQRSTVASMMHRQETVDCLKKFNARRKLKGAILTTMLATRNFSAAKSLLKKPDGVKKRKSSSSVQMMEPQTTVIHNPDGNKESTESSNTTIEDEDVKARKQEIIKVTEQLIEAINNGDFEAYTKICDPGLTAFEPEALGNLVEGMDFHRFYFENALSKSNKPIHTIILNPHVHLVGDDAACIAYIRLTQYMDGSGMPKTMQSEETRVWHRRDGKWQNVHFHRSGSPTVPIKPPCIPNGKENFSGGTSLWQNI

SEQ ID NO: 36554 - protein, 478 aa, Homo sapiens
MASTTTCTRFTDEYQLFEELGKGAFSVVRRCMKIPTGQEYAAKIINTKKLSARDHQKLEREARICRLLKHPNIVRLHDSISEEGFHYLVFDLVTGGELFEDIVAREYYSEADASHCIQQILESVNHCHLNGIVHRDLKPENLLLASKSKGAAVKLADFGLAIEVQGDQQAWFGFAGTPGYLSPEVLRKDPYGKPVDMWACGVILYILLVGYPPFWDEDQHRLYQQIKAGAYDFPSPEWDTVTPEAKDLINKMLTINPAKRITASEALKHPWICQRSTVASMMHRQETVDCLKKFNARRKLKGAILTTMLATRNFSAAKSLLKKPDGVKESTESSNTTIEDEDVKARKQEIIKVTEQLIEAINNGDFEAYTKICDPGLTAFEPEALGNLVEGMDFHRFYFENALSKSNKPIHTIILNPHVHLVGDDAACIAYIRLTQYMDGSGMPKTMQSEETRVWHRRDGKWQNVHFHRSGSPTVPIN

SEQ ID NO: 36555 - protein, 385 aa, Homo sapiens
MARENGESSSSWKKQAEDIKKIFEFKETLGTGAFSEVVLAEEKATGKLFAVKCIPKKALKGKESSIENEIAVLRKIKHENIVALEDIYESPNHLYLVMQLVSGGELFDRIVEKGFYTEKDASTLIRQVLDAVYYLHRMGIVHRDLKPENLLYYSQDEESKIMISDFGLSKMEGKGDVMSTACGTPGYVAPEVLAQKPYSKAVDCWSIGVIAYILLCGYPPFYDENDSKLFEQILKAEYEFDSPYWDDISDSAKDFIRNLMEKDPNKRYTCEQAARHPWIAGDTALNKNIHESVSAQIRKNFAKSKWRQAFNATAVVRHMRKLHLGSSLDSSNASVSSSLSLASQKDCLAPSTLCSFISSSSGVSGVGAERRPRPTTVTAVHSGSK

SEQ ID NO: 36556 - protein, 357 aa, Homo sapiens
MARENGESSSSWKKQAEDIKKIFEFKETLGTGAFSEVVLAEEKATGKLFAVKCIPKKALKGKESSIENEIAVLRKIKHENIVALEDIYESPNHLYLVMQLVSGGELFDRIVEKGFYTEKDASTLIRQVLDAVYYLHRMGIVHRDLKPENLLYYSQDEESKIMISDFGLSKMEGKGDVMSTACGTPGYVAPEVLAQKPYSKAVDCWSIGVIAYILLCGYPPFYDENDSKLFEQILKAEYEFDSPYWDDISDSAKDFIRNLMEKDPNKRYTCEQAARHPWIAGDTALNKNIHESVSAQIRKNFAKSKWRQAFNATAVVRHMRKLHLGSSLDSSNASVSSSLSLASQKDCAYVAKPESLS

SEQ ID NO: 36557 - protein, 277 aa, Homo sapiens
MWPLALVIASLTLALSGGVSQESSKVLNTNGTSGFLPGGYTCFPHSQPWQAALLVQGRLLCGGVLVHPKWVLTAAHCLKEGLKVYLGKHALGRVEAGEQVREVVHSIPHPEYRRSPTHLNHDHDIMLLELQSPVQLTGYIQTLPLSHNNRLTPGTTCRVSGWGTTTSPQVNYPKTLQCANIQLRSDEECRQVYPGKITDNMLCAGTKEGGKDSCEGDSGGPLVCNRTLYGIVSWGDFPCGQPDRPGVYTRVSRYVLWIRETIRKYETQQQKWLKGPQ

SEQ ID NO: 36558 - protein, 125 aa, Homo sapiens
MWPLALVIASLTLALSGVNYPKTLQCANIQLRSDEECRQVYPGKITDNMLCAGTKEGGKDSCEGDSGGPLVCNRTLYGIVSWGDFPCGQPDRPGVYTRVSRYVLWIRETIRKYETQQQKWLKGPQ

SEQ ID NO: 36559 - protein, 988 aa, Homo sapiens
MPGGKRGLVAPQNTFLENIVRRSSESSFLLGNAQIVDWPVVYSNDGFCKLSGYHRADVMQKSSTCSFMYGELTDKKTIEKVRQTFDNYESNCFEVLLYKKNRTPVWFYMQIAPIRNEHEKVVLFLCTFKDITLFKQPIEDDSTKGWTKFARLTRALTNSRSVLQQLTPMNKTEVVHKHSRLAEVLQLGSDILPQYKQEAPKTPPHIILHYCAFKTTWDWVILILTFYTAIMVPYNVSFKTKQNNIAWLVLDSVVDVIFLVDIVLNFHTTFVGPGGEVISDPKLIRMNYLKTWFVIDLLSCLPYDIINAFENVDEGISSLFSSLKVVRLLRLGRVARKLDHYLEYGAAVLVLLVCVFGLVAHWLACIWYSIGDYEVIDEVTNTIQIDSWLYQLALSIGTPYRYNTSAGIWEGGPSKDSLYVSSLYFTMTSLTTIGFGNIAPTTDVEKMFSVAMMMVGSLLYATIFGNVTTIFQQMYANTNRYHEMLNNVRDFLKLYQVPKGLSERVMDYIVSTWSMSKGIDTEKVLSICPKDMRADICVHLNRKVFNEHPAFRLASDGCLRALAVEFQTIHCAPGDLIYHAGESVDALCFVVSGSLEVIQDDEVVAILGKGDVFGDIFWKETTLAHACANVRALTYCDLHIIKREALLKVLDFYTAFANSFSRNLTLTCNLRKRIIFRKISDVKKEEEERLRQKNEVTLSIPVDHPVRKLFQKFKQQKELRNQGSTQGDPERNQLQVESRSLQNGASITGTSVVTVSQITPIQTSLAYVKTSESLKQNNRDAMELKPNGGADQKCLKVNSPIRMKNGNGKGWLRLKNNMGAHEEKKEDWNNVTKAESMGLLSEDPKSSDSENSVTKNPLRKTDSCDSGITKSDLRLDKAGEARSPLEHSPIQADAKHPFYPIPEQALQTTLQEVKHELKEDIQLLSCRMTALEKQVAEILKILSEKSVPQASSPKSQMPLQVPPQIPCQDIFSVSRPESPESDKDEIHF

SEQ ID NO: 36560 - protein, 611 aa, Homo sapiens
MPGGKRGLVAPQNTFLENIVRRSSESSFLLGNAQIVDWPVVYSNDGFCKLSGYHRADVMQKSSTCSFMYGELTDKKTIEKVRQTFDNYESNCFEVLLYKKNRTPVWFYMQIAPIRNEHEKVVLFLCTFKDITLFKQPIEDDSTKGWTKFARLTRALTNSRSVLQQLTPMNKTEVVHKHSRLAEVLQLGSDILPQYKQEAPKTPPHIILHYCAFKTTWDWVILILTFYTAIMVPYNVSFKTKQNNIAWLVLDSVVDVIFLVDIVLNFHTTFVGPGGEVISDPKLIRMNYLKTWFVIDLLSCLPYDIINAFENVDEGISSLFSSLKVVRLLRLGRVARKLDHYLEYGAAVLVLLVCVFGLVAHWLACIWYSIGDYEVIDEVTNTIQIDSWLYQLALSIGTPYRYNTSAGIWEGGPSKDSLYVSSLYFTMTSLTTIGFGNIAPTTDVEKMFSVAMMMVGSLLYATIFGNVTTIFQQMYANTNRYHEMLNNVRDFLKLYQVPKGLSERVMDYIVSTWSMSKGIDTEKVLSICPKDMRADICVHLNRKVFNEHPAFRLASDGCLRALAVEFQTIHCAPGDLIYHAGESVDALCFVVSGSLEVIQDDEVVAILDHLS

SEQ ID NO: 36561 - protein, 624 aa, Homo sapiens
MQKSSTCSFMYGELTDKKTIEKVRQTFDNYESNCFEVLLYKKNRTPVWFYMQIAPIRNEHEKVVLFLCTFKDITLFKQPIEDDSTKGWTKFARLTRALTNSRSVLQQLTPMNKTEVVHKHSRLAEVLQLGSDILPQYKQEAPKTPPHIILHYCAFKTTWDWVILILTFYTAIMVPYNVSFKTKQNNIAWLVLDSVVDVIFLVDIVLNFHTTFVGPGGEVISDPKLIRMNYLKTWFVIDLLSCLPYDIINAFENVDEGISSLFSSLKVVRLLRLGRVARKLDHYLEYGAAVLVLLVCVFGLVAHWLACIWYSIGDYEVIDEVTNTIQIDSWLYQLALSIGTPYRYNTSAGIWEGGPSKDSLYVSSLYFTMTSLTTIGFGNIAPTTDVEKMFSVAMMMVGSLLYATIFGNVTTIFQQMYANTNRYHEMLNNVRDFLKLYQVPKGLSERVMDYIVSTWSMSKGIDTEKVLSICPKDMRADICVHLNRKVFNEHPAFRLASDGCLRALAVEFQTIHCAPGDLIYHAGESVDALCFVVSGSLEVIQDDEVVAILGKGDVFGDIFWKETTLAHACANVRALTYCDLHIIKREALLKVLDFYTAFANSFSRNLTLTCNLRKRGWFSMANAL

SEQ ID NO: 36562 - protein, 424 aa, Homo sapiens
MLARKSIIPEEYVLARIAAENLRKPRIRDRLPKARFIAKSGACNLAHKNIREQGRFLQDIFTTLVDLKWRHTLVIFTMSFLCSWLLFAIMWWLVAFAHGDIYAYMEKSGMEKSGLESTVCVTNVRSFTSAFLFSIEVQVTIGFGGRMMTEECPLAITVLILQNIVGLIINAVMLGCIFMKTAQAHRRAETLIFSRHAVIAVRNGKLCFMFRVGDLRKSMIISASVRIQVVKKTTTPEGEVVPIHQLDIPVDNPIESNNIFLVAPLIICHVIDKRSPLYDISATDLANQDLEVIVILEGVVETTGITTQARTSYIAEEIQWGHRFVSIVTEEEGVYSVDYSKFGNTVKVAAPRCSARELDEKPSILIQTLQKSELSHQNSLRKRNSMRRNNSMRRNNSIRRNNSSLMVPKVQFMTPEGNQNTSES

SEQ ID NO: 36563 - protein, 426 aa, Homo sapiens
MLPSASRERPGYRAGVAAPDLLDPKSAAQNSKPRLSFSTKPTVLASRVESDTTINVMKWKTVSTIFLVVVLYLIIGATVFKALEQPHEISQRTTIVIQKQTFISQHSCVNSTELDELIQQIVAAINAGIIPLGNTSNQISHWDLGSSFFFAGTVITTIGFGNISPRTEGGKIFCIIYALLGIPLFGFLLAGVGDQLGTIFGKGIAKVEDTFIKWNVSQTKIRIISTIIFILFGCVLFVALPAIIFKHIEGWSALDAIYFVVITLTTIGFGDYVAGGSDIEYLDFYKPVVWFWILVGLAYFAAVLSMIGDWLRVISKKTKEEVGEFRAHAAEWTANVTAEFKETRRRLSVEIYDKFQRATSIKRKLSAELAGNHNQELTPCRRTLSVNHLTSERDVLPPLLKTESIYLNGLTPHCAGEEIAVIENIK

SEQ ID NO: 36564 - protein, 411 aa, Homo sapiens
MAAPDLLDPKSAAQNSKPRLSFSTKPTVLASRVESDTTINVMKWKTVSTIFLVVVLYLIIGATVFKALEQPHEISQRTTIVIQKQTFISQHSCVNSTELDELIQQIVAAINAGIIPLGNTSNQISHWDLGSSFFFAGTVITTIGFGNISPRTEGGKIFCIIYALLGIPLFGFLLAGVGDQLGTIFGKGIAKVEDTFIKWNVSQTKIRIISTIIFILFGCVLFVALPAIIFKHIEGWSALDAIYFVVITLTTIGFGDYVAGGSDIEYLDFYKPVVWFWILVGLAYFAAVLSMIGDWLRVISKKTKEEVGEFRAHAAEWTANVTAEFKETRRRLSVEIYDKFQRATSIKRKLSAELAGNHNQELTPCRRTLSVNHLTSERDVLPPLLKTESIYLNGLTPHCAGEEIAVIENIK

SEQ ID NO: 36565 - protein, 422 aa, Homo sapiens
MMNPRAKRDFYLAAPDLLDPKSAAQNSKPRLSFSTKPTVLASRVESDTTINVMKWKTVSTIFLVVVLYLIIGATVFKALEQPHEISQRTTIVIQKQTFISQHSCVNSTELDELIQQIVAAINAGIIPLGNTSNQISHWDLGSSFFFAGTVITTIGFGNISPRTEGGKIFCIIYALLGIPLFGFLLAGVGDQLGTIFGKGIAKVEDTFIKWNVSQTKIRIISTIIFILFGCVLFVALPAIIFKHIEGWSALDAIYFVVITLTTIGFGDYVAGGSDIEYLDFYKPVVWFWILVGLAYFAAVLSMIGDWLRVISKKTKEEVGEFRAHAAEWTANVTAEFKETRRRLSVEIYDKFQRATSIKRKLSAELAGNHNQELTPCRRTLSVNHLTSERDVLPPLLKTESIYLNGLTPHCAGEEIAVIENIK

SEQ ID NO: 36566 - protein, 228 aa, Homo sapiens
MMNPRAKRDFYLAAPDLLDPKSAAQNSKPRLSFSTKPTVLASRVESDTTINVMKWKTVSTIFLVVVLYLIIGATVFKALEQPHEISQRTTIVIQKQTFISQHSCVNSTELDELIQQIVAAINAGIIPLGNTSNQISHWDLGSSFFFAGTVITTIGFGNISPRTEGGKIFCIIYALLGIPLFGFLLAGVGDQLGTIFGKGIAKVEDTFIVDPILNIWTSISLSCGSGSL

SEQ ID NO: 36567 - protein, 473 aa, Homo sapiens
MLKVTVPSCSASSCSSVTASAAPGTASLVPDYWIDGSNRDALSDFFEVESELGRGATSIVYRCKQKGTQKPYALKVLKKTVDKKIVRTEIGVLLRLSHPNIIKLKEIFETPTEISLVLELVTGGELFDRIVEKGYYSERDAADAVKQILEAVAYLHENGIVHRDLKPENLLYATPAPDAPLKIADFGLSKIVEHQVLMKTVCGTPGYCAPEILRGCAYGPEVDMWSVGIITYILLCGFEPFYDERGDQFMFRRILNCEYYFISPWWDEVSLNAKDLVRKLIVLDPKKRLTTFQALQHPWVTGKAANFVHMDTAQKKLQEFNARRKLKAAVKAVVASSRLGSASSSHGSIQESHKASRDPSPIQDGNEDMKAIPEGEKIQGDGAQAAVKGAQAELMKVQALEKVKGADINAEEAPKMVPKAVEDGIKVADLELEEGLAEEKLKTVEEAAAPREGQGSSAVGFEVPQQDVILPEY

SEQ ID NO: 36568 - protein, 1820 aa, Homo sapiens
MESNFNQEGVPRPSYVFSADPIARPSEINFDGIKLDLSHEFSLVAPNTEANSFESKDYLQVCLRIRPFTQSEKELESEGCVHILDSQTVVLKEPQCILGRLSEKSSGQMAQKFSFSKVFGPATTQKEFFQGCIMQPVKDLLKGQSRLIFTYGLTNSGKTYTFQGTEENIGILPRTLNVLFDSLQERLYTKMNLKPHRSREYLRLSSEQEKEEIASKSALLRQIKEVTVHNDSDDTLYGSLTNSLNISEFEESIKDYEQANLNMANSIKFSVWVSFFEIYNEYIYDLFVPVSSKFQKRKMLRLSQDVKGYSFIKDLQWIQVSDSKEAYRLLKLGIKHQSVAFTKLNNASSRSHSIFTVKILQIEDSEMSRVIRVSELSLCDLAGSERTMKTQNEGERLRETGNINTSLLTLGKCINVLKNSEKSKFQQHVPFRESKLTHYFQSFFNGKGKICMIVNISQCYLAYDETLNVLKFSAIAQKVCVPDTLNSSQEKLFGPVKSSQDVSLDSNSNSKILNVKRATISWENSLEDLMEDEDLVEELENAEETQNVETKLLDEDLDKTLEENKAFISHEEKRKLLDLIEDLKKKLINEKKEKLTLEFKIREEVTQEFTQYWAQREADFKETLLQEREILEENAERRLAIFKDLVGKCDTREEAAKDICATKVETEETHNYVGFEDIIDSLQDNVADIKKQAEIAHLYIASLPDPQEATACLELKFNQIKAELAKTKGELIKTKEELKKRENESDSLIQELETSNKKIITQNQRIKELINIIDQKEDTINEFQNLKSHMENTFKCNDKADTSSLIINNKLICNETVEVPKDSKSKICSERKRVNENELQQDEPPAKKGSIHVSSAITEDQKKSEEVRPNIAEIEDIRVLQENNEGLRAFLLTIENELKNEKEEKAELNKQIVHFQQELSLSEKKNLTLSKEVQQIQSNYDIAIAELHVQKSKNQEQEEKIMKLSNEIETATRSITNNVSQIKLMHTKIDELRTLDSVSQISNIDLLNLRDLSNGSEEDNLPNTQLDLLGNDYLVSKQVKEYRIQEPNRENSFHSSIEAIWEECKEIVKASSKKSHQIEELEQQIEKLQAEVKGYKDENNRLKEKEHKNQDDLLKEKETLIQQLKEELQEKNVTLDVQIQHVVEGKRALSELTQGVTCYKAKIKELETILETQKVECSHSAKLEQDILEKESIILKLERNLKEFQEHLQDSVKNTKDLNVKELKLKEEITQLTNNLQDMKHLLQLKEEEEETNRQETEKLKEELSASSARTQNLKADLQRKEEDYADLKEKLTDAKKQIKQVQKEVSVMRDEDKLLRIKINELEKKKNQCSQELDMKQRTIQQLKEQLNNQKVEEAIQQYERACKDLNVKEKIIEDMRMTLEEQEQTQVEQDQVLEAKLEEVERLATELEKWKEKCNDLETKNNQRSNKEHENNTDVLGKLTNLQDELQESEQKYNADRKKWLEEKMMLITQAKEAENIRNKEMKKYAEDRERFFKQQNEMEILTAQLTEKDSDLQKWREERDQLVAALEIQLKALISSNVQKDNEIEQLKRIISETSKIETQIMDIKPKRISSADPDKLQTEPLSTSFEISRNKIEDGSVVLDSCEVSTENDQSTRFPKPELEIQFTPLQPNKMAVKHPGCTTPVTVKIPKARKRKSNEMEEDLVKCENKKNATPRTNLKFPISDDRNSSVKKEQKVAIRPSSKKTYSLRSQASIIGVNLATKKKEGTLQKFGDFLQHSPSILQSKAKKIIETMSSSKLSNVEASKENVSQPKRAKRKLYTSEISSPIDISGQVILMDQKMKESDHQIIKRRLRTKTAK

SEQ ID NO: 36569 - protein, 1853 aa, Homo sapiens
MESNFNQEGVPRPSYVFSADPIARPSEINFDGIKLDLSHEFSLVAPNTEANSFESKDYLQVCLRIRPFTQSEKELESEGCVHILDSQTVVLKEPQCILGRLSEKSSGQMAQKFSFSKVFGPATTQKEFFQGCIMQPVKDLLKGQSRLIFTYGLTNSGKTYTFQGTEENIGILPRTLNVLFDSLQERLYTKMNLKPHRSREYLRLSSEQEKEEIASKSALLRQIKEVTVHNDSDDTLYGSLTNSLNISEFEESIKDYEQANLNMANSIKFSVWVSFFEIYNEYIYDLFVPVSSKFQKRKMLRLSQDVKGYSFIKDLQWIQVSDSKEAYRLLKLGIKHQSVAFTKLNNASSRSHSIFTVKILQIEDSEMSRVIRVSELSLCDLAGSERTMKTQNEGERLRETGNINTSLLTLGKCINVLKNSEKSKFQQHVPFRESKLTHYFQSFFNGKGKICMIVNISQCYLAYDETLNVLKFSAIAQKVCVPDTLNSSQEKLFGPVKSSQDVSLDSNSNSKILNVKRATISWENSLEDLMEDEDLVEELENAEETQNVETKLLDEDLDKTLEENKAFISHEEKRKLLDLIEDLKKKLINEKKEKLTLEFKIREEVTQEFTQYWAQREADFKETLLQEREILEENAERRLAIFKDLVGKCDTREEAAKDICATKVETEETHNYVGFEDIIDSLQDNVADIKKQAEIAHLYIASLPDPQEATACLELKFNQIKAELAKTKGELIKTKEELKKRENESDSLIQELETSNKKIITQNQRIKELINIIDQKEDTINEFQNLKSHMENTFKCNDKADTSSLIINNKLICNETVEVPKDSKSKICSERKRVNENELQQDEPPAKKGTTSAASSRRLRKLISKPKKGVNRTRQTEGHSLVSIHVSSAITEDQKKSEEVRPNIAEIEDIRVLQENNEGLRAFLLTIENELKNEKEEKAELNKQIVHFQQELSLSEKKNLTLSKEVQQIQSNYDIAIAELHVQKSKNQEQEEKIMKLSNEIETATRSITNNVSQIKLMHTKIDELRTLDSVSQISNIDLLNLRDLSNGSEEDNLPNTQLDLLGNDYLVSKQVKEYRIQEPNRENSFHSSIEAIWEECKEIVKASSKKSHQIEELEQQIEKLQAEVKGYKDENNRLKEKEHKNQDDLLKEKETLIQQLKEELQEKNVTLDVQIQHVVEGKRALSELTQGVTCYKAKIKELETILETQKVECSHSAKLEQDILEKESIILKLERNLKEFQEHLQDSVKNTKDLNVKELKLKEEITQLTNNLQDMKHLLQLKEEEEETNRQETEKLKEELSASSARTQNLKADLQRKEEDYADLKEKLTDAKKQIKQVQKEVSVMRDEDKLLRIKINELEKKKNQCSQELDMKQRTIQQLKEQLNNQKVEEAIQQYERACKDLNVKEKIIEDMRMTLEEQEQTQVEQDQVLEAKLEEVERLATELEKWKEKCNDLETKNNQRSNKEHENNTDVLGKLTNLQDELQESEQKYNADRKKWLEEKMMLITQAKEAENIRNKEMKKYAEDRERFFKQQNEMEILTAQLTEKDSDLQKWREERDQLVAALEIQLKALISSNVQKDNEIEQLKRIISETSKIETQIMDIKPKRISSADPDKLQTEPLSTSFEISRNKIEDGSVVLDSCEVSTENDQSTRFPKPELEIQFTPLQPNKMAVKHPGCTTPVTVKIPKARKRKSNEMEEDLVKCENKKNATPRTNLKFPISDDRNSSVKKEQKVAIRPSSKKTYSLRSQASIIGVNLATKKKEGTLQKFGDFLQHSPSILQSKAKKIIETMSSSKLSNVEASKENVSQPKRAKRKLYTSEISSPIDISGQVILMDQKMKESDHQIIKRRLRTKTAK

SEQ ID NO: 36570 - protein, 1780 aa, Homo sapiens
MESNFNQEGVPRPSYVFSADPIARPSEINFDGIKLDLSHEFSLVAPNTEANSFESKDYLQVCLRIRPFTQSEKELESEGCVHILDSQTVVLKEPQCILGRLSEKSSGQMAQKFSFSKVFGPATTQKEFFQGCIMQPVKDLLKGQSRLIFTYGLTNSGKTYTFQGTEENIGILPRTLNVLFDSLQERLYTKMNLKPHRSREYLRLSSEQEKEEIASKSALLRQIKEVTVHNDSDDTLYGSLTNSLNISEFEESIKDYEQANLNMANSIKFSVWVSFFEIYNEYIYDLFVPVSSKFQKRKMLRLSQDVKGYSFIKDLQWIQVSDSKEAYRLLKLGIKHQSVAFTKLNNASSRSHSIFTVKILQIEDSEMSRVIRVSELSLCDLAGSERTMKTQNEGERLRETGNINTSLLTLGKCINVLKNSEKSKFQQHVPFRESKLTHYFQSFFNGKGKICMIVNISQCYLAYDETLNVLKFSAIAQKVCVPDTLNSSQEKLFGPVKSSQDVSLDSNSNSKILNVKRATISWENSLEDLMEDEDLVEELENAEETQNVETKLLDEDLDKTLEENKAFISHEEKRKLLDLIEDLKKKLINEKKEKLTLEFKIREEVTQEFTQYWAQREADFKETLLQEREILEENAERRLAIFKDLVGKCDTREEAAKDICATKVETEEATACLELKFNQIKAELAKTKGELIKTKEELKKRENESDSLIQELETSNKKIITQNQRIKELINIIDQKEDTINEFQNLKSHMENTFKCNDKADTSSLIINNKLICNETVEVPKDSKSKICSERKRVNENELQQDEPPAKKGSIHVSSAITEDQKKSEEVRPNIAEIEDIRVLQENNEGLRAFLLTIENELKNEKEEKAELNKQIVHFQQELSLSEKKNLTLSKEVQQIQSNYDIAIAELHVQKSKNQEQEEKIMKLSNEIETATRSITNNVSQIKLMHTKIDELRTLDSVSQISNIDLLNLRDLSNGSEEDNLPNTQLDLLGNDYLVSKQVKEYRIQEPNRENSFHSSIEAIWEECKEIVKASSKKSHQIEELEQQIEKLQAEVKGYKDENNRLKEKEHKNQDDLLKEKETLIQQLKEELQEKNVTLDVQIQHVVEGKRALSELTQGVTCYKAKIKELETILETQKVECSHSAKLEQDILEKESIILKLERNLKEFQEHLQDSVKNTKDLNVKELKLKEEITQLTNNLQDMKHLLQLKEEEEETNRQETEKLKEELSASSARTQNLKADLQRKEEDYADLKEKLTDAKKQIKQVQKEVSVMRDEDKLLRIKINELEKKKNQCSQELDMKQRTIQQLKEQLNNQKVEEAIQQYERACKDLNVKEKIIEDMRMTLEEQEQTQVEQDQVLEAKLEEVERLATELEKWKEKCNDLETKNNQRSNKEHENNTDVLGKLTNLQDELQESEQKYNADRKKWLEEKMMLITQAKEAENIRNKEMKKYAEDRERFFKQQNEMEILTAQLTEKDSDLQKWREERDQLVAALEIQLKALISSNVQKDNEIEQLKRIISETSKIETQIMDIKPKRISSADPDKLQTEPLSTSFEISRNKIEDGSVVLDSCEVSTENDQSTRFPKPELEIQFTPLQPNKMAVKHPGCTTPVTVKIPKARKRKSNEMEEDLVKCENKKNATPRTNLKFPISDDRNSSVKKEQKVAIRPSSKKTYSLRSQASIIGVNLATKKKEGTLQKFGDFLQHSPSILQSKAKKIIETMSSSKLSNVEASKENVSQPKRAKRKLYTSEISSPIDISGQVILMDQKMKESDHQIIKRRLRTKTAK

SEQ ID NO: 36571 - protein, 1722 aa, Homo sapiens
MESNFNQEGVPRPSYVFSADPIARPSEINFDGIKLDLSHEFSLVAPNTEANSFESKDYLQVCLRIRPFTQSEKELESEGCVHILDSQTVVLKEPQCILGRLSEKSSGQMAQKFSFSKVFGPATTQKEFFQGCIMQPVKDLLKGQSRLIFTYGLTNSGKTYTFQGTEENIGILPRTLNVLFDSLQERLYTKMNLKPHRSREYLRLSSEQEKEEIASKSALLRQIKEVTVHNDSDDTLYGSLTNSLNISEFEESIKDYEQANLNMANSIKFSVWVSFFEIYNEYIYDLFVPVSSKFQKRKMLRLSQDVKGYSFIKDLQWIQVSDSKEAYRLLKLGIKHQSVAFTKLNNASSRSHSIFTVKILQIEDSEMSRVIRVSELSLCDLAGSERTMKTQNEGERLRETGNINTSLLTLGKCINVLKNSEKSKFQQHVPFRESKLTHYFQSFFNGKGKICMIVNISQCYLAYDETLNVLKFSAIAQKVCVPDTLNSSQEKLFGPVKSSQDVSLDSNSNSKILNVKRATISWENSLEDLMEDEDLVEELENAEETQNVETKLLDEDLDKTLEENKAFISHEEKRKLLDLIEDLKKKLINEKKEKLTLEFKIREEVTQEFTQYWAQREADFKETLLQEREILEENAERRLAIFKDLVGKCDTREEAAKDICATKVETEETHNYVGFEDIIDSLQDNVADIKKQAEIAHLYIASLPDPQEATACLELKFNQIKAELAKTKGELIKTKEELKKRENESDSLIQELETSNKKIITQNQRIKELINIIDQKEDTINEFQNLKSHMENTFKCNDKADTSSLIINNKLICNETVEVPKDSKSKICSERKRVNENELQQDEPPAKKGSIHVSSAITEDQKKSEEVRPNIAEIEDIRVLQENNEGLRAFLLTIENELKNEKEEKAELNKQIVHFQQELSLSEKKNLTLSKEVQQIQSNYDIAIAELHVQKSKNQEQEEKIMKLSNEIETATRSITNNVSQIKLMHTKIDELRTLDSVSQISNIDLLNLRDLSNGSEEDNLPNTQLDLLGNDYLVSKQVKEYRIQEPNRENSFHSSIEAIWEECKEIVKASSKKSHQIEELEQQIEKLQAEVKGYKDENNRLKEKEHKNQDDLLKEKETLIQQLKEELQEKNVTLDVQIQHVVEGKRALSELTQGVTCYKAKIKELETILETQKVECSHSAKLEQDILEKESIILKLERNLKEFQEHLQDSVKNTKDLNVKELKLKEEITQLTNNLQDMKHLLQLKEEEEETNRQETEKLKEELSASSARTQNLKADLQRKEEDYADLKEKLTDAKKQIKQVQKEVSVMRDEDKLLRIKINELEKKKNQCSQELDMKQRTIQQLKEQLNNQKVEEAIQQYERACKDLNVKEKIIEDMRMTLEEQEQTQVEQDQVLEAKLEEVERLATELEKWKEKCNDLETKNNQRSNKEHENNTDVLGKLTNLQDELQESEQKYNADRKKWLEEKMMLITQAKEAENIRNKEMKKYAEDRERFFKQQNEMEILTAQLTEKDSDLQKWREERDQLVAALEIQLKALISSNVQKDNEIEQLKRIISETSKIETQIMDIKPKRISSADPDKLQTEPLSTSFEISRNKIEDGSVVLDSCEVSTENDQSTRFPKPELEIQFTPLQPNKMAVKHPGCTTPVTVKIPKARKRKSNEMEESASPPPKECSSSPAMEQSWKENDFDKLREEGFRRSNYSELQEEIQTKGKEVENFEKNLD

SEQ ID NO: 36572 - protein, 512 aa, Homo sapiens
MRDEDKLLRIKINELEKKKNQCSQELDMKQRTIQQLKEQLNNQKVEEAIQQYERACKDLNVKEKIIEDMRMTLEEQEQTQVEQDQVLEAKLEEVERLATELEKWKEKCNDLETKNNQRSNKEHENNTDVLGKLTNLQDELQESEQKYNADRKKWLEEKMMLITQAKEAENIRNKEMKKYAEDRERFFKQQNEMEILTAQLTEKDSDLQKWREERDQLVAALEIQLKALISSNVQKDNEIEQLKRIISETSKIETQIMDIKPKRISSADPDKLQTEPLSTSFEISRNKIEDGSVVLDSCEVSTENDQSTRFPKPELEIQFTPLQPNKMAVKHPGCTTPVTVKIPKARKRKSNEMEEDLVKCENKKNATPRTNLKFPISDDRNSSVKKEQKVAIRPSSKKTYSLRSQASIIGVNLATKKKEGTLQKFGDFLQHSPSILQSKAKKIIETMSSSKLSNVEASKENVSQPKRAKRKLYTSEISSPIDISGQVILMDQKMKESDHQIIKRRLRTKTAK

SEQ ID NO: 36573 - protein, 260 aa, Homo sapiens
MGRPRPRAAKTWMFLLLLGGAWAGHSRAQEDKVLGGHECQPHSQPWQAALFQGQQLLCGGVLVGGNWVLTAAHCKKPKYTVRLGDHSLQNKDGPEQEIPVVQSIPHPCYNSSDVEDHNHDLMLLQLRDQASLGSKVKPISLADHCTQPGQKCTVSGWGTVTSPRENFPDTLNCAEVKIFPQKKCEDAYPGQITDGMVCAGSSKGADTCQGDSGGPLVCDGALQGITSWGSDPCGRSDKPGVYTNICRYLDWIKKIIGSKG

SEQ ID NO: 36574 - protein, 305 aa, Homo sapiens
MGRPRPRAAKTWMFLLLLGGAWAACGSLDLLTKLYAENLPCVHLNPQWPSQPSHCPRGWRSNPLPPAAGHSRAQEDKVLGGHECQPHSQPWQAALFQGQQLLCGGVLVGGNWVLTAAHCKKPKYTVRLGDHSLQNKDGPEQEIPVVQSIPHPCYNSSDVEDHNHDLMLLQLRDQASLGSKVKPISLADHCTQPGQKCTVSGWGTVTSPRENFPDTLNCAEVKIFPQKKCEDAYPGQITDGMVCAGSSKGADTCQGDSGGPLVCDGALQGITSWGSDPCGRSDKPGVYTNICRYLDWIKKIIGSKG

SEQ ID NO: 36575 - protein, 119 aa, Homo sapiens
MGRPRPRAAKTWMFLLLLGGAWAENFPDTLNCAEVKIFPQKKCEDAYPGQITDGMVCAGSSKGADTCQGDSGGPLVCDGALQGITSWGSDPCGRSDKPGVYTNICRYLDWIKKIIGSKG

SEQ ID NO: 36576 - protein, 32 aa, Homo sapiens
MGRPRPRAAKTWMFLLLLGGAWAGRFWRPPGV

SEQ ID NO: 36577 - protein, 426 aa, Homo sapiens
MEGHKAEEEVLDVLRLNVGGCIYTARRESLCRFKDSMLASMFSGRFPLKTDESGACVIDRDGRLFKYLLDYLHGEVQIPTDEQTRIALQEEADYFGIPYPYSLSDHLANEMETYSLRSNIELKKALTDFCDSYGLVCNKPTVWVLHYLNTSGASCESRIIGVYATKTDGTDAIEKQLGGRIHSKGIFKREAGNNVQYIWSYYSVAELKKMMDAFDAWEGKGVSYWRVPHELIECWTLEERPLLGSLRHMAPIRKRRLITFNEADESVNYKTGPKPVRFLGPSTSTQIKVKNSASVTVSPASAIQTSAGATANRFQSGSRRKAAQRSAPSRATALVGTGAPGHPQASPGAASAENGGTHLPPAKVLLSDKKPTPQRVIKLKRTPLCATAPCLPSPTATRQANSLKPLPGEAARALGVRTENGKNKGN

SEQ ID NO: 36578 - protein, 234 aa, Homo sapiens
MEGHKAEEEVLDVLRLNVGGCIYTARRESLCRFKDSMLASMFSGRFPLKTDESGACVIDRDGRLFKYLLDYLHGEVQIPTDEQTRIALQEEADYFGIPYPYSLSDHLANEMETYSLRSNIELKKALTDFCDSYGLVCNKPTVWVLHYLNTSGASCESRIIGVYATKTDGTDAIEKQLGGRIHSKGIFKREAGNNVQYIWSYYSVAELKKMMDAFDAWEGKGTVQFFYFMEAGGL

SEQ ID NO: 36579 - protein, 221 aa, Homo sapiens
MRDEVGAHKPLDSLILDQNLSVNAEGKLGRCFHELLKLYMWKMTRFCISRRLITFNEADESVNYKTGPKPVRFLGPSTSTQIKVKNSASVTVSPASAIQTSAGATANRFQSGSRRKAAQRSAPSRATALVGTGAPGHPQASPGAASAENGGTHLPPAKVLLSDKKPTPQRVIKLKRTPLCATAPCLPSPTATRQANSLKPLPGEAARALGVRTENGKNKGN

SEQ ID NO: 36580 - protein, 708 aa, Homo sapiens
MLRMRVPALLVLLFCFRGRAGPSPHFLQQPEDLVVLLGEEARLPCALGAYWGLVQWTKSGLALGGQRDLPGWSRYWISGNAANGQHDLHIRPVELEDEASYECQATQAGLRSRPAQLHVLVPPEAPQVLGGPSVSLVAGVPANLTCRSRGDARPTPELLWFRDGVLLDGATFHQTLLKEGTPGSVESTLTLTPFSHDDGATFVCRARSQALPTGRDTAITLSLQYPPEVTLSASPHTVQEGEKVIFLCQATAQPPVTGYRWAKGGSPVLGARGPRLEVVADASFLTEPVSCEVSNAVGSANRSTALDVLFGPILQAKPEPVSVDVGEDASFSCAWRGNPLPRVTWTRRGGAQVLGSGATLRLPSVGPEDAGDYVCRAEAGLSGLRGGAAEARLTVNAPPVVTALHSAPAFLRGPARLQCLVFASPAPDAVVWSWDEGFLEAGSQGRFLVETFPAPESRGGLGPGLISVLHISGTQESDFSRSFNCSARNRLGEGGAQASLGRRDLLPTVRIVAGVAAATTTLLMVITGVALCCWRHSKASASFSEQKNLMRIPGSSDGSSSRGPEEEETGSREDRGPIVHTDHSDLVLEEKGTLETKDPTNGYYKVRGVSVSLSLGEAPGGGLFLPPPSPLGPPGTPTFYDFNPHLGMVPPCRLYRARAGYLTTPHPRAFTSYIKPTSFGPPDLAPGTPPFPYAAFPTPSHPRLQTHV

SEQ ID NO: 36581 - protein, 633 aa, Homo sapiens
MLRMRVPALLVLLFCFRGRAGPSPHFLQQPEDLVVLLGEEARLPCALGAYWGLVQWTKSGLALGGQRDLPGWSRYWISGNAANGQHDLHIRPVELEDEASYECQATQAGLRSRPAQLHVLVPPEAPQVLGGPSVSLVAGVPANLTCRSRGDARPTPELLWFRDGVLLDGATFHQTLLKEGTPGSVESTLTLTPFSHDDGATFVCRARSQALPTGRDTAITLSLQYPPEVTLSASPHTVQEGEKVIFLCQATAQPPVTGYRWAKGGSPVLGARGPRLEVVADASFLTEPVSCEVSNAVGSANRSTALDVLFGPILQAKPEPVSVDVGEDASFSCAWRGNPLPRVTWTRRGGAQVLGSGATLRLPSVGPEDAGDYVCRAEAGLSGLRGGAAEARLTVNAPPVVTALHSAPAFLRGPARLQCLVFASPAPDAVVWSWDEGFLEAGSQGRFLVETFPAPESRGGLGPGLISVLHISGTQESDFSRSFNCSARNRLGEGGAQASLGRRDLLPTVRIVAGVAAATTTLLMVITGVALCCWRHSKASASFSEQKNLMRIPGSSDGSSSRGPEEEETGSREDRGPIVHTDHSDLVLEEKGTLETKDPTNGYYKVRGVSPPASPDSRVTSFQWKSPGISNLP

SEQ ID NO: 36582 - protein, 583 aa, Homo sapiens
MLRMRVPALLVLLFCFRGRAGWSRYWISGNAANGQHDLHIRPVELEDEASYECQATQAGLRSRPAQLHVLVPPEAPQVLGGPSVSLVAGVPANLTCRSRGDARPTPELLWFRDGVLLDGATFHQTLLKEGTPGSVESTLTLTPFSHDDGATFVCRARSQALPTGRDTAITLSLQYPPEVTLSASPHTVQEGEKVIFLCQATAQPPVTGYRWAKGGSPVLGARGPRLEVVADASFLTEPVSCEVSNAVGSANRSTALDVLFGPILQAKPEPVSVDVGEDASFSCAWRGNPLPRVTWTRRGGAQVLGSGATLRLPSVGPEDAGDYVCRAEAGLSGLRGGAAEARLTVNAPPVVTALHSAPAFLRGPARLQCLVFASPAPDAVVWSWDEGFLEAGSQGRFLVETFPAPESRGGLGPGLISVLHISGTQESDFSRSFNCSARNRLGEGGAQASLGRRDLLPTVRIVAGVAAATTTLLMVITGVALCCWRHSKASASFSEQKNLMRIPGSSDGSSSRGPEEEETGSREDRGPIVHTDHSDLVLEEKGTLETKDPTNGYYKVRGVSPPASPDSRVTSFQWKSPGISNLP

SEQ ID NO: 36583 - protein, 219 aa, Homo sapiens
MLRMRVPALLVLLFCFRGRAGPSPHFLQQPEDLVVLLGEGGAQASLGRRASASFSEQKNLMRIPGSSDGSSSRGPEEEETGSREDRGPIVHTDHSDLVLEEKGTLETKDPTNGYYKVRGVSVSLSLGEAPGGGLFLPPPSPLGPPGTPTFYDFNPHLGMVPPCRLYRARAGYLTTPHPRAFTSYIKPTSFGPPDLAPGTPPFPYAAFPTPSHPRLQTHV

SEQ ID NO: 36584 - protein, 176 aa, Homo sapiens
MALWRAYQRALAAHPWKVQVLTAGSLMGLGDIISQQLVERRGLQEHQRGRTLTMVSLGCGFVGPVVGGWYKVLDRFIPGTTKVDALKKMLLDQGGFAPCFLGCFLPLVGALNGLSAQDNWAKLQRDYPDALITNYYLWPAVQLANFYLVPLHYRLAVVQCVAVIWNSYLSWKAHRL

SEQ ID NO: 36585 - protein, 240 aa, Homo sapiens
MAMASVKLLAGVLRKPDAWIGLWGVLRGTPSSYKLCTSWNRYLYFSSTKLRAPNYKTLFYNIFSLRLPGLLLSPECIFPFSVRLKSNIRSTKSTKKSLQKVDEEDSDEESHHDEMSEQEEELEDDPTVVKNYKDLEKAVQSFRYDVVLKTGLDIGRNKVEDAFYKGELRLNEEKLWKKSRTVKVGDTLDLLIGEDKEAGTETVMRILLKKVFEEKTESEKYRVVLRRWKSLKLPKKRMSK

SEQ ID NO: 36586 - protein, 467 aa, Homo sapiens
MASVAAARAVPVGSGLRGLQRTLPLVVILGATGTGKSTLALQLGQRLGGEIVSADSMQVYEGLDIITNKVSAQEQRICRHHMISFVDPLVTNYTVVDFRNRATALIEDIFARDKIPIVVGGTNYYIESLLWKVLVNTKPQEMGTEKVIDRKVELEKEDGLVLHKRLSQVDPEMAAKLHPHDKRKVARSLQVFEETGISHSEFLHRQHTEEGGGPLGGPLKFSNPCILWLHADQAVLDERLDKRVDDMLAAGLLEELRDFHRRYNQKNVSENSQDYQHGIFQSIGFKEFHEYLITEGKCTLETSNQLLKKGIEALKQVTKRYARKQNRWVKNRFLSRPGPIVPPVYGLEVSDVSKWEESVLEPALEIVQSFIQGHKPTATPIKMPYNEAENKRSYHLCDLCDRIIIGDREWAAHIKSKSHLNQLKKRRRLDSDAVNTIESQSVSPDHNKEPKEKGSPGQNDQELKCSV

SEQ ID NO: 36587 - protein, 326 aa, Homo sapiens
MGTEKVIDRKVELEKEDGLVLHKRLSQVDPEMAAKLHPHDKRKVARSLQVFEETGISHSEFLHRQHTEEGGGPLGGPLKFSNPCILWLHADQAVLDERLDKRVDDMLAAGLLEELRDFHRRYNQKNVSENSQDYQHGIFQSIGFKEFHEYLITEGKCTLETSNQLLKKGIEALKQVTKRYARKQNRWVKNRFLSRPGPIVPPVYGLEVSDVSKWEESVLEPALEIVQSFIQGHKPTATPIKMPYNEAENKRSYHLCDLCDRIIIGDREWAAHIKSKSHLNQLKKRRRLDSDAVNTIESQSVSPDHNKEPKEKGSPGQNDQELKCSV

SEQ ID NO: 36588 - protein, 324 aa, Homo sapiens
MGTEKVIDRKVELEKEDGLVLHKRLSQVDPEMAAKLHPHDKRKVARSLQVFEETGISHSEFLHRQHTEEGGGPLGGPLKFSNPCILWLHADQADERLDKRVDDMLAAGLLEELRDFHRRYNQKNVSENSQDYQHGIFQSIGFKEFHEYLITEGKCTLETSNQLLKKGIEALKQVTKRYARKQNRWVKNRFLSRPGPIVPPVYGLEVSDVSKWEESVLEPALEIVQSFIQGHKPTATPIKMPYNEAENKRSYHLCDLCDRIIIGDREWAAHIKSKSHLNQLKKRRRLDSDAVNTIESQSVSPDHNKEPKEKGSPGQNDQELKCSV

SEQ ID NO: 36589 - protein, 441 aa, Homo sapiens
MASVAAARAVPVGSGLRGLQRTLPLVVILGATGTGKSTLALQLGQRLGGEIVSADSMQVYEGLDIITNKVSAQEQRICRHHMISFVDPLVTNYTVVDFRNRATALIEDIFARDKIPIVVGGTNYYIESLLWKVLVNTKPQEMGTEKVIDRKVELEKEDGLVLHKRLSQVDPEMAAKLHPHDKRKVARSLQVFEETGISHSEFLHRQHTEEGGGPLGGPLKFSNPCILWLHADQAVLDERLDKRVDDMLAAGLLEELRDFHRRYNQKNVSENSQDYQHGIFQSIGFKEFHEYLITEGKCTLETSNQLLKKGPGPIVPPVYGLEVSDVSKWEESVLEPALEIVQSFIQGHKPTATPIKMPYNEAENKRSYHLCDLCDRIIIGDREWAAHIKSKSHLNQLKKRRRLDSDAVNTIESQSVSPDHNKEPKEKGSPGQNDQELKCSV

SEQ ID NO: 36590 - protein, 385 aa, Homo sapiens
MASVAAARAVPVGSGLRGLQRTLPLVVILGATGTGKSTLALQLGQRLGGEIVSADSMQPQEMGTEKVIDRKVELEKEDGLVLHKRLSQVDPEMAAKLHPHDKRKVARSLQVFEETGISHSEFLHRQHTEEGGGPLGGPLKFSNPCILWLHADQADERLDKRVDDMLAAGLLEELRDFHRRYNQKNVSENSQDYQHGIFQSIGFKEFHEYLITEGKCTLETSNQLLKKGIEALKQVTKRYARKQNRWVKNRFLSRPGPIVPPVYGLEVSDVSKWEESVLEPALEIVQSFIQGHKPTATPIKMPYNEAENKRSYHLCDLCDRIIIGDREWAAHIKSKSHLNQLKKRRRLDSDAVNTIESQSVSPDHNKEPKEKGSPGQNDQELKCSV

SEQ ID NO: 36591 - protein, 163 aa, Homo sapiens
MFRKIGIEALKQVTKRYARKQNRWVKNRFLSRPGPIVPPVYGLEVSDVSKWEESVLEPALEIVQSFIQGHKPTATPIKMPYNEAENKRSYHLCDLCDRIIIGDREWAAHIKSKSHLNQLKKRRRLDSDAVNTIESQSVSPDHNKEPKEKGSPGQNDQELKCSV

SEQ ID NO: 36592 - protein, 304 aa, Homo sapiens
MSLMVISMACVGFFWLQGAWPHEGFRRKPSLLAHPGRLVKSEETVILQCWSDVMFEHFLLHREGTFNDTLRLIGEHIDGVSKANFSIGRMRQDLAGTYRCYGSVPHSPYQFSAPSDPLDIVITGLYEKPSLSAQPGPTVLAGESVTLSCSSWSSYDMYHLSTEGEAHERRFSAGPKVNGTFQADFPLGPATQGGTYRCFGSFHDSPYEWSKSSDPLLVSVTGNPSNSWPSPTEPSSKTGNPRHLHVLIGTSVVKLPFTILLFFLLHRWCSDKKNASVMDQGPAGNRTVNREDSDEQDHQEVSYA

SEQ ID NO: 36593 - protein, 72 aa, Homo sapiens
MSAIFNFQSLLTVILLLICTCAYIRSLAPSLLDRNKTGLLGIFWKCARIGERKSPYVAVCCIVMAFSILFIQ

SEQ ID NO: 36594 - protein, 427 aa, Homo sapiens
MGGDLVLGLGALRRRKRLLEQEKSLAGWALVLAGTGIGLMVLHAEMLWFGGCSWALYLFLVKCTISISTFLLLCLIVAFHAKEVQLFMTDNGLRDWRVALTGRQAAQIVLELVVCGLHPAPVRGPPCVQDLGAPLTSPQPWPGFLGQGEALLSLAMLLRLYLVPRAVLLRSGVLLNASYRSIGALNQVRFRHWFVAKLYMNTHPGRLLLGLTLGLWLTTAWVLSVAERQAVNATGHLSDTLWLIPITFLTIGYGDVVPGTMWGKIVCLCTGVMGVCCTALLVAVVARKLEFNKAEKHVHNFMMDIQYTKEMKESAARVLQEAWMFYKHTRRKESHAARRHQRKLLAAINAFRQVRLKHRKLREQVNSMVDISKMHMILYDLQQNLSSSHRALEKQIDTLAGKLDALTELLSTALGPRQLPEPSQQSK

SEQ ID NO: 36595 - protein, 1056 aa, Homo sapiens
MASQPNSSAKKKEEKGKNIQVVVRCRPFNLAERKASAHSIVECDPVRKEVSVRTGGLADKSSRKTYTFDMVFGASTKQIDVYRSVVCPILDEVIMGYNCTIFAYGQTGTGKTFTMEGERSPNEEYTWEEDPLAGIIPRTLHQIFEKLTDNGTEFSVKVSLLEIYNEELFDLLNPSSDVSERLQMFDDPRNKRGVIIKGLEEITVHNKDEVYQILEKGAAKRTTAATLMNAYSSRSHSVFSVTIHMKETTIDGEELVKIGKLNLVDLAGSENIGRSGAVDKRAREAGNINQSLLTLGRVITALVERTPHVPYRESKLTRILQDSLGGRTRTSIIATISPASLNLEETLSTLEYAHRAKNILNKPEVNQKLTKKALIKEYTEEIERLKRDLAAAREKNGVYISEENFRVMSGKLTVQEEQIVELIEKIGAVEEELNRVTELFMDNKNELDQCKSDLQNKTQELETTQKHLQETKLQLVKEEYITSALESTEEKLHDAASKLLNTVEETTKDVSGLHSKLDRKKAVDQHNAEAQDIFGKNLNSLFNNMEELIKDGSSKQKAMLEVHKTLFGNLLSSSVSALDTITTVALGSLTSIPENVSTHVSQIFNMILKEQSLAAESKTVLQELINVLKTDLLSSLEMILSPTVVSILKINSQLKHIFKTSLTVADKIEDQKKELDGFLSILCNNLHELQENTICSLVESQKQCGNLTEDLKTIKQTHSQELCKLMNLWTERFCALEEKCENIQKPLSSVQENIQQKSKDIVNKMTFHSQKFCADSDGFSQELRNFNQEGTKLVEESVKHSDKLNGNLEKISQETEQRCESLNTRTVYFSEQWVSSLNEREQELHNLLEVVSQCCEASSSDITEKSDGRKAAHEKQHNIFLDQMTIDEDKLIAQNLELNETIKIGLTKLNCFLEQDLKLDIPTGTTPQRKSYLYPSTLVRTEPREHLLDQLKRKQPELLMMLNCSENNKEETIPDVDVEEAVLGQYTEEPLSQEPSVDAGVDCSSIGGVPFFQHKKSHGKDKENRGINTLERSKVEETTEHLVTKSRLPLRAQINL

SEQ ID NO: 36596 - protein, 1230 aa, Homo sapiens
MARAKLPRSPSEGKAGPGGAPAGAAAPEEPHGLSPLLPARGGGSVGSDVGQRLPVEDFSLDSSLSQVQVEFYVNENTFKERLKLFFIKNQRSSLRIRLFNFSLKLLTCLLYIVRVLLDDPALGIGCWGCPKQNYSFNDSSSEINWAPILWVERKMTLWAIQVIVAIISFLETMLLIYLSYKGNIWEQIFRVSFVLEMINTLPFIITIFWPPLRNLFIPVFLNCWLAKHALENMINDFHRAILRTQSAMFNQVLILFCTLLCLVFTGTCGIQHLERAGENLSLLTSFYFCIVTFSTVGYGDVTPKIWPSQLLVVIMICVALVVLPLQFEELVYLWMERQKSGGNYSRHRAQTEKHVVLCVSSLKIDLLMDFLNEFYAHPRLQDYYVVILCPTEMDVQVRRVLQIPLWSQRVIYLQGSALKDQDLMRAKMDNGEACFILSSRNEVDRTAADHQTILRAWAVKDFAPNCPLYVQILKPENKFHVKFADHVVCEEECKYAMLALNCICPATSTLITLLVHTSRGQEGQESPEQWQRMYGRCSGNEVYHIRMGDSKFFREYEGKSFTYAAFHAHKKYGVCLIGLKREDNKSILLNPGPRHILAASDTCFYINITKEENSAFIFKQEEKRKKRAFSGQGLHEGPARLPVHSIIASMGTVAMDLQGTEHRPTQSGGGGGGSKLALPTENGSGSRRPSIAPVLELADSSALLPCDLLSDQSEDEVTPSDDEGLSVVEYVKGYPPNSPYIGSSPTLCHLLPVKAPFCCLRLDKGCKHNSYEDAKAYGFKNKLIIVSAETAGNGLYNFIVPLRAYYRSRKELNPIVLLLDNKPDHHFLEAICCFPMVYYMEGSVDNLDSLLQCGIIYADNLVVVDKESTMSAEEDYMADAKTIVNVQTMFRLFPSLSITTELTHPSNMRFMQFRAKDSYSLALSKLEKRERENGSNLAFMFRLPFAAGRVFSISMLDTLLYQSFVKDYMITITRLLLGLDTTPGSGYLCAMKITEGDLWIRTYGRLFQKLCSSSAEIPIGIYRTESHVFSTSESQISVNVEDCEDTREVKGPWGSRAGTGGSSQGRHTGGGDPAEHPLLRRKSLQWARRLSRKAPKQAGRAAAAEWISQQRLSLYRRSERQELSELVKNRMKHLGLPTTGYEDVANLTASDVMNRVNLGYLQDEMNDHQNTLSYVLINPPPDTRLEPSDIVYLIRSDPLAHVASSSQSRKSSCSHKLSSCNPETRDETQL

SEQ ID NO: 36597 - protein, 1256 aa, Homo sapiens
MPLPDGARTPGGVCREARGGGYTNRTFEFDDGQCAPRRPCAGDGALLDTAGFKMSDLDSEVLPLPPRYRFRDLLLGDPSFQNDDRVQVEFYVNENTFKERLKLFFIKNQRSSLRIRLFNFSLKLLTCLLYIVRVLLDDPALGIGCWGCPKQNYSFNDSSSEINWAPILWVERKMTLWAIQVIVAIISFLETMLLIYLSYKGNIWEQIFRVSFVLEMINTLPFIITIFWPPLRNLFIPVFLNCWLAKHALENMINDFHRAILRTQSAMFNQVLILFCTLLCLVFTGTCGIQHLERAGENLSLLTSFYFCIVTFSTVGYGDVTPKIWPSQLLVVIMICVALVVLPLQFEELVYLWMERQKSGGNYSRHRAQTEKHVVLCVSSLKIDLLMDFLNEFYAHPRLQDYYVVILCPTEMDVQVRRVLQIPLWSQRVIYLQGSALKDQDLMRAKMDNGEACFILSSRNEVDRTAADHQTILRAWAVKDFAPNCPLYVQILKPENKFHVKFADHVVCEEECKYAMLALNCICPATSTLITLLVHTSRGQEGQESPEQWQRMYGRCSGNEVYHIRMGDSKFFREYEGKSFTYAAFHAHKKYGVCLIGLKREDNKSILLNPGPRHILAASDTCFYINITKEENSAFIFKQEEKRKKRAFSGQGLHEGPARLPVHSIIASMGTVAMDLQGTEHRPTQSGGGGGGSKLALPTENGSGSRRPSIAPVLELADSSALLPCDLLSDQSEDEVTPSDDEGLSVVEYVKGYPPNSPYIGSSPTLCHLLPVKAPFCCLRLDKGCKHNSYEDAKAYGFKNKLIIVSAETAGNGLYNFIVPLRAYYRSRKELNPIVLLLDNKPDHHFLEAICCFPMVYYMEGSVDNLDSLLQCGIIYADNLVVVDKESTMSAEEDYMADAKTIVNVQTMFRLFPSLSITTELTHPSNMRFMQFRAKDSYSLALSKLEKRERENGSNLAFMFRLPFAAGRVFSISMLDTLLYQSFVKDYMITITRLLLGLDTTPGSGYLCAMKITEGDLWIRTYGRLFQKLCSSSAEIPIGIYRTESHVFSTSEPHDLRAQSQISVNVEDCEDTREVKGPWGSRAGTGGSSQGRHTGGGDPAEHPLLRRKSLQWARRLSRKAPKQAGRAAAAEWISQQRLSLYRRSERQELSELVKNRMKHLGLPTTGYEDVANLTASDVMNRVNLGYLQDEMNDHQNTLSYVLINPPPDTRLEPSDIVYLIRSDPLAHVASSSQSRKSSCSHKLSSCNPETRDETQL

SEQ ID NO: 36598 - protein, 1235 aa, Homo sapiens
MPLPDGARTPGGVCREARGGGYTNRTFEFDDGQCAPRRPCAGDGALLDTAGFKMSDLDSEVLPLPPRYRFRDLLLGDPSFQNDDRVQVEFYVNENTFKERLKLFFIKNQRSSLRIRLFNFSLKLLTCLLYIVRVLLDDPALGIGCWGCPKQNYSFNDSSSEINWAPILWVERKMTLWAIQVIVAIISFLETMLLIYLSYKGNIWEQIFRVSFVLEMINTLPFIITIFWPPLRNLFIPVFLNCWLAKHALENMINDFHRAILRTQSAMFNQVLILFCTLLCLVFTGTCGIQHLERAGENLSLLTSFYFCIVTFSTVGYGDVTPKIWPSQLLVVIMICVALVVLPLQFEELVYLWMERQKSGGNYSRHRAQTEKHVVLCVSSLKIDLLMDFLNEFYAHPRLQDYYVVILCPTEMDVQVRRVLQIPLWSQRVIYLQGSALKDQDLMRAKMDNGEACFILSSRNEVDRTAADHQTILRAWAVKDFAPNCPLYVQILKPENKFHVKFADHVVCEEECKYAMLALNCICPATSTLITLLVHTSRGQEGQESPEQWQRMYGRCSGNEVYHIRMGDSKFFREYEGKSFTYAAFHAHKKYGVCLIGLKREDNKSILLNPGPRHILAASDTCFYINITKEENSAFIFKQEEKRKKRAFSGQGLHEGPARLPVHSIIASMGTVAMDLQGTEHRPTQSGGGGGGSKLALPTENGSGSRRPSIAPVLELADSSALLPCDLLSDQSEDEVTPSDDEGLSVVEYVKGYPPNSPYIGSSPTLCHLLPVKAPFCCLRLDKGCKHNSYEDAKAYGFKNKLIIVSAETAGNGLYNFIVPLRAYYRSRKELNPIVLLLDNKPDHHFLEAICCFPMVYYMEGSVDNLDSLLQCGIIYADNLVVVDKESTMSAEEDYMADAKTIVNVQTMFRLFPSLSITTELTHPSNMRFMQFRAKDSYSLALSKLEKRERENGSNLAFMFRLPFAAGRVFSISMLDTLLYQSFVKDYMITITRLLLGLDTTPGSGYLCAMKITEGDLWIRTYGRLFQKLCSSSAEIPIGIYRTESHVFSTSEPHDLRAQSQISVNVEDCEDTREVKGPWGSRAGTGGSSQGRHTGGGDPAEHPLLRRKSLQWARRLSRKAPKQAGRAAAAEWISQQRLSLYRRSERQELSELVKNRMKHLGLPTTGYDEMNDHQNTLSYVLINPPPDTRLEPSDIVYLIRSDPLAHVASSSQSRKSSCSHKLSSCNPETRDETQL

SEQ ID NO: 36599 - protein, 1211 aa, Homo sapiens
MPLPDGARTPGGVCREARGGGYTNRTFEFDDGQCAPRVQVEFYVNENTFKERLKLFFIKNQRSSLRIRLFNFSLKLLTCLLYIVRVLLDDPALGIGCWGCPKQNYSFNDSSSEINWAPILWVERKMTLWAIQVIVAIISFLETMLLIYLSYKGNIWEQIFRVSFVLEMINTLPFIITIFWPPLRNLFIPVFLNCWLAKHALENMINDFHRAILRTQSAMFNQVLILFCTLLCLVFTGGCRTCGIQHLERAGENLSLLTSFYFCIVTFSTVGYGDVTPKIWPSQLLVVIMICVALVVLPLQFEELVYLWMERQKSGGNYSRHRAQTEKHVVLCVSSLKIDLLMDFLNEFYAHPRLQDYYVVILCPTEMDVQVRRVLQIPLWSQRVIYLQGSALKDQDLMRAKMDNGEACFILSSRNEVDRTAADHQTILRAWAVKDFAPNCPLYVQILKPENKFHVKFADHVVCEEECKYAMLALNCICPATSTLITLLVHTSRGQEGQESPEQWQRMYGRCSGNEVYHIRMGDSKFFREYEGKSFTYAAFHAHKKYGVCLIGLKREDNKSILLNPGPRHILAASDTCFYINITKEENSAFIFKQEEKRKKRAFSGQGLHEGPARLPVHSIIASMGTVAMDLQGTEHRPTQSGGGGGGSKLALPTENGSGSRRPSIAPVLELADSSALLPCDLLSDQSEDEVTPSDDEGLSVVEYVKGYPPNSPYIGSSPTLCHLLPVKAPFCCLRLDKGCKHNSYEDAKAYGFKNKLIIVSAETAGNGLYNFIVPLRAYYRSRKELNPIVLLLDNKPDHHFLEAICCFPMVYYMEGSVDNLDSLLQCGIIYADNLVVVDKESTMSAEEDYMADAKTIVNVQTMFRLFPSLSITTELTHPSNMRFMQFRAKDSYSLALSKLEKRERENGSNLAFMFRLPFAAGRVFSISMLDTLLYQSFVKDYMITITRLLLGLDTTPGSGYLCAMKITEGDLWIRTYGRLFQKLCSSSAEIPIGIYRTESHVFSTSEPHDLRAQSQISVNVEDCEDTREVKGPWGSRAGTGGSSQGRHTGGGDPAEHPLLRRKSLQWARRLSRKAPKQAGRAAAAEWISQQRLSLYRRSERQELSELVKNRMKHLGLPTTGYEDVANLTASDVMNRVNLGYLQDEMNDHQNTLSYVLINPPPDTRLEPSDIVYLIRSDPLAHVASSSQSRKSSCSHKLSSCNPETRDETQL

SEQ ID NO: 36600 - protein, 620 aa, Homo sapiens
MSPPSPGRRREQRRPRAAATMATPLPGRAGGPATPLSPTRLSRLQEKEELRELNDRLAHYIDRVRALELENDRLLLKISEKEEVTTREVSGIKALYESELADARRVLDETARERARLQIEIGKLRAELDEVNKSAKKREGELTVAQGRVKDLESLFHRSEVELAAALSDKRGLESDVAELRAQLAKAEDGHAVAKKQLEKETLMRVDLENRCQSLQEELDFRKSVFEEEVRETRRRHERRLVEVDSSRQQEYDFKMAQALEELRSQHDEQVRLYKLELEQTYQAKLDSAKLSSDQNDKAASAAREELKEARMRLESLSYQLSGLQKQASAAEDRIRELEEAMAGERDKFRKMLDAKEQEMTEMRDVMQQQLAEYQELLDVKLALDMEINAYRKLLEGEEERLKLSPSPSSRVTVSRATSSSSGSLSATGRLGRSKRKRLEVEEPLGSGPSVLGTGTGGSGGFHLAQQASASGSVSIEEIDLEGKFVQLKNNSDKDQSLGNWRIKRQVLEGEEIAYKFTPKYILRAGQMVTVWAAGAGVAHSPPSTLVWKGQSSWGTGESFRTVLVNADGEEVAMRTVKKSSVMRENENGEEEEEEAEFGEEDLFHQQGDPRTTSRGCYVM

SEQ ID NO: 36601 - protein, 754 aa, Homo sapiens
MAEQWELDEEGIRRLGALTLEQPELVESLSLQGSYAGKIHSIGDAFRNFKNLRSLDLSRNLITSLKGIQYLCSLQDLNLYYNNIPSLVEVSRLQPLPFLKELDLRLNPVVRKDTDYRLFAVYTLQTLEKLDDRTVREGERKAAKLHFSQLGNSENFLLEVEKSSREKTMKNCVTGESSASKVSANVDSRIEMDSNKGLFIPFPNREIKDSLSTSATQGNGTRDQKLDTFPLGTQTQEVARREMPSDNHQEDEFRHYSPRQSTVRSPEKMTREGYQVSFLDNKSSGSSPEKELIPKPDTFHLTHDASLSKCLDVGDSSQIHPYQLPSDVGLENYDSCYSQTLSLHGSLGKRPQRSKNYQEYSIKPSNDIKTTASHSCGDLLTSLSNPDSSTGRLLKLSSDLYATTHFNSDPAVLVNVEQQLSTSLDDLTPAHGSVPNNAVLGNRTTPLRTLLLSPGTSEHRKIFTKRSLSPSKRGFKWKDNILANLNLKHGFQDATGSEPLSSDLGSLHGLAGNHSPPISARTPHVATVLRQLLELVDKHWNGSGSLLLNKKFLGPARDLLLSLVVPAPSQPRCCSHPEDTMKAFCRRELELKEAAQLVPNDMESLKQKLVRVLEENLILSEKIQQLEEGAAISIVSGQQSHTYDDLLHKNQQLTMQVACLNQELAQLKKLEKTVAILHESQRSLVVTNEYLLQQLNKEPKGYSGKALLPPEKGHHLGRSSPFGKSTLSSSSPVAHETGQYLIQSVLDAAPEPGL

SEQ ID NO: 36602 - protein, 633 aa, Homo sapiens
MLRPRFLPPDDRTVREGERKAAKLHFSQLGNSENFLLEVEKSSREKTMKNCVTGESSASKVSANVDSRIEMDSNKGLFIPFPNREIKDSLSTSATQGNGTRDQKLDTFPLGTQTQEVARREMPSDNHQEDEFRHYSPRQSTVRSPEKMTREGYQVSFLDNKSSGSSPEKELIPKPDTFHLTHDASLSKCLDVGDSSQIHPYQLPSDVGLENYDSCYSQTLSLHGSLGKRPQRSKNYQEYSIKPSNDIKTTASHSCGDLLTSLSNPDSSTGRLLKLSSDLYATTHFNSDPAVLVNVEQQLSTSLDDLTPAHGSVPNNAVLGNRTTPLRTLLLSPGTSEHRKIFTKRSLSPSKRGFKWKDNILANLNLKHGFQDATGSEPLSSDLGSLHGLAGNHSPPISARTPHVATVLRQLLELVDKHWNGSGSLLLNKKFLGPARDLLLSLVVPAPSQPRCCSHPEDTMKAFCRRELELKEAAQLVPNDMESLKQKLVRVLEENLILSEKIQQLEEGAAISIVSGQQSHTYDDLLHKNQQLTMQVACLNQELAQLKKLEKTVAILHESQRSLVVTNEYLLQQLNKEPKGYSGKALLPPEKGHHLGRSSPFGKSTLSSSSPVAHETGQYLIQSVLDAAPEPGL

SEQ ID NO: 36603 - protein, 529 aa, Homo sapiens
MLRPRFLPPDDRTVREGERKAAKLHFSQLGNSENFLLEVEKSSREKTMKNCVTGESSASKVSANVDSRIEMDSNKGLFIPFPNREIKDSLSTSATQGNGTRDQKLDTFPLGTQTQEVARREMPSDNHQEDEFRHYSPRQSTVRSPEKMTREGYQVSFLDNKSSGSSPEKELIPKPDTFHLTHDASLSKCLDVGDSSQIHPYQLPSDVGLENYDSCYSQTLSLHGSLGKRPQRSKNYQEYSIKPSNDIKTTASHSCGDLLTSLSNPDSSTGRLLKLSSDLYATTHFNSDPAVLVNVEQQLSTSLDDLTPAHGSVPNNAVLGNRTTPLRTLLLSPGTSEHRKIFTKRSLSPSKRGFKWKDNILANLNLKHGFQDATGSEESLKQKLVRVLEENLILSEKIQQLEEGAAISIVSGQQSHTYDDLLHKNQQLTMQVACLNQELAQLKKLEKTVAILHESQRSLVVTNEYLLQQLNKEPKGYSGKALLPPEKGHHLGRSSPFGKSTLSSSSPVAHETGQYLIQSVLDAAPEPGL

SEQ ID NO: 36604 - protein, 393 aa, Homo sapiens [sequence omitted]

SEQ ID NO: 36605 - protein, 367 aa, Homo sapiens
MPKKKPTPIQLNPAPDGSAVNGTSSAETNLEALQKKLEELELDEQQRKRLEAFLTQKQKVGELKDDDFEKISELGAGNGGVVFKVSHKPSGLVMARKLIHLEIKPAIRNQIIRELQVLHECNSPYIVGFYGAFYSDGEISICMEHMVIKGLTYLREKHKIMHRDVKPSNILVNSRGEIKLCDFGVSGQLIDSMANSFVGTRSYMSPERLQGTHYSVQSDIWSMGLSLVEMAVGRYPIPPPDAKELELMFGCQVEGDAAETPPRPRTPGRPLSSYGMDSRPPMAIFELLDYIVNEPPPKLPSGVFSLEFQDFVNKCLIKNPAERADLKQLMVHAFIKRSDAEEVDFAGWLCSTIGLNQPSTPTHAAGV

SEQ ID NO: 36606 - protein, 489 aa, Homo sapiens
MAAAAARVVLSSAARRRLWGFSESLLIRGAAGRSLYFGENRLRSTQAATQVVLNVPETRVTCLESGLRVASEDSGLSTCTVGLWIDAGSRYENEKNNGTAHFLEHMAFKGTKKRSQLDLELEIENMGAHLNAYTSREQTVYYAKAFSKDLPRAVEILADIIQNSTLGEAEIERERGVILREMQEVETNLQEVVFDYLHATAYQNTALGRTILGPTENIKSISRKDLVDYITTHYKGPRIVLAAAGGVSHDELLDLAKFHFGDSLCTHKGEIPALPPCKFTGSEIRVRDDKMPLAHLAIAVEAVGWAHPDTICLMVANTLIGNWDRSFGGGMNLSSKLAQLTCHGNLCHSFQSFNTSYTDTGLWGLYMVCESSTVADMLHVVQKEWMRLCTSVTESEVARARNLLKTNMLLQLDGSTPICEDIGRQMLCYNRRIPIPELEARIDAVNAETIREVCTKYIYNRSPAIAAVGPIKQLPDFKQIRSNMCWLRD

SEQ ID NO: 36607 - protein, 576 aa, Homo sapiens
MPVAATNSETAMQQVLDNLGSLPSATGAAELDLIFLRGIMESPIVRSLAKVIMVLWFMQQNVFVPMKYMLKYFGAHERLEETKLEAVRDNNLELVQEILRDLAHVAEQSSTAAELAHILQEPHFQSLLETHDSVASKTYETPPPSPGLDPTFSNQPVPPDAVRMVGIRKTAGEHLGVTFRVEGGELVIARILHGGMVAQQGLLHVGDIIKEVNGQPVGSDPRALQELLRNASGSVILKILPSYQEPHLPRQVFVKCHFDYDPARDSLIPCKEAGLRFNAGDLLQIVNQDDANWWQACHVEGGSAGLIPSQLLEEKRKAFVKRDLELTPNSGTLCGSLSGKKKKRMMYLTTKNAEFDRHELLIYEEVARMPPFRRKTLVLIGAQGVGRRSLKNKLIMWDPDRYGTTVPYTSRRPKDSEREGQGYSFVSRGEMEADVRAGRYLEHGEYEGNLYGTRIDSIRGVVAAGKVCVLDVNPQAVKVLRTAEFVPYVVFIEAPDFETLRAMNRAALESGISTKQLTEADLRRTVEESSRIQRGYGHYFDLCLVNSNLERTFRELQTAMEKLRTEPQWVPVSWVY

SEQ ID NO: 36608 - protein, 552 aa, Homo sapiens
MPVAATNSETAMQQVLDNLGSLPSATGAAELDLIFLRGIMESPIVRSLAKAHERLEETKLEAVRDNNLELVQEILRDLAHVAEQSSTAAELAHILQEPHFQSLLETHDSVASKTYETPPPSPGLDPTFSNQPVPPDAVRMVGIRKTAGEHLGVTFRVEGGELVIARILHGGMVAQQGLLHVGDIIKEVNGQPVGSDPRALQELLRNASGSVILKILPSYQEPHLPRQVFVKCHFDYDPARDSLIPCKEAGLRFNAGDLLQIVNQDDANWWQACHVEGGSAGLIPSQLLEEKRKAFVKRDLELTPNSGTLCGSLSGKKKKRMMYLTTKNAEFDRHELLIYEEVARMPPFRRKTLVLIGAQGVGRRSLKNKLIMWDPDRYGTTVPYTSRRPKDSEREGQGYSFVSRGEMEADVRAGRYLEHGEYEGNLYGTRIDSIRGVVAAGKVCVLDVNPQAVKVLRTAEFVPYVVFIEAPDFETLRAMNRAALESGISTKQLTEADLRRTVEESSRIQRGYGHYFDLCLVNSNLERTFRELQTAMEKLRTEPQWVPVSWVY

SEQ ID NO: 36609 - protein, 569 aa, Homo sapiens
MAGSPGSGVSLEGISLESSEEAELQREAMQQVLDNLGSLPSATGAAELDLIFLRGIMESPIVRSLAKAHERLEETKLEAVRDNNLELVQEILRDLAHVAEQSSTAAELAHILQEPHFQSLLETHDSVASKTYETPPPSPGLDPTFSNQPVPPDAVRMVGIRKTAGEHLGVTFRVEGGELVIARILHGGMVAQQGLLHVGDIIKEVNGQPVGSDPRALQELLRNASGSVILKILPSYQEPHLPRQVFVKCHFDYDPARDSLIPCKEAGLRFNAGDLLQIVNQDDANWWQACHVEGGSAGLIPSQLLEEKRKAFVKRDLELTPNSGTLCGSLSGKKKKRMMYLTTKNAEFDRHELLIYEEVARMPPFRRKTLVLIGAQGVGRRSLKNKLIMWDPDRYGTTVPYTSRRPKDSEREGQGYSFVSRGEMEADVRAGRYLEHGEYEGNLYGTRIDSIRGVVAAGKVCVLDVNPQAVKVLRTAEFVPYVVFIEAPDFETLRAMNRAALESGISTKQLTEADLRRTVEESSRIQRGYGHYFDLCLVNSNLERTFRELQTAMEKLRTEPQWVPVSWVY

SEQ ID NO: 36610 - protein, 597 aa, Homo sapiens
MSWAPPPQVGQNLRSQTVLRILNGMEDLMWVAMEERRFRALASFTMPVAATNSETAMQQVLDNLGSLPSATGAAELDLIFLRGIMESPIVRSLAKAHERLEETKLEAVRDNNLELVQEILRDLAHVAEQSSTAAELAHILQEPHFQSLLETHDSVASKTYETPPPSPGLDPTFSNQPVPPDAVRMVGIRKTAGEHLGVTFRVEGGELVIARILHGGMVAQQGLLHVGDIIKEVNGQPVGSDPRALQELLRNASGSVILKILPSYQEPHLPRQVFVKCHFDYDPARDSLIPCKEAGLRFNAGDLLQIVNQDDANWWQACHVEGGSAGLIPSQLLEEKRKAFVKRDLELTPNSGTLCGSLSGKKKKRMMYLTTKNAEFDRHELLIYEEVARMPPFRRKTLVLIGAQGVGRRSLKNKLIMWDPDRYGTTVPYTSRRPKDSEREGQGYSFVSRGEMEADVRAGRYLEHGEYEGNLYGTRIDSIRGVVAAGKVCVLDVNPQAVKVLRTAEFVPYVVFIEAPDFETLRAMNRAALESGISTKQLTEADLRRTVEESSRIQRGYGHYFDLCLVNSNLERTFRELQTAMEKLRTEPQWVPVSWVY

SEQ ID NO: 36611 - protein, 413 aa, Homo sapiens
MVGIRKTAGEHLGVTFRVEGGELVIARILHGGMVAQQGLLHVGDIIKEVNGQPVGSDPRALQELLRNASGSVILKILPSYQEPHLPRQVFVKCHFDYDPARDSLIPCKEAGLRFNAGDLLQIVNQDDANWWQACHVEGGSAGLIPSQLLEEKRKAFVKRDLELTPNSGTLCGSLSGKKKKRMMYLTTKNAEFDRHELLIYEEVARMPPFRRKTLVLIGAQGVGRRSLKNKLIMWDPDRYGTTVPYTSRRPKDSEREGQGYSFVSRGEMEADVRAGRYLEHGEYEGNLYGTRIDSIRGVVAAGKVCVLDVNPQAVKVLRTAEFVPYVVFIEAPDFETLRAMNRAALESGISTKQLTEADLRRTVEESSRIQRGYGHYFDLCLVNSNLERTFRELQTAMEKLRTEPQWVPVSWVY

SEQ ID NO: 36612 - protein, 541 aa, Homo sapiens
MQQVLDNLGSLPSATGAAELDLIFLRGIMESPIVRSLAKAHERLEETKLEAVRDNNLELVQEILRDLAHVAEQSSTAAELAHILQEPHFQSLLETHDSVASKTYETPPPSPGLDPTFSNQPVPPDAVRMVGIRKTAGEHLGVTFRVEGGELVIARILHGGMVAQQGLLHVGDIIKEVNGQPVGSDPRALQELLRNASGSVILKILPSYQEPHLPRQVFVKCHFDYDPARDSLIPCKEAGLRFNAGDLLQIVNQDDANWWQACHVEGGSAGLIPSQLLEEKRKAFVKRDLELTPNSGTLCGSLSGKKKKRMMYLTTKNAEFDRHELLIYEEVARMPPFRRKTLVLIGAQGVGRRSLKNKLIMWDPDRYGTTVPYTSRRPKDSEREGQGYSFVSRGEMEADVRAGRYLEHGEYEGNLYGTRIDSIRGVVAAGKVCVLDVNPQAVKVLRTAEFVPYVVFIEAPDFETLRAMNRAALESGISTKQLTEADLRRTVEESSRIQRGYGHYFDLCLVNSNLERTFRELQTAMEKLRTEPQWVPVSWVY

SEQ ID NO: 36613 - protein, 669 aa, Homo sapiens
MGSDPSAPGRPGWTGSLLGDREEAARPRLLPLLLVLLGCLGLGVAAEDAEVHAENWLRLYGYLPQPSRHMSTMRSAQILASALAEMQRFYGIPVTGVLDEETKEWMKRPRCGVPDQFGVRVKANLRRRRKRYALTGRKWNNHHLTFSIQNYTEKLGWYHSMEAVRRAFRVWEQATPLVFQEVPYEDIRLRRQKEADIMVLFASGFHGDSSPFDGTGGFLAHAYFPGPGLGGDTHFDADEPWTFSSTDLHGNNLFLVAVHELGHALGLEHSSNPNAIMAPFYQWKDVDNFKLPEDDLRGIQQLYGTPDGQPQPTQPLPTVTPRRPGRPDHRPPRPPQPPPPGGKPERPPKPGPPVQPRATERPDQYGPNICDGDFDTVAMLRGEMFVFKGRWFWRVRHNRVLDNYPMPIGHFWRGLPGDISAAYERQDGRFVFFKGDRYWLFREANLEPGYPQPLTSYGLGIPYDRIDTAIWWEPTGHTFFFQEDRYWRFNEETQRGDPGYPKPISVWQGIPASPKGAFLSNDAAYTYFYKGTKYWKFDNERLRMEPGYPKSILRDFMGCQEHVEPGPRWPDVARPPFNPHGGAEPGADSAEGDVGDGDGDFGAGVNKDGGSRVVVQMEEVARTVNVVMVLVPLLLLLCVLGLTYALVQMQRKGAPRVLLYCKRSLQEWV

SEQ ID NO: 36614 - protein, 571 aa, Homo sapiens
MTILPKKKPPPPDADPANEPPPPGPMPPAPRRGGGVGVGGGGTGVGGGDRDRDSGVVGARPRASPPPQGPLPGPPGALHRWALAVPPGAVAGPRPQQASPPPCGGPGGPGGGPGDALGAAAAGVGAAGVVVGVGGAVGVGGCCSGPGHSKRRRQAPGVGAVGGGSPEREEVGAGYNSEDEYEAAAARIEAMDPATVEQQEHWFEKALRDKKGFIIKQMKEDGACLFRAVADQVYGDQDMHEVVRKHCMDYLMKNADYFSNYVTEDFTTYINRKRKNNCHGNHIEMQAMAEMYNRPVEVYQYSTGTSAVEPINTFHGIHQNEDEPIRVSYHRNIHYNSVVNPNKATIGVGLGLPSFKPGFAEQSLMKNAIKTSEESWIEQQMLEDKKRATDWEATNEAIEEQVARESYLQWLRDQEKQARQVRGPSQPRKASATCSSATAAASSGLEEWTSRSPRQRSSASSPEHPELHAELGMKPPSPGTVLALAKPPSPCAPGTSSQFSAGADRATSPLVSLYPALECRALIQQMSPSAFGLNDWDDDEILASVLAVSQQEYLDSMKKNKVHRDPPPDKS

SEQ ID NO: 36615 - protein, 542 aa, Homo sapiens
MTILPKKKPPPPDADPGGTGVGGGDRDRDSGVVGARPRASPPPQGPLPGPPGALHRWALAVPPGAVAGPRPQQASPPPCGGPGGPGGGPGDALGAAAAGVGAAGVVVGVGGAVGVGGCCSGPGHSKRRRQAPGVGAVGGGSPEREEVGAGYNSEDEYEAAAARIEAMDPATVEQQEHWFEKALRDKKGFIIKQMKEDGACLFRAVADQVYGDQDMHEVVRKHCMDYLMKNADYFSNYVTEDFTTYINRKRKNNCHGNHIEMQAMAEMYNRPVEVYQYSTEPINTFHGIHQNEDEPIRVSYHRNIHYNSVVNPNKATIGVGLGLPSFKPGFAEQSLMKNAIKTSEESWIEQQMLEDKKRATDWEATNEAIEEQVARESYLQWLRDQEKQARQVRGPSQPRKASATCSSATAAASSGLEEWTSRSPRQRSSASSPEHPELHAELGMKPPSPGTVLALAKPPSPCAPGTSSQFSAGADRATSPLVSLYPALECRALIQQMSPSAFGLNDWDDDEILASVLAVSQQEYLDSMKKNKVHRDPPPDKS

SEQ ID NO: 36616 - protein, 561 aa, Homo sapiens
MTILPKKKPPPPDADPANEPPPPGPMPPAPRRGGGVGVGGGGTGVGGGDRDRDSGVVGARPRASPPPQGPLPGPPGALHRWALAVPPGAVAGPRPQQASPPPCGGPGGPGGGPGDALGAAAAGVGAAGVVVGVGGAVGVGGCCSGPGHSKRRRQAPGVGAVGGGSPEREEVGAGYNSEDEYEAAAARIEAMDPATVEQQEHWFEKALRDKKGFIIKQMKEDGACLFRAVADQVYGDQDMHEVVRKHCMDYLMKNADYFSNYVTEDFTTYINRKRKNNCHGNHIEMQAMAEMYNRPVEVYQYSTEPINTFHGIHQNEDEPIRVSYHRNIHYNSVVNPNKATIGVGLGLPSFKPGFAEQSLMKNAIKTSEESWIEQQMLEDKKRATDWEATNEAIEEQVARESYLQWLRDQEKQARQVRGPSQPRKASATCSSATAAASSGLEEWTSRSPRQRSSASSPEHPELHAELGMKPPSPGTVLALAKPPSPCAPGTSSQFSAGADRATSPLVSLYPALECRALIQQMSPSAFGLNDWDDDEILASVLAVSQQEYLDSMKKNKVPCRC

SEQ ID NO: 36617 - protein, 349 aa, Homo sapiens
MKEDGACLFRAVADQVYGDQDMHEVVRKHCMDYLMKNADYFSNYVTEDFTTYINRKRKNNCHGNHIEMQAMAEMYNRPVEVYQYSTEPINTFHGIHQNEDEPIRVSYHRNIHYNSVVNPNKATIGVGLGLPSFKPGFAEQSLMKNAIKTSEESWIEQQMLEDKKRATDWEATNEAIEEQVARESYLQWLRDQEKQARQVRGPSQPRKASATCSSATAAASSGLEEWTSRSPRQRSSASSPEHPELHAELGMKPPSPGTVLALAKPPSPCAPGTSSQFSAGADRATSPLVSLYPALECRALIQQMSPSAFGLNDWDDDEILASVLAVSQQEYLDSMKKNKVHRDPPPDKS

SEQ ID NO: 36618 - protein, 566 aa, Homo sapiens
MTILPKKKPPPPDADPANEPPPPGPMPPAPRRGGGVGVGGGGTGVGGGDRDRDSGVVGARPRASPPPQGPLPGPPGALHRWALAVPPGAVAGPRPQQASPPPCGGPGGPGGGPGDALGAAAAGVGAAGVVVGVGGAVGVGGCCSGPGHSKRRRQAPGVGAVGGGSPEREEVGAGYNSEDEYEAAAARIEAMDPATVEQQEHWFEKALRDKKGFIIKQMKEDGACLFRAVADQVYGDQDMHEVVRKHCMDYLMKNADYFSNYVTEDFTTYINRKRKNNCHGNHIEMQAMAEMYNRPVEVYQYSTEPINTFHGIHQNEDEPIRVSYHRNIHYNSVVNPNKATIGVGLGLPSFKPGFAEQSLMKNAIKTSEESWIEQQMLEDKKRATDWEATNEAIEEQVARESYLQWLRDQEKQARQVRGPSQPRKASATCSSATAAASSGLEEWTSRSPRQRSSASSPEHPELHAELGMKPPSPGTVLALAKPPSPCAPGTSSQFSAGADRATSPLVSLYPALECRALIQQMSPSAFGLNDWDDDEILASVLAVSQQEYLDSMKKNKVHRDPPPDKS

SEQ ID NO: 36619 - protein, 513 aa, Homo sapiens
MKRLLLLFLFFITFSSAFPLVRMTENEENMQLAQAYLNQFYSLEIEGNHLVQSKNRSLIDDKIREMQAFFGLTVTGKLDSNTLEIMKTPRCGVPDVGQYGYTLPGWRKYNLTYRIINYTPDMARAAVDEAIQEGLEVWSKVTPLKFTKISKGIADIMIAFRTRVHGRCPRYFDGPLGVLGHAFPPGPGLGGDTHFDEDENWTKDGAGFNLFLVAAHEFGHALGLSHSNDQTALMFPNYVSLDPRKYPLSQDDINGIQSIYGGLPKEPAKPKEPTIPHACDPDLTFDAITTFRREVMFFKGRHLWRIYYDITDVEFELIASFWPSLPADLQAAYENPRDKILVFKDENFWMIRGYAVLPDYPKSIHTLGFPGRVKKIDAAVCDKTTRKTYFFVGIWCWRFDEMTQTMDKGFPQRVVKHFPGISIRVDAAFQYKGFFFFSRGSKQFEYDIKTKNITRIMRTNTWFQCKEPKNSSFGFDINKEKAHSGGIKILYHKSLSLFIFGIVHLLKNTSIYQ

SEQ ID NO: 36620 - protein, 1228 aa, Homo sapiens
MKGARLFVLLSSLWSGGIGLNNSKHSWTIPEDGNSQKTMPSASVPPNKIQSLQILPTTRVMSAEIATTPEARTSEDSLLKSTLPPSETSAPAEGVRNQTLTSTEKAEGVVKLQNLTLPTNASIKFNPGAESVVLSNSTLKFLQSFARKSNEQATSLNTVGGTGGIGGVGGTGGVGNRAPRETYLSRGDSSSSQRTDYQKSNFETTRGKNWCAYVHTRLSPTVILDNQVTYVPGGKGPCGWTGGSCPQRSQKISNPVYRMQHKIVTSLDWRCCPGYSGPKCQLRAQEQQSLIHTNQAESHTAVGRGVAEQQQQQGCGDPEVMQKMTDQVNYQAMKLTLLQKKIDNISLTVNDVRNTYSSLEGKVSEDKSREFQSLLKGLKSKSINVLIRDIVREQFKIFQNDMQETVAQLFKTVSSLSEDLESTRQIIQKVNESVVSIAAQQKFVLVQENRPTLTDIVELRNHIVNVRQEMTLTCEKPIKELEVKQTHLEGALEQEHSRSILYYESLNKTLSKLKEVHEQLLSTEQVSDQKNAPAAESVSNNVTEYMSTLHENIKKQSLMMLQMFEDLHIQESKINNLTVSLEMEKESLRGECEDMLSKCRNDFKFQLKDTEENLHVLNQTLAEVLFPMDNKMDKMSEQLNDLTYDMEILQPLLEQGASLRQTMTYEQPKEAIVIRKKIENLTSAVNSLNFIIKELTKRHNLLRNEVQGRDDALERRINEYALEMEDGLNKTMTIINNAIDFIQDNYALKETLSTIKDNSEIHHKCTSDMETILTFIPQFHRLNDSIQTLVNDNQRYNFVLQVAKTLAGIPRDEKLNQSNFQKMYQMFNETTSQVRKYQQNMSHLEEKLLLTTKISKNFETRLQDIESKVTQTLIPYYISVKKGSVVTNERDQALQLQVLNSRFKALEAKSIHLSINFFSLNKTLHEVLTMCHNASTSVSELNATIPKWIKHSLPDIQLLQKGLTEFVEPIIQIKTQAALSNLTCCIDRSLPGSLANVVKSQKQVKSLPKKINALKKPTVNLTTVLIGRTQRNTDNIIYPEEYSSCSRHPCQNGGTCINGRTSFTCACRHPFTGDNCTIKLVEENALAPDFSKGSYRYAPMVAFFASHTYGMTIPGPILFNNLDVNYGASYTPRTGKFRIPYLGVYVFKYTIESFSAHISGFLVVDGIDKLAFESENINSEIHCDRVLTGDALLELNYGQEVWLRLAKGTIPAKFPPVTTFSGYLLYRT

SEQ ID NO: 36621 - protein, 531 aa, Homo sapiens
MKGARLFVLLSSLWSGGIGLNNSKHSWTIPEDGNSQKTMPSASVPPNKIQSLQILPTTRVMSAEIATTPEKAEGVVKLQNLTLPTNASIKFNPGAESVVLSNSTLKFLQSFARKSNEQATSLNTVGGTGGIGGVGGTGGVGNRAPRETYLSRGDSSSSQRTDYQKSNFETTRGKNWCAYVHTRLSPTVILDNQVTYVPGGKGPCGWTGGSCPQRSQKISNPVYRMQHKIVTSLDWRCCPGYSGPKCQLRAQEQQSLIHTNQAESHTAVGRGVAEQQQQQGCGDPEVMQKMTDQVNYQAMKLTLLQKKIDNISLTVNDVRNTYSSLEGKVSEDKSREFQSLLKEEYSSCSRHPCQNGGTCINGRTSFTCACRHPFTGDNCTIKLVEENALAPDFSKGSYRYAPMVAFFASHTYGMTIPGPILFNNLDVNYGASYTPRTGKFRIPYLGVYVFKYTIESFSAHISGFLVVDGIDKLAFESENINSEIHCDRVLTGDALLELNYGQEVWLRLAKGTIPAKFPPVTTFSGYLLYRT

SEQ ID NO: 36622 - protein, 125 aa, Homo sapiens
MPSEKTFKQRRTFEQRVEDVRLIREQHPTKIPVIIERYKGEKQLPVLDKTKFLVPDHVNMSELIKIIRRRLQLNANQAFFLLVNGHSMVSVSTPISEVYESEKDEDGFLYMVYASQETFGMKLSV

SEQ ID NO: 36623 - protein, 154 aa, Homo sapiens
MAQSINITELNLPQLEMLKNQLDQEVEFLSTSIAQLKVVQTKYVEAKDCLNVLNKSNEGKELLVPLTSSMYVPGKLHDVEHVLIDVGTGYYVEKTAEDAKDFFKRKIDFLTKQMEKIQPALQEKHAMKQAVMEMMSQKIQQLTALGAAQATAKA

SEQ ID NO: 36624 - protein, 66 aa, Homo sapiens
MAQSINITELNLPQLEMLKNQLDQEVEFLSTSIAQLKVVQTKYVEAKDCLNVLNKSNEDVCPWEAA

SEQ ID NO: 36625 - protein, 109 aa, Homo sapiens
MAQSINITELNLPQLEMLKNQLDQMYVPGKLHDVEHVLIDVGTGYYVEKTAEDAKDFFKRKIDFLTKQMEKIQPALQEKHAMKQAVMEMMSQKIQQLTALGAAQATAKA

SEQ ID NO: 36626 - protein, 1848 aa, Homo sapiens
MSVGELYSQCTRVWIPDPDEVWRSAELTKDYKEGDKSLQLRLEDETILEYPIDVQRNQLPFLRNPDILVGENDLTALSYLHEPAVLHNLKVRFLESNHIYTYCGIVLVAINPYEQLPIYGQDVIYTYSGQNMGDMDPHIFAVAEEAYKQMARDEKNQSIIVSGESGAGKTVSAKYAMRYFATVGGSASETNIEEKVLASSPIMEAIGNAKTTRNDNSSRFGKYIQIGFDKRYHIIGANMRTYLLEKSRVVFQADDERNYHIFYQLCAAAGLPEFKELALTSAEDFFYTSQGGDTSIEGVDDAEDFEKTRQAFTLLGVKESHQMSIFKIIASILHLGSVAIQAERDGDSCSISPQDVYLSNFCRLLGVEHSQMEHWLCHRKLVTTSETYVKTMSLQQVINARNALAKHIYAQLFGWIVEHINKALHTSLKQHSFIGVLDIYGFETFEVNSFEQFCINYANEKLQQQFNSHVFKLEQEEYMKEQIPWTLIDFYDNQPCIDLIEAKLGILDLLDEECKVPKGTDQNWAQKLYDRHSSSQHFQKPRMSNTAFIIVHFADKVEYLSDGFLEKNRDTVYEEQINILKASKFPLVADLFHDDKDPVPATTPGKGSSSKISVRSARPPMKVSNKEHKKTVGHQFRTSLHLLMETLNATTPHYVRCIKPNDEKLPFHFDPKRAVQQLRACGVLETIRISAAGYPSRWAYHDFFNRYRVLVKKRELANTDKKAICRSVLENLIKDPDKFQFGRTKIFFRAGQVAYLEKLRADKFRTATIMIQKTVRGWLQKVKYHRLKGATLTLQRYCRGHLARRLAEHLRRIRAAVVLQKHYRMQRARQAYQRVRRAAVVIQAFTRAMFVRRTYRQVLMEHKATTIQKHVRGWMARRHFQRLRDAAIVIQCAFRMLKARRELKALRIEARSAEHLKRLNVGMENKVVQLQRKIDEQNKEFKTLSEQLSVTTSTYTMEVERLKKELVHYQQSPGEDTSLRLQEEVESLRTELQRAHSERKILEDAHSREKDELRKRVADLEQENALLKDEKEQLNNQILCQSKDEFAQNSVKENLMKKELEEERSRYQNLVKEYSQLEQRYDNLRDEMTIIKQTPGHRRNPSNQSSLESDSNYPSISTSEIGDTEDALQQVEEIGLEKAAMDMTVFLKLQKRVRELEQERKKLQVQLEKREQQDSKKVQAEPPQTDIDLDPNADLAYNSLKRQELESENKKLKNDLNELRKAVADQATQNNSSHGSPDSYSLLLNQLKLAHEELEVRKEEVLILRTQIVSADQRRLAGRNAEPNINARSSWPNSEKHVDQEDAIEAYHGVCQTNSKTEDWGYLNEDGELGLAYQGLKQVARLLEAQLQAQSLEHEEEVEHLKAQLEALKEEMDKQQQTFCQTLLLSPEAQVEFGVQQEISRLTNENLDLKELVEKLEKNERKLKKQLKIYMKKAQDLEAAQALAQSERKRHELNRQVTVQRKEKDFQGMLEYHKEDEALLIRNLVTDLKPQMLSGTVPCLPAYILYMCIRHADYTNDDLKVHSLLTSTINGIKKVLKKHNDDFEMTSFWLSNTCRLLHCLKQYSGDEGFMTQNTAKQNEHCLKNFDLTEYRQVLSDLSIQIYQQLIKIAEGVLQPMIVSAMLENESIQGLSGVKPTGYRKRSSSMADGDNSYCLEAIIRQMNAFHTVMCDQGLDPEIILQVFKQLFYMINAVTLNNLLLRKDVCSWSTGMQLRYNISQLEEWLRGRNLHQSGAVQTMEPLIQAAQLLQLKKKTQEDAEAICSLCTSLSTQQIVKILNLYTPLNEFEERVTVAFIRTIQAQLQERNDPQQLLLDAKHMFPVLFPFNPSSLTMDSIHIPACLNLEFLNEV

SEQ ID NO: 36627 - protein, 963 aa, Homo sapiens
MEHKATTIQKHVRGWMARRHFQRLRDAAIVIQCAFRMLKARRELKALRIEARSAEHLKRLNVGMENKVVQLQRKIDEQNKEFKTLSEQLSVTTSTYTMEVERLKKELVHYQQSPGEDTSLRLQEEVESLRTELQRAHSERKILEDAHSREKDELRKRVADLEQENALLKDEKEQLNNQILCQSKDEFAQNSVKENLMKKELEEERSRYQNLVKEYSQLEQRYDNLRDEMTIIKQTPGHRRNPSNQSSLESDSNYPSISTSEIGDTEDALQQVEEIGLEKAAMDMTVFLKLQKRVRELEQERKKLQVQLEKREQQDSKKVQAEPPQTDIDLDPNADLAYNSLKRQELESENKKLKNDLNELRKAVADQATQNNSSHGSPDSYSLLLNQLKLAHEELEVRKEEVLILRTQIVSADQRRLAGRNAEPNINARSSWPNSEKHVDQEDAIEAYHGVCQTNRLLEAQLQAQSLEHEEEVEHLKAQLEALKEEMDKQQQTFCQTLLLSPEAQVEFGVQQEISRLTNENLDLKELVEKLEKNERKLKKQLKIYMKKAQDLEAAQALAQSERKRHELNRQVTVQRKEKDFQGMLEYHKEDEALLIRNLVTDLKPQMLSGTVPCLPAYILYMCIRHADYTNDDLKVHSLLTSTINGIKKVLKKHNDDFEMTSFWLSNTCRLLHCLKQYSGDEGFMTQNTAKQNEHCLKNFDLTEYRQVLSDLSIQIYQQLIKIAEGVLQPMIVSAMLENESIQGLSGVKPTGYRKRSSSMADGDNSYCLEAIIRQMNAFHTVMCDQGLDPEIILQVFKQLFYMINAVTLNNLLLRKDVCSWSTGMQLRYNISQLEEWLRGRNLHQSGAVQTMEPLIQAAQLLQLKKKTQEDAEAICSLCTSLSTQQIVKILNLYTPLNEFEERVTVAFIRTIQAQLQERNDPQQLLLDAKHMFPVLFPFNPSSLTMDSIHIPACLNLEFLNEV

SEQ ID NO: 36628 - protein, 418 aa, Homo sapiens
MKKAQDLEAAQALAQSERKRHELNRQVTVQRKEKDFQGMLEYHKEDEALLIRNLVTDLKPQMLSGTVPCLPAYILYMCIRHADYTNDDLKVHSLLTSTINGIKKVLKKHNDDFEMTSFWLSNTCRLLHCLKQYSGDEGFMTQNTAKQNEHCLKNFDLTEYRQVLSDLSIQIYQQLIKIAEGVLQPMIVSAMLENESIQGLSGVKPTGYRKRSSSMADGDNSYCLEAIIRQMNAFHTVMCDQGLDPEIILQVFKQLFYMINAVTLNNLLLRKDVCSWSTGMQLRYNISQLEEWLRGRNLHQSGAVQTMEPLIQAAQLLQLKKKTQEDAEAICSLCTSLSTQQIVKILNLYTPLNEFEERVTVAFIRTIQAQLQERNDPQQLLLDAKHMFPVLFPFNPSSLTMDSIHIPACLNLEFLNEV

SEQ ID NO: 36629 - protein, 154 aa, Homo sapiens
MASASARGNQDKDAHFPPPSKQSLLFCPKSKLHIHRAEISKIMRECQEESFWKRALPFSLVSMLVTQGLVYQGYLAANSRFGSLPKVALAGLLGFGLGKVSYIGVCQSKFHFFEDQLRGAGFGPQHNRHCLLTCEECKIKHGLSEKGDSQPSAS

SEQ ID NO: 36630 - protein, 99 aa, Homo sapiens
MASASARGNQDKDAHFPPPSKQSLLFCPKSKLHIHRAEISKIMRECQEESFWKRALPFSLVSMLVTQGLVYQGYLAANSRFGSLPKVARTASLPVRNAK

SEQ ID NO: 36631 - protein, 314 aa, Homo sapiens
MKNKSMEIEFILLGLTDDPQLQIVIFLFLFLNYTLSLMGNLIIIILTLLDPRLKTPMYFFLRNFSFLEVIFTTVCIPRFLITIVTRDKTISYNNCATQLFFILLPGVTEFYLLAAMSYDRYVAICKPLHYPIIMSSKVCYQLVLSSWVTGFLIIFPPLVMGLKLDFCASKTIDHFMCETSPILQISCTDTHVLELMSFTLAVVTLVVTLVLVILSYTCIIKTILKFSSAQQRNKAFSTCTSHMIVVSMTYGSCIFMYIKPSAKERVTVSKGVALLYTSIAPLLNPFIYTLRNQQVKEVFWDVLQKNLCFSKRPF

SEQ ID NO: 36632 - protein, 153 aa, Homo sapiens
MNVGVAHSEVNPNTRVMNSRGIWLAYIILVGLLHMVLLSIPFFSIPVVWTLTNVIHNLATYVFLHTVKGTPFETPDQGKARLLTHWEQMDYGLQFTSSRKFLSISPIVLYLLASFYTKYDAAHFLINTASLLSVLLPKLPQFHGVRVFGINKY

SEQ ID NO: 36633 - protein, 331 aa, Homo sapiens
MSPDGNHSSDPTEFVLAGLPNLNSARVELFSVFLLVYLLNLTGNVLIVGVVRADTRLQTPMYFFLGNLSCLEILLTSVIIPKMLSNFLSRQHTISFAACITQFYFYFFLGASEFLLLAVMSADRYLAICHPLRYPLLMSGAVCFRVALACWVGGLVPVLGPTVAVALLPFCKQGAVVQHFFCDSGPLLRLACTNTKKLEETDFVLASLVIVSSLLITAVSYGLIVLAVLSIPSASGRQKAFSTCTSHLIVVTLFYGSAIFLYVRPSQSGSVDTNWAVTVITTFVTPLLNPFIYALRNEQVKEALKDMFRKVVAGVLGNLLLDKCLSEKAVK

SEQ ID NO: 36634 - protein, 1896 aa, Homo sapiens
MKASSGDQGSPPCFLRFPRPVRVVSGAEAELKCVVLGEPPPVVVWEKGGQQLAASERLSFPADGAEHGLLLTAALPTDAGVYVCRARNAAGEAYAAAAVTVLEPPASDPELQPAERPLPSPGSGEGAPVFLTGPRSQWVLRGAEVVLTCRAGGLPEPTLYWEKDGMALDEVWDSSHFALQPGRAEDGPGASLALRILAARLPDSGVYVCHARNAHGHAQAGALLQVHQPPESPPADPDEAPAPVVEPLKCAPKTFWVNEGKHAKFRCYVMGKPEPEIEWHWEGRPLLPDRRRLMYRDRDGGFVLKVLYCQAKDRGLYVCAARNSAGQTLSAVQLHVKEPRLRFTRPLQDVEGREHGIAVLECKVPNSRIPTAWFREDQRLLPCRKYEQIEEGTVRRLIIHRLKADDDGIYLCEMRGRVRTVANVTVKGPILKRLPRKLDVLEGENAVLLVETLEAGVEGRWSRDGEELPVICQSSSGHMHALVLPGVTREDAGEVTFSLGNSRTTTLLRVKCVKHSPPGPPILAEMFKGHKNTVLLTWKPPEPAPETPFIYRLERQEVGSEDWIQCFSIEKAGAVEVPGDCVPSEGDYRFRICTVSGHGRSPHVVFHGSAHLVPTARLVAGLEDVQVYDGEDAVFSLDLSTIIQGTWFLNGEELKSNEPEGQVEPGALRYRIEQKGLQHRLILHAVKHQDSGALVGFSCPGVQDSAALTIQESPVHILSPQDRVSLTFTTSERVVLTCELSRVDFPATWYKDGQKVEESELLVVKMDGRKHRLILPEAKVQDSGEFECRTEGVSAFFGVTVQDPPVHIVDPREHVFVHAITSECVMLACEVDREDAPVRWYKDGQEVEESDFVVLENEGPHRRLVLPATQPSDGGEFQCVAGDECAYFTVTITDVSSWIVYPSGKVYVAAVRLERVVLTCELCRPWAEVRWTKDGEEVVESPALLLQKEDTVRRLVLPAVQLEDSGEYLCEIDDESASFTVTVTEPPVRIIYPRDEVTLIAVTLECVVLMCELSREDAPVRWYKDGLEVEESEALVLERDGPRCRLVLPAAQPEDGGEFVCDAGDDSAFFTVTVTAPPERIVHPAARSLDLHFGAPGRVELRCEVAPAGSQVRWYKDGLEVEASDALQLGAEGPTRTLTLPHAQPEDAGEYVCETRHEAITFNVILAEPPVQFLALETTPSPLCVAPGEPVVLSCELSRAGAPVVWSHNGRPVQEGEGLELHAEGPRRVLCIQAAGPAHAGLYTCQSGAAPGAPSLSFTVQVAEPPVRVVAPEAAQTRVRSTPGGDLELVVHLSGPGGPVRWYKDGERLASQGRVQLEQAGARQVLRVQGARSGDAGEYLCDAPQDSRIFLVSVEEPLLVKLVSELTPLTVHEGDDATFRCEVSPPDADVTWLRNGAVVTPGPQVEMAQNGSSRILTLRGCQLGDAGTVTLRAGSTATSARLHVRETELLFLRRLQDVRAEEGQDVCLEVETGRVGAAGAVRWVRGGQPLPHDSRLSMAQDGHIHRLFIHGVILADQGTYGCESHHDRTLARLSVRPRQLRVLRPLEDVTISEGGSATFQLELSQEGVTGEWARGGVQLYPGPKCHIHSDGHRHRLVLNGLGLADSGCVSFTADSLRCAARLIVREVPVTIVRGPHDLEVTEGDTATFECELSQALADVTWEKDGNALTPSPRLRLQALGTRRLLQLRRCGPSDAGTYSCAVGTARAGPVRLTVRERTVAVLSELRSVSAREGDGATFECTVSEVETTGRWELGGRPLRPGARVRIRQEGKKHILVLSELRAEDAGEVRFQAGPAQSLALLEVEALPLQMCRHPPREKTVLVGRRAVLEVTVSRSGGHVCWLREGAELCPGDKYEMRSHGPTHSLVIHDVRPEDQGTYCCQAGQDSTHTRLLVEGN

SEQ ID NO: 36635 - protein, 1025 aa, Homo sapiens
MKASSGDQGSPPCFLRFPRPVRVVSGAEAELKCVVLGEPPPVVVWEKGGQQLAASERLSFPADGAEHGLLLTAALPTDAGVYVCRARNAAGEAYAAAAVTVLEPPASDPELQPAERPLPSPGSGEGAPVFLTGPRSQWVLRGAEVVLTCRAGGLPEPTLYWEKDGMALDEVWDSSHFALQPGRAEDGPGASLALRILAARLPDSGVYVCHARNAHGHAQAGALLQVHQPPESPPADPDEAPAPVVEPLKCAPKTFWVNEGKHAKFRCYVMGKPEPEIEWHWEGRPLLPDRRRLMYRDRDGGFVLKVLYCQAKDRGLYVCAARNSAGQTLSAVQLHVKEPRLRFTRPLQDVEGREHGIAVLECKVPNSRIPTAWFREDQRLLPCRKYEQIEEGTVRRLIIHRLKADDDGIYLCEMRGRVRTVANVTVKGPILKRLPRKLDVLEGENAVLLVETLEAGVEGRWSRDGEELPVICQSSSGHMHALVLPGVTREDAGEVTFSLGNSRTTTLLRVKCVKHSPPGPPILAEMFKGHKNTVLLTWKPPEPAPETPFIYRLERQEVGSEDWIQCFSIEKAGAVEVPGDCVPSEGDYRFRICTVSGHGRSPHVVFHGSAHLVPTARLVAGLEDVQVYDGEDAVFSLDLSTIIQGTWFLNGEELKSNEPEGQVEPGALRYRIEQKGLQHRLILHAVKHQDSGALVGFSCPGVQDSAALTIQESPVHILSPQDRVSLTFTTSERVVLTCELSRVDFPATWYKDGQKVEESELLVVKMDGRKHRLILPEAKVQDSGEFECRTEGVSAFFGVTVQDPPVHIVDPREHVFVHAITSECVMLACEVDREDAPVRWYKDGQEVEESDFVVLENEGPHRRLVLPATQPSDGGEFQCVAGDECAYFTVTITDVSSWIVYPSGKVYVAAVRLERVVLTCELCRPWAEVRWTKDGEEVVESPALLLQKEDTVRRLVLPAVQLEDSGEYLCEIDDESASFTVTVTESYQSQDSSNNNPELCVLLKKPKTRRLWSRFPPWRRTAGTE

SEQ ID NO: 36636 - protein, 1401 aa, Homo sapiens
MKASSGDQGSPPCFLRFPRPVRVVSGAEAELKCVVLGEPPPVVVWEKGGQQLAASERLSFPADGAEHGLLLTAALPTDAGVYVCRARNAAGEAYAAAAVTVLEPPASDPELQPAERPLPSPGSGEGAPVFLTGPRSQWVLRGAEVVLTCRAGGLPEPTLYWEKDGMALDEVWDSSHFALQPGRAEDGPGASLALRILAARLPDSGVYVCHARNAHGHAQAGALLQVHQPPESPPADPDEAPAPVVEPLKCAPKTFWVNEGKHAKFRCYVMGKPEPEIEWHWEGRPLLPDRRRLMYRDRDGGFVLKVLYCQAKDRGLYVCAARNSAGQTLSAVQLHVKEPRLRFTRPLQDVEGREHGIAVLECKVPNSRIPTAWFREDQRLLPCRKYEQIEEGTVRRLIIHRLKADDDGIYLCEMRGRVRTVANVTVKGPILKRLPRKLDVLEGENAVLLVETLEAGVEGRWSRDGEELPVICQSSSGHMHALVLPGVTREDAGEVTFSLGNSRTTTLLRVKCVKHSPPGPPILAEMFKGHKNTVLLTWKPPEPAPETPFIYRLERQEVGSEDWIQCFSIEKAGAVEVPGDCVPSEGDYRFRICTVSGHGRSPHVVFHGSAHLVPTARLVAGLEDVQVYDGEDAVFSLDLSTIIQGTWFLNGEELKSNEPEGQVEPGALRYRIEQKGLQHRLILHAVKHQDSGALVGFSCPGVQDSAALTIQESPVHILSPQDRVSLTFTTSERVVLTCELSRVDFPATWYKDGQKVEESELLVVKMDGRKHRLILPEAKVQDSGEFECRTEGVSAFFGVTVQDPPVHIVDPREHVFVHAITSECVMLACEVDREDAPVRWYKDGQEVEESDFVVLENEGPHRRLVLPATQPSDGGEFQCVAGDECAYFTVTITDVSSWIVYPSGKVYVAAVRLERVVLTCELCRPWAEVRWTKDGEEVVESPALLLQKEDTVRRLVLPAVQLEDSGEYLCEIDDESASFTVTVTEPPVRIIYPRDEVTLIAVTLECVVLMCELSREDAPVRWYKDGLEVEESEALVLERDGPRCRLVLPAAQPEDGGEFVCDAGDDSAFFTVTVTEPPVQFLALETTPSPLCVAPGEPVVLSCELSRAGAPVVWSHNGRPVQEGEGLELHAEGPRRVLCIQAAGPAHAGLYTCQSGAAPGAPSLSFTVQVAEPPVRVVAPEAAQTRVRSTPGGDLELVVHLSGPGGPVRWYKDGERLASQGRVQLEQAGARQVLRVQGARSGDAGEYLCDAPQDSRIFLVSVEEPLLVKLVSELTPLTVHEGDDATFRCEVSPPDADVTWLRNGAVVTPGPQRQSCCSYGGCRMCGQRKARTCVSKWRQAEWVQRGPCAGCEVGSPCPTTLACPWPRMGTSTASSSMVSYWPTRAPTAARATTIAPWPGSA

SEQ ID NO: 36637 - protein, 1543 aa, Homo sapiens
MKASSGDQGSPPCFLRFPRPVRVVSGAEAELKCVVLGEPPPVVVWEKGGQQLAASERLSFPADGAEHGLLLTAALPTDAGVYVCRARNAAGEAYAAAAVTVLEPPASDPELQPAERPLPSPGSGEGAPVFLTGPRSQWVLRGAEVVLTCRAGGLPEPTLYWEKDGMALDEVWDSSHFALQPGRAEDGPGASLALRILAARLPDSGVYVCHARNAHGHAQAGALLQVHQPPESPPADPDEAPAPVVEPLKCAPKTFWVNEGKHAKFRCYVMGKPEPEIEWHWEGRPLLPDRRRLMYRDRDGGFVLKVLYCQAKDRGLYVCAARNSAGQTLSAVQLHVKEPRLRFTRPLQDVEGREHGIAVLECKVPNSRIPTAWFREDQRLLPCRKYEQIEEGTVRRLIIHRLKADDDGIYLCEMRGRVRTVANVTVKGPILKRLPRKLDVLEGENAVLLVETLEAGVEGRWSRDGEELPVICQSSSGHMHALVLPGVTREDAGEVTFSLGNSRTTTLLRVKCVKHSPPGPPILAEMFKGHKNTVLLTWKPPEPAPETPFIYRLERQEVGSEDWIQCFSIEKAGAVEVPGDCVPSEGDYRFRICTVSGHGRSPHVVFHGSAHLVPTARLVAGLEDVQVYDGEDAVFSLDLSTIIQGTWFLNGEELKSNEPEGQVEPGALRYRIEQKGLQHRLILHAVKHQDSGALVGFSCPGVQDSAALTIQESPVHILSPQDRVSLTFTTSERVVLTCELSRVDFPATWYKDGQKVEESELLVVKMDGRKHRLILPEAKVQDSGEFECRTEGVSAFFGVTVQDPPVHIVDPREHVFVHAITSECVMLACEVDREDAPVRWYKDGQEVEESDFVVLENEGPHRRLVLPATQPSDGGEFQCVAGDECAYFTVTITDVSSWIVYPSGKVYVAAVRLERVVLTCELCRPWAEVRWTKDGEEVVESPALLLQKEDTVRRLVLPAVQLEDSGEYLCEIDDESASFTVTVTEPPVRIIYPRDEVTLIAVTLECVVLMCELSREDAPVRWYKDGLEVEESEALVLERDGPRCRLVLPAAQPEDGGEFVCDAGDDSAFFTVTVTAPPERIVHPAARSLDLHFGAPGRVELRCEVAPAGSQVRWYKDGLEVEASDALQLGAEGPTRTLTLPHAQPEDAGEYVCETRHEAITFNVILAEPPVQFLALETTPSPLCVAPGEPVVLSCELSRAGAPVVWSHNGRPVQEGEGLELHAEGPRRVLCIQAAGPAHAGLYTCQSGAAPGAPSLSFTVQVAEPPVRVVAPEAAQTRVRSTPGGDLELVVHLSGPGGPVRWYKDGERLASQGRVQLEQAGARQVLRVQGARSGDAGEYLCDAPQDSRIFLVSVEEPLLVKLVSELTPLTVHEGDDATFRCEVSPPDADVTWLRNGAVVTPGPQVEMAQNGSSRILTLRGCQLGDAGTVTLRAGSTATSARLHVRETELLFLRRLQDVRAEEGQDVCLEVETGRVGAAGAVRWVRGGQPLPHDSRLSMAQDGHIHRLFIHGVILADQGTYGCESHHDRTLARLSVRRECPVLS

SEQ ID NO: 36638 - protein, 331 aa, Homo sapiens
MCWTMPSPFTGSSTRNMESGNQSTVTEFIFTGFPQLQDGSLLYFFPLLFIYTFIIIDNLLIFSAVRLDTHLHNPMYNFISIFSFLEIWYTTATIPKMLSNLISEKKAISMTGCILQMYFFHSLENSEGILLTTMAIDRYVAICNPLRYQMIMTPRLCAQLSAGSCLFGFLILLPEIVMISTLPFCGPNQIHQIFCDLVPVLSLACTDTSMILIEDVIHAVTIIITFLIIALSYVRIVTVILRIPSSEGRQKAFSTCAGHLMVFPIFFGSVSLMYLRFSDTYPPVLDTAIALMFTVLAPFFNPIIYSLRNKDMNNAIKKLFCLQKVLNKPGG

SEQ ID NO: 36639 - protein, 130 aa, Homo sapiens
MARRHCFSYWLLVCWLVVTVAEGQEEVFTPPGDSQNNADATDCQIFTLTPPPAPRSPVTRAQPITKTPRCPFHFFPRRPRIHFRFPNRPFVPSRCNHRFPFQPFYWPHRYLTYRYFPRRRLQRGSSSEES

SEQ ID NO: 36640 - protein, 176 aa, Homo sapiens
MARRHCFSYWLLVCWLVVTVAEALSTFYLQQHINLHMDKKRYLRLLEIHKIMRTLPTARSLHSPLHLPRGVRSQGPSPSQRHPGVPSIFFHEGPESILGFQTDLSSLQGVTTVFHSSHFIGHTVTLLIGISPEEDSREEAHLRKAEREEKPKHTEAKKSLSFRKKQQKDFCFIFRN

SEQ ID NO: 36641 - protein, 482 aa, Homo sapiens
MAAVRMLRTWSRNAGKLICVRYFQTCGNVHVLKPNYVCFFGYPSFKYSHPHHFLKTTAALRGQVVQFKLSDIGEGIREVTVKEWYVKEGDTVSQFDSICEVQSDKASVTITSRYDGVIKKLYYNLDDIAYVGKPLVDIETEALKDSEEDVVETPAVSHDEHTHQEIKGRKTLATPAVRRLAMENNIKLSEVVGSGKDGRILKEDILNYLEKQTGAILPPSPKVEIMPPPPKPKDMTVPILVSKPPVFTGKDKTEPIKGFQKAMVKTMSAALKIPHFGYCDEIDLTELVKLREELKPIAFARGIKLSFMPFFLKAASLGLLQFPILNASVDENCQNITYKASHNIGIAMDTEQGLIVPNVKNVQICSIFDIATELNRLQKLGSVGQLSTTDLTGGTFTLSNIGSIGGTFAKPVIMPPEVAIGALGSIKAIPRFNQKGEVYKAQIMNVSWSADHRVIDGATMSRFSNLWKSYLENPAFMLLDLK

SEQ ID NO: 36642 - protein, 312 aa, Homo sapiens
MKNHTVIRTFILLGLTGDPHLQVLLFIFLFLTYMLSVTGNLTIITLTLVDHHLKTPMYFFLRNFSFLEVSFTTVCIPRFLYNISMGDNTITYNACASQIFFVILFGATEFFLLAAMSYDRYVAICKPLHYVVIMNNRVCTLLVLCCWVAGLMIIVPPLSLGLQLEFCDSNAIDHFSCDAGPLLKISCSDTWVIEQMVILMAVFALIITLVCVILSYLYIVRTILKFPSVQQRKKAFSTCSSHMIVVSIAYGSCIFIYIKPSAKDEVAINKGVSVLTTSVAPLLNPFIYTLRNKQVKQAFSDSIKRIAFLSKK

SEQ ID NO: 36643 - protein, 311 aa, Homo sapiens
MDGDNQSENSQFLLLGISESPEQQQILFWMFLSMYLVTVLGNVLIILAISSDSHLHTPMYFFLANLSFTDLFFVTNTIPKMLVNFQSQNKAISYAGCLTQLYFLVSLVTLDNLILAVMAYDRYVAICCPLHYVTAMSPGLCVLLLSLCWGLSVLYGLLLTFLLTRVTFCGPREIHYLFCDMYILLWLACSNTHIIHTALIATGCFIFLTLLGFMTTSYVRIVRTILQMPSASKKYKTFSTCASHLGVVSLFYGTLAMVYLQPLHTYSMKDSVATVMYAVLTPMMNPFIYSLRNKDMHGAPGRVLWRPFQRP

SEQ ID NO: 36644 - protein, 454 aa, Homo sapiens
MGRTYIVEETVGQYLSNINLQGKAFVSGLLIGQCSSQKDYVILATRTPPKEEQSENLKHPKAKLDNLDEEWATEHACQVSRMLPGGLLVLGVFIITTLELANDFQNALRRLMFAVEKSINRKRLWNFTEEEVSERVTLHICASTKKIFCRTYDIHDPKSSARPADWKYQSGLSSSWLSLECTVHINIHIPLSATSVSYTLEKNTKNGLTRWAKEIENGVYLINGQVKDEDCDLLEGQKKSSRGNTQATSHSFDVRVLTQLLLNSDHRSTATVQICSGSVNLKGAVKCRAYIHSSKPKVKDAVQAVKRDILNTVADRCEMLFEDLLLNEIPEKKDSEKEFHVLPYRVFVPLPGSTVMLCDYKFDDESAEEIRDHFMEMLDHTIQIEDLEIAEETNTACMSSSMNSQASLDNTDDEQPKQPIKTTMLLKIQQNIGVIAAFTVAVLAAGISFHYFSD

SEQ ID NO: 36645 - protein, 431 aa, Homo sapiens
MGRTYIVEETVGQYLSNINLQGKAFVSGLLIGQCSSQKDYVILATRTPPKEEQSENLKHPKAKLDNLDEEWATEHACQVSRMLPGGLLVLGVFIITTLELANDFQNALRRLMFAVEKSINRKRLWNFTEEEVSERVTLHICASTKKIFCRTYDIHDPKSSARPADWKYQSGLSSSWLSLECTVHINIHIPLSATSVSYTLEKNTKNGLTRWAKEIENGVYLINGQVKDEDCDLLEGQLLNSDHRSTATVQICSGSVNLKGAVKCRAYIHSSKPKVKDAVQAVKRDILNTVADRCEMLFEDLLLNEIPEKKDSEKEFHVLPYRVFVPLPGSTVMLCDYKFDDESAEEIRDHFMEMLDHTIQIEDLEIAEETNTACMSSSMNSQASLDNTDDEQPKQPIKTTMLLKIQQNIGVIAAFTVAVLAAGISFHYFSD

SEQ ID NO: 36646 - protein, 335 aa, Homo sapiens
MGRTYIVEETVGQYLSNINLQGKAFVSGLLIGQCSSQKDYVILATRTPPKEEQSENLKHPKAKLDNLDEEWATEHACQVSRMLPGGLLVLGVFIITTLELANDFQNALRRLMFAVEKSINRKRLWNFTEEEVSERVTLHICASTKKIFCRTYDIHDPKSSARPADWKYQSGLSSSWLSLECTVHINIHIPLSATSVSYTLEKNTKNGLTRWAKEIENGVYLINGQVKDEDCDLLEGQKKSSRGNTQATSHSFDVRVLTQLLLNSDHRSTATVQICSGSVNLKGAVKCRAYIHSSKPKVKDAVQAVKRDILNTVADRCEMLFEDLLLNEIPEKKRF

SEQ ID NO: 36647 - protein, 422 aa, Homo sapiens
MGRTYIVEETVGQYLSNINLQGKAFVSGLLIGQCSSQKDYVILATRTPPKEEQSENLKHPKAKLDNLDEEWATEHACQLMFAVEKSINRKRLWNFTEEEVSERVTLHICASTKKIFCRTYDIHDPKSSARPADWKYQSGLSSSWLSLECTVHINIHIPLSATSVSYTLEKNTKNGLTRWAKEIENGVYLINGQVKDEDCDLLEGQKKSSRGNTQATSHSFDVRVLTQLLLNSDHRSTATVQICSGSVNLKGAVKCRAYIHSSKPKVKDAVQAVKRDILNTVADRCEMLFEDLLLNEIPEKKDSEKEFHVLPYRVFVPLPGSTVMLCDYKFDDESAEEIRDHFMEMLDHTIQIEDLEIAEETNTACMSSSMNSQASLDNTDDEQPKQPIKTTMLLKIQQNIGVIAAFTVAVLAAGISFHYFSD

SEQ ID NO: 36648 - protein, 445 aa, Homo sapiens
MAVAIAAARVWRLNRGLSQAALLLLRQPGARGLARSHPPRQQQQFSSLDDKPQFPGASAEFIDKLEFIQPNVISGIPIYRVMDRQGQIINPSEDPHLPKEKVLKLYKSMTLLNTMDRILYESQRQGRISFYMTNYGEEGTHVGSAAALDNTDLVFGQYREAGVLMYRDYPLELFMAQCYGNISDLGKGRQMPVHYGCKERHFVTISSPLATQIPQAVGAAYAAKRANANRVVICYFGEGAASEGDAHAGFNFAATLECPIIFFCRNNGYAISTPTSEQYRGDGIAARGPGYGIMSIRVDGNDVFAVYNATKEARRRAVAENQPFLIEAMTYRIGHHSTSDDSSAYRSVDEVNYWDKQDHPISRLRHYLLSQGWWDEEQEKAWRKQSRRKVMEAFEQAERKPKPNPNLLFSDVYQEMPAQLRKQQESLARHLQTYGEHYPLDHFDK

SEQ ID NO: 36649 - protein, 448 aa, Homo sapiens
MAVAIAAARVWRLNRGLSQQQQFSSLDDKPQFPGASAEFIDKLEFIQPNVISGIPIYRVMDRQGQIINPSEDPHLPKEKVLKLYKSMTLLNTMDRILYESQRQGRISFYMTNYGEEGTHVGSAAALDNTDLVFGQYREAGVLMYRDYPLELFMAQCYGNISDLGKGRQMPVHYGCKERHFVTISSPLATQIPQAVGAAYAAKRANANRVVICYFGEGAASEGDAHAGFNFAATLECPIIFFCRNNGYAISTPTSEQYRGDGIAARGPGYGIMSIRVDGNDVFAVYNATKEARRRAVAENQPFLIEAMTYSSSPILPPDPHSREPTLTWGPLPLCRIGHHSTSDDSSAYRSVDEVNYWDKQDHPISRLRHYLLSQGWWDEEQEKAWRKQSRRKVMEAFEQAERKPKPNPNLLFSDVYQEMPAQLRKQQESLARHLQTYGEHYPLDHFDK

SEQ ID NO: 36650 - protein, 313 aa, Homo sapiens
MNWVNDSIIQEFILLGFSDRPWLEFPLLVVFLISYTVTIFGNLTIILVSRLDTKLHTPMYFFLTNLSLLDLCYTTCTVPQMLVNLCSIRKVISYRGCVAQLFIFLALGATEYLLLAVMSFDRFVAICRPLHYSVIMHQRLCLQLAAASWVTGFSNSVWLSTLTLQLPLCDPYVIDHFLCEVPALLKLSCVETTANEAELFLVSELFHLIPLTLILISYAFIVRAVLRIQSAEGRQKAFGTCGSHLIVVSLFYSTAVSVYLQPPSPSSKDQGKMVSLFYGIIAPMLNPLIYTLRNKEVKEGFKRLVARVFLIKK

SEQ ID NO: 36651 - protein, 309 aa, Homo sapiens
MERINHTSSVSEFILLGLSSRPEDQKTLFVLFLIVYLVTITGNLLIILAIRFNPHLQTPMYFFLSFLSLTDICFTTSVVPKMLMNFLSEKKTISYAGCLTQMYFLYALGNSDSCLLAVMAFDRYVAVCDPFHYVTTMSHHHCVLLVAFSCSFPHLHSLLHTLLLNRLTFCDSNVIHHFLCDLSPVLKLSCSSIFVNEIVQMTEAPIVLVTRFLCIAFSYIRILTTVLKIPSTSGKRKAFSTCGFYLTVVTLFYGSIFCVYLQPPSTYAVKDHVATIVYTVLSSMLNPFIYSLRNKDLKQGLRKLMSKRS

SEQ ID NO: 36652 - protein, 362 aa, Homo sapiens
MTEFHLQSQMPSIRLIFRRLSLGRIKPSQSPRCSTSFMVVPSFSIAEHWRRMKGANLSQGMEFELLGLTTDPQLQRLLFVVFLGMYTATLLGNLVMFLLIHVSATLHTPMYSLLKSLSFLDFCYSSTVVPQTLVNFLAKRKVISYFGCMTQMFFYAGFATSECYLIAAMAYDRYAAICNPLLYSTIMSPEVCASLIVGSYSAGFLNSLIHTGCIFSLKFCGAHVVTHFFCDGPPILSLSCVDTSLCEILLFIFAGFNLLSCTLTILISYFLILNTILKMSSAQGRFKAFSTCASHLTAICLFFGTTLFMYLRPRSSYSLTQDRTVAVIYTVVIPVLNPLMYSLRNKDVKKALIKVWGRKTME

SEQ ID NO: 36653 - protein, 312 aa, Homo sapiens
MLMKKNASFEDFFLLLGFSNWPHLEVVLFVVILIFYLITLIGNLFIIILSYLDSHLHTPMYFFLSNLSFLDLCYTTSSIPQLLVNLWGPEKTISYAGCTVQLYFVLALGTAECVLLVVMSYDRYAAVCRPLHYTVLMHPRFCRLLAAASWVSGFTTSALHSSFTFWIPLCRHRLVDHFFCEVPALLRLSCVDTQANELTLMVMSSIFVLIPLILILTSYGAIARAVLSMQSTTGLQKVLRTCGAHLMVVSLFFIPVMCMYLQPPSENSQDQGKFIALFYTVVTPSLNPLIYTFRNKDVRGAVKRLMGWEWGM

SEQ ID NO: 36654 - protein, 320 aa, Homo sapiens
MDQSNYSSLHGFILLGFSNHPKMEMILSGVVAIFYLITLVGNTAIILASLLDSQLHTPMYFFLRNLSFLDLCFTTSIIPQMLVNLWGPDKTISYVGCIIQLYVYMWLGSVECLLLAVMSYDRFTAICKPLHYFVVMNPHLCLKMIIMIWSISLANSVVLCTLTLNLPTCGNNILDHFLCELPALVKIACVDTTTVEMSVFALGIIIVLTPLILILISYGYIAKAVLRTKSKASQRKAMNTCGSHLTVVSMFYGTIIYMYLQPGNRASKDQGKFLTLFYTVITPSLNPLIYTLRNKDMKDALKKLMRFHHKSTKIKRNCKS

SEQ ID NO: 36655 - protein, 328 aa, Homo sapiens
MGHQNHTFSSDFILLGLFSSSPTSVVFFLVLFVIFIMSVTENTLMILLIRSDSRLHTPMYFLLSHLSLMDILHVSNIVPKMVTNFLSGSRTISFAGCGFQVFLSLTLLGGECLLLAAMSCDRYVAICHPLRYPILMKEYASALMAGGSWLIGVFNSTVHTAYALQFPFCGSRAIDHFFCEVPAMLKLSCADTTRYERGVCVSAVIFLLIPFSLISASYGQIILTVLQMKSSEARKKSFSTCSFHMIVVTMYYGPFIFTYMRPKSYHTPGQDKFLAIFYTILTPTLNPFIYSFRNKDVLAVMKNMLKSNFLHKKMNRKIPECVFCLFLC

SEQ ID NO: 36656 - protein, 372 aa, Homo sapiens
MNRSHRHGAGSGCLGTMEVKSKFGAEFRRFSLERSKPGKFEEFYGLLQHVHKIPNVDVLVGYADIHGDLLPINNDDNYHKAVSTANPLLRIFIQKKEEADYSAFGTDTLIKKKNVLTNVLRPDNHRKKPHIVISMPQDFRPVSSIIDVDILPETHRRVRLYKYGTEKPLGFYIRDGSSVRVTPHGLEKVPGIFISRLVPGGLAQSTGLLAVNDEVLEVNGIEVSGKSLDQVTDMMIANSRNLIITVRPANQRNNVVRNSRTSGSSGQSTDNSLLGYPQQIEPSFEPEDEDSEEDDIIIEDNGVPQQIPKAVPNTESLESLTQIELSFESGQNGFIPSNEVSLAAIASSSNTEFETHAPDQKLLEEDGTIITL

SEQ ID NO: 36657 - protein, 115 aa, Homo sapiens
MNRSHRHGAGSGCLGTMEVKSKFGAEFRRFSLERSKPGKFEEFYGLLQHVHKIPNVDVLVGYADIHGDLLPINNDDNYHKAVSTANPLLRIFIQKKGCVLEHSKNNVRMPCLKTL

SEQ ID NO: 36658 - protein, 309 aa, Homo sapiens
MENCTEVTKFILLGLTSVPELQIPLFILFTFIYLLTLCGNLGMMLLILMDSCLHTPMYFFLSNLSLVDFGYSSAVTPKVMAGFLRGDKVISYNACAVQMFFFVALATVENYLLASMAYDRYAAVCKPLHYTTTMTASVGACLALGSYVCGFLNASFHIGGIFSLSFCKSNLVHHFFCDVPAVMALSCSDKHTSEVILVFMSSFNIFFVLLVIFISYLFIFITILKMHSAKGHQKALSTCASHFTAVSVFYGTVIFIYLQPSSSHSMDTDKMASVFYAMIIPMLNPVVYSLRNREVQNAFKKVLRRQKFL

SEQ ID NO: 36659 - protein, 309 aa, Homo sapiens
MASTSNVTELIFTGLFQDPAVQSVCFVVFLPVYLATVVGNGLIVLTVSISKSLDSPMYFFLSCLSLVEISYSSTIAPKFIIDLLAKIKTISLEGCLTQIFFFHFFGVAEILLIVVMAYDCYVAICKPLHYMNIISRQLCHLLVAGSWLGGFCHSIIQILVIIQLPFCGPNVIDHYFCDLQPLFKLACTDTFMEGVIVLANSGLFSVFSFLILVSSYIVILVNLRNHSAEGRHKALSTCASHITVVILFFGPAIFLYMRPSSTFTEDKLVAVFYTVITPMLNPIIYTLRNAEVKIAIRRLWSKKENPGRE

SEQ ID NO: 36660 - protein, 310 aa, Homo sapiens
MEPQNTTQVSMFVLLGFSQTQELQKFLFLLFLLVYVTTIVGNLLIMVTVTFDCRLHTPMYFLLRNLALIDLCYSTVTSPKMLVDFLHETKTISYQGCMAQIFFFHLLGGGTVFFLSVMAYDRYIAISQPLRYVTIMNTQLCVGLVVAAWVGGFVHSIVQLALILPLPFCGPNILDNFYCDVPQVLRLACTDTSLLEFLMISNSGLLVIIWFLLLLISYTVILVMLRSHSGKARRKAASTCTTHIIVVSMIFIPCIYIYTWPFTPFLMDKAVSISYTVMTPMLNPMIYTLRNQDMKAAMRRLGKCLVICRE

SEQ ID NO: 36661 - protein, 309 aa, Homo sapiens
MENRNNMTEFVLLGLTENPKMQKIIFVVFFVIYIITVVGYVLIVVTITASPSLGSPMYLSLAYLSFIDACYSSVNTPNLITHSLYGKKAILFNGCMTQVFGEHFFGGAEGILLTVMAYDHYVAICKPLHYMTIMNQCVCALLMGVVWMGGFLHATIQILFIFQLPFCGPNVIDHFMCDLNPLLNLACTDTHMLELFIAANSGFICLLNFALLLVSYVVILCSLRTHSLEARHKALSTCVSHITVVILFFVPCIFVYMRPAATLPIDKAVAIFYTMITPMLNPLIYTLKNAQMKNAIRKLCSRKDISGDK

SEQ ID NO: 36662 - protein, 315 aa, Homo sapiens
MVLASGNSSSHPVSFILLGIPGLESFQLWIAFPFCATYAVAVVGNITLLHVIRIDHTLHEPMYLFLAMLAITDLVLSSSTQPKMLAIFWFHAHEIQYHACLIQVFFIHAFSSVESGVLMAMALDCYVAICFPLRHSSILTPSVVIKLGTIVMLRGLLWVSPFCFMVSRMPFCQHQAIPQSYCEHMAVLKLVCADTSISRGNGLFVAFSVAGFDMIVIGMSYVMILRAVLQLPSGEARLKAFSTRSSHICVILALYIPALFSFLTYRFGHDVPRVVHILFANLYLLIPPMLNPIIYGVRTKQIGDRVIQGCCGNIP

SEQ ID NO: 36663 - protein, 341 aa, Homo sapiens
MEPAFGEVNQLGGVFVNGRPLPNAIRLRIVELAQLGIRPCDISRQLRVSHGCVSKILARYNETGSILPGAIGGSKPRVTTPTVVKHIRTYKQRDPGIFAWEIRDRLLADGVCDKYNVPSVSSISRILRNKIGNLAQQGHYDSYKQHQPTPQPALPYNHIYSYPSPITAAAAKVPTPPGVPAIPGSVAMPRTWPSSHSVTDILGIRSITDQVSDSSPYHSPKVEEWSSLGRNNFPAAAPHAVNGLEKGALEQEAKYGQAPNGLPAVGSFVSASSMAPYPTPAQVSPYMTYSAAPSGYVAGHGWQHAGGTSLSPHNCDIPASLAFKGMQAAREGSHSVTASAL

SEQ ID NO: 36664 - protein, 328 aa, Homo sapiens
MEWDNGTGQALGLPPTTCVYRENFKQLLLPPVYSAVLAAGLPLNICVITQICTSRRALTRTAVYTLNLALADLLYACSLPLLIYNYAQGDHWPFGDFACRLVRFLFYANLHGSILFLTCISFQRYLGICHPLAPWHKRGGRRAAWLVCVAVWLAVTTQCLPTAIFAATGIQRNRTVCYDLSPPALATHYMPYGMALTVIGFLLPFAALLACYCLLACRLCRQDGPAEPVAQERRGKAARMAVVVAAAFAISFLPFHITKTAYLAVRSTPGVPCTVLEAFAAAYKGTRPFASANSVLDPILFYFTQKKFRRRPHELLQKLTAKWQRQGR

SEQ ID NO: 36665 - protein, 636 aa, Homo sapiens
MNPSAPSYPMASLYVGDLHPDVTEAMLYEKFSPAGPILSIRVCRDMITRRSLGYAYVNFQQPADAERALDTMNFDVIKGKPVRIMWSQRDPSLRKSGVGNIFIKNLDKSIDNKALYDTFSAFGNILSCKVVCDENGSKGYGFVHFETQEAAERAIEKMNGMLLNDRKVFVGRFKSRKEREAELGARAKEFTNVYIKNFGEDMDDERLKDLFGKFGPALSVKVMTDESGKSKGFGFVSFERHEDAQKAVDEMNGKELNGKQIYVGRAQKKVERQTELKRKFEQMKQDRITRYQGVNLYVKNLDDGIDDERLRKEFSPFGTITSAKVMMEGGRSKGFGFVCFSSPEEATKAVTEMNGRIVATKPLYVALAQRKEERQAHLTNQYMQRMASVRAVPNPVINPYQPAPPSGYFMAAIPQTQNRAAYYPPSQIAQLRPSPRWTAQGARPHPFQNMPGAIRPAAPRPPFSTMRPASSQVPRVMSTQRVANTSTQTMGPRPAAAAAAATPAVRTVPQYKYAAGVRNPQQHLNAQPQVTMQQPAVHVQGQEPLTASMLASAPPQEQKQMLGERLFPLIQAMHPTLAGKITGMLLEIDNSELLHMLESPESLRSKVDEAVAVLQAHQAKEAAQKAVNSATGVPTV

SEQ ID NO: 36666 - protein, 547 aa, Homo sapiens
MNPSAPSYPMASLYVGDLHPDVTEAMLYEKFSPAGPILSIRVCRDMITRRSLGYAYVNFQQPADAERALDTMNFDVIKGKPVRIMWSQRDPSLRKSGVGNIFIKNLDKSIDNKALYDTFSAFGNILSCKVVCDENGSKGYGFVHFETQEAAERAIEKMNGMLLNDRKVFVGRFKSRKEREAELGARAKEFTNVYIKNFGEDMDDERLKDLFGKFGPALSVKVMTDESGKSKGFGFVSFERHEDAQKAVDEMNGKELNGKQIYVGRAQKKVERQTELKRKFEQMKQDRITRYQGVNLYVKNLDDGIDDERLRKEFSPFGTITSAKVMMEGGRSKGFGFVCFSSPEEATKAVTEMNGRIVATKPLYVALAQRKEERQAHLTNQYMQRMASVRAVPNPVINPYQPAPPSGYFMAAIPQTQNRAAYYPPSQIAQLRPSPRWTAQGARPHPAVHVQGQEPLTASMLASAPPQEQKQMLGERLFPLIQAMHPTLAGKITGMLLEIDNSELLHMLESPESLRSKVDEAVAVLQAHQAKEAAQKAVNSATGVPTV

SEQ ID NO: 36667 - protein, 2332 aa, Homo sapiens
MIPWSIFLLHVLLFSLQEYICASSILMGTSKNGFNENRQKRALLAAQFEATSPRYFFHDAINWGESKIKGSCPYECLNGAFCSKTGTCDCQIFQALGTRCQIIPNMGNGRDGICKTWGQYHFETFDGIYYYFPGNCSYIFAKDCGDLEPRYTVWVHNSPKCLGSVYSCYRSISLFFSNQEEIRIYGHEIKKNGISLTLPQTIGQIFIEKLADYILVKTTFGFSLAWDGISGIYLKLSEDHKGKSCGLCGNYNDIQSDDFIILQEDYTEDIAMFANSWSVQTPDDTKCVLTPSDFPNPCSSGMPAFEAIFFKCQILLQFPFLSCHEYIDPYLYIASCVNDLCKTDDDETYCRAATEYARACSHAGYPIQDWRDDFPACTDKCDDSFVHRDCISCCPPTCTFEKQCLGSNLHCLDGCYCPDGLVMDNGTCISLENCPCGFHGLAYSVGSKIEQECTECVCVGGVWNCTEQDCPVQCSVVGDSHFTTFDGRHYSFIGMCQYILVKGTGKDKFTITLQKAPCEQNLGLVCLQSITLILEDDFNKQVTLGRGGQILTSPNQGFNLNGIVEIQTLSSLFILLKTTFGLKILFAIDGERIYIQLTSAWKRRTLGLCGTFNGNIRDDFLSPSGMIEGTPQLHANAWRVSSTCFAPVHVPVVDPCNINQQNIGYAAHCDVIHQELFAPCHIYISPGLYYQLCRHDACKCGSSCLCNALAHYAYLCGQHGVPIDFRTQISFCAVVCQKGMLYHHCSSFCLHSCISLSSPEQCSDDCAEGCNCPEGKFYEDTLNFCVPIFHCRCHYRGSVYQPGELIPTPSGLCQCSNGTVKCDELATPSAVHICPEGKEYFDCRFPDPELPAGGVNCETTCANLAMNFTCTPSSPCISGCVCAPGMAEHRGKCYVPESCPCIWKDWEYLSGEVIATPCYTCVCRRGMFNCTYYPCPAVCTIYGDRHYYSFDGLEYDYISDCQVFLIKSADDSDISVIAQNKKCFDNDIVCSKSVLISVGDTEIYLNDTPYKQKQSGFFLENKSTYQLWKAGYYIVVYFPEKDITILWDRKTTIHIKVGPQWKNKLSGLCGNFDKCTSNDMTTSNNLEVRNARVFGDSWALGQCESPDETIKPCEAHQNKFPYAKKECSILYSDIFASCRNVIDVTSFAKNCHEDTCNCNLGGDCECLCTSIAAYAYKCCQEGISIHWRSSTVCSLDCEYYNEGLGEGPYMLASYGQSGLVLGANMTSRSVFCLPRSSVHTSLFFYFMITPGLFKEKVSSLALVSLESAERPNYFLYVHDNDTLSLELWEANSAFHRRATFFHHQGLWIPGYSAFELYSKKGFFIIFTDSSVKASKYDDSEEFKHSSSFSIEEIQAAVPYRKMCEWRYEPCATPCFKTCSDPEALACKFLPPVEGCLPYCPKNMILDEVTLKCVYPRDCIPVIPTEPTLMPPAKPTVPITVFDMLTPTTGLECEPQKFDPVYDCSQYICLNMEWQLYNWSLNCPKDVEMPDCGFRGRPVQVNSDICCPEWECPCRCSMLSELSIITFDGNNAALYSMASYILVRIPGEIIVAHIEKCSMNQNGNSLKKLAPSGRISGLCFKKLNVTTPIHKIIVNRLARKVEVDSIVVPLPFSSQELSIEDSGSMYVITTPAGLIIKWSHLTGIIDIHFGFRFNLSSYTEGLCGICNEDPDDDLRMQNGTIITNMEDIGLFIESWEIEKSFEVTMRRPVRNCTEHDCSQCIDLLNRRIFIPCHDKVSPEDFCEKMWINYTYFWNYECDALSAYVALCNKFDICIQWRTPDYCSLSCPEGKEYQPCVRPCEARTCLNQWFYGHTSCLNLREDCVCKVGTILHRPHSAQCIPEKECACTDSEDQPRTAGEIWNGGIDECTLYKCLENGSIIPIEPDCDEEPTPVCEREAEVVMGIIDKWTCCSKEVCGCDTTLCETSIPTCTNSQKLIVGHSPLSCCPQYKCECDPLKCPSISTPECREDQFMIQVRQEEPCCFSPFCVCESCTKPVPLCHDGEFLTVDLNSTHFCCPQYYCVCEPNLCPMPLLNCAEDMNLVKENVSGQCCPTWHCECNCENLIMPTCEVGEFTAIDHNFQSDCGCIQYLCEKDDVCVFQEVSVLNPGQSMIKYLEEDFCYAIECLEEKDNHTGFHTLNFTLVNCSKKCDVHQVYTPSPSDYGCCGTCKNVSCKFHMENGTSVVYAVGSTWHYNCTTYECVKTDEGAIILNYTMVCPPFNETECKMNEGIVKLYNEGCCKICKREERICQKVIIKSVIRKQDCMSQSPINVASCDGKCPSATIYNINIESHLRFCKCCRENGVRNLSVPLYCSGNGTEIMYTLQEPIDCTCQWN

SEQ ID NO: 36668 - protein, 1185 aa, Homo sapiens
MSLLNPVLLPPKVKAYLSQGERFIKWDDETTVASPVILRVDPKGYYLYWTYQSKEMEFLDITSIRDTRFGKFAKMPKSQKLRDVFNMDFPDNSFLLKTLTVVSGPDMVDLTFHNFVSYKENVGKAWAEDVLALVKHPLTANASRSTFLDKILVKLKMQLNSEGKIPVKNFFQMFPADRKRVEAALSACHLPKGKNDAINPEDFPEPVYKSFLMSLCPRPEIDEIFTSYHAKAKPYMTKEHLTKFINQKQRDSRLNSLLFPPARPDQVQGLIDKYEPSGINAQRGQLSPEGMVWFLCGPENSVLAQDKLLLHHDMTQPLNHYFINSSHNTYLTAGQFSGLSSAEMYRQVLLSGCRCVELDCWKGKPPDEEPIITHGFTMTTDIFFKEAIEAIAESAFKTSPYPIILSFENHVDSPRQQAKMAEYCRTIFGDMLLTEPLEKFPLKPGVPLPSPEDLRGKILIKNKKNQFSGPTSSSKDTGGEAEGSSPPSAPAGEGTVWAGEEGTELEEEEVEEEEEEESGNLDEEEIKKMQSDEGTAGLEVTAYEEMSSLVNYIQPTKFVSFEFSAQKNRSYVISSFTELKAYDLLSKASVQFVDYNKRQMSRIYPKGTRMDSSNYMPQMFWNAGCQMVALNFQTMDLPMQQNMAVFEFNGQSGYLLKHEFMRRPDKQFNPFSVDRIDVVVATTLSITVISGQFLSERSVRTYVEVELFGLPGDPKRRYRTKLSPSTNSINPVWKEEPFVFEKILMPELASLRVAVMEEGNKFLGHRIIPINALNSGYHHLCLHSESNMPLTMPALFIFLEMKDYIPGAWADLTVALANPIKFFSAHDTKSVKLKEAMGGLPEKPFPLASPVASQVNGALAPTSNGSPAARAGAREEAMKEAAEPRTASLEELRELKGVVKLQRRHEKELRELERRGARRWEELLQRGAAQLAELGPPGVGGVGACKLGPGKGSRKKRSLPREESAGAAPGEGPEGVDGRVRELKDRLELELLRQGEEQYECVLKRKEQHVAEQISKMMELAREKQAAELKALKETSENDTKEMKKKLETKRLERIQGMTKVTTDKMAQERLKREINNSHIQEVVQVIKQMTENLERHQEKLEEKQAACLEQIREMEKQFQKEALAEYEARMKGLEAEVKESVRACLRTCFPSEAKDKPERACECPPELCEQDPLIAKADAQESRL

SEQ ID NO: 36669 - protein, 1181 aa, Homo sapiens
MSLLNPVLLPPKVKAYLSQGERFIKWDDETTVASPVILRVDPKGYYLYWTYQSKEMEFLDITSIRDTRFGKFAKMPKSQKLRDVFNMDFPDNSFLLKTLTVVSGPDMVDLTFHNFVSYKENVGKAWAEDVLALVKHPLTANASRSTFLDKILVKLKMQLNSEGKIPVKNFFQMFPADRKRVEAALSACHLPKGKNDAINPEDFPEPVYKSFLMSLCPRPEIDEIFTSYHAKAKPYMTKEHLTKFINQKQRDSRLNSLLFPPARPDQVQGLIDKYEPSGINAQRGQLSPEGMVWFLCGPENSVLAQDKLLLHHDMTQPLNHYFINSSHNTYLTAGQFSGLSSAEMYRQVLLSGCRCVELDCWKGKPPDEEPIITHGFTMTTDIFFKEAIEAIAESAFKTSPYPIILSFENHVDSPRQQAKMAEYCRTIFGDMLLTEPLEKFPLKPGVPLPSPEDLRGKILIKNKKNQFSGPTSSSKDTGGEAEGSSPPSAPAVWAGEEGTELEEEEVEEEEEEESGNLDEEEIKKMQSDEGTAGLEVTAYEEMSSLVNYIQPTKFVSFEFSAQKNRSYVISSFTELKAYDLLSKASVQFVDYNKRQMSRIYPKGTRMDSSNYMPQMFWNAGCQMVALNFQTMDLPMQQNMAVFEFNGQSGYLLKHEFMRRPDKQFNPFSVDRIDVVVATTLSITVISGQFLSERSVRTYVEVELFGLPGDPKRRYRTKLSPSTNSINPVWKEEPFVFEKILMPELASLRVAVMEEGNKFLGHRIIPINALNSGYHHLCLHSESNMPLTMPALFIFLEMKDYIPGAWADLTVALANPIKFFSAHDTKSVKLKEAMGGLPEKPFPLASPVASQVNGALAPTSNGSPAARAGAREEAMKEAAEPRTASLEELRELKGVVKLQRRHEKELRELERRGARRWEELLQRGAAQLAELGPPGVGGVGACKLGPGKGSRKKRSLPREESAGAAPGEGPEGVDGRVRELKDRLELELLRQGEEQYECVLKRKEQHVAEQISKMMELAREKQAAELKALKETSENDTKEMKKKLETKRLERIQGMTKVTTDKMAQERLKREINNSHIQEVVQVIKQMTENLERHQEKLEEKQAACLEQIREMEKQFQKEALAEYEARMKGLEAEVKESVRACLRTCFPSEAKDKPERACECPPELCEQDPLIAKADAQESRL

SEQ ID NO: 36670 - protein, 1170 aa, Homo sapiens
MSLLNPVLLPPKVKAYLSQGERFIKWDDETTVASPVILRVDPKGYYLYWTYQSKEMEFLDITSIRDTRFGKFAKMPKSQKLRDVFNMDFPDNSFLLKTLTVVSGPDMVDLTFHNFVSYKENVGKAWAEDVLALVKHPLTANASRSTFLDKILVKLKMQLNSEGKIPVKNFFQMFPADRKRVEAALSACHLPKGKNDAINPEDFPEPVYKSFLMSLCPRPEIDEIFTSYHAKAKPYMTKEHLTKFINQKQRDSRLNSLLFPPARPDQVQGLIDKYEPSGINAQRGQLSPEGMVWFLCGPENSVLAQDKLLLHHDMTQPLNHYFINSSHNTYLTAGQFSGLSSAEMYRQVLLSGCRCVELDCWKGKPPDEEPIITHGFTMTTDIFFKEAIEAIAESAFKTSPYPIILSFENHVDSPRQQAKMAEYCRTIFGDMLLTEPLEKFPLKPGVPLPSPEDLRGKILIKNKKNQFSGPTSSSKDTGGEAEGSSPPSAPAGEGTVWAGEEGTELEEEEVEEEEEEESGNLDEEEIKKMQSDEGTAGLEVTAYEEMSSLVNYIQPTKFVSFEFSAQKNRSYVISSFTELKAYDLLSKASVQFVDYNKRQMSRIYPKGTRMDSSNYMPQMFWNAGCQMVALNFQTMDLPMQQNMAVFEFNGQSGYLLKHEFMRRPDKQFNPFSVDRIDVVVATTLSITVISGQFLSERSVRTYVEVELFGLPGDPKRRYRTKLSPSTNSINPVWKEEPFVFEKILMPELASLRVAVMEEGNKFLGHRIIPINALNSGYHHLCLHSESNMPLTMPALFIFLEMKDYIPGAWADLTVALANPIKFFSAHDTKSVKLKEAMGGLPEKPFPLASPVASQVNGALAPTSNGSPEPRTASLEELRELKGVVKLQRRHEKELRELERRGARRWEELLQRGAAQLAELGPPGVGGVGACKLGPGKGSRKKRSLPREESAGAAPGEGPEGVDGRVRELKDRLELELLRQGEEQYECVLKRKEQHVAEQISKMMELAREKQAAELKALKETSENDTKEMKKKLETKRLERIQGMTKVTTDKMAQERLKREINNSHIQEVVQVIKQMTENLERHQEKLEEKQAACLEQIREMEKQFQKEALAEYEARMKGLEAEVKESVRACLRTCFPSEAKDKPERACECPPELCEQDPLIAKADAQESRL

SEQ ID NO: 36671 - protein, 1175 aa, Homo sapiens
MAKPYEFNWQKEVPSFLQEGAVFDRYEEESFVFEPNCLFKVDEFGFFLTWRSEGKEGQVLECSLINSIRSGAIPKDPKILAALEAVGKSENDLEGRIVCVCSGTDLVNISFTYMVAENPEVTKQWVEGLRSIIHNFRANNVSPMTCLKKHWMKLAFMTNTNGKIPVRSITRTFASGKTEKVIFQALKELGLPSGKNDEIEPTAFSYEKFYELTQKICPRTDIEDLFKKINGDKTDYLTVDQLVSFLNEHQRDPRLNEILFPFYDAKRAMQIIEMYEPDEDLKKKGLISSDGFCRYLMSDENAPVFLDRLELYQEMDHPLAHYFISSSHNTYLTGRQFGGKSSVEMYRQVLLAGCRCVELDCWDGKGEDQEPIITHGKAMCTDILFKDVIQAIKETAFVTSEYPVILSFENHCSKYQQYKMSKYCEDLFGDLLLKQALESHPLEPGRALPSPNDLKRKILIKNKRLKPEVEKKQLEALRSMMEAGESASPANILEDDNEEEIESADQEEEAHPEFKFGNELSADDLGHKEAVANSVKKGLVTVEDEQAWMASYKYVGATTNIHPYLSTMINYAQPVKFQGFHVAEERNIHYNMSSFNESVGLGYLKTHAIEFVNYNKRQMSRIYPKGGRVDSSNYMPQIFWNAGCQMVSLNYQTPDLAMQLNQGKFEYNGSCGYLLKPDFMRRPDRTFDPFSETPVDGVIAATCSVQVISGQFLSDKKIGTYVEVDMYGLPTDTIRKEFRTRMVMNNGLNPVYNEESFVFRKVILPDLAVLRIAVYDDNNKLIGQRILPLDGLQAGYRHISLRNEGNKPLSLPTIFCNIVLKTYVPDGFGDIVDALSDPKKFLSITEKRADQMRAMGIETSDIADVPSDTSKNDKKGKANTAKANVTPQSSSELRPTTTAALASGVEAKKGIELIPQVRIEDLKQMKAYLKHLKKQQKELNSLKKKHAKEHSTMQKLHCTQVDKIVAQYDKEKSTHEKILEKAMKKKGGSNCLEMKKETEIKIQTLTSDHKSKVKEIVAQHTKEWSEMINTHSAEEQEIRDLHLSQQCELLKKLLINAHEQQTQQLKLSHDRESKEMRAHQAKISMENSKAISQDKSIKNKAERERRVRELNSSNTKKFLEERKRLAMKQSKEMDQLKKVQLEHLEFLEKQNEQAKEMQQMVKLEAEMDRRPATVV

SEQ ID NO: 36672 - protein, 1022 aa, Homo sapiens
MNNNWNVCFFLFCPSITRTFASGKTEKVIFQALKELGLPSGKNDEIEPTAFSYEKFYELTQKICPRTDIEDLFKKINGDKTDYLTVDQLVSFLNEHQRDPRLNEILFPFYDAKRAMQIIEMYEPDEDLKKKGLISSDGFCRYLMSDENAPVFLDRLELYQEMDHPLAHYFISSSHNTYLTGRQFGGKSSVEMYRQVLLAGCRCVELDCWDGKGEDQEPIITHGKAMCTDILFKDVIQAIKETAFVTSEYPVILSFENHCSKYQQYKMSKYCEDLFGDLLLKQALESHPLEPGRALPSPNDLKRKILIKNKRLKPEVEKKQLEALRSMMEAGESASPANILEDDNEEEIESADQEEEAHPEFKFGNELSADDLGHKEAVANSVKKGLVTVEDEQAWMASYKYVGATTNIHPYLSTMINYAQPVKFQGFHVAEERNIHYNMSSFNESVGLGYLKTHAIEFVNYNKRQMSRIYPKGGRVDSSNYMPQIFWNAGCQMVSLNYQTPDLAMQLNQGKFEYNGSCGYLLKPDFMRRPDRTFDPFSETPVDGVIAATCSVQVISGQFLSDKKIGTYVEVDMYGLPTDTIRKEFRTRMVMNNGLNPVYNEESFVFRKVILPDLAVLRIAVYDDNNKLIGQRILPLDGLQAGYRHISLRNEGNKPLSLPTIFCNIVLKTYVPDGFGDIVDALSDPKKFLSITEKRADQMRAMGIETSDIADVPSDTSKNDKKGKANTAKANVTPQSSSELRPTTTAALASGVEAKKGIELIPQVRIEDLKQMKAYLKHLKKQQKELNSLKKKHAKEHSTMQKLHCTQVDKIVAQYDKEKSTHEKILEKAMKKKGGSNCLEMKKETEIKIQTLTSDHKSKVKEIVAQHTKEWSEMINTHSAEEQEIRDLHLSQQCELLKKLLINAHEQQTQQLKLSHDRESKEMRAHQAKISMENSKAISQDKSIKNKAERERRVRELNSSNTKKFLEERKRLAMKQSKEMDQLKKVQLEHLEFLEKQNEQAKEMQQMVKLEAEMDRRPATVV

SEQ ID NO: 36673 - protein, 1194 aa, Homo sapiens
MAKPYEFNWQKEVPSFLQEGAVFDRYEEESFVFEPNCLFKVDEFGFFLTWRSEGKEGQVLECSLINSIRSGAIPKDPKILAALEAVGKSENDLEGRIVCVCSGTDLVNISFTYMVAENPEVTKQWVEGLRSIIHNFRANNVSPMTCLKKHWMKLAFMTNTNGKIPVRSITRTFASGKTEKVIFQALKELGLPSGKNDEIEPTAFSYEKFYELTQKICPRTDIEDLFKKINGDKTDYLTVDQLVSFLNEHQRDPRLNEILFPFYDAKRAMQIIEMYEPDEDLKKKGLISSDGFCRYLMSDENAPVFLDRLELYQEMDHPLAHYFISSSHNTYLTGRQFGGKSSVEMYRQVLLAGCRCVELDCWDGKGEDQEPIITHGKAMCTDILFKDVIQAIKETAFVTSEYPVILSFENHCSKYQQYKMSKYCEDLFGDLLLKQALESHPLEPGRALPSPNDLKRKILIKNKRLKPEVEKKQLEALRSMMEAGESASPANILEDDNEEEIESADQEEEAHPEFKFGNELSADDLGHKEAVANSVKKGLVTVEDEQAWMASYKYVGATTNIHPYLSTMINYAQPVKFQGFHVAEERNIHYNMSSFNESVGLGYLKTHAIEFVNYNKRQMSRIYPKGGRVDSSNYMPQIFWNAGCQMVSLNYQTPDLAMQLNQGKFEYNGSCGYLLKPDFMRRPDRTFDPFSETPVDGVIAATCSVQVISGQFLSDKKIGTYVEVDMYGLPTDTIRKEFRTRMVMNNGLNPVYNEESFVFRKVILPDLAVLRIAVYDDNNKLIGQRILPLDGLQAGYRHISLRNEGNKPLSLPTIFCNIVLKTYVPDGFGDIVDALSDPKKFLSITEKRADQMRAMGIETSDIADVPSDTSKNDKKGKANTAKANVTPQSSSELRPTTTAALASGVEAKKGIELIPQVRIEDLKQMKAYLKHLKKQQKELNSLKKKHAKEHSTMQKLHCTQVDKIVAQYDKEKSTHEKILEKAMKKKGGSNCLEMKKETEIKIQTLTSDHKSKVKEIVAQHTKEWSEMINTHSAEEQEIRDLHLSQQCELLKKLLINAHEQQTQQLKLSHDRESKEMRAHQAKISMENSKAISQDKSIKNKAERERRVRELNSSNTKKFLEERKRLAMKQSKEMDQLKKVQLEHLEFLEKQNEQLLKSCHAVSQTQGEGDAADGEIGSRDGPQTSNSSMKLQNAN

SEQ ID NO: 36674 - protein, 1187 aa, Homo sapiens
MAKPYEFNWQKEVPSFLQEGAVFDRYEEESFVFEPNCLFKVDEFGFFLTWRSEGKEGQVLECSLINSIRSGAIPKDPKILAALEAVGKSENDLEGRIVCVCSGTDLVNISFTYMVAENPEVTKQWVEGLRSIIHNFRANNVSPMTCLKKHWMKLAFMTNTNGKIPVRSITRTFASGKTEKVIFQALKELGLPSGKNDEIEPTAFSYEKFYELTQKICPRTDIEDLFKKINGDKTDYLTVDQLVSFLNEHQRDPRLNEILFPFYDAKRAMQIIEMYEPDEDLKKKGLISSDGFCRYLMSDENAPVFLDRLELYQEMDHPLAHYFISSSHNTYLTGRQFGGKSSVEMYRQVLLAGCRCVELDCWDGKGEDQEPIITHGKAMCTDILFKDVIQAIKETAFVTSEYPVILSFENHCSKYQQYKMSKYCEDLFGDLLLKQALESHPLEPGRALPSPNDLKRKILIKNKRLKPEVEKKQLEALRSMMEAGESASPANILEDDNEEEIESADQEEEAHPEFKFGNELSADDLGHKEAVANSVKKASDDLEHENNKKGLVTVEDEQAWMASYKYVGATTNIHPYLSTMINYAQPVKFQGFHVAEERNIHYNMSSFNESVGLGYLKTHAIEFVNYNKRQMSRIYPKGGRVDSSNYMPQIFWNAGCQMVSLNYQTPDLAMQLNQGKFEYNGSCGYLLKPDFMRRPDRTFDPFSETPVDGVIAATCSVQVISGQFLSDKKIGTYVEVDMYGLPTDTIRKEFRTRMVMNNGLNPVYNEESFVFRKVILPDLAVLRIAVYDDNNKLIGQRILPLDGLQAGYRHISLRNEGNKPLSLPTIFCNIVLKTYVPDGFGDIVDALSDPKKFLSITEKRADQMRAMGIETSDIADVPSDTSKNDKKGKANTAKANVTPQSSSELRPTTTAALASGVEAKKGIELIPQVRIEDLKQMKAYLKHLKKQQKELNSLKKKHAKEHSTMQKLHCTQVDKIVAQYDKEKSTHEKILEKAMKKKGGSNCLEMKKETEIKIQTLTSDHKSKVKEIVAQHTKEWSEMINTHSAEEQEIRDLHLSQQCELLKKLLINAHEQQTQQLKLSHDRESKEMRAHQAKISMENSKAISQDKSIKNKAERERRVRELNSSNTKKFLEERKRLAMKQSKEMDQLKKVQLEHLEFLEKQNEQAKEMQQMVKLEAEMDRRPATVV

SEQ ID NO: 36675 - protein, 364 aa, Homo sapiens
MSANSSRVGQLLLQGSACIRWKQDVEGAVYHLANCLLLLGFMGGSGVYGCFYLFGFLSAGYLCCVLWGWFSACGLDIVLWSFLLAVVCLLQLAHLVYRLREDTLPEEFDLLYKTLCLPLQVPLQTYKEIVHCCEEQVLTLATEQTYAVEGETPINRLSLLLSGRVRVSQDGQFLHYIFPYQFMDSPEWESLQPSEEGVFQVTLTAETSCSYISWPRKSLHLLLTKERYISCLFSALLGYDISEKLYTLNDKLFAKFGLRFDIRLPSLYHVLGPTAADAGPESEKGDEEVCEPAVSPPQATPTSLQQTPPCSTPPATTNFPAPPTRARLSRPDSGILASRIPLQSYSQVISRGQAPLAPTHTPEL

SEQ ID NO: 36676 - protein, 360 aa, Homo sapiens
MSANSSRVGQLLLQGSACIRWKQDVEGAVYHLANCLLLLGFMGGSGVYGCFYLFGFLSAGYLCCVLWGWFSACGLDIVLWSFLLAVVCLLQLAHLVYRLREDTLPEEFDLLYKTLCLPLQVPLQTYKEIVHCCEEQVLTLATEQTYAVEGETPINRLSLLLSGRVRVSQDGQFLHYIFPYQFMDSPEWESLQPSEEGVFQVTLTAETSCSYISWPRKSLHLLLTKERYISCLFSALLGYDISEKLYTLNDKLFAKFGLRFDIRLPSLYHVLGPTAADAGPESEKGDEEVCEPAVSPPQATPTSLQQTPPCSTPPATTNFPAPPTRARLSRPDSGILEIDDFPSYFHQFGFSGKVAAGRIP

SEQ ID NO: 36677 - protein, 262 aa, Homo sapiens
MAVTAQAARRKERVLCLFDVDGTLTPARQKIDPEVAAFLQKLRSRVQIGVVGGSDYCKIAEQLGDGDEVIEKFDYVFAENGTVQYKHGRLLSKQTIQNHLGEELLQDLINFCLSYMALLRLPKKRGTFIEFRNGMLNISPIGRSCTLEERIEFSELDKKEKIREKFVEALKTEFAGKGLRFSRGGMISFDVFPEGWDKRYCLDSLDQDSFDTIHFFGNETSPGGNDFEIFADPRTVGHSVVSPQDTVQRCREIFFPETAHEA

SEQ ID NO: 36678 - protein, 354 aa, Homo sapiens
MGKLVALVLLGVGLSLVGEMFLAFRERVNASREVEPVEPENCHLIEELESGSEDIDILPSGLAFISSGLKYPGMPNFAPDEPGKIFLMDLNEQNPRAQALEISGGFDKELFNPHGISIFIDKDNTVYLYVVNHPHMKSTVEIFKFEEQQRSLVYLKTIKHELLKSVNDIVVLGPEQFYATRDHYFTNSLLSFFEMILDLRWTYVLFYSPREVKVVAKGFCSANGITVSADQKYVYVADVAAKNIHIMEKHDNWDLTQLKVIQLGTLVDNLTVDPATGDILAGCHPNPMKLLNYNPEDPPGSEVLRIQNVLSEKPRVSTVYANNGSVLQGTSVASVYHGKILIGTVFHKTLYCEL

SEQ ID NO: 36679 - protein, 439 aa, Homo sapiens
MSKTMAMNLLEDWCRGMEVDIHRSLLVTGIPEDCGQAEIEETLNGVLSPLGPYRVLNKIFVREENVKAALIEVGEGVNLSTIPREFPGRGGVWRVVCRDPTQDAEFLKNLNEFLDAEGRTWEDVVRLLQLNHPTLSQNQHQPPENWAEALGVLLGAVVQIIFCMDAEIRSREEARAQEAAEFEEMAAWALAAGRKVKKEPGLAAEVGSALKAETPNNWNATEDQHEPTKPLVRRAGAKSRSRRKKQKKNSRQEAVPWKKPKGINSNSTANLEDPEVGDAESMAISEPIKGSRKPCVNKEELALKKPMAKCAWKGPREPPQDARAEAESPGGASESDQDGGHESPPKKKAVAWVSAKNPAPMRKKKKVSLGPVSYVLVDSEDGRKKPVMPKKGPGSRREASDQKAPRGQQPAEATASTSRGPKAKPEGSPRRATNESRKV

SEQ ID NO: 36680 - protein, 378 aa, Homo sapiens
MSKTMAMNLLEDWCRGMEVDIHRSLLVTGIPEDCGQAEIEETLNGVLSPLGPYRVLNKIFVREENVKAALIEVGEGVNLSTIPREFPGRGGVWRVVCRDPTQDAEFLKNLNEFLDAEGRTWEDVVRLLQLNHPTLSQNQHQPPENWAEALGVLLGAVVQIIFCMDAEIRSREEARAQEAAEFEEMAAWALAAGRKVKKEPGLAAEVGSALKAETPNNWNATEDQHEPTKPLVRRAGAKSRSRRKKQKKNSRQEAVPWKKPKGINSNSTANLEDPEVGDAESMAISEPIKGSRKPCVNKEELALKKPMAKCAWKGPREPPQDARAEAESPGGASESDQDGGHESPPKKKAVAWVSAKNPAPMRKKKKNPERFDLGDHPY

SEQ ID NO: 36681 - protein, 1192 aa, Homo sapiens
MPAPEQASLVEEGQPQTRQEAASTGPGMEPETTATTILASVKEQELQFQRLTRELEVERQIVASQLERCRLGAESPSIASTSSTEKSFPWRSTDVPNTGVSKPRVSDAVQPNNYLIRTEPEQGTLYSPEQTSLHESEGSLGNSRSSTQMNSYSDSGYQEAGSFHNSQNVSKADNRQQHSFIGSTNNHVVRNSRAEGQTLVQPSVANRAMRRVSSVPSRAQSPSYVISTGVSPSRGSLRTSLGSGFGSPSVTDPRPLNPSAYSSTTLPAARAASPYSQRPASPTAIRRIGSVTSRQTSNPNGPTPQYQTTARVGSPLTLTDAQTRVASPSQGQVGSSSPKRSGMTAVPQHLGPSLQRTVHDMEQFGQQQYDIYERMVPPRPDSLTGLRSSYASQHSQLGQDLRSAVSPDLHITPIYEGRTYYSPVYRSPNHGTVELQGSQTALYRTGSVGIGNLQRTSSQRSTLTYQRNNYALNTTATYAEPYRPIQYRVQECNYNRLQHAVPADDGTTRSPSIDSIQKDPREFAWRDPELPEVIHMLQHQFPSVQANAAAYLQHLCFGDNKVKMEVCRLGGIKHLVDLLDHRVLEVQKNACGALRNLVFGKSTDENKIAMKNVGGIPALLRLLRKSIDAEVRELVTGVLWNLSSCDAVKMTIIRDALSTLTNTVIVPHSGWNNSSFDDDHKIKFQTSLVLRNTTGCLRNLSSAGEEARKQMRSCEGLVDSLLYVIHTCVNTSDYDSKTVENCVCTLRNLSYRLELEVPQARLLGLNELDDLLGKESPSKDSEPSCWGKKKKKKKRTPQEDQWDGVGPIPGLSKSPKGVEMLWHPSVVKPYLTLLAESSNPATLEGSAGSLQNLSAGNWKFAAYIRAAVRKEKGLPILVELLRMDNDRVVSSVATALRNMALDVRNKELIGKYAMRDLVNRLPGGNGPSVLSDETMAAICCALHEVTSKNMENAKALADSGGIEKLVNITKGRGDRSSLKVVKAAAQVLNTLWQYRDLRSIYKKDGWNQNHFITPVSTLERDRFKSHPSLSTTNQQMSPIIQSVGSTSSSPALLGIRDPRSEYDRTQPPMQYYNSQGDATHKGLYPGSSKPSPIYISSYSSPAREQNRRLQHQQLYYSQDDSNRKNFDAYRLYLQSPHSYEDPYFDDRVHFPASTDYSTQYGLKSTTNYVDFYSTKRPSYRAEQYPGSPDSWV

SEQ ID NO: 36682 - protein, 1149 aa, Homo sapiens
MPAPEQASLVEEGQPQTRQEAASTGPGMEPETTATTILASVKEQELQFQRLTRELEVERQIVASQLERCRLGAESPSIASTSSTEKSFPWRSTDVPNTGVSKPRVSDAVQPNNYLIRTEPEQGTLYSPEQTSLHESEGSLGNSRSSTQMNSYSDSGYQEAGSFHNSQNVSKADNRQQHSFIGSTNNHVVRNSRAEGQTLVQPSVANRAMRRVSSVPSRAQSPSYVISTGVSPSRGSLRTSLGSGFGSPSVTDPRPLNPSAYSSTTLPAARAASPYSQRPASPTAIRRIGSVTSRQTSNPNGPTPQYQTTARVGSPLTLTDAQTRVASPSQGQVGSSSPKRSGMTAVPQHLGPSLQRTVHDMEQFGQQQYDIYERMVPPRPDSLTGLRSSYASQHSQLGQDLRSAVSPDLHITPIYEGRTYYSPVYRSPNHGTVELQGSQTALYRTGSVGIGNLQRTSSQRSTLTYQRNNYALNTTATYAEPYRPIQYRVQECNYNRLQHAVPADDGTTRSPSIDSIQKDPREFAWRDPELPEVIHMLQHQFPSVQANAAAYLQHLCFGDNKVKMEVCRLGGIKHLVDLLDHRVLEVQKNACGALRNLVFGKSTDENKIAMKNVGGIPALLRLLRKSIDAEVRELVTGVLWNLSSCDAVKMTIIRDALSTLTNTVIVPHSGWNNSSFDDDHKIKFQTSLVLRNTTGCLRNLSSAGEEARKQMRSCEGLVDSLLYVIHTCVNTSDYDSKTVENCVCTLRNLSYRLELEVPQARLLGLNELDDLLGKESPSKDSEPSCWGKKKKKKKRTPQEDQWDGVGPIPGLSKSPKGVEMLWHPSVVKPYLTLLAESSNPATLEGSAGSLQNLSAGNWKFAAYIRAAVRKEKGLPILVELLRMDNDRVVSSVATALRNMALDVRNKELIGKYAMRDLVNRLPGGNGPSVLSDETMAAICCALHEVTSKNMENAKALADSGGIEKLVNITKGRGDRSSLKVVKAAAQVLNTLWQYRDLRSIYKKDGWNQNHFITPVSTLERDRFKSHPSLSTTNQQMSPIIQSGSSKPSPIYISSYSSPAREQNRRLQHQQLYYSQDDSNRKNFDAYRLYLQSPHSYEDPYFDDRVHFPASTDYSTQYGLKSTTNYVDFYSTKRPSYRAEQYPGSPDSWV

SEQ ID NO: 36683 - protein, 2036 aa, Homo sapiens
MFSKKPHGDVKKSTQKVLDTKKDALTRLKHLRIVIENAESIDLKQFFDQHFSHIYYVFFENFVTIEASLKQKGHKSQREELDAILFIFEKILQLLPERIHQRWQFHSIGLILKKLLHTGNSLKIRREGVRLFLLWLQALQNNCSKEQLWMFSCLIPGFSAPQSEHGPRTLDNLINPPLNLQETQVTIEEITPLVPPQSGDKGQEDLTSYFLEALLKYIVIQVKSLEWKNKENQERGFSFLFSHFKKYYLPYIFPNICKENSLYHPILDIPQMRPKPHYVVIKKDAETNEAIYCTKEPFIKARVIVIRWLVSFWLEPKPHTGPHIPGMEGEVLPKNIQRAAASLVSREESKNDNADKTDRTTEPEQSHSNTSTLTEREPSSSSLCSIDEEHLTDIEIVRRVFSSKRSNVNFVTEIFRQAFLLPICEAAAMRKVVKVYQEWIQQEEKPLFMQEPEEIVITSSDLPCIENVTDHDISMEEGEKREEENGTNTADHVRNSSWAKNGSYQGALHNASEEATEQNIRAGTQAVLQVFIINSSNIFLLEPANEIKNLLDEHTDMCKRILNIYRYMVVQVSMDKKTWEQMLLVLLRVTESVLKMPSQAFLQFQGKKNMTLAGRLAGPLFQTLIVAWIKANLNVYISRELWDDLLSVLSSLTYWEELATEWSLTMETLTKVLARNLYSLDLSDLPLDKLSEQKQKKHKGKGVGHEFQKVSVDKSFSRGWSRDQPGQAPMRQRSATTTGSPGTEKARSIVRQKTVDIDDAQILPRSTRVRHFSQSEETGNEVFGALNEEQPLPRSSSTSDILEPFTVERAKVNKEDMSQKLPPLNSDIGGSSANVPDLMDEFIAERLRSGNASTMTRRGSSPGSLEIPKDLPDILNKQNQMRPIDDPGVPSEWTSPASAGSSDLISSDSHSDSFSAFQYDGRKFDNFGFGTDTGVTSSADVDSGSGHHQSAEEQEVASLTTLHIDSETSSLNQQAFSAEVATITGSESASPVHSPLGSRSQTPSPSTLNIDHMEQKDLQLDEKLHHSVLQTPDDLEISEFPSECCSVMAGGTLTGWHADVATVMWRRMLGILGDVNSIMDPEIHAQVFDYLCELWQNLAKIRDNLGISTDNLTSPSPPVLIPPLRILTPWLFKATMLTDKYKQGKLHAYKLICNTMKRRQDVSPNRDFLTHFYNIMHCGLLHIDQDIVNTIIKHCSPQFFSLGLPGATMLIMDFIVAAGRVASSAFLNAPRVEAQVLLGSLVCFPNLYCELPSLHPNIPDVAVSQFTDVKELIIKTVLSSARDEPSGPARCVALCSLGIWICEELVHESHHPQIKEALNVICVSLKFTNKTVAHVACNMLHMLVHYVPRLQIYQPDSPLKIIQILIATITHLLPSTEASSYEMDKRLVVSLLLCLLDWIMALPLKTLLQPFHATGAESDKTEKSVLNCIYKVLHGCVYGAQCFSNPRYFPMSLSDLASVDYDPFMHLESLKEPEPLHSPDSERSSKLQPVTEVKTQMQHGLISIAARTVITHLVNHLGHYPMSGGPAMLTSQVCENHDNHYSESTELSPELFESPNIQFFVLNNTTLVSCIQIRSEENMPGGGLSAGLASANSNVRIIVRDLSGKYSWDSAILYGPPPVSGLSEPTSFMLSLSHQEKPEEPPTSNECLEDITVKDGLSLQFKRFRETVPTWDTIRDEEDVLDELLQYLGVTSPECLQRTGISLNIPAPQPVCISEKQENDVINAILKQHTEEKEFVEKHFNDLNMKAVEQDEPIPQKPQSAFYYCRLLLSILGMNSWDKRRSFHLLKKNEKLLRELRNLDSRQCRETHKIAVFYVAEGQEDKHSILTNTGGSQAYEDFVAGLGWEVNLTNHCGFMGGLQKNKSTGLTTPYFATSTVEVIFHVSTRMPSDSDDSLTKKLRHLGNDEVHIVWSEHTRDYRRGIIPTEFGDVLIVIYPMKNHMFSIQIMKKPEVPFFGPLFDGAIVNGKVLPIMVRATAINASRALKSLIPLYQNFYEERARYLQTIVQHHLEPTTFEDFAAQVFSPAPYHHLPSDADH

SEQ ID NO: 36684 - protein, 2083 aa, Homo sapiens
MFSKKPHGDVKKSTQKVLDTKKDALTRLKHLRIVIENAESIDLKQFFDQHFSHIYYVFFENFVTIEASLKQKGHKSQREELDAILFIFEKILQLLPERIHQRWQFHSIGLILKKLLHTGNSLKIRREGVRLFLLWLQALQNNCSKEQLWMFSCLIPGFSAPQSEHGPRTLDNLINPPLNLQETQVTIEEITPLVPPQSGDKGQEDLTSYFLEALLKYIVIQVKSLEWKNKENQERGFSFLFSHFKKYYLPYIFPNICKENSLYHPILDIPQMRPKPHYVVIKKDAETNEAIYCTKEPFIKARVIVIRWLVSFWLEPKPHTGPHIPGMEGEVLPKNIQRAAASLVSREESKNDNADKTDRTTEPEQSHSNTSTLTEREPSSSSLCSIDEEHLTDIEIVRRVFSSKRSNVNFVTEIFRQAFLLPICEAAAMRKVVKVYQEWIQQEEKPLFMQEPEEIVITSSDLPCIENVTDHDISMEEGEKREEENGTNTADHVRNSSWAKNGSYQGALHNASEEATEQNIRAGTQAVLQVFIINSSNIFLLEPANEIKNLLDEHTDMCKRILNIYRYMVVQVSMDKKTWEQMLLVLLRVTESVLKMPSQAFLQFQGKKNMTLAGRLAGPLFQTLIVAWIKANLNVYISRELWDDLLSVLSSLTYWEELATEWSLTMETLTKVLARNLYSLDLSDLPLDKLSEQKQKKHKGKGVGHEFQKVSVDKSFSRGWSRDQPGQAPMRQRSATTTGSPGTEKARSIVRQKTVDIDDAQILPRSTRVRHFSQSEETGNEVFGALNEEQPLPRSSSTSDILEPFTVERAKVNKEDMSQKLPPLNSDIGGSSANVPDLMDEFIAERLRSGNASTMTRRGSSPGSLEIPKDLPDILNKQNQMRPIDDPGVPSEWTSPASAGSSDLISSDSHSDSFSAFQYDGRKFDNFGFGTDTGVTSSADVDSGSGHHQSAEEQEVASLTTLHIDSETSSLNQQAFSAEVATITGSESASPVHSPLGSRSQTPSPSTLNIDHMEQKDLQLDEKLHHSVLQTPDDLEISEFPSECCSVMAGGTLTGWHADVATVMWRRMLGILGDVNSIMDPEIHAQVFDYLCELWQNLAKIRDNLGISTDNLTSPSPPVLIPPLRILTPWLFKATMLTDKYKQGKLHAYKLICNTMKRRQDVSPNRDFLTHFYNIMHCGLLHIDQDIVNTIIKHCSPQFFSLGLPGATMLIMDFIVAAGRVASSAFLNAPRVEAQVLLGSLVCFPNLYCELPSLHPNIPDVAVSQFTDVKELIIKTVLSSARDEPSGPARCVALCSLGIWICEELVHESHHPQIKEALNVICVSLKFTNKTVAHVACNMLHMLVHYVPRLQIYQPDSPLKIIQILIATITHLLPSTEASSYEMDKRLVVSLLLCLLDWIMALPLKTLLQPFHATGAESDKTEKSVLNCIYKVLHGCVYGAQCFSNPRYFPMSLSDLASVDYDPFMHLESLKEPEPLHSPDSERSSKLQPVTEVKTQMQHGLISIAARTVITHLVNHLGHYPMSGGPAMLTSQVCENHDNHYSESTELSPELFESPNIQFFVLNNTTLVSCIQIRSEENMPGGGLSAGLASANSNVRIIVRDLSGKYSWDSAILYGPPPVSGLSEPTSFMLSLSHQEKPEEPPTSNECLEDITVKDGLSLQFKRFRETVPTWDTIRDEEDVLDELLQYLGVTSPECLQRTGISLNIPAPQPVCISEKQENDVINAILKQHTEEKEFVEKHFNDLNMKAVEQDEPIPQKPQSAFYYCRLLLSILGMNSWDKRRSFHLLKKNEKLLRELRNLDSRQCRETHKIAVFYVAEGQEDKHSILTNTGGSQAYEDFVAGLGWEVNLTNHCGFMGGLQKNKSTGLTTPYFATSTVEVIFHVSTRMPSDSDDSLTKKLRHLGNDEVHIVWSEHTRDYRRGIIPTEFGDVLIVIYPMKNHMFSIQIMKKPEVPFFGPLFDGAIVNGKVLPIMVRATAINASRALKSLIPLYQNFYEERARYLQTIVQHHLEPTTFEDFAAQVFSPAPYHHLPSDAGSYPEILPSETPTATQVDGADLASPMSPRTSKSRMSMKLRRSSGSANKS

SEQ ID NO: 36685 - protein, 1104 aa, Homo sapiens
MFSKKPHGDVKKSTQKVLDTKKDALTRLKHLRIVIENAESIDLKQFFDQHFSHIYYVFFENFVTIEASLKQKGHKSQREELDAILFIFEKILQLLPERIHQRWQFHSIGLILKKLLHTGNSLKIRREGVRLFLLWLQALQNNCSKEQLWMFSCLIPGFSAPQSEHGPRTLDNLINPPLNLQETQVTIEEITPLVPPQSGDKGQEDLTSYFLEALLKYIVIQVKSLEWKNKENQERGFSFLFSHFKKYYLPYIFPNICKENSLYHPILDIPQMRPKPHYVVIKKDAETNEAIYCTKEPFIKARVIVIRWLVSFWLEPKPHTGPHIPGMEGEVLPKNIQRAAASLVSREESKNDNADKTDRTTEPEQSHSNTSTLTEREPSSSSLCSIDEEHLTDIEIVRRVFSSKRSNVNFVTEIFRQAFLLPICEAAAMRKVVKVYQEWIQQEEKPLFMQEPEEIVITSSDLPCIENVTDHDISMEEGEKREEENGTNTADHVRNSSWAKNGSYQGALHNASEEATEQNIRAGTQAVLQVFIINSSNIFLLEPANEIKNLLDEHTDMCKRILNIYRYMVVQVSMDKKTWEQMLLVLLRVTESVLKMPSQAFLQFQGKKNMTLAGRLAGPLFQTLIVAWIKANLNVYISRELWDDLLSVLSSLTYWEELATEWSLTMETLTKVLARNLYSLDLSDLPLDKLSEQKQKKHKGKGVGHEFQKVSVDKSFSRGWSRDQPGQAPMRQRSATTTGSPGTEKARSIVRQKTVAMRSRSIGECALPSAYIRSAKSAPVLIHTSKPFLPDIVLTPLSDELSDIDDAQILPRSTRVRHFSQSEETGNEVFGALNEEQPLPRSSSTSDILEPFTVERAKVNKEDMSQKLPPLNSDIGGSSANVPDLMDEFIAERLRSGNASTMTRRGSSPGSLEIPKDLPDILNKQNQMRPIDDPGVPSEWTSPASAGSSDLISSDSHSDSFSAFQYDGRKFDNFGFGTDTGVTSSADVDSGSGHHQSAEEQEVASLTTLHIDSETSSLNQQAFSAEVATITGSESASPVHSPLGSRSQTPSPSTLNIDHMEQKDLQLDEKLHHSVLQTPDDLGNISKLDIYLFSFRASVSGDHK

SEQ ID NO: 36686 - protein, 1961 aa, Homo sapiens
MFSKKPHGDVKKSTQKVLDTKKDALTRLKHLRIVIENAESIDLKQFFDQHFSHIYYVFFENFVTIEASLKQKGHKSQREELDAILFIFEKILQLLPERIHQRWQFHSIGLILKKLLHTGNSLKIRREGVRLFLLWLQALQNNCSKEQLWMFSCLIPGFSAPQSEHGPRTLDNLINPPLNLQETQVTIEEITPLVPPQSGDKGQEDLTSYFLEALLKYIVIQVKSLEWKNKENQERGFSFLFSHFKKYYLPYIFPNICKENSLYHPILDIPQMRPKPHYVVIKKDAETNEAIYCTKEPFIKARVIVIRWLVSFWLEPKPHTGPHIPGMEGEVLPKNIQRAAASLVSREESKNDNADKTDRTTEPEQSHSNTSTLTEREPSSSSLCSIDEEHLTDIEIVRRVFSSKRSNVNFVTEIFRQAFLLPICEAAAMRKVVKVYQEWIQQEEKPLFMQEPEEIVITSSDLPCIENVTDHDISMEEGEKREEENGTNTADHVRNSSWAKNGSYQGALHNASEEATEQNIRAGTQAVLQVFIINSSNIFLLEPANEIKNLLDEHTDMCKRILNIYRYMVVQVSMDKKTWEQMLLVLLRVTESVLKMPSQAFLQFQGKKNMTLAGRLAGPLFQTLIVAWIKANLNVYISRELWDDLLSVLSSLTYWEELATEWSLTMETLTKVLARNLYSLDLSDLPLDKLSEQKQKKHKGKGVGHEFQKVSVDKSFSRGWSRDQPGQAPMRQRSATTTGSPGTEKARSIVRQKTVDIDDAQILPRSTRVRHFSQSEETGNEVFGALNEEQPLPRSSSTSDILEPFTVERAKVNKEDMSQKLPPLNSDIGGSSANVPDLMDEFIAERLRSGNASTMTRRGSSPGSLEIPKDLPDILNKQNQMRPIDDPGVPSEWTSPASAGSSDLISSDSHSDSFSAFQYDGRKFDNFGFGTDTGVTSSADVDSGSGHHQSAEEQEVASLTTLHIDSETSSLNQQAFSAEVATITGSESASPVHSPLGSRSQTPSPSTLNIDHMEQKDLQLDEKLHHSVLQTPDDLEISEFPSECCSVMAGGTLTGWHADVATVMWRRMLGILGDVNSIMDPEIHAQVFDYLCELWQNLAKIRDNLGISTDNLTSPSPPVLIPPLRILTPWLFKATMLTDKYKQGKLHAYKLICNTMKRRQDVSPNRDFLTHFYNIMHCGLLHIDQDIVNTIIKHCSPQFFSLGLPGATMLIMDFIVAAGRVASSAFLNAPRVEAQVLLGSLVCFPNLYCELPSLHPNIPDVAVSQFTDVKELIIKTVLSSARDEPSGPARCVALCSLGIWICEELVHESHHPQIKEALNVICVSLKFTNKTVAHVACNMLHMLVHYVPRLQIYQPDSPLKIIQILIATITHLLPSTEASSYEMDKRLVVSLLLCLLDWIMALPLKTLLQPFHATGAESDKTEKSVLNCIYKVLHGCVYGAQCFSNPRYFPMSLSDLASVDYDPFMHLESLKEPEPLHSPDSERSSKLQPVTEVKTQMQHGLISIAARTVITHLVNHLGHYPMSGGPAMLTSQVCENHDNHYSESTELSPELFESPNIQFFVLNNTTLVSCIQIRSEENMPGGGLSAGLASANSNVRIIVRDLSGKYSWDSAILYGPPPVSGLSEPTSFMLSLSHQEKPEEPPTSNECLEDITVKDGLSLQFKRFRETVPTWDTIRDEEDVLDELLQYLGVTSPECLQRTGISLNIPAPQPVCISEKQENDVINAILKQHTEEKEFVEKHFNDLNMKAVEQDEPIPQKPQSAFYYCRLLLSILGMNSWDKRRSFHLLKKNEKLLRELRNLDSRQCRETHKIAVFYVAEGQEDKHSILTNTGGSQAYEDFVAGLGWEVNLTNHCGFMGGLQKNKSTGLTTPYFATSTVEVIFHVSTRMPSDSDDSLTKKMESHCVAQAGVQWHDLRSLQLLPPRFKESSLLSLLSSWDYRCMPPHLSNFCIFSRDGVSPCWPG

SEQ ID NO: 36687 - protein, 2073 aa, Homo sapiens
MFSKKPHGDVKKSTQKVLDTKKDALTRLKHLRIVIENAESIDLKQFFDQHFSHIYYVFFENFVTIEASLKQKGHKSQREELDAILFIFEKILQLLPERIHQRWQFHSIGLILKKLLHTGNSLKIRREGVRLFLLWLQALQNNCSKEQLWMFSCLIPGFSAPQSEHGPRTLDNLINPPLNLQETQVTIEEITPLVPPQSGDKGQEDLTSYFLEALLKYIVIQVKSLEWKNKENQERGFSFLFSHFKKYYLPYIFPNICKENSLYHPILDIPQMRPKPHYVVIKKDAETNEAIYCTKEPFIKARVIVIRWLVSFWLEPKPHTGPHIPGMEGEVLPKNIQRAAASLVSREESKNDNADKTDRTTEPEQSHSNTSTLTEREPSSSSLCSIDEEHLTDIEIVRRVFSSKRSNVNFVTEIFRQAFLLPICEAAAMRKVVKVYQEWIQQEEKPLFMQEPEEIVITSSDLPCIENVTDHDISMEEGEKREEENGTNTADHVRNSSWAKNGSYQGALHNASEEATEQNIRAGTQAVLQVFIINSSNIFLLEPANEIKNLLDEHTDMCKRILNIYRYMVVQVSMDKKTWEQMLLVLLRVTESVLKMPSQAFLQFQGKKNMTLAGRLAGPLFQTLIVAWIKANLNVYISRELWDDLLSVLSSLTYWEELATEWSLTMETLTKVLARNLYSLDLSDLPLDKLSEQKQKKHKGKGVGHEFQKVSVDKSFSRGWSRDQPGQAPMRQRSATTTGSPGTEKARSIVRQKTVDIDDAQILPRSTRVRHFSQSEETGNEVFGALNEEQPLPRSSSTSDILEPFTVERAKVNKEDMSQKLPPLNSDIGGSSANVPDLMDEFIAERLRSGNASTMTRRGSSPGSLEIPKDLPDILNKQNQMRPIDDPGVPSEWTSPASAGSSDLISSDSHSDSFSAFQYDGRKFDNFGFGTDTGVTSSADVDSGSGHHQSAEEQEVASLTTLHIDSETSSLNQQAFSAEVATITGSESASPVHSPLGSRSQTPSPSTLNIDHMEQKDLQLDEKLHHSVLQTPDDLEISEFPSECCSVMAGGTLTGWHADVATVMWRRMLGILGDVNSIMDPEIHAQVFDYLCELWQNLAKIRDNLGISTDNLTSPSPPVLIPPLRILTPWLFKATMLTDKYKQGKLHAYKLICNTMKRRQDVSPNRDFLTHFYNIMHCGLLHIDQDIVNTIIKHCSPQFFSLGLPGATMLIMDFIVAAGRVASSAFLNAPRVEAQVLLGSLVCFPNLYCELPSLHPNIPDVAVSQFTDVKELIIKTVLSSARDEPSGPARCVALCSLGIWICEELVHESHHPQIKEALNVICVSLKFTNKTVAHVACNMLHMLVHYVPRLQIYQPDSPLKIIQILIATITHLLPSTEASSYEMDKRLVVSLLLCLLDWIMALPLKTLLQPFHATGAESDKTEKSVLNCIYKVLHGCVYGAQCFSNPRYFPMSLSDLASVDYDPFMHLESLKEPEPLHSPDSERSSKLQPVTEVKTQMQHGLISIAARTVITHLVNHLGHYPMSGGPAMLTSQVCENHDNHYSESTELSPELFESPNIQFFVLNNTTLVSCIQIRSEENMPGGGLSAGLASANSNVRIIVRDLSGKYSWDSAILYGPPPVSGLSEPTSFMLSLSHQEKPEEPPTSNECLEDITVKDGLSLQFKRFRETVPTWDTIRDEEDVLDELLQYLGVTSPECLQRTGISLNIPAPQPVCISEKQENDVINAILKQHTEEKEFVEKHFNDLNMKAVEQDEPIPQKPQSAFYYCRLLLSILGMNSWDKRRSFHLLKKNEKLLRELRNLDSRQCRETHKIAVFYVAEGQEDKHSILTNTGGSQAYEDFVAGLGWEVNLTNHCGFMGGLQKNKSTGLTTPYFATSTVEVIFHVSTRMPSDSDDSLTKKLRHLGNDEVHIVWSEHTRDYRRGIIPTEFGDVLIVIYPMKNHMFSIQIMKKPEVPFFGPLFDGAIVNGKVLPIMVRATAINASRALKSLIPLYQNFYEERARYLQTIVQHHLEPTTFEDFAAQVFSPAPYHHLPSDAVERNAVIVLFLPKPPLENIGHLKAPTQRFYPVKLPQQRR

SEQ ID NO: 36688 - protein, 2083 aa, Homo sapiens
MFSKKPHGDVKKSTQKVLDTKKDALTRLKHLRIVIENAESIDLKQFFDQHFSHIYYVFFENFVTIEASLKQKGHKSQREELDAILFIFEKILQLLPERIHQRWQFHSIGLILKKLLHTGNSLKIRREGVRLFLLWLQALQNNCSKEQLWMFSCLIPGFSAPQSEHGPRTLDNLINPPLNLQETQVTIEEITPLVPPQSGDKGQEDLTSYFLEALLKYIVIQVKSLEWKNKENQERGFSFLFSHFKKYYLPYIFPNICKENSLYHPILDIPQMRPKPHYVVIKKDAETNEAIYCTKEPFIKARVIVIRWLVSFWLEPKPHTGPHIPGMEGEVLPKNIQRAAASLVSREESKNDNADKTDRTTEPEQSHSNTSTLTEREPSSSSLCSIDEEHLTDIEIVRRVFSSKRSNVNFVTEIFRQAFLLPICEAAAMRKVVKVYQEWIQQEEKPLFMQEPEEIVITSSDLPCIENVTDHDISMEEGEKREEENGTNTADHVRNSSWAKNGSYQGALHNASEEATEQNIRAGTQAVLQVFIINSSNIFLLEPANEIKNLLDEHTDMCKRILNIYRYMVVQVSMDKKTWEQMLLVLLRVTESVLKMPSQAFLQFQGKKNMTLAGRLAGPLFQTLIVAWIKANLNVYISRELWDDLLSVLSSLTYWEELATEWSLTMETLTKVLARNLYSLDLSDLPLDKLSEQKQKKHKGKGVGHEFQKVSVDKSFSRGWSRDQPGQAPMRQRSATTTGSPGTEKARSIVRQKTVAMRSRSIGECALPSAYIRSAKSAPVLIHTSKPFLPDIVLTPLSDELSDIDDAQILPRSTRVRHFSQSEETGNEVFGALNEEQPLPRSSSTSDILEPFTVERAKVNKEDMSQKLPPLNSDIGGSSANVPDLMDEFIAERLRSGNASTMTRRGSSPGSLEIPKDLPDILNKQNQMRPIDDPGVPSEWTSPASAGSSDLISSDSHSDSFSAFQYDGRKFDNFGFGTDTGVTSSADVDSGSGHHQSAEEQEVASLTTLHIDSETSSLNQQAFSAEVATITGSESASPVHSPLGSRSQTPSPSTLNIDHMEQKDLQLDEKLHHSVLQTPDDLEISEFPSECCSVMAGGTLTGWHADVATVMWRRMLGILGDVNSIMDPEIHAQVFDYLCELWQNLAKIRDNLGISTDNLTSPSPPVLIPPLRILTPWLFKATMLTDKYKQGKLHAYKLICNTMKRRQDVSPNRDFLTHFYNIMHCGLLHIDQDIVNTIIKHCSPQFFSLGLPGATMLIMDFIVAAGRVASSAFLNAPRVEAQVLLGSLVCFPNLYCELPSLHPNIPDVAVSQFTDVKELIIKTVLSSARDEPSGPARCVALCSLGIWICEELVHESHHPQIKEALNVICVSLKFTNKTVAHVACNMLHMLVHYVPRLQIYQPDSPLKIIQILIATITHLLPSTEASSYEMDKRLVVSLLLCLLDWIMALPLKTLLQPFHATGAESDKTEKSVLNCIYKVLHGCVYGAQCFSNPRYFPMSLSDLASVDYDPFMHLESLKEPEPLHSPDSERSSKLQPVTEVKTQMQHGLISIAARTVITHLVNHLGHYPMSGGPAMLTSQVCENHDNHYSESTELSPELFESPNIQFFVLNNTTLVSCIQIRSEENMPGGGLSAGLASANSNVRIIVRDLSGKYSWDSAILYGPPPVSGLSEPTSFMLSLSHQEKPEEPPTSNECLEDITVKDGLSLQFKRFRETVPTWDTIRDEEDVLDELLQYLGVTSPECLQRTGISLNIPAPQPVCISEKQENDVINAILKQHTEEKEFVEKHFNDLNMKAVEQDEPIPQKPQSAFYYCRLLLSILGMNSWDKRRSFHLLKKNEKLLRELRNLDSRQCRETHKIAVFYVAEGQEDKHSILTNTGGSQAYEDFVAGLGWEVNLTNHCGFMGGLQKNKSTGLTTPYFATSTVEVIFHVSTRMPSDSDDSLTKKLRHLGNDEVHIVWSEHTRDYRRGIIPTEFGDVLIVIYPMKNHMFSIQIMKKPEVPFFGPLFDGAIVNGKVLPIMVRATAINASRALKSLIPLYQNFYEERARYLQTIVQHHLEPTTFEDFAAQVFSPAPYHHLPSDADH

SEQ ID NO: 36689 - protein, 2049 aa, Homo sapiens
MFSKKPHGDVKKSTQKVLDTKKDALTRLKHLRIVIENAESIDLKQFFDQHFSHIYYVFFENFVTIEASLKQKGHKSQREELDAILFIFEKILQLLPERIHQRWQFHSIGLILKKLLHTGNSLKIRREGVRLFLLWLQALQNNCSKEQLWMFSCLIPGFSAPQSEHGPRTLDNLINPPLNLQETQVTIEEITPLVPPQSGDKGQEDLTSYFLEALLKYIVIQVKSLEWKNKENQERGFSFLFSHFKKYYLPYIFPNICKENSLYHPILDIPQMRPKPHYVVIKKDAETNEAIYCTKEPFIKARVIVIRWLVSFWLEPKPHTGPHIPGMEGEVLPKNIQRAAASLVSREESKNDNADKTDRTTEPEQSHSNTSTLTEREPSSSSLCSIDEEHLTDIEIVRRVFSSKRSNVNFVTEIFRQAFLLPICEAAAMRKVVKVYQEWIQQEEKPLFMQEPEEIVITSSDLPCIENVTDHDISMEEGEKREEENGTNTADHVRNSSWAKNGSYQGALHNASEEATEQNIRAGTQAVLQVFIINSSNIFLLEPANEIKNLLDEHTDMCKRILNIYRYMVVQVSMDKKTWEQMLLVLLRVTESVLKMPSQAFLQFQGKKNMTLAGRLAGPLFQTLIVAWIKANLNVYISRELWDDLLSVLSSLTYWEELATEWSLTMETLTKVLARNLYSLDLSDLPLDKLSEQKQKKHKGKGVGHEFQKVSVDKSFSRGWSRDQPGQAPMRQRSATTTGSPGTEKARSIVRQKTVDIDDAQILPRSTRVRHFSQSEETGNEVFGALNEEQPLPRSSSTSDILEPFTVERAKEAEQNATRGSTEGSVQSCNGLFWKESCSDIGGSSANVPDLMDEFIAERLRSGNASTMTRRGSSPGSLEIPKDLPDILNKQNQMRPIDDPGVPSEWTSPASAGSSDLISSDSHSDSFSAFQYDGRKFDNFGFGTDTGVTSSADVDSGSGHHQSAEEQEVASLTTLHIDSETSSLNQQAFSAEVATITGSESASPVHSPLGSRSQTPSPSTLNIDHMEQKDLQLDEKLHHSVLQTPDDLEISEFPSECCSVMAGGTLTGWHADVATVMWRRMLGILGDVNSIMDPEIHAQVFDYLCELWQNLAKIRDNLGISTDNLTSPSPPVLIPPLRILTPWLFKATMLTDKYKQGKLHAYKLICNTMKRRQDVSPNRDFLTHFYNIMHCGLLHIDQDIVNTIIKHCSPQFFSLGLPGATMLIMDFIVAAGRVASSAFLNAPRVEAQVLLGSLVCFPNLYCELPSLHPNIPDVAVSQFTDVKELIIKTVLSSARDEPSGPARCVALCSLGIWICEELVHESHHPQIKEALNVICVSLKFTNKTVAHVACNMLHMLVHYVPRLQIYQPDSPLKIIQILIATITHLLPSTEASSYEMDKRLVVSLLLCLLDWIMALPLKTLLQPFHATGAESDKTEKSVLNCIYKVLHGCVYGAQCFSNPRYFPMSLSDLASVDYDPFMHLESLKEPEPLHSPDSERSSKLQPVTEVKTQMQHGLISIAARTVITHLVNHLGHYPMSGGPAMLTSQVCENHDNHYSESTELSPELFESPNIQFFVLNNTTLVSCIQIRSEENMPGGGLSAGLASANSNVRIIVRDLSGKYSWDSAILYGPPPVSGLSEPTSFMLSLSHQEKPEEPPTSNECLEDITVKDGLSLQFKRFRETVPTWDTIRDEEDVLDELLQYLGVTSPECLQRTGISLNIPAPQPVCISEKQENDVINAILKQHTEEKEFVEKHFNDLNMKAVEQDEPIPQKPQSAFYYCRLLLSILGMNSWDKRRSFHLLKKNEKLLRELRNLDSRQCRETHKIAVFYVAEGQEDKHSILTNTGGSQAYEDFVAGLGWEVNLTNHCGFMGGLQKNKSTGLTTPYFATSTVEVIFHVSTRMPSDSDDSLTKKLRHLGNDEVHIVWSEHTRDYRRGIIPTEFGDVLIVIYPMKNHMFSIQIMKKPEVPFFGPLFDGAIVNGKVLPIMVRATAINASRALKSLIPLYQNFYEERARYLQTIVQHHLEPTTFEDFAAQVFSPAPYHHLPSDADH

SEQ ID NO: 36690 - protein, 177 aa, Homo sapiens
MNWFGSNFFRCPEDLSLLNIYSPLLSHMSSEDEHFISNLRGHVPASAVVKQPVRGASGRTTITAIVQTGGGWSTGLFSVCRDRRICFCGLFCPMCLECDIARHYGECLCWPLLPGSTFALRIGTRERHKIQGTLCEDWLAVHCCWAFSICQVARELKMRTSQVYEICAVPMTKDTLV

SEQ ID NO: 36691 - protein, 467 aa, Homo sapiens
MAAGPAPPPGRPRAQMPHLRKMERVVVSMQDPDQGVKMRSQRLLVTVIPHAVTGSDVVQWLAQKFCVSEEEALHLGAVLVQHGYIYPLRDPRSLMLRPDETPYRFQTPYFWTSTLRPAAELDYAIYLAKKNIRKRGTLVDYEKDCYDRLHKKINHAWDLVLMQAREQLRAAKQRSKGDRLVIACQEQTYWLVNRPPPGAPDVLEQGPGRGSCAASRVLMTKSADFHKREIEYFRKALGRTRVKSSVCLEAYLSFCGQRGPHDPLVSGCLPSNPWISDNDAYWVMNAPTVAAPTKLRVERWGFSFRELLEDPVGRAHFMDFLGKEFSGENLSFWEACEELRYGAQAQVPTLVDAVYEQFLAPGAAHWVNIDSRTMEQTLEGLRQPHRYVLDDAQLHIYMLMKKDSYPRFLKSDMYKALLAEAGIPLEMKRRVFPFTWRPRHSSPSPALLPTPVEPTAACGPGGGDGVA

SEQ ID NO: 36692 - protein, 456 aa, Homo sapiens
MAAGPAPPPGRPRAQMPHLRKMERVVVSMQDPDQGVKMRSQRLLVTVIPHAVTGSDVVQWLAQKFCVSEEEALHLGAVLVQHGYIYPLRDPRSLMLRPDETPYRFQVRLGGAAIYLAKKNIRKRGTLVDYEKDCYDRLHKKINHAWDLVLMQAREQLRAAKQRSKGDRLVIACQEQTYWLVNRPPPGAPDVLEQGPGRGSCAASRVLMTKSADFHKREIEYFRKALGRTRVKSSVCLEAYLSFCGQRGPHDPLVSGCLPSNPWISDNDAYWVMNAPTVAAPTKLRVERWGFSFRELLEDPVGRAHFMDFLGKEFSGENLSFWEACEELRYGAQAQVPTLVDAVYEQFLAPGAAHWVNIDSRTMEQTLEGLRQPHRYVLDDAQLHIYMLMKKDSYPRFLKSDMYKALLAEAGIPLEMKRRVFPFTWRPRHSSPSPALLPTPVEPTAACGPGGGDGVA

SEQ ID NO: 36693 - protein, 446 aa, Homo sapiens
MERVVVSMQDPDQGVKMRSQRLLVTVIPHAVTGSDVVQWLAQKFCVSEEEALHLGAVLVQHGYIYPLRDPRSLMLRPDETPYRFQTPYFWTSTLRPAAELDYAIYLAKKNIRKRGTLVDYEKDCYDRLHKKINHAWDLVLMQAREQLRAAKQRSKGDRLVIACQEQTYWLVNRPPPGAPDVLEQGPGRGSCAASRVLMTKSADFHKREIEYFRKALGRTRVKSSVCLEAYLSFCGQRGPHDPLVSGCLPSNPWISDNDAYWVMNAPTVAAPTKLRVERWGFSFRELLEDPVGRAHFMDFLGKEFSGENLSFWEACEELRYGAQAQVPTLVDAVYEQFLAPGAAHWVNIDSRTMEQTLEGLRQPHRYVLDDAQLHIYMLMKKDSYPRFLKSDMYKALLAEAGIPLEMKRRVFPFTWRPRHSSPSPALLPTPVEPTAACGPGGGDGVA

SEQ ID NO: 36694 - protein, 160 aa, Homo sapiens
MLLLLLSIIVLHVAVLVLLFVSTIVSQWIVGNGHATDLWQNCSTSSSGNVHHCFSSSPNEWLQSVQATMILSIIFSILSLFLFFCQLFTLTKGGRFYITGIFQILAGLCVMSAAAIYTVRHPEWHLNSDYSYGFAYILAWVAFPLALLSGVIYVILRKRE

SEQ ID NO: 36695 - protein, 295 aa, Homo sapiens
MAGYLPPKGYAPSPPPPYPVTPGYPEPALHPGPGQAPVPAQVPAPAPGFALFPSPGPVALGSAAPFLPLPGVPSGLEFLVQIDQILIHQKAERVETFLGWETCNRYELRSGAGQPLGQAAEESNCCARLCCGARRPLRVRLADPGDREVLRLLRPLHCGCSCCPCGLQEMEVQAPPGTTIGHVLQTWHPFLPKFSIQDADRQTVLRVVGPCWTCGCGTDTNFEVKTRDESRSVGRISKQWGGLVREALTDADDFGLQFPLDLDVRVKAVLLGATFLIDYMFFEKRGGAGPSAVTS

SEQ ID NO: 36696 - protein, 404 aa, Homo sapiens
MPYVDRQNRICGFLDIEENENSGKFLRRYFILDTREDSFVWYMDNPQNLPSGSSRVGAIKLTYISKVSDATKLRPKAEFCFVMNAGMRKYFLQANDQQDLVEWVNVLNKAIKITVPKQSDSQPNSDNLSRHGECGKKQVSYRTDIVGGVPIITPTQKEEVNECGESIDRNNLKRSQSHLPYFTPKPPQDSAVIKAGYCVKQGAVMKNWKRRYFQLDENTIGYFKSELEKEPLRVIPLKEVHKVQECKQSDIMMRDNLFEIVTTSRTFYVQADSPEEMHSWIKAVSGAIVAQRGPGRSASSEHPPGPSESKHAFRPTNAATATSHSTASRSNSLVSTFTMEKRGFYESLAKVKPGNFKVQTVSPREPASKVTEQALLRPQSKNGPQEKDCDLVDLDDASLPVSDV

SEQ ID NO: 36697 - protein, 334 aa, Homo sapiens
MPYVDRQNRICGFLDIEENENSGKFLRRYFILDTREDSFVWYMDNPQNLPSGSSRVGAIKLTYISKVSDATKLRPKAEFCFVMNAGMRKYFLQANDQQDLVEWVNVLNKAIKITVPKQSDSQPNSDNLSRHGECGKKQVSYRTDIVGGVPIITPTQKEEVNECGESIDRNNLKRSQSHLPYFTPKPPQDSAVIKAGYCVKQGAVMKNWKRRYFQLDENTIGYFKSELEKEPLRVIPLKEVHKVQECKQSDIMMRDNLFEIVTTSRTFYVQADSPEEMHSWIKAVSGAIVAQRGPGRSASSMRQARRLSNPCIQRYTSRAGECSTYVGSHANVPS

SEQ ID NO: 36698 - protein, 497 aa, Homo sapiens
MASPAPPEHAEEGCPAPAAEEQAPPSPPPPQASPAERQQQEEEAQEAGAAEGAGLQVEEAAGRAAAAVTWLLGEPVLWLGCRADELLSWKRPLRSLLGFVAANLLFWFLALTPWRVYHLISVMILGRVIMQIIKDMVLSRTRGAQLWRSLSESWEVINSKPDERPRLSHCIAESWMNFSIFLQEMSLFKQQSPGKFCLLVCSVCTFFTILGSYIPGVILSYLLLLCAFLCPLFKCNDIGQKIYSKIKSVLLKLDFGIGEYINQKKRERSEADKEKSHKDDSELDFSALCPKISLTVAAKELSVSDTDVSEVSWTDNGTFNLSEGYTPQTDTSDDLDRPSEEVFSRDLSDFPSLENGMGTNDEDELSLGLPTELKRKKEQLDSGHRPSKETQSAAGLTLPLNSDQTFHLMSNLAGDVITAAVTAAIKDQLEGVQQALSQAAPIPEEDTDTEEGDDFELLDQSELDQIESELGLTQDQEAEAQQNKKSSGFLSNLLGGH

SEQ ID NO: 36699 - protein, 356 aa, Homo sapiens
MPEGEDFGPGKSWEVINSKPDERPRLSHCIAESWMNFSIFLQEMSLFKQQSPGKFCLLVCSVCTFFTILGSYIPGVILSYLLLLCAFLCPLFKCNDIGQKIYSKIKSVLLKLDFGIGEYINQKKRERSEADKEKSHKDDSELDFSALCPKISLTVAAKELSVSDTDVSEVSWTDNGTFNLSEGYTPQTDTSDDLDRPSEEVFSRDLSDFPSLENGMGTNDEDELSLGLPTELKRKKEQLDSGHRPSKETQSAAGLTLPLNSDQTFHLMSNLAGDVITAAVTAAIKDQLEGVQQALSQAAPIPEEDTDTEEGDDFELLDQSELDQIESELGLTQDQEAEAQQNKKSSGFLSNLLGGH

SEQ ID NO: 36700 - protein, 222 aa, Homo sapiens
MAFVKSGWLLRQSTILKRWKKNWFDLWSDGHLIYYDDQTRQNIEDKVHMPMDCINIRTGQECRDTQPPDGKSKDCMLQIVCRDGKTISLCAESTDDCLAWKFTLQDSRTNTAYVGSAVMTDETSVVSSPPPYTAYAAPAPEQAYGYGPYGGAYPPGTQVVYAANGQAYAVPYQYPYAGLYGQQPANQVIIRERYRDNDSDLALGMLAGAATGMALGSLFWVF

SEQ ID NO: 36701 - protein, 309 aa, Homo sapiens
MAFVKSGWLLRQSTILKRWKKNWFDLWSDGHLIYYDDQTRQNIEDKVHMPMDCINIRTGQECRDTQPPDGKSKDCMLQIVCRDGKTISLCAESTDDCLAWKFTLQDSRTNTAYVGSAVMTDETSVVSSPPPYTAYAAPAPEELHSKGPKIHTTTSAKTQAVLPTRCFFPSESPIRRSVQISVLLPAVNIRRRIKLTFPQPARPRAPRSLCLWQTWFAGKRAPSLPTAATAPALPSCPSPPAPSKALPPSLAGWRSPSSAPLPPEQALAPRSFQLSKHQARPRPHRPGTPPVPAWPGVPPPPPARPPALR

SEQ ID NO: 36702 - protein, 221 aa, Homo sapiens
MAFVKSGWLLRQSTILKRWKKNWFDLWSDGHLIYYDDQTRQNIEDKVHMPMDCINIRTGQECRDTQPPDGKSKDCMLQIVCRDGKTISLCAESTDDCLAWKFTLQDSRTNTAYVGSAVMTDETSVVSSPPPYTAYAAPAPEAYGYGPYGGAYPPGTQVVYAANGQAYAVPYQYPYAGLYGQQPANQVIIRERYRDNDSDLALGMLAGAATGMALGSLFWVF

SEQ ID NO: 36703 - protein, 170 aa, Homo sapiens
MAFVKSGWLLRQSTILKRWKKNWFDLWSDGHLIYYDDQTRQNIEDKVHMPMDCINIRTGQECRDTQPPDGKSKDCMLQIVCRDGKTISLCAESTDDCLLMAMGHTVVRTRQELKLSTLRMGRRMPCPTSTHMQDFMDSSLLTKSSFESAIETTTATWHWACWQEQPRAWP

SEQ ID NO: 36704 - protein, 178 aa, Homo sapiens
MAFVKSGWLLRQSTILKRWKKNWFDLWSDGHLIYYDDQTRQNIEDKVHMPMDCINIRTGQECRDTQPPDGKSKDCMLQIVCRDGKTISLCAESTDDCLAWKFTLQDSRTNTAYVGSAVMTDETSVVSSPPPYTAYAAPAPEDFMDSSLLTKSSFESAIETTTATWHWACWQEQPRAWP

SEQ ID NO: 36705 - protein, 230 aa, Homo sapiens
MAFVKSGWLLRQSTILKRWKKNWFDLWSDGHLIYYDDQTRQNIEDKVHMPMDCINIRTGQECRDTQPPDGKSKDCMLQIVCRDGKTISLCAESTDDCLAWKFTLQDSRTNTAYVGSAVMTDETSVVSSPPPYTAYAAPAPEVGRTLSLQQAYGYGPYGGAYPPGTQVVYAANGQAYAVPYQYPYAGLYGQQPANQVIIRERYRDNDSDLALGMLAGAATGMALGSLFWVF

SEQ ID NO: 36706 - protein, 610 aa, Homo sapiens
MWLPLVLLLAVLLLAVLCKVYLGLFSGSSPNPFSEDVKRPPAPLVTDKEARKKVLKQAFSANQVPEKLDVVVIGSGFGGLAAAAILAKAGKRVLVLEQHTKAGGCCHTFGKNGLEFDTGIHYIGRMEEGSIGRFILDQITEGQLDWAPLSSPFDIMVLEGPNGRKEYPMYSGEKAYIQGLKEKFPQEEAIIDKYIKLVKVVSSGAPHAILLKFLPLPVVQLLDRCGLLTRFSPFLQASTQSLAEVLQQLGASSELQAVLSYIFPTYGVTPNHSAFSMHALLVNHYMKGGFYPRGGSSEIAFHTIPVIQRAGGAVLTKATVQSVLLDSAGKACGVSVKKGHELVNIYCPIVVSNAGLFNTYEHLLPGNARCLPGVKQQLGTVRPGLGMTSVFICLRGTKEDLHLPSTNYYVYYDTDMDQAMERYVSMPREEAAEHIPLLFFAFPSAKDPTWEDRFPGRSTMIMLIPTAYEWFEEWQAELKGKRGSDYETFKNSFVEASMSVVLKLFPQLEGKVESVTAGSPLTNQFYLAAPRGACYGADHDLGRLHPCVMASLRAQSPIPNLYLTGQDIFTCGLVGALQGALLCSSAILKRNLYSDLKNLDSRIRAQKKKN

SEQ ID NO: 36707 - protein, 481 aa, Homo sapiens
MWLPLVLLLAVLLLAVLCKVYLGLFSGSSPNPFSEDVKRPPAPLVTDKEARKKVLKQAFSANQVPEKLDVVVIGSGFGGLAAAAILAKAGKRVLVLEQHTKAGGCCHTFGKNGLEFDTGIHYIGRMEEGSIGRFILDQITEGQLDWAPLSSPFDIMVLEGPNGRKEYPMYSGEKAYIQGLKEKFPQEEAIIDKYIKLVKVVSSGAPHAILLKFLPLPVVQLLDRCGLLTRFSPFLQASTQSLAEVLQQLGASSELQAVLSYIFPTYGVTPNHSAFSMHALLVNHYMKGGFYPRGGSSEIAFHTIPVIQRAGGAVLTKATVQSVLLDSAGKACGVSVKKGHELVNIYCPIVVSNAGLFNTYEHLLPGNARCLPGVKQQLGTVRPGLGMTSVFICLRGTKEDLHLPSTNYYVYYDTDMDQAMERYVSMPREEAAEHIPLLFFAFPSAKDPTWEDRFPGGECDCRIPTHQPVLSGCSPRCLLRG

SEQ ID NO: 36708 - protein, 1075 aa, Homo sapiens
MVVEVDSMPAASSVKKPFGLRSKMGKWCCRCFPCCRESGKSNVGTSGDHDDSAMKTLRSKMGKWCRHCFPCCRGSGKSNVGASGDHDDSAMKTLRNKMGKWCCHCFPCCRGSSKSKVGAWGDYDDSAFMEPRYHVRGEDLDKLHRAAWWGKVPRKDLIVMLRDTDVNKQDKQKRTALHLASANGNSEVVKLLLDRRCQLNVLDNKKRTALIKAVQCQEDECALMLLEHGTDPNIPDEYGNTTLHYAIYNEDKLMAKALLLYGADIESKNKHGLTPLLLGVHEQKQQVVKFLIKKKANLNALDRYGRTALILAVCCGSASIVSLLLEQNIDVSSQDLSGQTAREYAVSSHHHVICQLLSDYKEKQMLKISSENSNPEQDLKLTSEEESQRFKGSENSQPEKMSQEPEINKDGDREVEEEMKKHESNNVGLLENLTNGVTAGNGDNGLIPQRKSRTPENQQFPDNESEEYHRICELLSDYKEKQMPKYSSENSNPEQDLKLTSEEESQRLKGSENGQPEKRSQEPEINKDGDRELENFMAIEEMKKHRSTHVGFPENLTNGATAGNGDDGLIPPRKSRTPESQQFPDTENEEYHSDEQNDTQKQFCEEQNTGILHDEILIHEEKQIEVVEKMNSELSLSCKKEKDILHENSTLREEIAMLRLELDTMKHQSQLREKKYLEDIESVKKRNDNLLKALQLNELTMDDDTAVLVIDNGSGMCKAGFAGDDAPRAVFPSIVGRPRQQGMMGGMHQKESYVGKEAQSKRGILTLKYPMEHGIITNWDDMEKIWHHTFYNELRVAPEEHPVLLTEATLNPKANREKMTQIMFETFNTPAMYVAIQAVLSLYTSGRTTGIVMDSGDGVTHTVPIYEGNALPHATLRLDLAGRELPDYLMKILTEHGYRFTTMAEREIVRDIKEKLCYVALDFEQEMATVASSSSLEKSYELPDGQVITIGNERFRCPEALFQPCFLGMESCGIHETTFNSIMKSDVDIRKDLYTNTVLSGGTTMYPGMAHRMQKEIAALAPSMMKIRIIAPPKRKYSVWVGGSILASLSTFQQMWISKQEYDESGPSIVHRKCL

SEQ ID NO: 36709 - protein, 691 aa, Homo sapiens
MEKTESFCPEVPPQDCGASPRPSLRSLPKNQGSLLQFDRQAPGRISTSPTLRRLRTRGCGTRQDAWQVTTWGSWGAPVGFPCYLSKSLPGSPKDSSHLLSPLRLHSRLTSEPERALNAADSLEPQTRPTDKYLPPELQPVNEGSLHQASLRQQEGHFLPSPTLRHPSPQGEELHPSRFYEHRRSSVVLNLPGLEVFPGDLLVSDGAADYLCHPLLLLNSESKKPRWPFSKRGVGKDKHKHISDLENCLSSVKITSFRGYDFYGLKDKTWDEVLETHHKLPTDQLDLKKQQEAVWELFTSECTYFLDHLLVLKMIFMNTLRYLQTHEYLLDVDLWRLFANLEELTQTSLGFVNSLFGIIKDYVDASEISSSLDFISVLTKYFRGSLCQSHQTYCLNYSAAIFYLESLRQRDDFGIYLKWCEQNEQCRRLHVPELLVAPLQRLTRYPLLLKNIWKRSMDSAEKIMIYSIKEKVEKSIRDLEGKVKWLDNFQKFRYLQEIIVWPPLWDRDKRFFIPECLKHIFKEHMAENILSPTSRHLLYEGKLTLAESTRFLDVYLFLFNDFLLVTKTKCNKKKLGGSDPGLMCPSLTPELQAVIKEGGSCTVLDQPIPLDRLVVKSIEPLHVSVFGLRNAFLIQHENRYRQCIAAFLLQAQTENIKKTWMAQITTAISCFTKSQETKKISLFTLPAESSEI

SEQ ID NO: 36710 - protein, 190 aa, Homo sapiens
MEKTESFCPEVPPQDCGASPRPSLRSLPKNQGSLLQFDRQAPGRISTSPTLRRLRTRGCGTRQDAWQVTTWGSWGAPVGFPCYLSKSLPGSPKDSSHLLSPLRLHSRLTSEPERALNAADSLEPQTRPTDKYLPPELQPVNEGSLHQASLRQQEGHFLPSPTLRHPSPQGEELHPSRCVCIYFLRCYDIC

SEQ ID NO: 36711 - protein, 173 aa, Homo sapiens
MEKTESFCPEVPPQDCGASPRPSLRSLPKNQGSLLQFDRQAPGRISTSPTLRRLRTRGCGTRQDAWQVTTWGSWGAPVGFPCYLSKSLPGSPKDSSHLLSPLRLHSRLTSEPERALNAADSLEPQTRPTDKYLPPELQPVNEGSLHQASLRQQEGHFLPSPTLRHPSPQVTQL

SEQ ID NO: 36712 - protein, 756 aa, Homo sapiens
MASAPPASPPGSEPPGPDPEPGGPDGPGAAQLAPGPAELRLGAPVGGPDPQSPGLDEPAPGAAADGGARWSAGPAPGLEGGPRDPGPSAPPPRSGPRGQLASPDAPGPGPRSEAPLPELDPLFSWTEEPEECGPASCPESAPFRLQGSSSSHRARGEVDVFSPFPAPTAGELALEQGPGSPPQPSDLSQTHPLPSEPVGSQEDGPRLRAVFDALDGDGDGFVRIEDFIQFATVYGAEQVKDLTKYLDPSGLGVISFEDFYQGITAIRNGDPDGQCYGGVASAQDEEPLACPDEFDDFVTYEANEVTDSAYMGSESTYSECETFTDEDTSTLVHPELQPEGDADSAGGSAVPSECLDAMEEPDHGALLLLPGRPHPHGQSVITVIGGEEHFEDYGEGSEAELSPETLCNGQLGCSDPAFLTPSPTKRLSSKKVARYLHQSGALTMEALEDPSPELMEGPEEDIADKVVFLERRVLELEKDTAATGEQHSRLRQENLQLVHRANALEEQLKEQELRACEMVLEETRRQKELLCKMEREKSIEIENLQTRLQQLDEENSELRSCTPCLKANIERLEEEKQKLLDEIESLTLRLSEEQENKRRMGDRLSHERHQFQRDKEATQELIEDLRKQLEHLQLLKLEAEQRRGRSSSMGLQEYHSRARESELEQEVRRLKQDNRNLKEQNEELNGQIITLSIQGAKSLFSTAFSESLAAEISSVSRDELMEAIQKQEEINFRLQDYIDRIIVAIMETNPSILEVK

SEQ ID NO: 36713 - protein, 460 aa, Homo sapiens
MPFLKANEVTDSAYMGSESTYSECETFTDEDTSTLVHPELQPEGDADSAGGSAVPSECLDAMEEPDHGALLLLPGRPHPHGQSVITVIGGEEHFEDYGEGSEAELSPETLCNGQLGCSDPAFLTPSPTKRLSSKKVARYLHQSGALTMEALEDPSPELMEGPEEDIADKVVFLERRVLELEKDTAATGEQHSRLRQENLQLVHRANALEEQLKEQELRACEMVLEETRRQKELLCKMEREKSIEIENLQTRLQQLDEENSELRSCTPCLKANIERLEEEKQKLLDEIESLTLRLSEEQENKRRMGDRLSHERHQFQRDKEATQELIEDLRKQLEHLQLLKLEAEQRRGRSSSMGLQEYHSRARESELEQEVRRLKQDNRNLKEQNEELNGQIITLSIQGAKSLFSTAFSESLAAEISSVSRDELMEAIQKQEEINFRLQDYIDRIIVAIMETNPSILEVK

SEQ ID NO: 36714 - protein, 801 aa, Homo sapiens
MASAPPASPPGSEPPGPDPEPGGPDGPGAAQLAPGPAELRLGAPVGGPDPQSPGLDEPAPGAAADGGARWSAGPAPGLEGGPRDPGPSAPPPRSGPRGQLASPDAPGPGPRSEAPLPELDPLFSWTEEPEECGPASCPESAPFRLQGSSSSHRARGEVDVFSPFPAPTAGELALEQGPGSPPQPSDLSQTHPLPSEPVGSQEDGPRLRAVFDALDGDGDGFVRIEDFIQFATVYGAEQVKDLTKYLDPSGLGVISFEDFYQGITAIRNGDPDGQCYGGVASAQDEEPLACPDEFDDFVTYEANEVTDSAYMGSESTYSECETFTDEDTSTLVHPELQPEGDADSAGGSAVPSECLDAMEEPDHGALLLLPGRPHPHGQSVITVIGGEEHFEDYGEGSEAELSPETLCNGQLGCSDPAFLTPSTDPLAAKLHSILTDEAFEFYCSQCHKQINRLEDLSARLSDLEMNSPTKRLSSKKVARYLHQSGALTMEALEDPSPELMEGPEEDIADKVVFLERRVLELEKDTAATGEQHSRLRQENLQLVHRANALEEQLKEQELRACEMVLEETRRQKELLCKMEREKSIEIENLQTRLQQLDEENSELRSCTPCLKANIERLEEEKQKLLDEIESLTLRLSEEQENKRRMGDRLSHERHQFQRDKEATQELIEDLRKQLEHLQLLKLEAEQRRGRSSSMGLQEYHSRARESELEQEVRRLKQDNRNLKEQNEELNGQIITLSIQGAKSLFSTAFSESLAAEISSVSRDELMEAIQKQEEINFRLQDYIDRIIVAIMETNPSILEVK

SEQ ID NO: 36715 - protein, 1659 aa, Homo sapiens
MEAPSGSEPGGDGAGDCAHPDPRAPGAAAPSSGPGPCAAARESERQLRLRLCVLNEILGTERDYVGTLRFLQSAFLHRIRQNVADSVEKGLTEENVKVLFSNIEDILEVHKDFLAALEYCLHPEPQSQHELGNVFLKFKDKFCVYEEYCSNHEKALRLLVELNKIPTVRAFLLSCMLLGGRKTTDIPLEGYLLSPIQRICKYPLLLKELAKRTPGKHPDHPAVQSALQAMKTVCSNINETKRQMEKLEALEQLQSHIEGWEGSNLTDICTQLLLQGTLLKISAGNIQERAFFLFDNLLVYCKRKSRVTGSKKSTKRTKSINGSLYIFRGRINTEVMEVENVEDGTADYHSNGYTVTNGWKIHNTAKNKWFVCMAKTAEEKQKWLDAIIREREQRESLKLGMERDAYVMIAEKGEKLYHMMMNKKVNLIKDRRRKLSTVPKCFLGNEFVAWLLEIGEISKTEEGVNLGQALLENGIIHHVSDKHQFKNEQVMYRFRYDDGTYKARSELEDIMSKGVRLYCRLHSLYTPVIKDRDYHLKTYKSVLPGSKLVDWLLAQGDCQTREEAVALGVGLCNNGFMHHVLEKSEFRDESQYFRFHADEEMEGTSSKNKQLRNDFKLVENILAKRLLILPQEEDYGFDIEEKNKAVVVKSVQRGSLAEVAGLQVGRKIYSINEDLVFLRPFSEVESILNQSFCSRRPLRLLVATKAKEIIKIPDQPDTLCFQIRGAAPPYVYAVGRGSEAMAAGLCAGQCILKVNGSNVMNDGAPEVLEHFQAFRSRREEALGLYQWIYHTHEDAQEARASQEASTEDPSGEQAQEEDQADSAFPLLSLGPRLSLCEDSPMVTLTVDNVHLEHGVVYEYVSTAGVRCHVLEKIVEPRGCFGLTAKILEAFAANDSVFVENCRRLMALSSAIVTMPHFEFRNICDTKLESIGQRIACYQEFAAQLKSRVSPPFKQAPLEPHPLCGLDFCPTNCHINLMEVSYPKTTPSVGRSFSIRFGRKPSLIGLDPEQGHLNPMSYTQHCITTMAAPSWKCLPAAEGDPQGQGLHDGSFGPASGTLGQEDRGLSFLLKQEDREIQDAYLQLFTKLDVALKEMKQYVTQINRLLSTITEPTSGGSCDASLAEEASSLPLVSEESEMDRSDHGGIKKVCFKVAEEDQEDSGHDTMSYRDSYSECNSNRDSVLSYTSVRSNSSYLGSDEMGSGDELPCDMRIPSDKQDKLHGCLEHLFNQVDSINALLKGPVMSRAFEETKHFPMNHSLQEFKQKEECTIRGRSLIQISIQEDPWNLPNSIKTLVDNIQRYVEDGKNQLLLALLKCTDTELQLRRDAIFCQALVAAVCTFSKQLLAALGYRYNNNGEYEESSRDASRKWLEQVAATGVLLHCQSLLSPATVKEERTMLEDIWVTLSELDNVTFSFKQLDENYVANTNVFYHIEGSRQALKVIFYLDSYHFSKLPSRLEGGASLRLHTALFTKVLENVEGLPSPGSQAAEDLQQDINAQSLEKVQQYYRKLRAFYLERSNLPTDASTTAVKIDQLIRPINALDELCRLMKSFVHPKPGAAGSVGAGLIPISSELCYRLGACQMVMCGTGMQRSTLSVSLEQAAILARSHGLLPKCIMQATDIMRKQGPRVEILAKNLRVKDQMPQGAPRLYRLCQPPVDGDL

SEQ ID NO: 36716 - protein, 956 aa, Homo sapiens
MGLEQIIKIPDQPDTLCFQIRGAAPPYVYAVGRGSEAMAAGLCAGQCILKVNGSNVMNDGAPEVLEHFQAFRSRREEALGLYQWIYHTHEDAQEARASQEASTEDPSGEQAQEEDQADSAFPLLSLGPRLSLCEDSPMVTLTVDNVHLEHGVVYEYVSTAGVRCHVLEKIVEPRGCFGLTAKILEAFAANDSVFVENCRRLMALSSAIVTMPHFEFRNICDTKLESIGQRIACYQEFAAQLKSRVSPPFKQAPLEPHPLCGLDFCPTNCHINLMEVSYPKTTPSVGRSFSIRFGRKPSLIGLDPEQGHLNPMSYTQHCITTMAAPSWKCLPAAEGDPQGQGLHDGSFGPASGTLGQEDRGLSFLLKQEDREIQDAYLQLFTKLDVALKEMKQYVTQINRLLSTITEPTSGGSCDASLAEEASSLPLVSEESEMDRSDHGGIKKVCFKVAEEDQEDSGHDTMSYRDSYSECNSNRDSVLSYTSVRSNSSYLGSDEMGSGDELPCDMRIPSDKQDKLHGCLEHLFNQVDSINALLKGPVMSRAFEETKHFPMNHSLQEFKQKEECTIRGRSLIQISIQEDPWNLPNSIKTLVDNIQRYVEDGKNQLLLALLKCTDTELQLRRDAIFCQALVAAVCTFSKQLLAALGYRYNNNGEYEESSRDASRKWLEQVAATGVLLHCQSLLSPATVKEERTMLEDIWVTLSELDNVTFSFKQLDENYVANTNVFYHIEGSRQALKVIFYLDSYHFSKLPSRLEGGASLRLHTALFTKVLENVEGLPSPGSQAAEDLQQDINAQSLEKVQQYYRKLRAFYLERSNLPTDASTTAVKIDQLIRPINALDELCRLMKSFVHPKPGAAGSVGAGLIPISSELCYRLGACQMVMCGTGMQRSTLSVSLEQAAILARSHGLLPKCIMQATDIMRKQGPRVEILAKNLRVKDQMPQGAPRLYRLCQPPVDGDL

SEQ ID NO: 36717 - protein, 1561 aa, Homo sapiens
MEAPSGSEPGGDGAGDCAHPDPRAPGAAAPSSGPGPCAAARESERQLRLRLCVLNEILGTERDYVGTLRFLQSAFLHRIRQNVADSVEKGLTEENVKVLFSNIEDILEVHKDFLAALEYCLHPEPQSQHELGNVFLKFKDKFCVYEEYCSNHEKALRLLVELNKIPTVRAFLLSCMLLGGRKTTDIPLEGYLLSPIQRICKYPLLLKELAKRTPGKHPDHPAVQSALQAMKTVCSNINETKRQMEKLEALEQLQSHIEGWEGSNLTDICTQLLLQGTLLKISAGNIQERAFFLFDNLLVYCKRKSRVTGSKKSTKRTKSINGSLYIFRGRINTEVMEVENVEDGTADYHSNGYTVTNGWKIHNTAKNKWFVCMAKTAEEKQKWLDAIIREREQRESLKLGMERDAYVMIAEKGEKLYHMMMNKKVNLIKDRRRKLSTVPKCFLGNEFVAWLLEIGEISKTEEGVNLGQALLENGIIHHVSDKHQFKNEQVMYRFRYDDGTYKARSELEDIMSKGVRLYCRLHSLYTPVIKDRDYHLKTYKSVLPGSKLVDWLLAQGDCQTREEAVALGVGLCNNGFMHHVLEKSEFRDESQYFRFHADEEMEGTSSKNKQLRNDFKLVENILAKRLLILPQEEDYGFDIEEKNKAVVVKSVQRGSLAEVAGLQVGRKIYSINEDLVFLRPFSEVESILNQSFCSRRPLRLLVATKAKEIIKIPDQPDTLCFQIRGAAPPYVYAVGRGSEAMAAGLCAGQCILKVNGSNVMNDGAPEVLEHFQAFRSRREEALGLYQWIYHTHEDAQEARASQEASTEDPSGEQAQEEDQADSAFPLLSLGPRLSLCEDSPMVTLTVDNVHLEHGVVYEYVSTAGVRCHVLEKIVEPRGCFGLTAKILEAFAANDSVFVENCRRLMALSSAIVTMPHFEFRNICDTKLESIGQRIACYQEFAAQLKSRVSPPFKQAPLEPHPLCGLDFCPTNCHINLMEVSYPKTTPSVGRSFSIRFGRKPSLIGLDPEQGHLNPMSYTQHCITTMAAPSWKCLPAAEGDPQGQGLHDGSFGPASGTLGQEDRGLSFLLKQEDREIQDAYLQLFTKLDVALKEMKQYVTQINRLLSTITEPTSGGSCDASLAEEASSLPLVSEESEMDRSDHGGIKKVCFKVAEEDQEDSGHDTMSYRDSYSECNSNRDSVLSYTSVRSNSSYLGSDEMGSGDELPCDMRIPSDKQDKLHGCLEHLFNQVDSINALLKGPVMSRAFEETKHFPMNHSLQEFKQKEECTIRGRSLIQISIQEDPWNLPNSIKTLVDNIQRYVEDGKNQLLLALLKCTDTELQLRRDAIFCQALVAAVCTFSKQLLAALGYRYNNNGEYEESSRDASRKWLEQVAATGVLLHCQSLLSPATVKEERTMLEDIWVTLSELDNVTFSFKQLDENYVANTNVFYHIEGSRQALKVIFYLDSYHFSKLPSRLEGGASLRLHTALFTKGELQAWGREDHGGRAKATKHTGSQPPARPRHLPSQCWRTWRGCLLQAARPRRICSRTSTRSPWRKFSSITANSGHFTWSGLTCPRMPAPRR

SEQ ID NO: 36718 - protein, 397 aa, Homo sapiens
MNCEREQLRGNQEAAAAPDTMAQPYASAQFAPPQNGIPAEYTAPHPHPAPEYTGQTTVPEHTLNLYPPAQTHSEQSPADTSAQTVSGTATQTDDAAPTDGQPQTQPSENTENKSQPKRLHVSNIPFRFRDPDLRQMFGQFGKILDVEIIFNERGSKGFGFVTFENSADADRAREKLHGTVVEGRKIEVNNATARVMTNKKTVNPYTNGWKLNPVVGAVYSPEFYAGTVLLCQANQEGSSMYSAPSSLVYTSAMPGFPYPAATAAAAYRGAHLRGRGRTVYNTFRAAAPPPPIPAYGGVVYQDGFYGADIYGGYAAYRYAQPTPATAAAYSDSYGRVYAADPYHHALAPAPTYGVGAMNAFAPLTDAKTRSHADDVGLVLSSLQASIYRGGYNRFAPY

SEQ ID NO: 36719 - protein, 418 aa, Homo sapiens
MLASQGVLLHPYGVPMIVPAAPYLPGLIQGNQEAAAAPDTMAQPYASAQFAPPQNGIPAEYTAPHPHPAPEYTGQTTVPEHTLNLYPPAQTHSEQSPADTSAQTVSGTATQTDDAAPTDGQPQTQPSENTENKSQPKRLHVSNIPFRFRDPDLRQMFGQFGKILDVEIIFNERGSKGFGFVTFENSADADRAREKLHGTVVEGRKIEVNNATARVMTNKKTVNPYTNGWKLNPVVGAVYSPEFYAGTVLLCQANQEGSSMYSAPSSLVYTSAMPGFPYPAATAAAAYRGAHLRGRGRTVYNTFRAAAPPPPIPAYGGVVYQEPVYGNKLLQGGYAAYRYAQPTPATAAAYSDSYGRVYAADPYHHALAPAPTYGVGAMNAFAPLTDAKTRSHADDVGLVLSSLQASIYRGGYNRFAPY

SEQ ID NO: 36720 - protein, 370 aa, Homo sapiens
MNCEREQLRGNQEAAAAPDTMAQPYASAQFAPPQNGIPAEYTAPHPHPAPEYTGQTTVPEHTLNLYPPAQTHSEQSPADTSAQTVSGTATQTDDAAPTDGQPQTQPSENTENKSQPKRLHVSNIPFRFRDPDLRQMFGQFGKILDVEIIFNERGSKGFGFVTFENSADADRAREKLHGTVVEGRKIEVNNATARVMTNKKTVNPYTNGWKLNPVVGAVYSPEFYAVPGFPYPAATAAAAYRGAHLRGRGRTVYNTFRAAAPPPPIPAYGGVVYQDGFYGADIYGGYAAYRYAQPTPATAAAYSDSYGRVYAADPYHHALAPAPTYGVGAMNAFAPLTDAKTRSHADDVGLVLSSLQASIYRGGYNRFAPY

SEQ ID NO: 36721 - protein, 392 aa, Homo sapiens
MLASQGVLLHPYGVPMIVPAAPYLPGLIQGNQEAAAAPDTMAQPYASAQFAPPQNGIPAEYTAPHPHPAPEYTGQTTVPEHTLNLYPPAQTHSEQSPADTSAQTVSGTATQTDDAAPTDGQPQTQPSENTENKSQPKRLHVSNIPFRFRDPDLRQMFGQFGKILDVEIIFNERGSKGFGFVTFENSADADRAREKLHGTVVEGRKIEVNNATARVMTNKKTVNPYTNGWKLNPVVGAVYSPEFYAGTVLLCQANQEGSSMYSAPSSLVYTSAMPGFPYPAATAAAAYRGAHLRGRGRTVYNTFRAAAPPPPIPAYGGVVYQEPVYGNKLLQGGYAAYRYAQPTPATAAAYSDSYGRVYAADPYHHALAPAPTYGVGAMASIYRGGYNRFAPY

SEQ ID NO: 36722 - protein, 395 aa, Homo sapiens
MLASQGVLLHPYGVPMIVPAAPYLPGLIQGNQEAAAAPDTMAQPYASAQFAPPQNGIPAEYTAPHPHPAPEYTGQTTVPEHTLNLYPPAQTHSEQSPADTSAQTVSGTATQTDDAAPTDGQPQTQPSENTENKSQPKRLHVSNIPFRFRDPDLRQMFGQFGKILDVEIIFNERGSKGFGFVTFENSADADRAREKLHGTVVEGRKIEVNNATARVMTNKKTVNPYTNGWKLNPVVGAVYSPEFYAGTVLLCQANQEGSSMYSAPSSLVYTSAMPGFPYPAATAAAAYRGAHLRGRGRTVYNTFRAAAPPPPIPAYGGVVYQEPVYGNKLLQGGYAAYRYAQPTPATAAAYSDRNQFVFVAADEISCNTSAVTDEFMLPTPTTTHLLQPPPTALVP

SEQ ID NO: 36723 - protein, 1148 aa, Homo sapiens
MDIRKFFGVIPSGKKLVSETVKKNEKTKSDEETLKAKKGIKEIKVNSSRKEDDFKQKQPSKKKRIIYDSDSESEETLQVKNAKKPPEKLPVSSKPGKISRQDPVTYISETDEEDDFMCKKAASKSKENGRSTNSHLGTSNMKKNEENTKTKNKPLSPIKLTPTSVLDYFGTGSVQRSNKKMVASKRKELSQNTDESGLNDEAIAKQLQLDEDAELERQLHEDEEFARTLAMLDEEPKTKKARKDTEAGETFSSVQANLSKAEKHKYPHKVKTAQVSDERKSYSPRKQSKYESSKESQQHSKSSADKIGEVSSPKASSKLAIMKRKEESSYKEIEPVASKRKENAIKLKGETKTPKKTKSSPAKKESVSPEDSEKKRTNYQAYRSYLNREGPKALGSKEIPKGAENCLEGLIFVITGVLESIERDEAKSLIERYGGKVTGNVSKKTNYLVMGRDSGQSKSDKAAALGTKIIDEDGLLNLIRTMPGKKSKYEIAVETEMKKESKLERTPQKNVQGKRKISPSKKESESKKSRPTSKRDSLAKTIKKETDVFWKSLDFKEQVAEETSGDSKARNLADDSSENKVENLLWVDKYKPTSLKTIIGQQGDQSCANKLLRWLRNWQKSSSEDKKHAAKFGKFSGKDDGSSFKAALLSGPPGVGKTTTASLVCQELGYSYVELNASDTRSKSSLKAIVAESLNNTSIKGFYSNGAASSVSTKHALIMDEVDGMAGNEDRGGIQELIGLIKHTKIPIICMCNDRNHPKIRSLVHYCFDLRFQRPRVEQIKGAMMSIAFKEGLKIPPPAMNEIILGANQDIRQVLHNLSMWCARSKALTYDQAKADSHRAKKDIKMGPFDVARKVFAAGEETAHMSLVDKSDLFFHDYSIAPLFVQENYIHVKPVAAGGDMKKHLMLLSRAADSICDGDLVDSQIRSKQNWSLLPAQAIYASVLPGELMRGYMTQFPTFPSWLGKHSSTGKHDRIVQDLALHMSLRTYSSKRTVNMDYLSLLRDALVQPLTSQGVDGVQDVVALMDTYYLMKEDFENIMEISSWGGKPSPFSKLDPKVKAAFTRAYNKEAHLTPYSLQAIKASRHSTSPSLDSEYNEELNEDDSQSDEKDQDAIETDAMIKKKTKSSKPSKPEKDKEPRKGKGKSSKK

SEQ ID NO: 36724 - protein, 1147 aa, Homo sapiens
MDIRKFFGVIPSGKKLVSETVKKNEKTKSDEETLKAKKGIKEIKVNSSRKEDDFKQKQPSKKKRIIYDSDSESEETLQVKNAKKPPEKLPVSSKPGKISRQDPVTYISETDEEDDFMCKKAASKSKENGRSTNSHLGTSNMKKNEENTKTKNKPLSPIKLTPTSVLDYFGTGSVQRSNKKMVASKRKELSQNTDESGLNDEAIAKQLQLDEDAELERQLHEDEEFARTLAMLDEEPKTKKARKDTEAGETFSSVQANLSKAEKHKYPHKVKTAQVSDERKSYSPRKQSKYESSKESQQHSKSSADKIGEVSSPKASSKLAIMKRKEESSYKEIEPVASKRKENAIKLKGETKTPKKTKSSPAKKESVSPEDSEKKRTNYQAYRSYLNREGPKALGSKEIPKGAENCLEGLIFVITGVLESIERDEAKSLIERYGGKVTGNVSKKTNYLVMGRDSGQSKSDKAAALGTKIIDEDGLLNLIRTMPGKKSKYEIAVETEMKKESKLERTPQKNVQGKRKISPSKKESESKKSRPTSKRDSLAKTIKKETDVFWKSLDFKEQVAEETSGDSKARNLADDSSENKVENLLWVDKYKPTSLKTIIGQQGDQSCANKLLRWLRNWQKSSSEDKKHAKFGKFSGKDDGSSFKAALLSGPPGVGKTTTASLVCQELGYSYVELNASDTRSKSSLKAIVAESLNNTSIKGFYSNGAASSVSTKHALIMDEVDGMAGNEDRGGIQELIGLIKHTKIPIICMCNDRNHPKIRSLVHYCFDLRFQRPRVEQIKGAMMSIAFKEGLKIPPPAMNEIILGANQDIRQVLHNLSMWCARSKALTYDQAKADSHRAKKDIKMGPFDVARKVFAAGEETAHMSLVDKSDLFFHDYSIAPLFVQENYIHVKPVAAGGDMKKHLMLLSRAADSICDGDLVDSQIRSKQNWSLLPAQAIYASVLPGELMRGYMTQFPTFPSWLGKHSSTGKHDRIVQDLALHMSLRTYSSKRTVNMDYLSLLRDALVQPLTSQGVDGVQDVVALMDTYYLMKEDFENIMEISSWGGKPSPFSKLDPKVKAAFTRAYNKEAHLTPYSLQAIKASRHSTSPSLDSEYNEELNEDDSQSDEKDQDAIETDAMIKKKTKSSKPSKPEKDKEPRKGKGKSSKK

SEQ ID NO: 36725 - protein, 481 aa, Homo sapiens
MRMSLQAPRRLLELAGQSLLGDQALAISILDELPRELFPPLFVEAFTSRRCEVLKVMVQAWPFPCLPLGSLMKTPDLEILHYVVDGIDCLLAQKVRPRRWKLQVLELRDVDENFWTIWSGARPLSCSPEAMSKRQTVEDCPRTGEKQPLKVFMDVCLKEKFMDEDLSFFSGWVQHRRGSVHLCCTKVVNYSMSILNFRNILETVYPDSIQVLEIWNMCWPCMIVEFSRYLSQMRNLRKLFISDGCRYLLSSDSQEQLVAEFSSVLLRLEYLQMLYVRRVCFFRGHLDQLIRCLRSPLETLALTYGFLEKVDLKCLPRYPSLSQLKQLNLSHGALRFIRLEPLRALLEKVAATLQTLFLVDCGIRDSKLRVILPALSCCSNLTTFCFHGNDTSMDGLKDLLRHTGRLSNLSLETYPAPRESLDDRGRVISELLTPLQAELMRILREVREPKRIFFGPVSCPCCGTSPTEQLEFNFCLWGRPA

SEQ ID NO: 36726 - protein, 478 aa, Homo sapiens
MKMSIRTPPRLLELAGRSVLRDQALAMSTLEELPTELFPPLFMEAFSRRRCEALKLMVQAWPFRRLPLRPLIKMPCLETFQAVLNGLDALLTHGVRPRRWKLQVLDLQDVCENFWMVWSEAMARGCFLNAKRNKKPVQDCPRMRGRQPLTVFVELWLKNRTLDEHLTCLLLWVKQRKDLLHLCCKKLKILGMPFRNIRSILKMVNLDCIQEVEVNCKWVLPILTQFTPYLGHMRNLQKLVLSHMDVSRYVSPEQKKEIVTQFTTQFLKLHCLQKLYMNSVSFLEGHLDQLLSCLKTSLKVLTITNCVLLESDLKHLSQCPSISQLKTLDLSGIRLTNYSLVPLQILLEKVAATLEYLDLDDCGIIDSQVNAILPALSRCFELNTFSFCGNPISMATLENLLSHTIILKNLCLELYPAPRESYGADGTLCWSRFTQIRAELMKRVRDLRHPKRILFGTDYCPDCGNRSFYDLEADQYCC

SEQ ID NO: 36727 - protein, 312 aa, Homo sapiens
MAQPYPPAQYPPPPQNGIPAEYAPPPPHPTQDYSGQTPVPTEHGMTLYTPAQTHPEQPGSEASTQPIAGTQTVPQTDEAAQTDSQPLHPSDPTEKQQPKRLHVSNIPFRFRDPDLRQMFGQFGKILDVEIIFNERGSKGFGFVTFETSSDADRAREKLNGTIVEGRKIEVNNATARVMTNKKTGNPYTNGWKLNPVVGAVYGPEFYAVTGFPYPTTGTAVAYRGAHLRGRGRAVYNTFRAAPPPPPIPTYGAVVYQDGFYGAEIYGGYAAYRYAQPAAAAAAYSDSYGRVYAAADPYHHTIGPAATYSIGTM

SEQ ID NO: 36728 - protein, 325 aa, Homo sapiens
MAQPYPPAQYPPPPQNGIPAEYAPPPPHPTQDYSGQTPVPTEHGMTLYTPAQTHPEQPGSEASTQPIAGTQTVPQTDEAAQTDSQPLHPSDPTEKQQPKRLHVSNIPFRFRDPDLRQMFGQFGKILDVEIIFNERGSKGFGFVTFETSSDADRAREKLNGTIVEGRKIEVNNATARVMTNKKTGNPYTNGWKLNPVVGAVYGPEFYAVTGFPYPTTGTAVAYRGAHLRGRGRAVYNTFRAAPPPPPIPTYGAVVYQDGFYGAEIYGGYAAYRYAQPAAAAAAYSDSYGRVYAAADPYHHTIGPAATYSIGTMVRSPGPPSPGCQS

SEQ ID NO: 36729 - protein, 474 aa, Homo sapiens
MSIQAPPRLLELAGQSLLRDQALSISAMEELPRVLYLPLFMEAFSRRHFQTLTVMVQAWPFTCLPLGSLMKTLHLETLKALLEGLHMLLTQKDRPRRWKLQVLDLRDVDENFWARWPGAWALSCFPETTSKRQTAEDCPRMGEHQPLKVFIDICLKEIPQDECLRYLFQWVYQRRGLVHLCCSKLVNYLTPIKYLRKSLKIIYLNSIQELEIRNMSWPRLIRKLRCYLKEMKNLRKLVFSRCHHYTSDNELEGRLVAKFSSVFLRLEHLQLLKIKLITFFSGHLEQLIRCLQNPLENLELTYGYLLEEDMKCLSQYPSLGYLKHLNLSYVLLFRISLEPLGALLEKIAASLKTLILEGCQIHYSQLSAILPGLSRCSQLTTFYFGRNCMSIDALKDLLRHTSGLSKLSLETYPAPEESLNSLVRVNWEIFTPLRAELMCTLREVRQPKRIFIGPTPCPSCGSSPSEELELHLCC

SEQ ID NO: 36730 - protein, 2229 aa, Homo sapiens
MSDRLGQITKGKDGKSKYSTLSLFDKYKGKSVDAIRSSVIPRHGLQSLGKVAAARRMPPPANLPSLKSENKGNDPNIVIVPKDGTGWANKQDQQDPKSSSATASQPPESLPQPGLQKSVSNLQKPTQSISQENTNSVPGGPKSWAQLNGKPVGHEGGLRGSSRLLSFSPEEFPTLKAAGGQDKAGKEKGVLDLSYGPGPSLRPQNVTSWREGGGRHIISATSLSTSPTELGSRNSSTGDGAPSSACTSDSKDPSLRPAQPVRKGASQFMGNVYHPPTYHDMLPAFMCSPKSSENQGTVERGSFPLPQLRLEPRVPFRQFQMNDQDGKENRLGLSRPLRPLRQLVERAPRPTIINAENLKGLDDLDADADDGWAGLHEEVDYSEKLKFSDDEEEEEVVKDGRPKWNSWDPRRQRQLSMSSADSADAKRTREEGKDWAEAVGASRVVRKAPDPQPPPRKLHGWAPGPDYQKSSMGSMFRQQSIEDKEDKPPPRQKFIQSEMSEAVERARKRREEEERRAREERLAACAAKLKQLDQKCKQARKAGEARKQAEKEVPWSPSAEKASPQENGPAVHKGSPEFPAQETPTTFPEEAPTVSPAVAQSNSSEEEAREAGSPAQEFKYQKSLPPRFQRQQQQQQQEQLYKMQHWQPVYPPPSHPQRTFYPHHPQMLGFDPRWMMMPSYMDPRITPTRTPVDFYPSALHPSGLMKPMMPQESLNGTGCRSEDQNCVPPLQERKVTPIDSPPVWSPEGYMALQSKGYPLPHPKSSDTLAMDMRVRNESSFSASLGRAGGVSAQRDLFEERGEEYLSAFDKKAQADFDSCISSQRIGQELLFPPQENVQDAGAPGGHTQNLRCSPLEPDFVPDEKKPECGSWDVSHQPETADTAHGVERETPREGTAFNISSWDKNGSPNKQPSSEPEWTPEPRSSSSQHPEQTGRTRRSGPIKKPVLKALKVEDKEKELEKIKQELGEESTRLAKEKEQSPTAEKDEDEENDASLANSSTTTLEDKGPGHATFGREATKFEEEEKPDKAWEARPPRESSDVPPMKRNNWIFIDEEQAFGVRGQARGRGRGFREFTFRGRPAGGNGSGLCGGGVLGARSIYCSSQRSGRGRGLREFARPEDCPRAKPRRRVASETHSEGSEYEELPKRRRQRGSENGNEGSLLEREESTLKKGDCRDSWRSNKGCSEDHSGLDAKSRGPRAFGRALPPRLSNCGYGRRTFVSKESPHWQSKSPGSSWQEYGPSDTCGSRRPTDRDYVPDSYRHPDAFGGRGFEDSRAEDKRSFFQDEHVADSENAENRPFRRRRPPRQDKPPRFRRLRQERESLGLWGPEEEPHLLAGQWPGRPKLCSGDKSGTVGRRSPELSYQNSSDHANEEWETASESSDFSERRERREGPGSEPDSQVDGGLSGASLGEKKELAKRSFSSQRPVVDRQSRKLEPGGFGEKPVRPGGGDTSPRYESQQNGTPLKVKRSPDEALPGGLSGCSSGSGHSPYALERAAHASADLPEASSKKAEKEAKLAAPRAGEQGEAMKQFDLNYGSAIIENCGSSPGEESEVGSMVGEGFIEVLTKKQRRLLEEERRKKEQAVQVPVKGRGLSSRIPPRFAKKQNNLCLEQGDVTVPGSSLGTEIWESSSQALPVQAPANDSWRKAVTAFSSTETGSAEQGFKSSQGDSGVDLSAESRESSATSSQRSSPYGTLKPEEMSGPGLAEPKADSHKEQAPKPSEQKDSEQGSGQSKEHRPGPIGNERSLKNRKGSEGAERLQGAVVPPVNGVEIHVDSVLPVPPIEFGVSPKDSDFSLPPGSASGPTGSPVVKLQDALASNAGLTQSIPILRRDHHIQRAIGLSPMSFPTADLTLKMESARKAWENSPSLPEQSSPGGAGSGIQPPSSVGASSGVNYSSFGGVSMPPMPVASVAPSASMPGSHLPPLYLDGHVFASQPRLVPQTIPQQQSYQQAAAAQQIPISLHTSLQAQAQLGLRGGLPVSQSQEIFSSLQPFRSQVYMHPSLSPPSTMILSGGTALKPPYSAFPGMQPLEMVKPQSGSPYQPMSGNQALVYEGQLSQAAGLGASQMLDSQLPQLTMPLPRYGSGQQPLILPQSIQLPPGQSLSVGAPRRIPPPGSQPPVLNTSREPSQMEMKGFHFADSKQNVPSGGPVPSPQTYRPSSASPSGKPSGSAVNMGSVQGHYVQQAKQRVDEKPSLGAVKLQEAPSAASQMKRTGAIKPRAVKVEESKA

SEQ ID NO: 36731 - protein, 326 aa, Homo sapiens
MPPMPVASVAPSASMPGSHLPPLYLDGHVFASQPRLVPQTIPQQQSYQQAAAAQQIPISLHTSLQAQAQLGLRGGLPVSQSQEIFSSLQPFRSQVYMHPSLSPPSTMILSGGTALKPPYSAFPGMQPLEMVKPQSGSPYQPMSGNQALVYEGQLSQAAGLGASQMLDSQLPQLTMPLPRYGSGQQPLILPQSIQLPPGQSLSVGAPRRIPPPGSQPPVLNTSREPSQMEMKGFHFADSKQNVPSGGPVPSPQTYRPSSASPSGKPSGSAVNMGSVQGHYVQQAKQRVDEKPSLGAVKLQEAPSAASQMKRTGAIKPRAVKVEESKA

SEQ ID NO: 36732 - protein, 327 aa, Homo sapiens
MPPMPVASVAPSASMPGSHLPPLYLDGHVFASQPRLVPQTIPQQQSYQQAAAAQQIPISLHTSLQAQAQLGLRGGLPVSQSQEIFSSLQPFRSQVYMHPSLSPPSTMILSGGTALKPPYSAFPGMQPLEMVKPQSGSPYQPMSGNQALVYEGQLSQAAGLGASQMLDSQLPQQLTMPLPRYGSGQQPLILPQSIQLPPGQSLSVGAPRRIPPPGSQPPVLNTSREPSQMEMKGFHFADSKQNVPSGGPVPSPQTYRPSSASPSGKPSGSAVNMGSVQGHYVQQAKQRVDEKPSLGAVKLQEAPSAASQMKRTGAIKPRAVKVEESKA

SEQ ID NO: 36733 - protein, 268 aa, Homo sapiens
MPPMPVASVAPSASMPGSHLPPLYLDGHVFASQPRLVPQTIPQQQSYQQAAAAQQIPISLHTSLQAQAQLGLRGGLPVSQSQEIFSSLQPFRSQVYMHPSLSPPSTMILSGGTALKPPYSAFPGMQPLEMVKPQSGSPYQPMSGNQALVYEGQLSQAAGLGASQMLDSQLPQLTMPLPRYGSGQQPLILPQSIQLPPGQSLSVGAPRRIPPPGSQPPVLNTSREPSQMEMKGFHFADSKQNVPSGGPVPSPQTYRQNNEWMRNPAWEP

SEQ ID NO: 36734 - protein, 1535 aa, Homo sapiens
MSDRLGQITKGKDGKSKYSTLSLFDKYKGKSVDAIRSSVIPRHGLQSLGKVAAARRMPPPANLPSLKSENKGNDPNIVIVPKDGTGWANKQDQQDPKSSSATASQPPESLPQPGLQKSVSNLQKPTQSISQENTNSVPGGPKSWAQLNGKPVGHEGGLRGSSRLLSFSPEEFPTLKAAGGQDKAGKEKGVLDLSYGPGPSLRPQNVTSWREGGGRHIISATSLSTSPTELGSRNSSTGDGAPSSACTSDSKDPSLRPAQPVRKGASQFMGNVYHPPTYHDMLPAFMCSPKSSENQGTVERGSFPLPQLRLEPRVPFRQFQMNDQDGKENRLGLSRPLRPLRQLVERAPRPTIINAENLKGLDDLDADADDGWAGLHEEVDYSEKLKFSDDEEEEEVVKDGRPKWNSWDPRRQRQLSMSSADSADAKRTREEGKDWAEAVGASRVVRKAPDPQPPPRKLHGWAPGPDYQKSSMGSMFRQQSIEDKEDKPPPRQKFIQSEMSEAVERARKRREEEERRAREERLAACAAKLKQLDQKCKQARKAGEARKQAEKEVPWSPSAEKASPQENGPAVHKGSPEFPAQETPTTFPEEAPTVSPAVAQSNSSEEEAREAGSPAQEFKYQKSLPPRFQRQQQQQQQEQLYKMQHWQPVYPPPSHPQRTFYPHHPQMLGFDPRWMMMPSYMDPRITPTRTPVDFYPSALHPSGLMKPMMPQESLNGTGCRSEDQNCVPPLQERKVTPIDSPPVWSPEGYMALQSKGYPLPHPKSSDTLAMDMRVRSPDEALPGGLSGCSSGSGHSPYALERAAHASADLPEASSKKAEKEAKLAAPRAGEQGEAMKQFDLNYGSAIIENCGSSPGEESEVGSMVGEGFIEVLTKKQRRLLEEERRKKEQAVQVPVKGRGLSSRIPPRFAKKQNNLCLEQGDVTVPGSSLGTEIWESSSQALPVQAPANDSWRKAVTAFSSTETGSAEQGFKSSQGDSGVDLSAESRESSATSSQRSSPYGTLKPEEMSGPGLAEPKADSHKEQAPKPSEQKDSEQGSGQSKEHRPGPIGNERSLKNRKGSEGAERLQGAVVPPVNGVEIHVDSVLPVPPIEFGVSPKDSDFSLPPGSASGPTGSPVVKLQDALASNAGLTQSIPILRRDHHIQRAIGLSPMSFPTADLTLKMESARKAWENSPSLPEQSSPGGAGSGIQPPSSVGASSGVNYSSFGGVSMPPMPVASVAPSASMPGSHLPPLYLDGHVFASQPRLVPQTIPQQQSYQQAAAAQQIPISLHTSLQAQAQLGLRGGLPVSQSQEIFSSLQPFRSQVYMHPSLSPPSTMILSGGTALKPPYSAFPGMQPLEMVKPQSGSPYQPMSGNQALVYEGQLSQAAGLGASQMLDSQLPQLTMPLPRYGSGQQPLILPQSIQLPPGQSLSVGAPRRIPPPGSQPPVLNTSREPSQMEMKGFHFADSKQNVPSGGPVPSPQTYRPSSASPSGKPSGSAVNMGSVQGHYVQQAKQRVDEKPSLGAVKLQEAPSAASQMKRTGAIKPRAVKVEESKA

SEQ ID NO: 36735 - protein, 54 aa, Homo sapiens
MCTTLFLLSTLAMLWRRRFANRVQPEPSDVDGAARGSSLDADPQSSGREKEPLK

SEQ ID NO: 36736 - protein, 94 aa, Homo sapiens
MQHSLVFFFAVILHLSHLLHLDASIHPFRLPFSSKPFLLIPMSNTTLPHTAWPLSFLHQTVSTLKAVAVTHSLWHLQIPVDCQACNRKSKKIYC

SEQ ID NO: 36737 - protein, 1346 aa, Homo sapiens
MDNKRDKAKAGAAARTPAARAPGLLTPRPPGSPRPPPPVTPAALRVLGAAGAVGRKPLAERAGGIGGATIPESAPRAGPTRSAGTSSRNPASRPPASGRGERAPPAKNTSPGPVSSPGRASGTTRPGPLGQKGLRISAEETVARGKATEAPKRSALSAGARRDTSGPTPGTPSPAMARRSRAAGTEVGLPRPAPSARPRPPTEGPRKSVSSASEHSTTEPSPAARRRPSAGGGLQRPASRSLSSSATPLSSPARSGPSARGTPRAPAHPSQPKPKGLQALRPPQVTPPRKDAAPALGPLSSSPLATPSPSGTKARPVPPPDNAATPLPATLPPSPPVTPPPPAALQSQAPPTLPATPHSSSLTCQLATPLPLAPPSPSAPPSLQTLPSPPATPPSQVPPTQLIMSFPEAGVSSLATAAFVASVSPSVSSPLQSMPPTQANPALPSLPTLLSPLATPPLSAMSPLQGPVSPATSLGNSAFPLAALPQPGLSALTTPPPQASPSPSPPSLQATPHTLATLPLQDSPLLATLPLQASPSPLTTVSLQDPPLVSPSLLASPPLQAPPHPQAPPSMTTPPMQAPPSLQTIPPIQVPHSLTSPSLQAPPSPLALSSLQATTSLGSPTLQATHSFLTMSPRQTQASLISPSRPASTPPDSPPLQAPLSLPASPPLQTSLSPAVSPLSSPLTIHPLQALSSLASHSPQAPLSSLIMPPLETQSSLAPPSLQTPPASLTTPPLENLPSLAPPPLQTASAPLTTPPLENLPSLAPPPLQTASAPLTTPHLETPPCPAPCPLQAPPSPLTTPPPETPSSIATPPPQAPPALASPPLQGLPSPPLSPLATPPPQAPPALALPPLQAPPSPPASPPLSPLATPSPQAPNALAVHLLQAPFSPPPSPPVQAPFSPPASPPVSPSATPPSQAPPSLAAPPLQVPPSPPASPPMSPSATPPPQAPPPLAAPPLQVPPSPPASPPMSPSATPPPRVPPLLAAPPLQVPPSPPASLPMSPLAKPPPQAPPALATPPLQALPSPPASFPGQAPFSPSASLPMSPLATPPPQAPPVLAAPLLQVPPSPPASPTLQAPRRPPTPGPDTSVSGPRLTLALAPGPPPPPSRSPSSTLSGPDLAGHSSSATSTPEELRGYDSGPEGGAAASPPPDAELAACHPAAWSRGPAPPLAFRGAPGAPLPWPPATGPGSADGLCTIYETEGPESATPAPGALDPGPSPGTSGGKAAAGAGAGASSRSPKQARLGELPLGALQASVVQHLLSRTLLLAAAEGAAGGSGGGPGGAEGGGVTGGARAALSDAELGRWAELLSPLDESRASITSVTSFSPDDVASPQGDWTVVEVETFH

SEQ ID NO: 36738 - protein, 1323 aa, Homo sapiens
MDNKRDKAKAGAAARTPAARAPGLLTPRPPGSPRPPPPVTPAALRVLGAAGAVGRKPLAERAGGIGGATIPESAPRAGPTRSAGTSSRNPASRPPASGRGERAPPAKNTSPGPVSSPGRASGTTRPGPLGQKGLRISAEETVARGKATEAPKRSALSAGARRDTSGPTPGTPSPAMARRSRAAGTEVGLPRPAPSARPRPPTEGPRKSVSSASEHSTTEPSPAARRRPSAGGGLQRPASRSLSSSATPLSSPARSGPSARGTPRAPAHPSQPKPKGLQALRPPQVTPPRKDAAPALGPLSSSPLATPSPSGTKARPVPPPDNAATPLPATLPPSPPVTPPPPAALQSQAPPTLPATPHSSSLTCQLATPLPLAPPSPSAPPSLQTLPSPPATPPSQVPPTQLIMSFPEAGVSSLATAAFVASVSPSVSSPLQSMPPTQANPALPSLPTLLSPLATPPLSAMSPLQGPVSPATSLGNSAFPLAALPQPGLSALTTPPPQASPSPSPPSLQATPHTLATLPLQDSPLLATLPLQASPSPLTTVSLQDPPLVSPSLLASPPLQAPPHPQAPPSMTTPPMQAPPSLQTIPPIQVPHSLTSPSLQAPPSPLALSSLQATTSLGSPTLQATHSFLTMSPRQTQASLISPSRPASTPPDSPPLQAPLSLPASPPLQTSLSPAVSPLSSPLTIHPLQALSSLASHSPQAPLSSLIMPPLETQSSLAPPSLQTPPASLTTPPLENLPSLAPPPLQTASAPLTTPHLETPPCPAPCPLQAPPSPLTTPPPETPSSIATPPPQAPPALASPPLQGLPSPPLSPLATPPPQAPPALALPPLQAPPSPPASPPLSPLATPSPQAPNALAVHLLQAPFSPPPSPPVQAPFSPPASPPVSPSATPPSQAPPSLAAPPLQVPPSPPASPPMSPSATPPPQAPPPLAAPPLQVPPSPPASPPMSPSATPPPRVPPLLAAPPLQVPPSPPASLPMSPLAKPPPQAPPALATPPLQALPSPPASFPGQAPFSPSASLPMSPLATPPPQAPPVLAAPLLQVPPSPPASPTLQAPRRPPTPGPDTSVSGPRLTLALAPGPPPPPSRSPSSTLSGPDLAGHSSSATSTPEELRGYDSGPEGGAAASPPPDAELAACHPAAWSRGPAPPLAFRGAPGAPLPWPPATGPGSADGLCTIYETEGPESATPAPGALDPGPSPGTSGGKAAAGAGAGASSRSPKQARLGELPLGALQASVVQHLLSRTLLLAAAEGAAGGSGGGPGGAEGGGVTGGARAALSDAELGRWAELLSPLDESRASITSVTSFSPDDVASPQGDWTVVEVETFH

SEQ ID NO: 36739 - protein, 331 aa, Homo sapiens
MGPQVVASAPEPTRPPSGFVPVSGGGGTHVTQVHIQLAPSPHNGTPEPPRTAPEVGSNSQDGDATPSPPRAQPLVPVAHIRPLPTTVQAASPLPEEPPVPRPPPGFQASVPREASARVVVPIAPTCRSLESSPHSLVPMGPGREHLEEPPMAGPAAEAERVSSPAWASSPTPPSGPHPCPVPKVAPKPRLSGWTWLKKQLLEEAPEPPCPEPRQSLEPEVPTPTEQEVPAPTEQEVPALTAPRAPASRTSRMWDAVLYRMSVAEAQGRLAGPSGGEHTPASLTRLPFLYRPRFNARKLQEATRPPPTVRSILELSPQPKNFNRTATGWRLQ

SEQ ID NO: 36740 - protein, 342 aa, Homo sapiens
MDILKSEILRKRQLVEDRNLLVENKKYFKRSELAKKEEEAYFERCGYKIQPKEEDQKPLTSSNPVLELELAEEKLPMTLSRQEVIRRLRERGEPIRLFGETDYDAFQRLRKIEILTPEVNKGLRNDLKAALDKIDQQYLNEIVGGQEPGEEDTQNDLKVHEENTTIEELEALGESLGKGDDHKDMDIITKFLKFLLGVWAKELNAREDYVKRSVQGKLNSATQKQTESYLRPLFRKLRKRNLPADIKESITDIIKFMLQREYVKANDAYLQMAIGNAPWPIGVTMVGIHARTGREKIFSKHVAHVLNDETQRKYIQGLKRLMTICQKHFPTDPSKCVEYNAL

SEQ ID NO: 36741 - protein, 47 aa, Homo sapiens
MDILKSEILRKRQLVEDRNLLREYVKANDAYLQMAIGNAPWPIGVTM

SEQ ID NO: 36742 - protein, 352 aa, Homo sapiens
MLLFSVLLLLSLVTGTQLGPRTPLPEAGVAILGRARGAHRPQPPHPPSPVSECGDRSIFEGRTRYSRITGGMEAEVGEFPWQVSIQARSEPFCGGSILNKWWILTAAHCLYSEELFPEELSVVLGTNDLTSPSMEIKEVASIILHKDFKRANMDNDIALLLLASPIKLDDLKVPICLPTQPGPATWRECWVAGWGQTNAADKNSVKTDLMKAPMVIMDWEECSKMFPKLTKNMLCAGYKNESYDACKGDSGGPLVCTPEPGEKWYQVGIISWGKSCGEKNTPGIYTSLVNYNLWIEKVTQLEGRPFNAEKRRTSVKQKPMGSPVSGVPEPGSPRSWLLLCPLSHVLFRAILY

SEQ ID NO: 36743 - protein, 276 aa, Homo sapiens
MLLFSVLLLLSLVTGTQLGPRTPLPEAGVAILGRARGAHRPQPPHPPSPVSECGDRSIFEGRTRYSRITGGMEAEVGEFPWQVSIQARSEPFCGGSILNKWWILTAAHCLYSEELFPEELSVVLGTNDLTSPSMEIKEVASIILHKDFKRANMDNDIALLLLASPIKLDDLKVPICLPTQPGPATWRECWVAGWGQTNAADKNSVKTDLMKAPMVIMDWEECSKMFPKLTKNMLCAGYKNESYDACKQSYFPTLQRMNTGSSQTKPPGSHTFHLQN

SEQ ID NO: 36744 - protein, 957 aa, Homo sapiens
MRPGTGAERGGLMVSEMESHPPSQGPGDGERRLSGSSLCSGSWVSADGFLRRRPSMGHPGMHYAPMGMHPMGQRANMPPVPHGMMPQMMPPMGGPPMGQMPGMMSSVMPGMMMSHMSQASMQPALPPGVNSMDVAAGTASGAKSMWTEHKSPDGRTYYYNTETKQSTWEKPDDLKTPAEQLLSKCPWKEYKSDSGKPYYYNSQTKESRWAKPKELEDLEGYQNTIVAGSLITKSNLHAMIKAEESSKQEECTTTSTAPVPTTEIPTTMSTMAAAEAAAAVVAAAAAAAAAAAAANANASTSASNTVSGTVPVVPEPEVTSIVATVVDNENTVTISTEEQAQLTSTPAIQDQSVEVSSNTGEETSKQETVADFTPKKEEEESQPAKKTYTWNTKEEAKQAFKELLKEKRVPSNASWEQAMKMIINDPRYSALAKLSEKKQAFNAYKVQTEKEEKEEARSKYKEAKESFQRFLENHEKMTSTTRYKKAEQMFGEMEVWNAISERDRLEIYEDVLFFLSKKEKEQAKQLRKRNWEALKNILDNMANVTYSTTWSEAQQYLMDNPTFAEDEELQNMDKEDALICFEEHIRALEKEEEEEKQKSLLRERRRQRKNRESFQIFLDELHEHGQLHSMSSWMELYPTISSDIRFTNMLGQPGSTALDLFKFYVEDLKARYHDEKKIIKDILKDKGFVVEVNTTFEDFVAIISSTKRSTTLDAGNIKLAFNSLLEKAEAREREREKEEARKMKRKESAFKSMLKQAAPPIELDAVWEDIRERFVKEPAFEDITLESERKRIFKDFMHVLEHECQHHHSKNKKHSKKSKKHHRKRSRSRSGSDSDDDDSHSKKKRQRSESRSASEHSSSAESERSYKKSKKHKKKSKKRRHKSDSPESDAEREKDKKEKDRESEKDRTRQRSESKHKSPKKKTGKDSGNWDTSGSELSEGELEKRRRTLLEQLDDDQ

SEQ ID NO: 36745 - protein, 930 aa, Homo sapiens
MCSGSGRRRSSLSPTMRPGTGAERGGLMMGHPGMHYAPMGMHPMGQRANMPPVPHGMMPQMMPPMGGPPMGQMPGMMSSVMPGMMMSHMSQASMQPALPPGVNSMDVAAGTASGAKSMWTEHKSPDGRTYYYNTETKQSTWEKPDDLKTPAEQLLSKCPWKEYKSDSGKPYYYNSQTKESRWAKPKELEDLEGYQNTIVAGSLITKSNLHAMIKAEESSKQEECTTTSTAPVPTTEIPTTMSTMAAAEAAAAVVAAAAAAAAAAAAANANASTSASNTVSGTVPVVPEPEVTSIVATVVDNENTVTISTEEQAQLTSTPAIQDQSVEVSSNTGEETSKQETVADFTPKKEEEESQPAKKTYTWNTKEEAKQAFKELLKEKRVPSNASWEQAMKMIINDPRYSALAKLSEKKQAFNAYKVQTEKEEKEEARSKYKEAKESFQRFLENHEKMTSTTRYKKAEQMFGEMEVWNAISERDRLEIYEDVLFFLSKKEKEQAKQLRKRNWEALKNILDNMANVTYSTTWSEAQQYLMDNPTFAEDEELQNMDKEDALICFEEHIRALEKEEEEEKQKSLLRERRRQRKNRESFQIFLDELHEHGQLHSMSSWMELYPTISSDIRFTNMLGQPGSTALDLFKFYVEDLKARYHDEKKIIKDILKDKGFVVEVNTTFEDFVAIISSTKRSTTLDAGNIKLAFNSLLEKAEAREREREKEEARKMKRKESAFKSMLKQAAPPIELDAVWEDIRERFVKEPAFEDITLESERKRIFKDFMHVLEHECQHHHSKNKKHSKKSKKHHRKRSRSRSGSDSDDDDSHSKKKRQRSESRSASEHSSSAESERSYKKSKKHKKKSKKRRHKSDSPESDAEREKDKKEKDRESEKDRTRQRSESKHKSPKKKTGKDSGNWDTSGSELSEGELEKRRRTLLEQLDDDQ

SEQ ID NO: 36746 - protein, 939 aa, Homo sapiens
MRPGTGAERGGLMVSEMESHPPSQGPGDGERRLSGSSLCSGSWVSADGFLRRRPSMGHPGMHYAPMGMHPMGQRANMPPVPHGMMPQMMPPMGGPPMGQMPGMMSSVMPGMMMSHMSQASMQPALPPGVNSMDVAAGTASGAKSMWTEHKSPDGRTYYYNTETKQSTWEKPDDLKTPAEQLLSKCPWKEYKSDSGKPYYYNSQTKESRWAKPKELEDLEAMIKAEESSKQEECTTTSTAPVPTTEIPTTMSTMAAAEAAAAVVAAAAAAAAAAAAANANASTSASNTVSGTVPVVPEPEVTSIVATVVDNENTVTISTEEQAQLTSTPAIQDQSVEVSSNTGEETSKQETVADFTPKKEEEESQPAKKTYTWNTKEEAKQAFKELLKEKRVPSNASWEQAMKMIINDPRYSALAKLSEKKQAFNAYKVQTEKEEKEEARSKYKEAKESFQRFLENHEKMTSTTRYKKAEQMFGEMEVWNAISERDRLEIYEDVLFFLSKKEKEQAKQLRKRNWEALKNILDNMANVTYSTTWSEAQQYLMDNPTFAEDEELQNMDKEDALICFEEHIRALEKEEEEEKQKSLLRERRRQRKNRESFQIFLDELHEHGQLHSMSSWMELYPTISSDIRFTNMLGQPGSTALDLFKFYVEDLKARYHDEKKIIKDILKDKGFVVEVNTTFEDFVAIISSTKRSTTLDAGNIKLAFNSLLEKAEAREREREKEEARKMKRKESAFKSMLKQAAPPIELDAVWEDIRERFVKEPAFEDITLESERKRIFKDFMHVLEHECQHHHSKNKKHSKKSKKHHRKRSRSRSGSDSDDDDSHSKKKRQRSESRSASEHSSSAESERSYKKSKKHKKKSKKRRHKSDSPESDAEREKDKKEKDRESEKDRTRQRSESKHKSPKKKTGKDSGNWDTSGSELSEGELEKRRRTLLEQLDDDQ

SEQ ID NO: 36747 - protein, 101 aa, Homo sapiens
MCSGSGRRRSSLSPTMRPGTGAERGGLMMGHPGMHYAPMGMHPMGQRANMPPVPHGMMPQMMPPMGGPPMGQMPGMMSSVMPGMMMSHMSQASMQPALPLN

SEQ ID NO: 36748 - protein, 204 aa, Homo sapiens
MDPKDRKKIQFSVPAPPSQLDPRQVEMIRRRRPTPAMLFRLSEHSSPEEEASPHQRASGEGHHLKSKRPNPCAYTPPSLKAVQRIAESHLQSISNLNENQASEEEDELGELRELGYPREEDEEEEEDDEEEEEEEDSQAEVLKVIRQSAGQKTTCGQGLEGPWERPPPLDESERDGGSEDQVEDPALSEPGEEPQRPSPSEPGT

SEQ ID NO: 36749 - protein, 168 aa, Homo sapiens
MLFRLSEHSSPEEEASPHQRASGEGHHLKSKRPNPCAYTPPSLKAVQRIAESHLQSISNLNENQASEEEDELGELRELGYPREEDEEEEEDDEEEEEEEDSQAEVLKVIRQSAGQKTTCGQGLEGPWERPPPLDESERDGGSEDQVEDPALSEPGEEPQRPSPSEPGT

SEQ ID NO: 36750 - protein, 264 aa, Homo sapiens
MFVPCGESAPDLAGFTLLMPAVSVGNVGQLAMDLIISTLNMSKIGYFYTDCLVPMVGNNPYATTEGNSTELSINAEVYSLPSRKLVALQLRSIFIKYKSKPFCEKLLSWVKSSGCARVIVLSSSHSYQRNDLQLRSTPFRYLLTPSMQKSVQNKIKSLNWEEMEKSRCIPEIDDSEFCIRIPGGGITKTLYDESCSKEIQMAVLLKFVSEGDNIPDALGLVEYLNEWLQILKPLSDDPTVSASRWKIPSSWRLLFGSGLPPALF

SEQ ID NO: 36751 - protein, 233 aa, Homo sapiens
MDLIISTLNMSKIGYFYTDCLVPMVGNNPYATTEGNSTELSINAEVYSLPSRKLVALQLRSIFIKYKSKPFCEKLLSWVKSSGCARVIVLSSSHSYQRNDLQLRSTPFRYLLTPSMQKSVQNKIKSLNWEEMEKSRCIPEIDDSEFCIRIPGGGITKTLYDESCSKEIQMAVLLKFVSEGDNIPDALGLVEYLNEWLQILKPLSDDPTVSASRWKIPSSWRLLFGSGLPPALF

SEQ ID NO: 36752 - protein, 500 aa, Homo sapiens
MAWAALLGLLAALLLLLLLSRRRTRRPGEPPLDLGSIPWLGYALDFGKDAASFLTRMKEKHGDIFTILVGGRYVTVLLDPHSYDAVVWEPRTRLDFHAYAIFLMERIFDVQLPHYSPSDEKARMKLTLLHRELQALTEAMYTNLHAVLLGDATEAGSGWHEMGLLDFSYSFLLRAGYLTLYGIEALPRTHESQAQDRVHSADVFHTFRQLDRLLPKLARGSLSVGDKDHMCSVKSRLWKLLSPARLARRAHRSKWLESYLLHLEEMGVSEEMQARALVLQLWATQGNMGPAAFWLLLFLLKNPEALAAVRGELESILWQAEQPVSQTTTLPQKVLDSTPVLDSVLSESLRLTAAPFITREVVVDLAMPMADGREFNLRRGDRLLLFPFLSPQRDPEIYTDPEVFKYNRFLNPDGSEKKDFYKDGKRLKNYNMPWGAGHNHCLGRSYAVNSIKQFVFLVLVHLDLELINADVEIPEFDLSRYGFGLMQPEHDVPVRYRIRP

SEQ ID NO: 36753 - protein, 696 aa, Homo sapiens
MESEYVLCNWKDQLWPAKVLSRSETSSNSKRKKAFSLEVQILSLDEKIKLDSTETKILNKSQIEAIAASLGLQSEDSAPPTEETAYGRSLKVALGILNERTNLSQASTSDEEEITMLSQNVPQKQSDSPPHKKYRKDEGDLPGCLEERENSACLLASSESDDSLYDDKSQAPTMVDTIPSEVETKSLQNSSWCETFPSLSEDNDEKENKNKIDISAVMSVHSAVKEESACVKDEKFAPPLSPLSSDMLIMPKALKEESEDTCLETLAVPSECSAFSENIEDPGEGPSNPCLDTSQNQPSMESEMGAAACPGSCSRECEVSFSASNPVWDYSHLMSSERNFQRLDFEELEEEGQASDKSLLPSRINLSLLDDDEEDEELPRFILHYETHPFETGMIVWFKYQKYPFWPAVIKSIRRKERKASVLFVEANMNSEKKGIRVNFRRLKKFDCKEKQMLVDKAREDYSESIDWCISLICDYRVRIGCGSFTGSLLEYYAADISYPVRKETKQDTFRNKFPKLHNEDAREPMAVTSQTKKMSFQKILPDRMKAARDRANKNLVDFIVNAKGTENHLLAIVNGTKGSRWLKSFLNANRFTPCIETYFEDEDQLDEVVKYLQEVCNQIDQIMPTWIKDDKIKFILEVLLPEAIICSISAVDGLDYEAAEAKYLKGPCLGYRERELFDAKIIYEKRRKAPTNEAH

SEQ ID NO: 36754 - protein, 266 aa, Homo sapiens
MAEAGKVPLSLGLTGGEAAEWPLQRYARCIPSNTRDPPGPCLEAGTAPCPTWKVFDSNEESGYLVLTIVISGHFFIFQGQTLLEGFSLIGSKDWLKIVRRVDCLLFGTTIKDKSRLFRVQFSGESKEQALEHCCSCVQKLAQYITVQVPDGNIQELQLIPGPPRATESQGKDSAKSVPRQPGSHQHSEQQQVCVTAGTGAPDGRTSLTQLAQTLLASEELPHVYEQSAWGAEELGPFLRLCLMDQNFPAFVEEVEKELKKLAGLRN

SEQ ID NO: 36755 - protein, 349 aa, Homo sapiens
MKGLYFQQSSTDEEITFVFQEKEDLPVTEDNFVKLQVKACALSQINTKLLAEMKMKKDLFPVGREIAGIVLDVGSKVSFFQPDDEVVGILPLDSEDPGLCEVVRVHEHYLVHKPEKVTWTEAAGSIRDGVRAYTALHYLSHLSPGKSVLIMDGASAFGTIAIQLAHHRGAKVISTACSLEDKQCLERFRPPIARVIDVSNGKVHVAESCLEETGGLGVDIVLDAGVRLYSKDDEPAVKLQLLPHKHDIITLLGVGGHWVTTEENLQLDPPDSHCLFLKGATLAFLNDEVWNLSNVQQGKYLCILKDVMEKLSTGVFRPQLDEPIPLYEAKVSMEAVQKNQGRKKQVVQF

SEQ ID NO: 36756 - protein, 198 aa, Homo sapiens
MKGLYFQQSSTDEEITFVFQEKEDLPVTEDNFVKLQVKACALSQINTKLLAEMKMKKDLFPVGREIAGIVLDVGSKVSFFQPDDEVVGILPLDSEDPGLCEVVRVHEHYLVHKPEKVTWTEAAGSIRDGVRAYTALHYLSHLSPGKSVLIMDGASAFGTIAIQLAHHRGAKVISTACSLEDKQCLERFRPPIENSTIA

SEQ ID NO: 36757 - protein, 97 aa, Homo sapiens [sequence omitted]

SEQ ID NO: 36758 - protein, 1015 aa, Homo sapiens
MGPPLPLLLLLLLLLPPRVLPAAPSSVPRGRQLPGRLGCLLEEGLCGASEACVNDGVFGRCQKVPAMDFYRYEVSPVALQRLRVALQKLSGTGFTWQDDYTQYVMDQELADLPKTYLRRPEASSPARPSKHSVGSERRYSREGGAALANALRRHLPFLEALSQAPASDVLARTHTAQDRPPAEGDDRFSESILTYVAHTSALTYPPGSRTQLREDLLPRTLGQLQPDELSPKVDSGVDRHHLMAALSAYAAQRPPAPPGEGSLEPQYLLRAPSRMPRPLLAPAAPQKWPSPLGDSEDPSSTGDGARIHTLLKDLQRQPAEVRGLSGLELDGMAELMAGLMQGVDHGVARGSPGRAALGESGEQADGPKATLRGDSFPDDGVQDDDDRLYQEVHRLSATLGGLLQDHGSRLLPGALPFARPLDMERKKSEHPESSLSSEEETAGVENVKSQTYSKDLLGQQPHSEPGAAAFGELQNQMPGPSKEEQSLPAGAQEALSDGLQLEVQPSEEEARGYIVTDRDPLRPEEGRRLVEDVARLLQVPSSAFADVEVLGPAVTFKVSANVQNVTTEDVEKATVDNKDKLEETSGLKILQTGVGSKSKLKFLPPQAEQEDSTKFIALTLVSLACILGVLLASGLIYCLRHSSQHRLKEKLSGLGGDPGADATAAYQELCRQRMATRPPDRPEGPHTSRISSVSSQFSDGPIPSPSARSSASSWSEEPVQSNMDISTGHMILSYMEDHLKNKNRLEKEWEALCAYQAEPNSSFVAQREENVPKNRSLAVLTYDHSRVLLKAENSHSHSDYINASPIMDHDPRNPAYIATQGPLPATVADFWQMVWESGCVVIVMLTPLAENGVRQCYHYWPDEGSNLYHIYEVNLVSEHIWCEDFLVRSFYLKNLQTNETRTVTQFHFLSWYDRGVPSSSRSLLDFRRKVNKCYRGRSCPIIVHCSDGAGRSGTYVLIDMVLNKMAKGAKEIDIAATLEHLRDQRPGMVQTKEQFEFALTAVAEEVNAILKALPQ

SEQ ID NO: 36759 - protein, 986 aa, Homo sapiens
MGPPLPLLLLLLLLLPPRVLPAAPSSVPRGRQLPGRLGCLLEEGLCGASEACVNDGVFGRCQKVPAMDFYRYEVSPVALQRLRVALQKLSGTGFTWQDDYTQYVMDQELADLPKTYLRRPEASSPARPSKHSVGSERRYSREGGAALANALRRHLPFLEALSQAPASDVLARTHTAQDRPPAEGDDRFSESILTYVAHTSALTYPPGSRTQLREDLLPRTLGQLQPDELSPKVDSGVDRHHLMAALSAYAAQRPPAPPGEGSLEPQYLLRAPSRMPRPLLAPAAPQKWPSPLGDSEDPSSTGDGARIHTLLKDLQRQPAEVRGLSGLELDGMAELMAGLMQGVDHGVARGSPGRAALGESGEQADGPKATLRGDSFPDDGVQDDDDRLYQEVHRLSATLGGLLQDHGSRLLPGALPFARPLDMERKKSEHPESSLSSEEETAGVENVKSQTYSKDLLGQQPHSEPGAAAFGELQNQMPGPSKEEQSLPAGAQEALSDGLQLEVQPSEEEARGYIVTDREVLGPAVTFKVSANVQNVTTEDVEKATVDNKDKLEETSGLKILQTGVGSKSKLKFLPPQAEQEDSTKFIALTLVSLACILGVLLASGLIYCLRHSSQHRLKEKLSGLGGDPGADATAAYQELCRQRMATRPPDRPEGPHTSRISSVSSQFSDGPIPSPSARSSASSWSEEPVQSNMDISTGHMILSYMEDHLKNKNRLEKEWEALCAYQAEPNSSFVAQREENVPKNRSLAVLTYDHSRVLLKAENSHSHSDYINASPIMDHDPRNPAYIATQGPLPATVADFWQMVWESGCVVIVMLTPLAENGVRQCYHYWPDEGSNLYHIYEVNLVSEHIWCEDFLVRSFYLKNLQTNETRTVTQFHFLSWYDRGVPSSSRSLLDFRRKVNKCYRGRSCPIIVHCSDGAGRSGTYVLIDMVLNKMAKGAKEIDIAATLEHLRDQRPGMVQTKEQFEFALTAVAEEVNAILKALPQ

SEQ ID NO: 36760 - protein, 1038 aa, Homo sapiens
MAVESEYSLLRTEASFPTMKMFCVSHTLPRVEVMFVSGPQTRERTEPVDPRWQCLVQMWAGCLLEEGLCGASEACVNDGVFGRCQKVPAMDFYRYEVSPVALQRLRVALQKLSGTGFTWQDDYTQYVMDQELADLPKTYLRRPEASSPARPSKHSVGSERRYSREGGAALANALRRHLPFLEALSQAPASDVLARTHTAQDRPPAEGDDRFSESILTYVAHTSALTYPPGSRTQLREDLLPRTLGQLQPDELSPKVDSGVDRHHLMAALSAYAAQRPPAPPGEGSLEPQYLLRAPSRMPRPLLAPAAPQKWPSPLGDSEDPSSTGDGARIHTLLKDLQRQPAEVRGLSGLELDGMAELMAGLMQGVDHGVARGSPGRAALGESGEQADGPKATLRGDSFPDDGVQDDDDRLYQEVHRLSATLGGLLQDHGSRLLPGALPFARPLDMERKKSEHPESSLSSEEETAGVENVKSQTYSKDLLGQQPHSEPGAAAFGELQNQMPGPSKEEQSLPAGAQEALSDGLQLEVQPSEEEARGYIVTDRDPLRPEEGRRLVEDVARLLQVPSSAFADVEVLGPAVTFKVSANVQNVTTEDVEKATVDNKDKLEETSGLKILQTGVGSKSKLKFLPPQAEQEDSTKFIALTLVSLACILGVLLASGLIYCLRHSSQHRLKEKLSGLGGDPGADATAAYQELCRQRMATRPPDRPEGPHTSRISSVSSQFSDGPIPSPSARSSASSWSEEPVQSNMDISTGHMILSYMEDHLKNKNRLEKEWEALCAYQAEPNSSFVAQREENVPKNRSLAVLTYDHSRVLLKAENSHSHSDYINASPIMDHDPRNPAYIATQGPLPATVADFWQMVWESGCVVIVMLTPLAENGVRQCYHYWPDEGSNLYHIYEVNLVSEHIWCEDFLVRSFYLKNLQTNETRTVTQFHFLSWYDRGVPSSSRSLLDFRRKVNKCYRGRSCPIIVHCSDGAGRSGTYVLIDMVLNKMAKGAKEIDIAATLEHLRDQRPGMVQTKEQFEFALTAVAEEVNAILKALPQ

SEQ ID NO: 36761 - protein, 998 aa, Homo sapiens
MGPPLPLLLLLLLLLPPRVLPAAPSSVPRGRQLPGRLDGVFGRCQKVPAMDFYRYEVSPVALQRLRVALQKLSGTGFTWQDDYTQYVMDQELADLPKTYLRRPEASSPARPSKHSVGSERRYSREGGAALANALRRHLPFLEALSQAPASDVLARTHTAQDRPPAEGDDRFSESILTYVAHTSALTYPPGSRTQLREDLLPRTLGQLQPDELSPKVDSGVDRHHLMAALSAYAAQRPPAPPGEGSLEPQYLLRAPSRMPRPLLAPAAPQKWPSPLGDSEDPSSTGDGARIHTLLKDLQRQPAEVRGLSGLELDGMAELMAGLMQGVDHGVARGSPGRAALGESGEQADGPKATLRGDSFPDDGVQDDDDRLYQEVHRLSATLGGLLQDHGSRLLPGALPFARPLDMERKKSEHPESSLSSEEETAGVENVKSQTYSKDLLGQQPHSEPGAAAFGELQNQMPGPSKEEQSLPAGAQEALSDGLQLEVQPSEEEARGYIVTDRDPLRPEEGRRLVEDVARLLQVPSSAFADVEVLGPAVTFKVSANVQNVTTEDVEKATVDNKDKLEETSGLKILQTGVGSKSKLKFLPPQAEQEDSTKFIALTLVSLACILGVLLASGLIYCLRHSSQHRLKEKLSGLGGDPGADATAAYQELCRQRMATRPPDRPEGPHTSRISSVSSQFSDGPIPSPSARSSASSWSEEPVQSNMDISTGHMILSYMEDHLKNKNRLEKEWEALCAYQAEPNSSFVAQREENVPKNRSLAVLTYDHSRVLLKAENSHSHSDYINASPIMDHDPRNPAYIATQGPLPATVADFWQMVWESGCVVIVMLTPLAENGVRQCYHYWPDEGSNLYHIYEVNLVSEHIWCEDFLVRSFYLKNLQTNETRTVTQFHFLSWYDRGVPSSSRSLLDFRRKVNKCYRGRSCPIIVHCSDGAGRSGTYVLIDMVLNKMAKGAKEIDIAATLEHLRDQRPGMVQTKEQFEFALTAVAEEVNAILKALPQ

SEQ ID NO: 36762 - protein, 1306 aa, Homo sapiens
MTMYLWLKLLAFGFAFLDTEVFVTGQSPTPSPTGLTTAKMPSVPLSSDPLPTHTTAFSPASTFERENDFSETTTSLSPDNTSTQVSPDSLDNASAFNTTGVSSVQTPHLPTHADSQTPSAGTDTQTFSGSAANAKLNPTPGSNAISDVPGERSTASTFPTDPVSPLTTTLSLAHHSSAALPARTSNTTITANTSDAYLNASETTTLSPSGSAVISTTTIATTPSKPTCDEKYANITVDYLYNKETKLFTAKLNVNENVECGNNTCTNNEVHNLTECKNASVSISHNSCTAPDKTLILDVPPGVEKFQLHDCTQVEKADTTICLKWKNIETFTCDTQNITYRFQCGNMIFDNKEIKLENLEPEHEYKCDSEILYNNHKFTNASKIIKTDFGSPGEPQIIFCRSEAAHQGVITWNPPQRSFHNFTLCYIKETEKDCLNLDKNLIKYDLQNLKPYTKYVLSLHAYIIAKVQRNGSAAMCHFTTKSAPPSQVWNMTVSMTSDNSMHVKCRPPRDRNGPHERYHLEVEAGNTLVRNESHKNCDFRVKDLQYSTDYTFKAYFHNGDYPGEPFILHHSTSYNSKALIAFLAFLIIVTSIALLVVLYKIYDLHKKRSCNLDEQQELVERDDEKQLMNVEPIHADILLETYKRKIADEGRLFLAEFQSIPRVFSKFPIKEARKPFNQNKNRYVDILPYDYNRVELSEINGDAGSNYINASYIDGFKEPRKYIAAQGPRDETVDDFWRMIWEQKATVIVMVTRCEEGNRNKCAEYWPSMEEGTRAFGDVVVKINQHKRCPDYIIQKLNIVNKKEKATGREVTHIQFTSWPDHGVPEDPHLLLKLRRRVNAFSNFFSGPIVVHCSAGVGRTGTYIGIDAMLEGLEAENKVDVYGYVVKLRRQRCLMVQVEAQYILIHQALVEYNQFGETEVNLSELHPYLHNMKKRDPPSEPSPLEAEFQRLPSYRSWRTQHIGNQEENKSKNRNSNVIPYDYNRVPLKHELEMSKESEHDSDESSDDDSDSEEPSKYINASFIMSYWKPEVMIAAQGPLKETIGDFWQMIFQRKVKVIVMLTELKHGDQEICAQYWGEGKQTYGDIEVDLKDTDKSSTYTLRVFELRHSKRKDSRTVYQYQYTNWSVEQLPAEPKELISMIQVVKQKLPQKNSSEGNKHHKSTPLLIHCRDGSQQTGIFCALLNLLESAETEEVVDIFQVVKALRKARPGMVSTFEQYQFLYDVIASTYPAQNGQVKKNNHQEDKIEFDNEVDKVKQDANCVNPLGAPEKLPEAKEQAEGSEPTSGTEGPEHSVNGPASPALNQGS

SEQ ID NO: 36763 - protein, 1145 aa, Homo sapiens
MTMYLWLKLLAFGFAFLDTEVFVTGQSPTPSPTDAYLNASETTTLSPSGSAVISTTTIATTPSKPTCDEKYANITVDYLYNKETKLFTAKLNVNENVECGNNTCTNNEVHNLTECKNASVSISHNSCTAPDKTLILDVPPGVEKFQLHDCTQVEKADTTICLKWKNIETFTCDTQNITYRFQCGNMIFDNKEIKLENLEPEHEYKCDSEILYNNHKFTNASKIIKTDFGSPGEPQIIFCRSEAAHQGVITWNPPQRSFHNFTLCYIKETEKDCLNLDKNLIKYDLQNLKPYTKYVLSLHAYIIAKVQRNGSAAMCHFTTKSAPPSQVWNMTVSMTSDNSMHVKCRPPRDRNGPHERYHLEVEAGNTLVRNESHKNCDFRVKDLQYSTDYTFKAYFHNGDYPGEPFILHHSTSYNSKALIAFLAFLIIVTSIALLVVLYKIYDLHKKRSCNLDEQQELVERDDEKQLMNVEPIHADILLETYKRKIADEGRLFLAEFQSIPRVFSKFPIKEARKPFNQNKNRYVDILPYDYNRVELSEINGDAGSNYINASYIDGFKEPRKYIAAQGPRDETVDDFWRMIWEQKATVIVMVTRCEEGNRNKCAEYWPSMEEGTRAFGDVVVKINQHKRCPDYIIQKLNIVNKKEKATGREVTHIQFTSWPDHGVPEDPHLLLKLRRRVNAFSNFFSGPIVVHCSAGVGRTGTYIGIDAMLEGLEAENKVDVYGYVVKLRRQRCLMVQVEAQYILIHQALVEYNQFGETEVNLSELHPYLHNMKKRDPPSEPSPLEAEFQRLPSYRSWRTQHIGNQEENKSKNRNSNVIPYDYNRVPLKHELEMSKESEHDSDESSDDDSDSEEPSKYINASFIMSYWKPEVMIAAQGPLKETIGDFWQMIFQRKVKVIVMLTELKHGDQEICAQYWGEGKQTYGDIEVDLKDTDKSSTYTLRVFELRHSKRKDSRTVYQYQYTNWSVEQLPAEPKELISMIQVVKQKLPQKNSSEGNKHHKSTPLLIHCRDGSQQTGIFCALLNLLESAETEEVVDIFQVVKALRKARPGMVSTFEQYQFLYDVIASTYPAQNGQVKKNNHQEDKIEFDNEVDKVKQDANCVNPLGAPEKLPEAKEQAEGSEPTSGTEGPEHSVNGPASPALNQGS

SEQ ID NO: 36764 - protein, 1258 aa, Homo sapiens
MTMYLWLKLLAFGFAFLDTEVFVTGQSPTPSPTGLTTAKMPSVPLSSDPLPTHTTAFSPASTFERENDFSETTTSLSPDNTSTQVSPDSLDNASAFNTTGVSSVQTPHLPTHADSQTPSAGTDTQTFSGSAANAKLNPTPGSNAISDAYLNASETTTLSPSGSAVISTTTIATTPSKPTCDEKYANITVDYLYNKETKLFTAKLNVNENVECGNNTCTNNEVHNLTECKNASVSISHNSCTAPDKTLILDVPPGVEKFQLHDCTQVEKADTTICLKWKNIETFTCDTQNITYRFQCGNMIFDNKEIKLENLEPEHEYKCDSEILYNNHKFTNASKIIKTDFGSPGEPQIIFCRSEAAHQGVITWNPPQRSFHNFTLCYIKETEKDCLNLDKNLIKYDLQNLKPYTKYVLSLHAYIIAKVQRNGSAAMCHFTTKSAPPSQVWNMTVSMTSDNSMHVKCRPPRDRNGPHERYHLEVEAGNTLVRNESHKNCDFRVKDLQYSTDYTFKAYFHNGDYPGEPFILHHSTSYNSKALIAFLAFLIIVTSIALLVVLYKIYDLHKKRSCNLDEQQELVERDDEKQLMNVEPIHADILLETYKRKIADEGRLFLAEFQSIPRVFSKFPIKEARKPFNQNKNRYVDILPYDYNRVELSEINGDAGSNYINASYIDGFKEPRKYIAAQGPRDETVDDFWRMIWEQKATVIVMVTRCEEGNRNKCAEYWPSMEEGTRAFGDVVVKINQHKRCPDYIIQKLNIVNKKEKATGREVTHIQFTSWPDHGVPEDPHLLLKLRRRVNAFSNFFSGPIVVHCSAGVGRTGTYIGIDAMLEGLEAENKVDVYGYVVKLRRQRCLMVQVEAQYILIHQALVEYNQFGETEVNLSELHPYLHNMKKRDPPSEPSPLEAEFQRLPSYRSWRTQHIGNQEENKSKNRNSNVIPYDYNRVPLKHELEMSKESEHDSDESSDDDSDSEEPSKYINASFIMSYWKPEVMIAAQGPLKETIGDFWQMIFQRKVKVIVMLTELKHGDQEICAQYWGEGKQTYGDIEVDLKDTDKSSTYTLRVFELRHSKRKDSRTVYQYQYTNWSVEQLPAEPKELISMIQVVKQKLPQKNSSEGNKHHKSTPLLIHCRDGSQQTGIFCALLNLLESAETEEVVDIFQVVKALRKARPGMVSTFEQYQFLYDVIASTYPAQNGQVKKNNHQEDKIEFDNEVDKVKQDANCVNPLGAPEKLPEAKEQAEGSEPTSGTEGPEHSVNGPASPALNQGS

SEQ ID NO: 36765 - protein, 1259 aa, Homo sapiens
MTMYLWLKLLAFGFAFLDTEVFVTGQSPTPSPTGLTTAKMPSVPLSSDPLPTHTTAFSPASTFERENDFSETTTSLSPDNTSTQVSPDSLDNASAFNTTDVPGERSTASTFPTDPVSPLTTTLSLAHHSSAALPARTSNTTITANTSDAYLNASETTTLSPSGSAVISTTTIATTPSKPTCDEKYANITVDYLYNKETKLFTAKLNVNENVECGNNTCTNNEVHNLTECKNASVSISHNSCTAPDKTLILDVPPGVEKFQLHDCTQVEKADTTICLKWKNIETFTCDTQNITYRFQCGNMIFDNKEIKLENLEPEHEYKCDSEILYNNHKFTNASKIIKTDFGSPGEPQIIFCRSEAAHQGVITWNPPQRSFHNFTLCYIKETEKDCLNLDKNLIKYDLQNLKPYTKYVLSLHAYIIAKVQRNGSAAMCHFTTKSAPPSQVWNMTVSMTSDNSMHVKCRPPRDRNGPHERYHLEVEAGNTLVRNESHKNCDFRVKDLQYSTDYTFKAYFHNGDYPGEPFILHHSTSYNSKALIAFLAFLIIVTSIALLVVLYKIYDLHKKRSCNLDEQQELVERDDEKQLMNVEPIHADILLETYKRKIADEGRLFLAEFQSIPRVFSKFPIKEARKPFNQNKNRYVDILPYDYNRVELSEINGDAGSNYINASYIDGFKEPRKYIAAQGPRDETVDDFWRMIWEQKATVIVMVTRCEEGNRNKCAEYWPSMEEGTRAFGDVVVKINQHKRCPDYIIQKLNIVNKKEKATGREVTHIQFTSWPDHGVPEDPHLLLKLRRRVNAFSNFFSGPIVVHCSAGVGRTGTYIGIDAMLEGLEAENKVDVYGYVVKLRRQRCLMVQVEAQYILIHQALVEYNQFGETEVNLSELHPYLHNMKKRDPPSEPSPLEAEFQRLPSYRSWRTQHIGNQEENKSKNRNSNVIPYDYNRVPLKHELEMSKESEHDSDESSDDDSDSEEPSKYINASFIMSYWKPEVMIAAQGPLKETIGDFWQMIFQRKVKVIVMLTELKHGDQEICAQYWGEGKQTYGDIEVDLKDTDKSSTYTLRVFELRHSKRKDSRTVYQYQYTNWSVEQLPAEPKELISMIQVVKQKLPQKNSSEGNKHHKSTPLLIHCRDGSQQTGIFCALLNLLESAETEEVVDIFQVVKALRKARPGMVSTFEQYQFLYDVIASTYPAQNGQVKKNNHQEDKIEFDNEVDKVKQDANCVNPLGAPEKLPEAKEQAEGSEPTSGTEGPEHSVNGPASPALNQGS

SEQ ID NO: 36766 - protein, 1240 aa, Homo sapiens
MTMYLWLKLLAFGFAFLDTEVFVTGQSPTPSPTGVSSVQTPHLPTHADSQTPSAGTDTQTFSGSAANAKLNPTPGSNAISDVPGERSTASTFPTDPVSPLTTTLSLAHHSSAALPARTSNTTITANTSDAYLNASETTTLSPSGSAVISTTTIATTPSKPTCDEKYANITVDYLYNKETKLFTAKLNVNENVECGNNTCTNNEVHNLTECKNASVSISHNSCTAPDKTLILDVPPGVEKFQLHDCTQVEKADTTICLKWKNIETFTCDTQNITYRFQCGNMIFDNKEIKLENLEPEHEYKCDSEILYNNHKFTNASKIIKTDFGSPGEPQIIFCRSEAAHQGVITWNPPQRSFHNFTLCYIKETEKDCLNLDKNLIKYDLQNLKPYTKYVLSLHAYIIAKVQRNGSAAMCHFTTKSAPPSQVWNMTVSMTSDNSMHVKCRPPRDRNGPHERYHLEVEAGNTLVRNESHKNCDFRVKDLQYSTDYTFKAYFHNGDYPGEPFILHHSTSYNSKALIAFLAFLIIVTSIALLVVLYKIYDLHKKRSCNLDEQQELVERDDEKQLMNVEPIHADILLETYKRKIADEGRLFLAEFQSIPRVFSKFPIKEARKPFNQNKNRYVDILPYDYNRVELSEINGDAGSNYINASYIDGFKEPRKYIAAQGPRDETVDDFWRMIWEQKATVIVMVTRCEEGNRNKCAEYWPSMEEGTRAFGDVVVKINQHKRCPDYIIQKLNIVNKKEKATGREVTHIQFTSWPDHGVPEDPHLLLKLRRRVNAFSNFFSGPIVVHCSAGVGRTGTYIGIDAMLEGLEAENKVDVYGYVVKLRRQRCLMVQVEAQYILIHQALVEYNQFGETEVNLSELHPYLHNMKKRDPPSEPSPLEAEFQRLPSYRSWRTQHIGNQEENKSKNRNSNVIPYDYNRVPLKHELEMSKESEHDSDESSDDDSDSEEPSKYINASFIMSYWKPEVMIAAQGPLKETIGDFWQMIFQRKVKVIVMLTELKHGDQEICAQYWGEGKQTYGDIEVDLKDTDKSSTYTLRVFELRHSKRKDSRTVYQYQYTNWSVEQLPAEPKELISMIQVVKQKLPQKNSSEGNKHHKSTPLLIHCRDGSQQTGIFCALLNLLESAETEEVVDIFQVVKALRKARPGMVSTFEQYQFLYDVIASTYPAQNGQVKKNNHQEDKIEFDNEVDKVKQDANCVNPLGAPEKLPEAKEQAEGSEPTSGTEGPEHSVNGPASPALNQGS

SEQ ID NO: 36767 - protein, 1211 aa, Homo sapiens
MTMYLWLKLLAFGFAFLDTEVFVTGQSPTPSPTGLTTAKMPSVPLSSDPLPTHTTAFSPASTFERENDFSETTTSLSPDNTSTQVSPDSLDNASAFNTTDAYLNASETTTLSPSGSAVISTTTIATTPSKPTCDEKYANITVDYLYNKETKLFTAKLNVNENVECGNNTCTNNEVHNLTECKNASVSISHNSCTAPDKTLILDVPPGVEKFQLHDCTQVEKADTTICLKWKNIETFTCDTQNITYRFQCGNMIFDNKEIKLENLEPEHEYKCDSEILYNNHKFTNASKIIKTDFGSPGEPQIIFCRSEAAHQGVITWNPPQRSFHNFTLCYIKETEKDCLNLDKNLIKYDLQNLKPYTKYVLSLHAYIIAKVQRNGSAAMCHFTTKSAPPSQVWNMTVSMTSDNSMHVKCRPPRDRNGPHERYHLEVEAGNTLVRNESHKNCDFRVKDLQYSTDYTFKAYFHNGDYPGEPFILHHSTSYNSKALIAFLAFLIIVTSIALLVVLYKIYDLHKKRSCNLDEQQELVERDDEKQLMNVEPIHADILLETYKRKIADEGRLFLAEFQSIPRVFSKFPIKEARKPFNQNKNRYVDILPYDYNRVELSEINGDAGSNYINASYIDGFKEPRKYIAAQGPRDETVDDFWRMIWEQKATVIVMVTRCEEGNRNKCAEYWPSMEEGTRAFGDVVVKINQHKRCPDYIIQKLNIVNKKEKATGREVTHIQFTSWPDHGVPEDPHLLLKLRRRVNAFSNFFSGPIVVHCSAGVGRTGTYIGIDAMLEGLEAENKVDVYGYVVKLRRQRCLMVQVEAQYILIHQALVEYNQFGETEVNLSELHPYLHNMKKRDPPSEPSPLEAEFQRLPSYRSWRTQHIGNQEENKSKNRNSNVIPYDYNRVPLKHELEMSKESEHDSDESSDDDSDSEEPSKYINASFIMSYWKPEVMIAAQGPLKETIGDFWQMIFQRKVKVIVMLTELKHGDQEICAQYWGEGKQTYGDIEVDLKDTDKSSTYTLRVFELRHSKRKDSRTVYQYQYTNWSVEQLPAEPKELISMIQVVKQKLPQKNSSEGNKHHKSTPLLIHCRDGSQQTGIFCALLNLLESAETEEVVDIFQVVKALRKARPGMVSTFEQYQFLYDVIASTYPAQNGQVKKNNHQEDKIEFDNEVDKVKQDANCVNPLGAPEKLPEAKEQAEGSEPTSGTEGPEHSVNGPASPALNQGS

SEQ ID NO: 36768 - protein, 1192 aa, Homo sapiens
MTMYLWLKLLAFGFAFLDTEVFVTGQSPTPSPTGVSSVQTPHLPTHADSQTPSAGTDTQTFSGSAANAKLNPTPGSNAISDAYLNASETTTLSPSGSAVISTTTIATTPSKPTCDEKYANITVDYLYNKETKLFTAKLNVNENVECGNNTCTNNEVHNLTECKNASVSISHNSCTAPDKTLILDVPPGVEKFQLHDCTQVEKADTTICLKWKNIETFTCDTQNITYRFQCGNMIFDNKEIKLENLEPEHEYKCDSEILYNNHKFTNASKIIKTDFGSPGEPQIIFCRSEAAHQGVITWNPPQRSFHNFTLCYIKETEKDCLNLDKNLIKYDLQNLKPYTKYVLSLHAYIIAKVQRNGSAAMCHFTTKSAPPSQVWNMTVSMTSDNSMHVKCRPPRDRNGPHERYHLEVEAGNTLVRNESHKNCDFRVKDLQYSTDYTFKAYFHNGDYPGEPFILHHSTSYNSKALIAFLAFLIIVTSIALLVVLYKIYDLHKKRSCNLDEQQELVERDDEKQLMNVEPIHADILLETYKRKIADEGRLFLAEFQSIPRVFSKFPIKEARKPFNQNKNRYVDILPYDYNRVELSEINGDAGSNYINASYIDGFKEPRKYIAAQGPRDETVDDFWRMIWEQKATVIVMVTRCEEGNRNKCAEYWPSMEEGTRAFGDVVVKINQHKRCPDYIIQKLNIVNKKEKATGREVTHIQFTSWPDHGVPEDPHLLLKLRRRVNAFSNFFSGPIVVHCSAGVGRTGTYIGIDAMLEGLEAENKVDVYGYVVKLRRQRCLMVQVEAQYILIHQALVEYNQFGETEVNLSELHPYLHNMKKRDPPSEPSPLEAEFQRLPSYRSWRTQHIGNQEENKSKNRNSNVIPYDYNRVPLKHELEMSKESEHDSDESSDDDSDSEEPSKYINASFIMSYWKPEVMIAAQGPLKETIGDFWQMIFQRKVKVIVMLTELKHGDQEICAQYWGEGKQTYGDIEVDLKDTDKSSTYTLRVFELRHSKRKDSRTVYQYQYTNWSVEQLPAEPKELISMIQVVKQKLPQKNSSEGNKHHKSTPLLIHCRDGSQQTGIFCALLNLLESAETEEVVDIFQVVKALRKARPGMVSTFEQYQFLYDVIASTYPAQNGQVKKNNHQEDKIEFDNEVDKVKQDANCVNPLGAPEKLPEAKEQAEGSEPTSGTEGPEHSVNGPASPALNQGS

SEQ ID NO: 36769 - protein, 1193 aa, Homo sapiens
MTMYLWLKLLAFGFAFLDTEVFVTGQSPTPSPTDVPGERSTASTFPTDPVSPLTTTLSLAHHSSAALPARTSNTTITANTSDAYLNASETTTLSPSGSAVISTTTIATTPSKPTCDEKYANITVDYLYNKETKLFTAKLNVNENVECGNNTCTNNEVHNLTECKNASVSISHNSCTAPDKTLILDVPPGVEKFQLHDCTQVEKADTTICLKWKNIETFTCDTQNITYRFQCGNMIFDNKEIKLENLEPEHEYKCDSEILYNNHKFTNASKIIKTDFGSPGEPQIIFCRSEAAHQGVITWNPPQRSFHNFTLCYIKETEKDCLNLDKNLIKYDLQNLKPYTKYVLSLHAYIIAKVQRNGSAAMCHFTTKSAPPSQVWNMTVSMTSDNSMHVKCRPPRDRNGPHERYHLEVEAGNTLVRNESHKNCDFRVKDLQYSTDYTFKAYFHNGDYPGEPFILHHSTSYNSKALIAFLAFLIIVTSIALLVVLYKIYDLHKKRSCNLDEQQELVERDDEKQLMNVEPIHADILLETYKRKIADEGRLFLAEFQSIPRVFSKFPIKEARKPFNQNKNRYVDILPYDYNRVELSEINGDAGSNYINASYIDGFKEPRKYIAAQGPRDETVDDFWRMIWEQKATVIVMVTRCEEGNRNKCAEYWPSMEEGTRAFGDVVVKINQHKRCPDYIIQKLNIVNKKEKATGREVTHIQFTSWPDHGVPEDPHLLLKLRRRVNAFSNFFSGPIVVHCSAGVGRTGTYIGIDAMLEGLEAENKVDVYGYVVKLRRQRCLMVQVEAQYILIHQALVEYNQFGETEVNLSELHPYLHNMKKRDPPSEPSPLEAEFQRLPSYRSWRTQHIGNQEENKSKNRNSNVIPYDYNRVPLKHELEMSKESEHDSDESSDDDSDSEEPSKYINASFIMSYWKPEVMIAAQGPLKETIGDFWQMIFQRKVKVIVMLTELKHGDQEICAQYWGEGKQTYGDIEVDLKDTDKSSTYTLRVFELRHSKRKDSRTVYQYQYTNWSVEQLPAEPKELISMIQVVKQKLPQKNSSEGNKHHKSTPLLIHCRDGSQQTGIFCALLNLLESAETEEVVDIFQVVKALRKARPGMVSTFEQYQFLYDVIASTYPAQNGQVKKNNHQEDKIEFDNEVDKVKQDANCVNPLGAPEKLPEAKEQAEGSEPTSGTEGPEHSVNGPASPALNQGS

SEQ ID NO: 36770 - protein, 2315 aa, Homo sapiens
MRILKRFLACIQLLCVCRLDWANGYYRQQRKLVEEIGWSYTGALNQKNWGKKYPTCNSPKQSPINIDEDLTQVNVNLKKLKFQGWDKTSLENTFIHNTGKTVEINLTNDYRVSGGVSEMVFKASKITFHWGKCNMSSDGSEHSLEGQKFPLEMQIYCFDADRFSSFEEAVKGKGKLRALSILFEVGTEENLDFKAIIDGVESVSRFGKQAALDPFILLNLLPNSTDKYYIYNGSLTSPPCTDTVDWIVFKDTVSISESQLAVFCEVLTMQQSGYVMLMDYLQNNFREQQYKFSRQVFSSYTGKEEIHEAVCSSEPENVQADPENYTSLLVTWERPRVVYDTMIEKFAVLYQQLDGEDQTKHEFLTDGYQDLGAILNNLLPNMSYVLQIVAICTNGLYGKYSDQLIVDMPTDNPELDLFPELIGTEEIIKEEEEGKDIEEGAIVNPGRDSATNQIRKKEPQISTTTHYNRIGTKYNEAKTNRSPTRGSEFSGKGDVPNTSLNSTSQPVTKLATEKDISLTSQTVTELPPHTVEGTSASLNDGSKTVLRSPHMNLSGTAESLNTVSITEYEEESLLTSFKLDTGAEDSSGSSPATSAIPFISENISQGYIFSSENPETITYDVLIPESARNASEDSTSSGSEESLKDPSMEGNVWFPSSTDITAQPDVGSGRESFLQTNYTEIRVDESEKTTKSFSAGPVMSQGPSVTDLEMPHYSTFAYFPTEVTPHAFTPSSRQQDLVSTVNVVYSQTTQPVYNGETPLQPSYSSEVFPLVTPLLLDNQILNTTPAASSSDSALHATPVFPSVDVSFESILSSYDGAPLLPFSSASFSSELFRHLHTVSQILPQVTSATESDKVPLHASLPVAGGDLLLEPSLAQYSDVLSTTHAASETLEFGSESGVLYKTLMFSQVEPPSSDAMMHARSSGPEPSYALSDNEGSQHIFTVSYSSAIPVHDSVGVTYQGSLFSGPSHIPIPKSSLITPTASLLQPTHALSGDGEWSGASSDSEFLLPDTDGLTALNISSPVSVAEFTYTTSVFGDDNKALSKSEIIYGNETELQIPSFNEMVYPSESTVMPNMYDNVNKLNASLQETSVSISSTKGMFPGSLAHTTTKVFDHEISQVPENNFSVQPTHTVSQASGDTSLKPVLSANSEPASSDPASSEMLSPSTQLLFYETSASFSTEVLLQPSFQASDVDTLLKTVLPAVPSDPILVETPKVDKISSTMLHLIVSNSASSENMLHSTSVPVFDVSPTSHMHSASLQGLTISYASEKYEPVLLKSESSHQVVPSLYSNDELFQTANLEINQAHPPKGRHVFATPVLSIDEPLNTLINKLIHSDEILTSTKSSVTGKVFAGIPTVASDTFVSTDHSVPIGNGHVAITAVSPHRDGSVTSTKLLFPSKATSELSHSAKSDAGLVGGGEDGDTDDDGDDDDDDRGSDGLSIHKCMSCSSYRESQEKVMNDSDTHENSLMDQNNPISYSLSENSEEDNRVTSVSSDSQTGMDRSPGKSPSANGLSQKHNDGKEENDIQTGSALLPLSPESKAWAVLTSDEESGSGQGTSDSLNENETSTDFSFADTNEKDADGILAAGDSEITPGFPQSPTSSVTSENSEVFHVSEAEASNSSHESRIGLAEGLESEKKAVIPLVIVSALTFICLVVLVGILIYWRKCFQTAHFYLEDSTSPRVISTPPTPIFPISDDVGAIPIKHFPKHVADLHASSGFTEEFETLKEFYQEVQSCTVDLGITADSSNHPDNKHKNRYINIVAYDHSRVKLAQLAEKDGKLTDYINANYVDGYNRPKAYIAAQGPLKSTAEDFWRMIWEHNVEVIVMITNLVEKGRRKCDQYWPADGSEEYGNFLVTQKSVQVLAYYTVRNFTLRNTKIKKGSQKGRPSGRVVTQYHYTQWPDMGVPEYSLPVLTFVRKAAYAKRHAVGPVVVHCSAGVGRTGTYIVLDSMLQQIQHEGTVNIFGFLKHIRSQRNYLVQTEEQYVFIHDTLVEAILSKETEVLDSHIHAYVNALLIPGPAGKTKLEKQFQLLSQSNIQQSDYSAALKQCNREKNRTSSIIPVERSRVGISSLSGEGTDYINASYIMGYYQSNEFIITQHPLLHTIKDFWRMIWDHNAQLVVMIPDGQNMAEDEFVYWPNKDEPINCESFKVTLMAEEHKCLSNEEKLIIQDFILEATQDDYVLEVRHFQCPKWPNPDSPISKTFELISVIKEEAANRDGPMIVHDEHGGVTAGTFCALTTLMHQLEKENSVDVYQVAKMINLMRPGVFADIEQYQFLYKVILSLVSTRQEENPSTSLDSNGAALPDGNIAESLESLV

SEQ ID NO: 36771 - protein, 2308 aa, Homo sapiens
MRILKRFLACIQLLCVCRLDWANGYYRQQRKLVEEIGWSYTGALNQKNWGKKYPTCNSPKQSPINIDEDLTQVNVNLKKLKFQGWDKTSLENTFIHNTGKTVEINLTNDYRVSGGVSEMVFKASKITFHWGKCNMSSDGSEHSLEGQKFPLEMQIYCFDADRFSSFEEAVKGKGKLRALSILFEVGTEENLDFKAIIDGVESVSRFGKQAALDPFILLNLLPNSTDKYYIYNGSLTSPPCTDTVDWIVFKDTVSISESQLAVFCEVLTMQQSGYVMLMDYLQNNFREQQYKFSRQVFSSYTGKEEIHEAVCSSEPENVQADPENYTSLLVTWERPRVVYDTMIEKFAVLYQQLDGEDQTKHEFLTDGYQDLGAILNNLLPNMSYVLQIVAICTNGLYGKYSDQLIVDMPTDNPELDLFPELIGTEEIIKEEEEGKDIEEGAIVNPGRDSATNQIRKKEPQISTTTHYNRIGTKYNEAKTNRSPTRGSEFSGKGDVPNTSLNSTSQPVTKLATEKDISLTSQTVTELPPHTVEGTSASLNDGSKTVLRSPHMNLSGTAESLNTVSITEYEEESLLTSFKLDTGAEDSSGSSPATSAIPFISENISQGYIFSSENPETITYDVLIPESARNASEDSTSSGSEESLKDPSMEGNVWFPSSTDITAQPDVGSGRESFLQTNYTEIRVDESEKTTKSFSAGPVMSQGPSVTDLEMPHYSTFAYFPTEVTPHAFTPSSRQQDLVSTVNVVYSQTTQPVYNGETPLQPSYSSEVFPLVTPLLLDNQILNTTPAASSSDSALHATPVFPSVDVSFESILSSYDGAPLLPFSSASFSSELFRHLHTVSQILPQVTSATESDKVPLHASLPVAGGDLLLEPSLAQYSDVLSTTHAASETLEFGSESGVLYKTLMFSQVEPPSSDAMMHARSSGPEPSYALSDNEGSQHIFTVSYSSAIPVHDSVGVTYQGSLFSGPSHIPIPKSSLITPTASLLQPTHALSGDGEWSGASSDSEFLLPDTDGLTALNISSPVSVAEFTYTTSVFGDDNKALSKSEIIYGNETELQIPSFNEMVYPSESTVMPNMYDNVNKLNASLQETSVSISSTKGMFPGSLAHTTTKVFDHEISQVPENNFSVQPTHTVSQASGDTSLKPVLSANSEPASSDPASSEMLSPSTQLLFYETSASFSTEVLLQPSFQASDVDTLLKTVLPAVPSDPILVETPKVDKISSTMLHLIVSNSASSENMLHSTSVPVFDVSPTSHMHSASLQGLTISYASEKYEPVLLKSESSHQVVPSLYSNDELFQTANLEINQAHPPKGRHVFATPVLSIDEPLNTLINKLIHSDEILTSTKSSVTGKVFAGIPTVASDTFVSTDHSVPIGNGHVAITAVSPHRDGSVTSTKLLFPSKATSELSHSAKSDAGLVGGGEDGDTDDDGDDDDDDRGSDGLSIHKCMSCSSYRESQEKVMNDSDTHENSLMDQNNPISYSLSENSEEDNRVTSVSSDSQTGMDRSPGKSPSANGLSQKHNDGKEENDIQTGSALLPLSPESKAWAVLTSDEESGSGQGTSDSLNENETSTDFSFADTNEKDADGILAAGDSEITPGFPQSPTSSVTSENSEVFHVSEAEASNSSHESRIGLAEGLESEKKAVIPLVIVSALTFICLVVLVGILIYWRKCFQTAHFYLEDSTSPRVISTPPTPIFPISDDVGAIPIKHFPKHVADLHASSGFTEEFEEVQSCTVDLGITADSSNHPDNKHKNRYINIVAYDHSRVKLAQLAEKDGKLTDYINANYVDGYNRPKAYIAAQGPLKSTAEDFWRMIWEHNVEVIVMITNLVEKGRRKCDQYWPADGSEEYGNFLVTQKSVQVLAYYTVRNFTLRNTKIKKGSQKGRPSGRVVTQYHYTQWPDMGVPEYSLPVLTFVRKAAYAKRHAVGPVVVHCSAGVGRTGTYIVLDSMLQQIQHEGTVNIFGFLKHIRSQRNYLVQTEEQYVFIHDTLVEAILSKETEVLDSHIHAYVNALLIPGPAGKTKLEKQFQLLSQSNIQQSDYSAALKQCNREKNRTSSIIPVERSRVGISSLSGEGTDYINASYIMGYYQSNEFIITQHPLLHTIKDFWRMIWDHNAQLVVMIPDGQNMAEDEFVYWPNKDEPINCESFKVTLMAEEHKCLSNEEKLIIQDFILEATQDDYVLEVRHFQCPKWPNPDSPISKTFELISVIKEEAANRDGPMIVHDEHGGVTAGTFCALTTLMHQLEKENSVDVYQVAKMINLMRPGVFADIEQYQFLYKVILSLVSTRQEENPSTSLDSNGAALPDGNIAESLESLV

SEQ ID NO: 36772 - protein, 1448 aa, Homo sapiens
MRILKRFLACIQLLCVCRLDWANGYYRQQRKLVEEIGWSYTGALNQKNWGKKYPTCNSPKQSPINIDEDLTQVNVNLKKLKFQGWDKTSLENTFIHNTGKTVEINLTNDYRVSGGVSEMVFKASKITFHWGKCNMSSDGSEHSLEGQKFPLEMQIYCFDADRFSSFEEAVKGKGKLRALSILFEVGTEENLDFKAIIDGVESVSRFGKQAALDPFILLNLLPNSTDKYYIYNGSLTSPPCTDTVDWIVFKDTVSISESQLAVFCEVLTMQQSGYVMLMDYLQNNFREQQYKFSRQVFSSYTGKEEIHEAVCSSEPENVQADPENYTSLLVTWERPRVVYDTMIEKFAVLYQQLDGEDQTKHEFLTDGYQDLGAILNNLLPNMSYVLQIVAICTNGLYGKYSDQLIVDMPTDNPELDLFPELIGTEEIIKEEEEGKDIEEGAIVNPGRDSATNQIRKKEPQISTTTHYNRIGTKYNEAKTNRSPTRGSEFSGKGDVPNTSLNSTSQPVTKLATEKDISLTSQTVTELPPHTVEGTSASLNDGSKTVLRSPHMNLSGTAESLNTVSITEYEEESLLTSFKLDTGAEDSSGSSPATSAIPFISENISQGYIFSSENPETITYDVLIPESARNASEDSTSSGSEESLKDPSMEGNVWFPSSTDITAQPDVGSGRESFLQTNYTEIRVDESEKTTKSFSAGPVMSQGPSVTDLEMPHYSTFAYFPTEVTPHAFTPSSRQQDLVSTVNVVYSQTTQPVYNEASNSSHESRIGLAEGLESEKKAVIPLVIVSALTFICLVVLVGILIYWRKCFQTAHFYLEDSTSPRVISTPPTPIFPISDDVGAIPIKHFPKHVADLHASSGFTEEFEEVQSCTVDLGITADSSNHPDNKHKNRYINIVAYDHSRVKLAQLAEKDGKLTDYINANYVDGYNRPKAYIAAQGPLKSTAEDFWRMIWEHNVEVIVMITNLVEKGRRKCDQYWPADGSEEYGNFLVTQKSVQVLAYYTVRNFTLRNTKIKKGSQKGRPSGRVVTQYHYTQWPDMGVPEYSLPVLTFVRKAAYAKRHAVGPVVVHCSAGVGRTGTYIVLDSMLQQIQHEGTVNIFGFLKHIRSQRNYLVQTEEQYVFIHDTLVEAILSKETEVLDSHIHAYVNALLIPGPAGKTKLEKQFQLLSQSNIQQSDYSAALKQCNREKNRTSSIIPVERSRVGISSLSGEGTDYINASYIMGYYQSNEFIITQHPLLHTIKDFWRMIWDHNAQLVVMIPDGQNMAEDEFVYWPNKDEPINCESFKVTLMAEEHKCLSNEEKLIIQDFILEATQDDYVLEVRHFQCPKWPNPDSPISKTFELISVIKEEAANRDGPMIVHDEHGGVTAGTFCALTTLMHQLEKENSVDVYQVAKMINLMRPGVFADIEQYQFLYKVILSLVSTRQEENPSTSLDSNGAALPDGNIAESLESLV

SEQ ID NO: 36773 - protein, 256 aa, Homo sapiens
MASRYDRAITVFSPDGHLFQVEYAQEAVKKGSTAVGIRGTNIVVLGVEKKSVAKLQDERTVRKICALDDHVCMAFAVLTIFIGLTADARVVINRARVECQSHKLTVEDPVTVEYITRFIATLKQKYTQSNGRRPFGISALIVGFDDDGISRLYQTDPSGTYHAWKANAIGRSAKTVREFLEKNYTEDAIASDSEAIKLAIKALLEVVQSGGKNIELAIIRRNQPLKMFSAKEVELYVTEIEKEKEEAEKKKSKKSV

SEQ ID NO: 36774 - protein, 212 aa, Homo sapiens
MASRYDRAITVFSPDGHLFQVEYAQEAVKKGSTAVGIRGLTADARVVINRARVECQSHKLTVEDPVTVEYITRFIATLKQKYTQSNGRRPFGISALIVGFDDDGISRLYQTDPSGTYHAWKANAIGRSAKTVREFLEKNYTEDAIASDSEAIKLAIKALLEVVQSGGKNIELAIIRRNQPLKMFSAKEVELYVTEIEKEKEEAEKKKSKKSV

SEQ ID NO: 36775 - protein, 250 aa, Homo sapiens
MASRYDRAITVFSPDGHLFQVEYAQEAVKKGSTAVGIRGTNIVVLGVEKKSVAKLQDERTVRKICALDDHVCMAFAGLTADARVVINRARVECQSHKLTVEDPVTVEYITRFIATLKQKYTQSNGRRPFGISALIVGFDDDGISRLYQTDPSGTYHAWKANAIGRSAKTVREFLEKNYTEDAIASDSEAIKLAIKALLEVVQSGGKNIELAIIRRNQPLKMFSAKEVELYVTEIEKEKEEAEKKKSKKSV

SEQ ID NO: 36776 - protein, 531 aa, Homo sapiens
MDGIVTEVAVGVKRGSDELLSGSVLSSPNSNMSSMVVTANGNDSKKFKGEDKMDGAPSRVLHIRKLPGEVTETEVIALGLPFGKVTNILMLKGKNQAFLELATEEAAITMVNYYSAVTPHLRNQPIYIQYSNHKELKTDNTLNQRAQAVLQAVTAVQTANTPLSGTTVSESAVTPAQSPVLRIIIDNMYYPVTLDVLHQIFSKFGAVLKIITFTKNNQFQALLQYGDPVNAQQAKLALDGQNIYNACCTLRIDFSKLVNLNVKYNNDKSRDYTRPDLPSGDGQPALDPAIAAAFAKETSLLAVPGALSPLAIPNAAAAAAAAAAGRVGMPGVSAGGNTVLLVSNLNEEMVTPQSLFTLFGVYGDVQRVKILYNKKDSALIQMADGNQSQLAMNHLNGQKMYGKIIRVTLSKHQTVQLPREGLDDQGLTKDFGNSPLHRFKKPGSKNFQNIFPPSATLHLSNIPPSVAEEDLRTLFANTGGTVKAFKFFQDHKMALLQMATVEEAIQALIDLHNYNLGENHHLRVSFSKSTI

SEQ ID NO: 36777 - protein, 532 aa, Homo sapiens
MDGIVTEVAVGVKRGSDELLSGSVLSSPNSNMSSMVVTANGNDSKKFKGEDKMDGAPSRVLHIRKLPGEVTETEVIALGLPFGKVTNILMLKGKNQAFLELATEEAAITMVNYYSAVTPHLRNQPIYIQYSNHKELKTDNTLNQRAQAVLQAVTAVQTANTPLSGTTVSESAVTPAQSPVLRIIIDNMYYPVTLDVLHQIFSKFGAVLKIITFTKNNQFQALLQYGDPVNAQQAKLALDGQNIYNACCTLRIDFSKLVNLNVKYNNDKSRDYTRPDLPSGDGQPALDPAIAAAFAKETSLLAVPGALSPLAIPNAAAAAAAAAAGRVGMPGVSAGGNTVLLVSNLNEEMVTPQSLFTLFGVYGDVQRVKILYNKKDSALIQMADGNQSQLAMNHLNGQKMYGKIIRVTLSKHQTVQLPREGLDDQGLTKDFGNSPLHRFKKPGSKNFQNIFPPSATLHLSNIPPSVAEEDLRTLFANTGGTVKAFKFFQRDHKMALLQMATVEEAIQALIDLHNYNLGENHHLRVSFSKSTI

SEQ ID NO: 36778 - protein, 537 aa, Homo sapiens
MDGIVTEVAVGVKRGSDELLSGSVLSSPNSNMSSMVVTANGNDSKKFKGEDKMDGAPSRVLHIRKLPGEVTETEVIALGLPFGKVTNILMLKGKNQAFLELATEEAAITMVNYYSAVTPHLRNQPIYIQYSNHKELKTDNTLNQRAQAVLQAVTAVQTANTPLSGTTVSESAVTPAQSPVLRIIIDNMYYPVTLDVLHQIFSKFGAVLKIITFTKNNQFQALLQYGDPVNAQQAKLALDGQNIYNACCTLRIDFSKLVNLNVKYNNDKSRDYTRPDLPSGDGQPALDPAIAAAFAKETSLLGLPVAAVPGALSPLAIPNAAAAAAAAAAGRVGMPGVSAGGNTVLLVSNLNEEMVTPQSLFTLFGVYGDVQRVKILYNKKDSALIQMADGNQSQLAMNHLNGQKMYGKIIRVTLSKHQTVQLPREGLDDQGLTKDFGNSPLHRFKKPGSKNFQNIFPPSATLHLSNIPPSVAEEDLRTLFANTGGTVKAFKFFQRDHKMALLQMATVEEAIQALIDLHNYNLGENHHLRVSFSKSTI

SEQ ID NO: 36779 - protein, 536 aa, Homo sapiens
MDGIVTEVAVGVKRGSDELLSGSVLSSPNSNMSSMVVTANGNDSKKFKGEDKMDGAPSRVLHIRKLPGEVTETEVIALGLPFGKVTNILMLKGKNQAFLELATEEAAITMVNYYSAVTPHLRNQPIYIQYSNHKELKTDNTLNQRAQAVLQAVTAVQTANTPLSGTTVSESAVTPAQSPVLRIIIDNMYYPVTLDVLHQIFSKFGAVLKIITFTKNNQFQALLQYGDPVNAQQAKLALDGQNIYNACCTLRIDFSKLVNLNVKYNNDKSRDYTRPDLPSGDGQPALDPAIAAAFAKETSLLGLPVAAVPGALSPLAIPNAAAAAAAAAAGRVGMPGVSAGGNTVLLVSNLNEEMVTPQSLFTLFGVYGDVQRVKILYNKKDSALIQMADGNQSQLAMNHLNGQKMYGKIIRVTLSKHQTVQLPREGLDDQGLTKDFGNSPLHRFKKPGSKNFQNIFPPSATLHLSNIPPSVAEEDLRTLFANTGGTVKAFKFFQDHKMALLQMATVEEAIQALIDLHNYNLGENHHLRVSFSKSTI

SEQ ID NO: 36780 - protein, 356 aa, Homo sapiens
MDGIVTEVAVGVKRGSDELLSGSVLSSPNSNMSSMVVTANGNDSKKFKGEDKMDGAPSRVLHIRKLPGEVTETEVIALGLPFGKVTNILMLKGKNQAFLELATEEAAITMVNYYSAVTPHLRNQPIYIQYSNHKELKTDNTLNQRAQAVLQAVTAVQTANTPLSGTTVSESAVTPAQSPVLRIIIDNMYYPVTLDVLHQIFSKFGAVLKIITFTKNNQFQALLQYGDPVNAQQAKLALDGQNIYNACCTLRIDFSKLVNLNVKYNNDKSRDYTRPDLPSGDGQPALDPAIAAAFAKETSLLAVPGALSPLAIPNAAAAAAAAAAGRVGMPGVSAGGNTVLLVSNLNEEVFMEMCSV

SEQ ID NO: 36781 - protein, 361 aa, Homo sapiens
MDGIVTEVAVGVKRGSDELLSGSVLSSPNSNMSSMVVTANGNDSKKFKGEDKMDGAPSRVLHIRKLPGEVTETEVIALGLPFGKVTNILMLKGKNQAFLELATEEAAITMVNYYSAVTPHLRNQPIYIQYSNHKELKTDNTLNQRAQAVLQAVTAVQTANTPLSGTTVSESAVTPAQSPVLRIIIDNMYYPVTLDVLHQIFSKFGAVLKIITFTKNNQFQALLQYGDPVNAQQAKLALDGQNIYNACCTLRIDFSKLVNLNVKYNNDKSRDYTRPDLPSGDGQPALDPAIAAAFAKETSLLGLPVAAVPGALSPLAIPNAAAAAAAAAAGRVGMPGVSAGGNTVLLVSNLNEEVFMEMCSV

SEQ ID NO: 36782 - protein, 363 aa, Homo sapiens
MEDLEEDVRFIVDETLDFGGLSPSDSREEEDITVLVTPEKPLRRGLSHRSDPNAVAPAPQGVRLSLGPLSPEKLEEILDEANRLAAQLEQCALQDRESAGEGLGPRRVKPSPRRETFVLKDSPVRDLLPTVNSLTRSTPSPSSLTPRLRSNDRKGSVRALRATSGKRPSNMKRESPTCNLFPASKSPASSPLTRSTPPVRGRAGPSGRAAASEETRAAKLRVSGSGEFVGLTLKFLHPSPPGPPTPIRSVLAPQPSTSNSQRLPRPQGAAAKSSSQLPIPSAIPRPASRMPLTSRSVPPGRGALPPDSLSTRKGLPRPSTAGHRVRESGHKVPVSQRLNLPVMGATRSNLQPPRKVAVPGPTR

SEQ ID NO: 36783 - protein, 333 aa, Homo sapiens
MEDLEEDVRFIVDETLDFGGLSPSDSREEEDITVLVTPEKPLRRGLSHRSDPNAVAPAPQGVRLSLGPLSPEKLEEILDEANRLAAQLEQCALQDRESAGEGLGPRRVKPSPRRETFVLKDSPVRDLLPTVNSLTRSTPSPSSLTPRLRSNDRKGSVRALRATSGKRPSNMKRESPTCNLFPASKSPASSPLTRSTPPVRGRAGPSGRAAASPPTPIRSVLAPQPSTSNSQRLPRPQGAAAKSSSQLPIPSAIPRPASRMPLTSRSVPPGRGALPPDSLSTRKGLPRPSTAGHRVRESGHKVPVSQRLNLPVMGATRSNLQPPRKVAVPGPTR

SEQ ID NO: 36784 - protein, 310 aa, Homo sapiens
MEDLEEDVRFIVDETLDFGGLSPSDSREEEDITVLVTPEKPLRRGLSHRSDPNAVAPAPQGVRLSLGPLSPEKLEEILDEANRLAAQLEQCALQDRESAGEGLGPRRVKPSPRRETFVLKDSPVRDLLPTVNSLTRSTPSPSSLTPRLRSNDRKGSVRALRATSGKRPSNMKRESPTCNLFPASKSPASSPLTRSTPPVRGRAGPSGRAAASEETRAAKLRACQPNATHQPECATWQRCPTSGFSVNSKRASKTKHCRTQSAGKWTQGSCFPATKSSCHGCHSQQSAAPQESGSPRTYQVKRSGQQARLQ

SEQ ID NO: 36785 - protein, 163 aa, Homo sapiens
MKRESPTCNLFPASKSPASSPLTRSTPPVRGRAGPSGRAAASPPTPIRSVLAPQPSTSNSQRLPRPQGAAAKSSSQLPIPSAIPRPASRMPLTSRSVPPGRGALPPDSLSTRKGLPRPSTAGHRVRESGHKVPVSQRLNLPVMGATRSNLQPPRKVAVPGPTR

SEQ ID NO: 36786 - protein, 453 aa, Homo sapiens
MKLLTRAGSFSRFYSLKVAPKVKATAAPAGAPPQPQDLEFTKLPNGLVIASLENYSPVSRIGLFIKAGSRYEDFSNLGTTHLLRLTSSLTTKGASSFKITRGIEAVGGKLSVTATRENMAYTVECLRGDVDILMEFLLNVTTAPEFRRWEVADLQPQLKIDKAVAFQNPQTHVIENLHAAAYRNALANPLYCPDYRIGKVTSEELHYFVQNHFTSARMALIGLGVSHPVLKQVAEQFLNMRGGLGLSGAKANYRGGEIREQNGDSLVHAAFVAESAVAGSAEANAFSVLQHVLGAGPHVKRGSNTTSHLHQAVAKATQQPFDVSAFNASYSDSGLFGIYTISQATAAGDVIKAAYNQVKTIAQGNLSNTDVQAAKNKLKAGYLMSVESSECFLEEVGSQALVAGSYMPPSTVLQQIDSVANADIINAAKKFVSGQKSMAASGNLGHTPFVDEL

SEQ ID NO: 36787 - protein, 2225 aa, Homo sapiens
MAALVLEDGSVLRGQPFGAAVSTAGEVVFQTGMVGYPEALTDPSYKAQILVLTYPLIGNYGIPPDEMDEFGLCKWFESSGIHVAALVVGECCPTPSHWSATRTLHEWLQQHGIPGLQGVDTRELTKKLREQGSLLGKLVQNGTEPSSLPFLDPNARPLVPEVSIKTPRVFNTGGAPRILALDCGLKYNQIRCLCQRGAEVTVVPWDHALDSQEYEGLFLSNGPGDPASYPSVVSTLSRVLSEPNPRPVFGICLGHQLLALAIGAKTYKMRYGNRGHNQPCLLVGSGRCFLTSQNHGFAVETDSLPADWAPLFTNANDGSNEGIVHNSLPFFSVQFHPEHQAGPSDMELLFDIFLETVKEATAGNPGGQTVRERLTERLCPPGIPTPGSGLPPPRKVLILGSGGLSIGQAGEFDYSGSQAIKALKEENIQTLLINPNIATVQTSQGLADKVYFLPITPHYVTQVIRNERPDGVLLTFGGQTALNCGVELTKAGVLARYGVRVLGTPVETIELTEDRRAFAARMAEIGEHVAPSEAANSLEQAQAAAERLGYPVLVRAAFALGGLGSGFASNREELSALVAPAFAHTSQVLVDKSLKGWKEIEYEVVRDAYGNCVTVCNMENLDPLGIHTGESIVVAPSQTLNDREYQLLRQTAIKVTQHLGIVGECNVQYALNPESEQYYIIEVNARLSRSSALASKATGYPLAYVAAKLALGIPLPELRNSVTGGTAAFEPSVDYCVVKIPRWDLSKFLRVSTKIGSCMKSVGEVMGIGRSFEEAFQKALRMVDENCVGFDHTVKPVSDMELETPTDKRIFVVAAALWAGYSVDRLYELTRIDRWFLHRMKRIIAHAQLLEQHRGQPLPPDLLQQAKCLGFSDKQIALAVLSTELAVRKLRQELGICPAVKQIDTVAAEWPAQTNYLYLTYWGTTHDLTFRTPHVLVLGSGVYRIGSSVEFDWCAVGCIQQLRKMGYKTIMVNYNPETVSTDYDMCDRLYFDEISFEVVMDIYELENPEGVILSMGGQLPNNMAMALHRQQCRVLGTSPEAIDSAENRFKFSRLLDTIGISQPQWRELSDLESARQFCQTVGYPCVVRPSYVLSGAAMNVAYTDGDLERFLSSAAAVSKEHPVVISKFIQEAKEIDVDAVASDGVVAAIAISEHVENAGVHSGDATLVTPPQDITAKTLERIKAIVHAVGQELQVTGPFNLQLIAKDDQLKVIECNVRVSRSFPFVSKTLGVDLVALATRVIMGEEVEPVGLMTGSGVVGVKVPQFSFSRLAGADVVLGVEMTSTGEVAGFGESRCEAYLKAMLSTGFKIPKKNILLTIGSYKNKSELLPTVRLLESLGYSLYASLGTADFYTEHGVKVTAVDWHFEEAVDGECPPQRSILEQLAEKNFELVINLSMRGAGGRRLSSFVTKGYRTRRLAADFSVPLIIDIKCTKLFVEALGQIGPAPPLKVHVDCMTSQKLVRLPGLIDVHVHLREPGGTHKEDFASGTAAALAGGITMVCAMPNTRPPIIDAPALALAQKLAEAGARCDFALFLGASSENAGTLGTVAGSAAGLKLYLNETFSELRLDSVVQWMEHFETWPSHLPIVAHAEQQTVAAVLMVAQLTQRSVHICHVARKEEILLIKAAKARGLPVTCEVAPHHLFLSHDDLERLGPGKGEVRPELGSRQDVEALWENMAVIDCFASDHAPHTLEEKCGSRPPPGFPGLETMLPLLLTAVSEGRLSLDDLLQRLHHNPRRIFHLPPQEDTYVEVDLEHEWTIPSHMPFSKAHWTPFEGQKVKGTVRRVVLRGEVAYIDGQVLVPPGYGQDVRKWPQGAVPQLPPSAPATSEMTTTPERPRRGIPGLPDGRFHLPPRIHRASDPGLPAEEPKEKSSRKVAEPELMGTPDGTCYPPPPVPRQASPQNLGTPGLLHPQTSPLLHSLVGQHILSVQQFTKDQMSHLFNVAHTLRMMVQKERSLDILKGKVMASMFYEVSTRTSSSFAAAMARLGGAVLSFSEATSSVQKGESLADSVQTMSCYADVVVLRHPQPGAVELAAKHCRRPVINAGDGVGEHPTQALLDIFTIREELGTVNGMTITMVGDLKHGRTVHSLACLLTQYRVSLRYVAPPSLRMPPTVRAFVASRGTKQEEFESIEEALPDTDVLYMTRIQKERFGSTQEYEACFGQFILTPHIMTRAKKKMVVMHPMPRVNEISVEVDSDPRAAYFRQAENGMYIRMALLATVLGRF

SEQ ID NO: 36788 - protein, 1735 aa, Homo sapiens
MNFLSTAESRTAQAAASGTTLLPQFRAPSWQTGMHSSAATELFATGPLPSTGTLPPSLSAYQHPTTFSNRNFATTSPLVLQDSTFNTTSNGILSHHDPLLQIKTSQGTVPTALAFERLGSSVLSNSIPPQSSTYRSAQESAPHLLQPQFSLLPSALGGSQQTPQAYSSTLFTSSTASIERALLRECSVIKHHQRPSGTQSIQAQLTGSQHSLHSYLSNSSVVNFQETTRQSSLSCSPIGDSTQVSNGGLQQKTSQVSVELAQSYSSAIPSSGYPPSTTKIKSCSTEQPLTSTKTPKPQSIIPPVQTLSYSKPLHNQSSVISGQAQIYSTAQLPSLLSVSQSQNYGLVQPHNVPSIVHSQVYRSSKVEKLPPLYKTLTFSGSSQTVTPENQTLNYSSNQQEVLSSVTNENYPAQTRDLSSVSQSQSYSSGHSQGLSPVSQTQVSYSSQSQVLSVVSLSESYASGESLTLTAPSLSYSSASRAQNLPDSSPTQNYISMHSSQNVQTQESSSPQSQKFLPAVQSSSFASSTHCQTLQNNITSPDPKSYAERKLDSDVYPSSKQEDGFPMQELQVLQPQASLESSTQRLSDGEINAQESTYKVSKADDRYSQSVIRSNSRLEDQVIGVALQASKKEESVVGSVTQLNQQIGQVNNAATLDLKNSTNLIQTPQIRLNTKDLKQQHPLILKVHESKVQEQHDQIINASSQIQIPNHALGHGHQASLPNTQVLLDSACDLQILQQSILQAGLGQVKASLQAQRVQSPQQIVHPFLQMEGHVIQSNGDHSQQQLHPQNSEVMKMDLSESSKPLQQHLTTKGHFSETNQHDSKNQFVSLGSMCFPEAVLLSDERNILSNVDDILAATAAACGVTPTDFSKSTSNETMQAVEDGDSKSHFQQSLDVRHVTSDFNSMTATVGKPQNINDTSLNGNQVTVNLSPVPALQSKMTLDQQHIETPGQNIPTKVTSAVVGPSHEVQEQSSGPFKKQSATNLESEEDSEAPVDSTLNNNRNQEFVSSSRSISGENATSESEFTLGGDDSGVSMNPARSALALLAMAQSGDAVSVKIEEENQDLMHFNLQKKRAKGKGQVKEEDNSNQKQLKRPAQGKRQNPRGTDIYLPYTPPSSESCHDGYQHQEKMRQKIKEVEEKQPEVKTGFIASFLDFLKSGPKQQFSTLAVRMPNRTRRPGTQMVRTFCPPPLPKPSSTTPTPLVSETGGNSPSDKVDNELKNLEHLSSFSSDEDDPGYSQDAYKSVSTPLTTLDATSDKKKKTEALQVATTSPTANTTGTATTSSTTVGAVKQEPLHSTSYAVNILENISSSESSKPIELDGLPSDQFAKGQDTVAIEGFTDEEDTESGGEGQYRERDEFVVKIEDIETFKEALKTGKEPPAIWKVQKALLQKFVPEIRDGQREFAATNSYLGYFGDAKSKYKRIYVKFIENANKKEYVRVCSKKPRNKPSQTIRTVQAKPSSSSKTSDPLASKTTTTKAPSVKPKVKQPKVKAEPPPKKRKKWKEEFSSSQSDSSPEIHTSSSDDEEFEPPAPFVTRFLNTRAMKETFKSYMELLVSIALDPDTMQALEKSNDELLLPHMKKIDGMLNDNRKRLLLNLHLDQSFKNALESFPELTIITRDSKAKSGGTAISKIKMNGKAYNKKTLRTSKTTTKSAQEFAVDPEKIQLYSLYHSLHHYKYHVYLICKDEISSVQKKNEDLGQEEIVQLCMKNVKWVEDLFEKFGELLNHVQQKCS

SEQ ID NO: 36789 - protein, 1529 aa, Homo sapiens
MNFLSTAESRTAQAAASGTTLLPQFRAPSWQTGMHSSAATELFATGPLPSTGTLPPSLSAYQHPTTFSNRNFATTSPLVLQDSTFNTTSNGILSHHDPLLQIKTSQGTVPTALAFERLGSSVLSNSIPPQSSTYRSAQESAPHLLQPQFSLLPSALGGSQQTPQAYSSTLFTSSTASIERALLRECSVIKHHQRPSGTQSIQAQLTGSQHSLHSYLSNSSVVNFQETTRQSSLSCSPIGDSTQNLPDSSPTQNYISMHSSQNVQTQESSSPQSQKFLPAVQSSSFASSTHCQTLQNNITSPDPKSYAERKLDSDVYPSSKQEDGFPMQELQVLQPQASLESSTQRLSDGEINAQESTYKVSKADDRYSQSVIRSNSRLEDQVIGVALQASKKEESVVGSVTQLNQQIGQVNNAATLDLKNSTNLIQTPQIRLNTKDLKQQHPLILKVHESKVQEQHDQIINASSQIQIPNHALGHGHQASLPNTQVLLDSACDLQILQQSILQAGLGQVKASLQAQRVQSPQQIVHPFLQMEGHVIQSNGDHSQQQLHPQNSEVMKMDLSESSKPLQQHLTTKGHFSETNQHDSKNQFVSLGSMCFPEAVLLSDERNILSNVDDILAATAAACGVTPTDFSKSTSNETMQAVEDGDSKSHFQQSLDVRHVTSDFNSMTATVGKPQNINDTSLNGNQVTVNLSPVPALQSKMTLDQQHIETPGQNIPTKVTSAVVGPSHEVQEQSSGPFKKQSATNLESEEDSEAPVDSTLNNNRNQEFVSSSRSISGENATSESEFTLGGDDSGVSMNPARSALALLAMAQSGDAVSVKIEEENQDLMHFNLQKKRAKGKGQVKEEDNSNQKQLKRPAQGKRQNPRGTDIYLPYTPPSSESCHDGYQHQEKMRQKIKEVEEKQPEVKTGFIASFLDFLKSGPKQQFSTLAVRMPNRTRRPGTQMVRTFCPPPLPKPSSTTPTPLVSETGGNSPSDKVDNELKNLEHLSSFSSDEDDPGYSQDAYKSVSTPLTTLDATSDKKKKTEALQVATTSPTANTTGTATTSSTTVGAVKQEPLHSTSYAVNILENISSSESSKPIELDGLPSDQFAKGQDTVAIEGFTDEEDTESGGEGQYRERDEFVVKIEDIETFKEALKTGKEPPAIWKVQKALLQKFVPEIRDGQREFAATNSYLGYFGDAKSKYKRIYVKFIENANKKEYVRVCSKKPRNKPSQTIRTVQAKPSSSSKTSDPLASKTTTTKAPSVKPKVKQPKVKAEPPPKKRKKWKEEFSSSQSDSSPEIHTSSSDDEEFEPPAPFVTRFLNTRAMKETFKSYMELLVSIALDPDTMQALEKSNDELLLPHMKKIDGMLNDNRKRLLLNLHLDQSFKNALESFPELTIITRDSKAKSGGTAISKIKMNGKAYNKKTLRTSKTTTKSAQEFAVDPEKIQLYSLYHSLHHYKYHVYLICKDEISSVQKKNEDLGQEEIVQLCMKNVKWVEDLFEKFGELLNHTGMLGEMQSVSVSSTRRSEQQNILEAGKSKIKVPVSGDC

SEQ ID NO: 36790 - protein, 456 aa, Homo sapiens
MAFAETYPAASSLPNGDCGRPRARPGGNRVTVVLGAQWGDEGKGKVVDLLAQDADIVCRCQGGNNAGHTVVVDSVEYDFHLLPSGIINPNVTAFIGNGVVIHLPGLFEEAEKNVQKGKGLEGWEKRLIISDRAHIVFDFHQAADGIQEQQRQEQAGKNLGTTKKGIGPVYSSKAARSGLRMCDLVSDFDGFSERFKVLANQYKSIYPTLEIDIEGELQKLKGYMEKIKPMVRDGVYFLYEALHGPPKKILVEGANAALLDIDFGTYPFVTSSNCTVGGVCTGLGMPPQNVGEVYGVVKAYTTRVGIGAFPTEQDNEIGELLQTRGREFGVTTGRKRRCGWLDLVLLKYAHMINGFTALALTKLDILDMFTEIKVGVAYKLDGEIIPHIPANQEVLNKVEVQYKTLPGWNTDISNARAFKELPVNAQNYVRFIEDELQIPVKWIGVGKSRESMIQLF

SEQ ID NO: 36791 - protein, 501 aa, Homo sapiens
MNRSRQVTCVAWVRCGVAKETPDKVELSKEEVKRLIAEAKEKLQEEGGGSDEEETGSPSEDGMQSARTQARPREPLEDGDPEDDRTLDDDELAEYDLDKYDEEGDPDAETLGESLLGLTVYGSNDQDPYVTLKDTEQYEREDFLIKPSDNLIVCGRAEQDQCNLEVHVYNQEEDSFYVHHDILLSAYPLSVEWLNFDPSPDDSTGNYIAVGNMTPVIEVWDLDIVDSLEPVFTLGSKLSKKKKKKGKKSSSAEGHTDAVLDLSWNKLIRNVLASASADNTVILWDMSLGKPAASLAVHTDKVQTLQFHPFEAQTLISGSYDKSVALYDCRSPDESHRMWRFSGQIERVTWNHFSPCHFLASTDDGFVYNLDARSDKPIFTLNAHNDEISGLDLSSQIKGCLVTASADKYVKIWDILGDRPSLVHSRDMKMGVLFCSSCCPDLPFIYAFGGQKEGLRVWDISTVSSVNEAFGRRERLVLGSARNSSISGPFGSRSSDTPMES

SEQ ID NO: 36792 - protein, 147 aa, Homo sapiens
MNRSRQVTCVAWVRCGVAKETPDKVELSKEEVKRLIAEAKEKLQEEGGGSDEEETGSPSEDGMQSARTQARPREPLEDGDPEDDRTLDDDELAEYDLDKYDEEGDPDAETLGESLLGLTVYGSNDQDPYVTLKDTSMTFFSSHLGTI

SEQ ID NO: 36793 - protein, 533 aa, Homo sapiens
MNEENIDGTNGCSKVRTGIQNEAALLALMEKTGYNMVQENGQRKFGGPPPGWEGPPPPRGCEVFVGKIPRDMYEDELVPVFERAGKIYEFRLMMEFSGENRGYAFVMYTTKEEAQLAIRILNNYEIRPGKFIGVCVSLDNCRLFIGAIPKEKKKEEILDEMKKVTEGVVDVIVYPSATDKTKNRGFAFVEYESHRAAAMARRKLIPGTFQLWGHTIQVDWADPEKEVDEETMQRVKVLYVRNLMISTTEETIKAEFNKFKPGAVERVKKLRDYAFVHFFNREDAVAAMSVMNGKCIDGASIEVTLAKPVNKENTWRQHLNGQISPNSENLIVFANKEESHPKTLGKLPTLPARLNGQHSPSPPEVERCTYPFYPGTKLTPISMYSLKSNHFNSAVMHLDYYCNKNNWAPPEYYLYSTTSQDGKVLLVYKIVIPAIANGSQSYFMPDKLCTTLEDAKELAAQFTLLHLDYNFHRSSINSLSPVSATLSSGTPSVLPYTSRPYSYPGYPLSPTISLANGSHVGQRLCISNQASFF

SEQ ID NO: 36794 - protein, 470 aa, Homo sapiens
MNEENIDGTNGCSKVRTGIQNEAALLALMEKTGYNMVQENGQRKFGGPPPGWEGPPPPRGCEVFVGKIPRDMYEDELVPVFERAGKIYEFRLMMEFSGENRGYAFVMYTTKEEAQLAIRILNNYEIRPGKFIGVCVSLDNCRLFIGAIPKEKKKEEILDEMKKVTEGVVDVIVYPSATDKTKNRGFAFVEYESHRAAAMARRKLIPGTFQLWGHTIQVDWADPEKEVDEETMQRVKVLYVRNLMISTTEETIKAEFNKFKPGAVERVKKLRDYAFVHFFNREDAVAAMSVMNGKCIDGASIEVTLAKPVNKENTWRQHLNGQISPNSENLIVFANKEESHPKTLGKLPTLPARLNGQHSPSPPEVERCTYPFYPGTKLTPISMYSLKSNHFNSAVMHLDYYCNKNNWAPPEYYLYSTTSQDGKVLLVYKIVIPAIANGSQSYFMPDKLCTTLEDAKELAAQFTLLHLGPF

SEQ ID NO: 36795 - protein, 485 aa, Homo sapiens
MNEENIDGTNGCSKVRTGIQNEAALLALMEKTGYNMVQENGQRKFGGPPPGWEGPPPPRGCEVFVGKIPRDMYEDELVPVFERAGKIYEFRLMMEFSGENRGYAFVMYTTKEEAQLAIRILNNYEIRPGKFIGVCVSLDNCRLFIGAIPKEKKKEEILDEMKKVTEGVVDVIVYPSATDKTKNRGFAFVEYESHRAAAMARRKLIPGTFQLWGHTIQVDWADPEKEVDEETMQRVKVLYVRNLMISTTEETIKAEFNKFKPGAVERVKKLRDYAFVHFFNREDAVAAMSVMNGKCIDGASIEVTLAKPVNKENTWRQHLNGQISPNSENLIVFANKEESHPKTLGKLPTLPARLNGQHSPSPPEVERCTYPFYPGTKLTPISMYSLKSNHFNSAVMHLDYYCNKNNWAPPEYYLYSTTSQDGKVLLVYKIVIPAIANGSQSYFMPDKLCTTLEDAKELAAQFTLLHLDREHNLFSLDLCRRIWRK

SEQ ID NO: 36796 - protein, 1170 aa, Homo sapiens
MAAALGASGGAGAGDDDFDQFDKPGAERSWRRRAADEDWDSELEDDLLGEDLLSGKKNQSDLSDEELNDDLLQSDNEDEENFSSQGVTISLNATSGMVTSFELSDNTNDQSGEQESEYEQEQGEDELVYHKSDGSELYTQEYPEEGQYEGHEAELTEDQIEYVEEPEEEQLYTDEVLDIEINEPLDEFTGGMETLELQKDIKEESDEEEEDDEESGRLRFKTERKEGTIIRLSDVTRERRNIPETLELSAEAKAALLEFEERERQHKQGRYSSRRGGRRGGPLMCRGVGDQRRESTERGRMKDHRPALLPTQPPVVPQAPPPPPPPPQQQPIRSLFQPQPLQPLLPVQHPHHPSPPQGMHMPPQLETPRMMMTPPPVTPQQPKNIHINPHFKGTVVTPVQVPLLPVPSQPRPAVGPQRFPGPPEFPQHTPGPVPNSFSQPPRLPLQDQWRAPPPPQDRDPFFLGVSGEPRFPSHLFLEQRSPPPPPPPPTLLNSSHPVPTQSPLPFTQPGPAFNQQGQQPVFPRERPVRPALQPPGPVGILHFSQPGSATTRPFIPPRQPFLPGPGQPFLPTHTQPNLQGPLHPPLPPPHQPQPQQPQQQPPPQHQPPHQPPHQPPPQHQPPPQHPPQHPPQHQHHHHHHHLSVPPPPLMPMSQPQFRPHVQTAQPQASSSRMQCPQRQGLRHNTTSQNVSKRPMQQMQPTAPRNSNLRELPIAPSHVIEMSSSRCSATPSAQVKPIVSASPPSRAVAGSRSSQGKTEVKVKPASPVAQPKEEAKTETEFPDEDEETRLYRLKIEEQKRLREEILKQKELRRQQQAGARKKELLERLAQQQQQLYAPPPPAEQEEQALSPSPTNGNPLLPFPGAQVRQNVKNRLLVKNQDVSISNVQPKTSNFVPSSANMQYQGQQMKALKHLRQTRTVPQSQTQPLHKVLPIKPADVEEPAVPQTPRVASIQGRPQDTKPGVKRTVTHRTNSGGGDGPHISSKVRVIKLSGGGGESDGFFHPEGQPQRLPQPPEVGPQPARKVTLTRGGLQQPPHLPAGPHAHSPVPPGIKSIQGIHPAKKAIMHGRGRGVAGPMGRGRLMPNKQNLRVVECKPQPCVVSVEGLSSSTTDAQLKSLLMSVGPIQSLQMLPQQRKAIAKFKEPAHALAFQQKFHRHMIDLSHINVALIVE

SEQ ID NO: 36797 - protein, 268 aa, Homo sapiens
MAAALGASGGAGAGDDDFDQFDKPGAERSWRRRAADEDWDSELEDDLLGEDLLSGKKNQSDLSDEELNDDLLQSDNEDEENFSSQGVTISLNATSGMVTSFELSDNTNDQSGEQESEYEQEQGEDELVYHKSDGSELYTQEYPEEGQYEGHEAELTEDQIEYVEEPEEEQLYTDEVLDIEINEPLDEFTGGMETLELQKDIKEESDEEEEDDEESGRLRFKTERKEGTIIRLSDVTRERRNIPETLGNFFACLPSSFTLISTSSIVLL

SEQ ID NO: 36798 - protein, 454 aa, Homo sapiens
MATNKERLFAAGALGPGSGYPGAGFPFAFPGALRGSPPFEMLSPSFRGLGQPDLPKEMASLSVETQSTSSEEMVPSSPSPPPPPRVYKPCFVCNDKSSGYHYGVSSCEGCKGFFRRSIQKNMVYTCHRDKNCIINKVTRNRCQYCRLQKCFEVGMSKEAVRNDRNKKKKEVKEEGSPDSYELSPQLEELITKVSKAHQETFPSLCQLGKYTTNSSADHRVQLDLGLWDKFSELATKCIIKIVEFAKRLPGFTGLSIADQITLLKAACLDILMLRICTRYTPEQDTMTFSDGLTLNRTQMHNAGFGPLTDLVFAFAGQLLPLEMDDTETGLLSAICLICGDRMDLEEPEKVDKLQEPLLEALRLYARRRRPSQPYMFPRMLMKITDLRGISTKGAERAITLKMEIPGPMPPLIREMLENPEMFEDDSSQPGPHPNASSEDEVPGGQGKGGLKSPA

SEQ ID NO: 36799 - protein, 443 aa, Homo sapiens
MYDCMETFAPGPRRLYGAAGPGAGLLRRATGGSCFAGLESFAWPQPASLQSVETQSTSSEEMVPSSPSPPPPPRVYKPCFVCNDKSSGYHYGVSSCEGCKGFFRRSIQKNMVYTCHRDKNCIINKVTRNRCQYCRLQKCFEVGMSKEAVRNDRNKKKKEVKEEGSPDSYELSPQLEELITKVSKAHQETFPSLCQLGKYTTNSSADHRVQLDLGLWDKFSELATKCIIKIVEFAKRLPGFTGLSIADQITLLKAACLDILMLRICTRYTPEQDTMTFSDGLTLNRTQMHNAGFGPLTDLVFAFAGQLLPLEMDDTETGLLSAICLICGDRMDLEEPEKVDKLQEPLLEALRLYARRRRPSQPYMFPRMLMKITDLRGISTKGAERAITLKMEIPGPMPPLIREMLENPEMFEDDSSQPGPHPNASSEDEVPGGQGKGGLKSPA

SEQ ID NO: 36800 - protein, 382 aa, Homo sapiens
MVPSSPSPPPPPRVYKPCFVCNDKSSGYHYGVSSCEGCKGFFRRSIQKNMVYTCHRDKNCIINKVTRNRCQYCRLQKCFEVGMSKEAVRNDRNKKKKEVKEEGSPDSYELSPQLEELITKVSKAHQETFPSLCQLGKYTTNSSADHRVQLDLGLWDKFSELATKCIIKIVEFAKRLPGFTGLSIADQITLLKAACLDILMLRICTRYTPEQDTMTFSDGLTLNRTQMHNAGFGPLTDLVFAFAGQLLPLEMDDTETGLLSAICLICGDRMDLEEPEKVDKLQEPLLEALRLYARRRRPSQPYMFPRMLMKITDLRGISTKGAERAITLKMEIPGPMPPLIREMLENPEMFEDDSSQPGPHPNASSEDEVPGGQGKGGLKSPA

SEQ ID NO: 36801 - protein, 432 aa, Homo sapiens
MLALPLPPCWSGAPPGEEGESAAGPWCFQHPVSLQAGSRCTTVWKRLPRVRDGCTGRPGPGPACCAEPPAAPVSPDLNLLPGRNPPACNGFFRRSIQKNMVYTCHRDKNCIINKVTRNRCQYCRLQKCFEVGMSKEAVRNDRNKKKKEVKEEGSPDSYELSPQLEELITKVSKAHQETFPSLCQLGKYTTNSSADHRVQLDLGLWDKFSELATKCIIKIVEFAKRLPGFTGLSIADQITLLKAACLDILMLRICTRYTPEQDTMTFSDGLTLNRTQMHNAGFGPLTDLVFAFAGQLLPLEMDDTETGLLSAICLICGDRMDLEEPEKVDKLQEPLLEALRLYARRRRPSQPYMFPRMLMKITDLRGISTKGAERAITLKMEIPGPMPPLIREMLENPEMFEDDSSQPGPHPNASSEDEVPGGQGKGGLKSPA

SEQ ID NO: 36802 - protein, 631 aa, Homo sapiens
MFYAHFVLSKRGPLAKIWLAAHWDKKLTKAHVFECNLESSVESIISPKVKMALRTSGHLLLGVVRIYHRKAKYLLADCNEAFIKIKMAFRPGVVDLPEENREAAYNAITLPEEFHDFDQPLPDLDDIDVAQQFSLNQSRVEEITMREEVGNISILQENDFGDFGMDDREIMREGSAFEDDDMLVSTTTSNLLLESEQSTSNLNEKINHLEYEDQYKDDNFGEGNDGGILDDKLISNNDGGIFDDPPALSEAGVMLPEQPAHDDMDEDDNVSMGGPDSPDSVDPVEPMPTMTDQTTLVPNEEEAFALEPIDITVKETKAKRKRKLIVDSVKELDSKTIRAQLSDYSDIVTTLDLAPPTKKLMMWKETGGVEKLFSLPAQPLWNNRLLKLFTRCLTPLVPEDLRKRRKGGEADNLDEFLKEFENPEVPREDQQQQHQQRDVIDEPIIEEPSRLQESVMEASRTNIDESAMPPPPPQGVKRKAGQIDPEPVMPPQQVEQMEIPPVELPPEEPPNICQLIPELELLPEKEKEKEKEKEDDEEEEDEDASGGDQDQEERRWNKRTQQMLHGLQRALAKTGAESISLLELCRNTNRKQAAAKFYSFLVLKKQQAIELTQEEPYSDIIATPGPRFHII

SEQ ID NO: 36803 - protein, 277 aa, Homo sapiens
MSAPGSPDQAYDFLLKFLLVGDRDVGKSEILESLQDGAAESPYSHLGGIDYKTTTILLDGQRVKLKLWDTSGQGRFCTIFRSYSRGAQGVILVYDIANRWSFEGMDRWIKKIEEHAPGVPKILVGNRLHLAFKRQVPREQAQAYAERLGVTFFEVSPLCNFNIIESFTELARIVLLRHRMNWLGRPSKVLSLQDLCCRTIVSCTPVHLVDKLPLPSTLRSHLKSFSMAKGLNARMMRGLSYSLTTSSTHKSSLCKVEIVCPPQSPPKNCTRNSCKIS

SEQ ID NO: 36804 - protein, 311 aa, Homo sapiens
MAAAPRTVLISGCSSGIGLELAVQLAHDPKKRYQVVATMRDLGKKETLEAAAGEALGQTLTVAQLDVCSDESVAQCLSCIQGEVDVLVNNAGMGLVGPLEGLSLAAMQNVFDTNFFGAVRLVKAVLPGMKRRRQGHIVVISSVMGLQGVIFNDVYAASKFALEGFFESLAIQLLQFNIFISLVEPGPVVTEFEGKLLAQVSMAEFPGTDPETLHYFRDLYLPASRKLFCSVGQNPQDVVQAIVNVISSTRPPLRRQTNIRYSPLTTLKTVDSSGSLYVRTTHRLLFRCPRLLNLGLQCLSCGCLPTRVRPR

SEQ ID NO: 36805 - protein, 496 aa, Homo sapiens
MVEADHPGKLFIGGLNRETNEKMLKAVFGKHGPISEVLLIKDRTSKSRGFAFITFENPADAKNAAKDMNGKSLHGKAIKVEQAKKPSFQSGGRRRPPASSRNRSPSGSLRSARGSRGGTRGWLPSHEGHLDDGGYTPDLKMSYSRGLIPVKRGPSSRSGGPPPKKSAPSAVARSNSWMGSQGPMSQRRENYGVPPRRATISSWRNDRMSTRHDGYATNDGNHPSCQETRDYAPPSRGYAYRDNGHSNRDEHSSRGYRNHRSSRETRDYAPPSRGHAYRDYGHSRRDESYSRGYRNRRSSRETREYAPPSRGHGYRDYGHSRRHESYSRGYRNHPSSRETRDYAPPHRDYAYRDYGHSSWDEHSSRGYSYHDGYGEALGRDHSEHLSGSSYRDALQRYGTSHGAPPARGPRMSYGGSTCHAYSNTRDRYGRSWESYSSCGDFHYCDREHVCRKDQRNPPSLGRVLPDPREACGSSSYVASIVDGGESRSEKGDSSRY

SEQ ID NO: 36806 - protein, 459 aa, Homo sapiens
MVEADHPGKLFIGGLNRETNEKMLKAVFGKHGPISEVLLIKDRTSKSRGFAFITFENPADAKNAAKDMNGKSLHGKAIKVEQAKKPSFQSGGRRRPPASSRNRSPSGSLRSARGSRGGTRGWLPSHEGHLDDGGYTPDLKMSYSRGLIPVKRGPSSRSGGPPPKKSAPSAVARSNSWMGSQGPMSQRRENYGVPPRRATISSWRNDRMSTRHDGYATNDGNHPSCQETRDYAPPSRGYAYRDNGHSNRDEHSSRGYRNHRSSRETRDYAPPSRGHAYRDYGHSRRDESYSRGYRNRRSSRETREYAPPSRGHGYRDYGHSRRHESYSRGYSYHDGYGEALGRDHSEHLSGSSYRDALQRYGTSHGAPPARGPRMSYGGSTCHAYSNTRDRYGRSWESYSSCGDFHYCDREHVCRKDQRNPPSLGRVLPDPREACGSSSYVASIVDGGESRSEKGDSSRY

SEQ ID NO: 36807 - protein, 356 aa, Homo sapiens
MSYSRGLIPVKRGPSSRSGGPPPKKSAPSAVARSNSWMGSQGPMSQRRENYGVPPRRATISSWRNDRMSTRHDGYATNDGNHPSCQETRDYAPPSRGYAYRDNGHSNRDEHSSRGYRNHRSSRETRDYAPPSRGHAYRDYGHSRRDESYSRGYRNRRSSRETREYAPPSRGHGYRDYGHSRRHESYSRGYRNHPSSRETRDYAPPHRDYAYRDYGHSSWDEHSSRGYSYHDGYGEALGRDHSEHLSGSSYRDALQRYGTSHGAPPARGPRMSYGGSTCHAYSNTRDRYGRSWESYSSCGDFHYCDREHVCRKDQRNPPSLGRVLPDPREACGSSSYVASIVDGGESRSEKGDSSRY

SEQ ID NO: 36808 - protein, 284 aa, Homo sapiens
MAELVPFAVPIESDKTLLVWELSSGPTAEALHHSLFTAFSQFGLLYSVRVFPNAAVAHPGFYAVIKFYSARAAHRAQKACDRKQLFQKSPVKVRLGTRHKAVQHQALALNSSKCQELANYYFGFNGCSKRIIKLQELSDLEERENEDSMVPLPKQSLKFFCALEVVLPSCDCRSPGIGLVEEPMDKVEEGPLSFLMKRKTAQKLAIQKALSDAFQKLLIVVLESGKIAVEYRPSEDIVGVRCEEELHGLIQVPCSPWKQYGQEEEGYLSDFSLEEEEFRLPELD

SEQ ID NO: 36809 - protein, 261 aa, Homo sapiens
MHLLVPPPQHSLFTAFSQFGLLYSVRVFPNAAVAHPGFYAVIKFYSARAAHRAQKACDRKQLFQKSPVKVRLGTRHKAVQHQALALNSSKCQELANYYFGFNGCSKRIIKLQELSDLEERENEDSMVPLPKQSLKFFCALEVVLPSCDCRSPGIGLVEEPMDKVEEGPLSFLMKRKTAQKLAIQKALSDAFQKLLIVVLESGKIAVEYRPSEDIVGVRCEEELHGLIQVPCSPWKQYGQEEEGYLSDFSLEEEEFRLPELD

SEQ ID NO: 36810 - protein, 139 aa, Homo sapiens
MAELVPFAVPIESDKTLLVWELSSGPTAEALHHSLFTAFSQFGLLYSVRVFPNAAVAHPGFYAVIKFYSARAAHRAQKACDRKQLFQKSPVKVRLGTRHKAVQHQALALNSSKCQELANYYFGFNGCSKRIIKDHYHSL

SEQ ID NO: 36811 - protein, 116 aa, Homo sapiens
MHLLVPPPQHSLFTAFSQFGLLYSVRVFPNAAVAHPGFYAVIKFYSARAAHRAQKACDRKQLFQKSPVKVRLGTRHKAVQHQALALNSSKCQELANYYFGFNGCSKRIIKDHYHSL

SEQ ID NO: 36812 - protein, 251 aa, Homo sapiens
MAELVPFAVPIESDKTLLVWELSSGPTAEALHHSLFTAFSQFGLLYSVRVFPNAAVAHPGFYAVIKFYSARAAHRAQKACDRKQLFQKSPVKVRLGTRHKAVQHQALALNSSKCQELANYYFGFNGCSKRIIKLQELSDLEERENEDSMVPLPKQSLKFFCALEVVLPSCDCRSPGIGLVEEPMDKVEEESGKIAVEYRPSEDIVGVRCEEELHGLIQVPCSPWKQYGQEEEGYLSDFSLEEEEFRLPELD

SEQ ID NO: 36813 - protein, 228 aa, Homo sapiens
MHLLVPPPQHSLFTAFSQFGLLYSVRVFPNAAVAHPGFYAVIKFYSARAAHRAQKACDRKQLFQKSPVKVRLGTRHKAVQHQALALNSSKCQELANYYFGFNGCSKRIIKLQELSDLEERENEDSMVPLPKQSLKFFCALEVVLPSCDCRSPGIGLVEEPMDKVEEESGKIAVEYRPSEDIVGVRCEEELHGLIQVPCSPWKQYGQEEEGYLSDFSLEEEEFRLPELD

SEQ ID NO: 36814 - protein, 79 aa, Homo sapiens
MAELVPFAVPIESDKTLLVWELSSGPTAEALHVRLGTRHKAVQHQALALNSSKCQELANYYFGFNGCSKRIIKDHYHSL

SEQ ID NO: 36815 - protein, 137 aa, Homo sapiens
MAELVPFAVPIESDKTLLVWELSSGPTAEALHHSLFTAFSQFGLLYSVRVFPNAAVAHPGFYAVIKFYSARAAHRAQKACDRKQLFQKSPVKVRLGTRHKAVQHQALALNSSKCQELANYYFGFNGCSKRIIKKVVK

SEQ ID NO: 36816 - protein, 114 aa, Homo sapiens
MHLLVPPPQHSLFTAFSQFGLLYSVRVFPNAAVAHPGFYAVIKFYSARAAHRAQKACDRKQLFQKSPVKVRLGTRHKAVQHQALALNSSKCQELANYYFGFNGCSKRIIKKVVK

SEQ ID NO: 36817 - protein, 166 aa, Homo sapiens
MAELVPFAVPIESDKTLLVWELSSGPTAEALHHSLFTAFSQFGLLYSVRVFPNAAVAHPGFYAVIKFYSARAAHRAQKACDRKQLFQKSPVKVRLGTRHKAVQHQALALNSSKCQELANYYFGFNGCSKRIIKVPCSPWKQYGQEEEGYLSDFSLEEEEFRLPELD

SEQ ID NO: 36818 - protein, 143 aa, Homo sapiens
MHLLVPPPQHSLFTAFSQFGLLYSVRVFPNAAVAHPGFYAVIKFYSARAAHRAQKACDRKQLFQKSPVKVRLGTRHKAVQHQALALNSSKCQELANYYFGFNGCSKRIIKVPCSPWKQYGQEEEGYLSDFSLEEEEFRLPELD

SEQ ID NO: 36819 - protein, 236 aa, Homo sapiens
MAELVPFAVPIESDKTLLVWELSSGPTAEALHHSLFTAFSQFGLLYSVRVFPNAAVAHPGFYAVIKFYSARAAHRAQKACDRKQLFQKSPVKVRLGTRHKAVQHQALALNSSKCQELANYYFGFNGCSKRIIKLQELSDLEERENEDSMVPLPKQSLKFFCALEVVLPSCDCRSPGIGLVEEPMDKVEEGPLSFLMKRKTAQKLAIQKALSDAFQKLLIVVLGKTVLIILEVLQFQ

SEQ ID NO: 36820 - protein, 205 aa, Homo sapiens
MSSMNPEYDYLFKLLLIGDSGVGKSCLLLRFADDTYTESYISTIGVDFKIRTIELDGKTIKLQIWDTAGQERFRTITSSYYRGAHGIIVVYDVTDQESFNNVKQWLQEIDRYASENVNKLLVGNKCDLTTKKVVDYTTAKEFADSLGIPFLETSAKNATNVEQSFMTMAAEIKKRMGPGATAGGAEKSNVKIQSTPVKQSGGGCC

SEQ ID NO: 36821 - protein, 141 aa, Homo sapiens
MSSMNPEYDYLFKLLLIGDSGVGKSCLLLRFAESFNNVKQWLQEIDRYASENVNKLLVGNKCDLTTKKVVDYTTAKEFADSLGIPFLETSAKNATNVEQSFMTMAAEIKKRMGPGATAGGAEKSNVKIQSTPVKQSGGGCC

SEQ ID NO: 36822 - protein, 129 aa, Homo sapiens
MSSMNPEYDYLFKLLLIGDSGVGKSCLLLRFADDTYTESYISTIGVDFKIRTIELDGKTIKLQIEFADSLGIPFLETSAKNATNVEQSFMTMAAEIKKRMGPGATAGGAEKSNVKIQSTPVKQSGGGCC

SEQ ID NO: 36823 - protein, 213 aa, Homo sapiens
MGNGTEEDYNFVFKVVLIGESGVGKTNLLSRFTRNEFSHDSRTTIGVEFSTRTVMLGTAAVKAQIWDTAGLERYRAITSAYYRGAVGALLVFDLTKHQTYAVVERWLKELYDHAEATIVVMLVGNKSDLSQAREVPTEEARMFAENNGLLFLETSALDSTNVELAFETVLKEIFAKVSKQRQNSIRTNAITLGSAQAGQEPGPGEKRACCISL

SEQ ID NO: 36824 - protein, 222 aa, Homo sapiens
MSAFGHDEAWMEAGGFGLEAAERTEYQSLCKSKLLFLGEQSVGKTSIISRFMYNSFGCACQATVGIDFLSKTMYLEDQIVQLQLWDTAGQERFHSLIPSYIRDSTIAVVVYDITNINSFKETDKWVEHVRAERGDDVVIMLLGNKIDLDNKRQVTAEQGEEKSRNLNVMFIETSAKTGYNVKKLFRRVASALLSTRTSPPPKEGTVEIELESFEESGNRSYC

SEQ ID NO: 36825 - protein, 221 aa, Homo sapiens
MSAFGHDEAWMEAGGFGLEAAERTEYQSLCKSKLLFLGEQSGKTSIISRFMYNSFGCACQATVGIDFLSKTMYLEDQIVQLQLWDTAGQERFHSLIPSYIRDSTIAVVVYDITNINSFKETDKWVEHVRAERGDDVVIMLLGNKIDLDNKRQVTAEQGEEKSRNLNVMFIETSAKTGYNVKKLFRRVASALLSTRTSPPPKEGTVEIELESFEESGNRSYC

SEQ ID NO: 36826 - protein, 225 aa, Homo sapiens
MAAAGGGGGGAAAAGRAYSFKVVLLGEGCVGKTSLVLRYCENKFNDKHITTLQASFLTKKLNIGGKRVNLAIWDTAGQERFHALGPIYYRDSNGAILVYDITDEDSFQKVKNWVKELRKMLGNEICLCIVGNKIDLEKERHVSIQEAESYAESVGAKHYHTSAKQNKGIEELFLDLCKRMIETAQVDERAKGNGSSQPGTARRGVQIIDDEPQAQTSGGGCCSSG

SEQ ID NO: 36827 - protein, 1566 aa, Homo sapiens
MTADKDKDKDKEKDRDRDRDREREKRDKARESENSRPRRSCTLEGGAKNYAESDHSEDEDNDNNSATAEESTKKNKKKPPKKKSRYERTDTGEITSYITEDDVVYRPGDCVYIESRRPNTPYFICSIQDFKLVHNSQACCRSPTPALCDPPACSLPVASQPPQHLSEAGRGPVGSKRDHLLMNVKWYYRQSEVPDSVYQHLVQDRHNENDSGRELVITDPVIKNRELFISDYVDTYHAAALRGKCNISHFSDIFAAREFKARVDSFFYILGYNPETRRLNSTQGEIRVGPSHQAKLPDLQPFPSPDGDTVTQHEELVWMPGVNDCDLLMYLRAARSMAAFAGMCDGGSTEDGCVAASRDDTTLNALNTLHESGYDAGKALQRLVKKPVPKLIEKCWTEDEVKRFVKGLRQYGKNFFRIRKELLPNKETGELITFYYYWKKTPEAASSRAHRRHRRQAVFRRIKTRTASTPVNTPSRPPSSEFLDLSSASEDDFDSEDSEQELKGYACRHCFTTTSKDWHHGGRENILLCTDCRIHFKKYGELPPIEKPVDPPPFMFKPVKEEDDGLSGKHSMRTRRSRGSMSTLRSGRKKQPASPDGRTSPINEDIRSSGRNSPSAASTSSNDSKAETVKKSAKKVKEEASSPLKSNKRQREKVASDTEEADRTSSKKTKTQEISRPNSPSEGEGESSDSRSVNDEGSSDPKDIDQDNRSTSPSIPSPQDNESDSDSSAQQQMLQAQPPALQAPTGVTPAPSSAPPGTPQLPTPGPTPSATAVPPQGSPTASQAPNQPQAPTAPVPHTHIQQAPALHPQRPPSPHPPPHPSPHPPLQPLTGSAGQPSAPSHAQPPLHGQGPPGPHSLQAGPLLQHPGPPQPFGLPPQASQGQAPLGTSPAAAYPHTSLQLPASQSALQSQQPPREQPLPPAPLAMPHIKPPPTTPIPQLPAPQAHKHPPHLSGPSPFSMNANLPPPPALKPLSSLSTHHPPSAHPPPLQLMPQSQPLPSSPAQPPGLTQSQNLPPPPASHPPTGLHQVAPQPPFAQHPFVPGGPPPITPPTCPSTSTPPAGPGTSAQPPCSGAAASGGSIAGGSSCPLPTVQIKEEALDDAEEPESPPPPPRSPSPEPTVVDTPSHASQSARFYKHLDRGYNSCARTDLYFMPLAGSKLAKKREEAIEKAKREAEQKAREEREREKEKEKEREREREREREAERAAKASSSAHEGRLSDPQLSGPGHMRPSFEPPPTTIAAVPPYIGPDTPALRTLSEYARPHVMSPTNRNHPFYMPLNPTDPLLAYHMPGLYNVDPTIRERELREREIREREIRERELRERMKPGFEVKPPELDPLHPAANPMEHFARHSALTIPPTAGPHPFASFHPGLNPLERERLALAGPQLRPEMSYPDRLAAERIHAERMASLTSDPLARLQMFNVTPHHHQHSHIHSHLHLHQQDPLHQGSAGPVHPLVDPLTAGPHLARFPYPPGTLPNPLLGQPPHEHEMLRHPVFGTPYPRDLPGAIPPPMSAAHQLQAMHAQSAELQRLAMEQQWLHGHPHMHGGHLPSQEDYYSRLKKEGDKQL

SEQ ID NO: 36828 - protein, 1012 aa, Homo sapiens
MFKPVKEEDDGLSGKHSMRTRRSRGSMSTLRSGRKKQPASPDGRTSPINEDIRSSGRNSPSAASTSSNDSKAETVKKSAKKVKEEASSPLKSNKRQREKVASDTEEADRTSSKKTKTQEISRPNSPSEGEGESSDSRSVNDEGSSDPKDIDQDNRSTSPSIPSPQDNESDSDSSAQQQMLQAQPPALQAPTGVTPAPSSAPPGTPQLPTPGPTPSATAVPPQGSPTASQAPNQPQAPTAPVPHTHIQQAPALHPQRPPSPHPPPHPSPHPPLQPLTGSAGQPSAPSHAQPPLHGQGPPGPHSLQAGPLLQHPGPPQPFGLPPQASQGQAPLGTSPAAAYPHTSLQLPASQSALQSQQPPREQPLPPAPLAMPHIKPPPTTPIPQLPAPQAHKHPPHLSGPSPFSMNANLPPPPALKPLSSLSTHHPPSAHPPPLQLMPQSQPLPSSPAQPPGLTQSQNLPPPPASHPPTGLHQVAPQPPFAQHPFVPGGPPPITPPTCPSTSTPPAGPGTSAQPPCSGAAASGGSIAGGSSCPLPTVQIKEEALDDAEEPESPPPPPRSPSPEPTVVDTPSHASQSARFYKHLDRGYNSCARTDLYFMPLAGSKLAKKREEAIEKAKREAEQKAREEREREKEKEKEREREREREREAERAAKASSSAHEGRLSDPQLSGPGHMRPSFEPPPTTIAAVPPYIGPDTPALRTLSEYARPHVMSPTNRNHPFYMPLNPTDPLLAYHMPGLYNVDPTIRERELREREIREREIRERELRERMKPGFEVKPPELDPLHPAANPMEHFARHSALTIPPTAGPHPFASFHPGLNPLERERLALAGPQLRPEMSYPDRLAAERIHAERMASLTSDPLARLQMFNVTPHHHQHSHIHSHLHLHQQDPLHQGSAGPVHPLVDPLTAGPHLARFPYPPGTLPNPLLGQPPHEHEMLRHPVFGTPYPRDLPGAIPPPMSAAHQLQAMHAQSAELQRLAMEQQWLHGHPHMHGGHLPSQEDYYSRLKKEGDKQL

SEQ ID NO: 36829 - protein, 1444 aa, Homo sapiens
MKNKGAKQKLKRKGAASAFGCDLTEYLESSGQDVPYVLKSCAEFIETHGIVDGIYRLSGVTSNIQRLRQEFGSDQCPDLTREVYLQDIHCVGSLCKLYFRELPNPLLTYELYEKFTEAVSHCPEEGQLARIQNVIQELPPSHYRTLEYLIRHLAHIASFSSKTNMHARNLALVWAPNLLRSKEIEATGCNGDAAFLAVRVQQVVIEFILNHVDQIFNNGAPGSLENDENRPIMKSLTLPALSLPMKLVSLEEAQARSLATNHPARKERRENSLPEIVPPMGTLFHTVLELPDNKRKLSSKSKKWKSIFNLGRSGSDSKSKLSRNGSVFVRGQRLSVEKATIRPAKSMDSLCSVPVEGKETKGNFNRTVTTGGFFIPATKMHSTGTGSSCDLTKQEGEWGQEGMPPGAEGGFDVSSDRSHLQGAQARPPPEQLKVFRPVEDPESEQTAPKMLGMFYTSNDSPSKSVFTSSLFQMEPSPRNQRKALNISEPFAVSVPLRVSAVISTNSTPCRTPPKELQSLSSLEEFSFHGSESGGWPEEEKPLGAETSAASVPKKAGLEDAKAVPEAPGTVECSKGLSQEPGAHLEEKKTPESSLSSQHLNELEKRPNPEKVVEEGREAGEMESSTLQESPRARAEAVLLHEMDEDDLANALIWPEIQQELKIIESEEELSSLPPPALKTSPIQPILESSLGPFIPSEPPGSLPCGSFPAPVSTPLEVWTRDPANQSTQGASTAASREKPEPEQGLHPDLASLAPLEIVPFEKASPQATVEVGGPGNLSPPLPPAPPPPTPLEESTPVLLSKGGPEREDSSRKLRTDLYIDQLKSQDSPEISSLCQGEEATPRHSDKQNSKNAASEGKGCGFPSPTREVEIVSQEEEDVTHSVQEPSDCDEDDTVTDIAQHGLEMVEPWEEPQWVTSPLHSPTLKDAHKAQVQGLQGHQLEKRLSHRPSLRQSHSLDSKPTVKSQWTLEVPSSSSCANLETERNSDPLQPQAPRREITGWDEKALRSFREFSGLKGAEAPPNQKGPSGVQPNPAETSPISLAEGKELGTHLGHSSPQIRQGGVPGPESSKESSPSVQDSTSPGEHPAKLQLKSTECGPPKGKNRPSSLNLDPAIPIADLFWFENVASFSSPGMQVSEPGDPKVTWMTSSYCKADPWRVYSQDPQDLDIVAHALTGRRNSAPVSVSAVRTSFMVKMCQARAVPVIPPKIQYTQIPQPLPSQSSGENGVQPLERSQEGPSSTSGTTQKPAKDDSPSSLESSKEEKPKQDPGAIKSSPVDATAPCMCEGPTLSPEPGSSNLLSTQDAVVQCRKRMSETEPSGDNLLSSKLERPSGGSKPFHRSRPGRPQSLILFSPPFPIMDHLPPSSTVTDSKVLLSPIRSPTQTVSPGLLCGELAENTWVTPEGVTLRNKMTIPKNGQRLETSTSCFYQPQRRSVILDGRSGRQIE

SEQ ID NO: 36830 - protein, 674 aa, Homo sapiens
MTIRHQGQQYRPRMAFLQKIEALVKDMQNPETGVRMQNQRVLVTSVPHAMTGSDVLQWIVQRLWISSLEAQNLGNFIVRYGYIYPLQDPKNLILKPDGSLYRFQTPYFWPTQQWPAEDTDYAIYLAKRNIKKKGILEEYEKENYNFLNQKMNYKWDFVIMQAKEQYRAGKERNKADRYALDCQEKAYWLVHRCPPGMDNVLDYGLDRVTNPNEVKVNQKQTVVAVKKEIMYYQQALMRSTVKSSVSLGGIVKYSEQFSSNDAIMSGCLPSNPWITDDTQFWDLNAKLVEIPTKMRVERWAFNFSELIRDPKGRQSFQYFLKKEFSGENLGFWEACEDLKYGDQSKVKEKAEEIYKLFLAPGARRWINIDGKTMDITVKGLKHPHRYVLDAAQTHIYMLMKKDSYARYLKSPIYKDMLAKAIEPQETTKKSSTLPFMRRHLRSSPSPVILRQLEEEAKAREAANTVDITQPGQHMAPSPHLTVYTGTCMPPSPSSPFSSSCRSPRKPFASPSRFIRRPSTTICPSPIRVALESSSGLEQKGECSGSMAPRGPSVTESSEASLDTSWPRSRPRAPPKARMALSFSRFLRRGCLASPVFARLSPKCPAVSHGRVQPLGDVGQQLPRLKSKRVANFFQIKMDVPTGSGTCLMDSEDAGTGESGDRATEKEVICPWESL

SEQ ID NO: 36831 - protein, 469 aa, Homo sapiens
MTIRHQGQQYRPRMAFLQKIEALVKDMQNPETGVRMQNQRVLVTSVPHAMTGSDVLQWIVQRLWISSLEAQNLGNFIVRYGYIYPLQDPKNLILKPDGSLYRFQTPYFWPTQQWPAEDTDYAIYLAKRNIKKKGILEEYEKENYNFLNQKMNYKWDFVIMQAKEQYRAGKERNKADRYALDCQEKAYWLVHRCPPGMDNVLDYGLDRVTNPNEVKVNQKQTVVAVKKEIMYYQQALMRSTVKSSVSLGGIVKYSEQFSSNDAIMSGCLPSNPWITDDTQFWDLNAKLVEIPTKMRVERWAFNFSELIRDPKGRQSFQYFLKKEFSGENLGFWEACEDLKYGDQSKVKEKAEEIYKLFLAPGARRWINIDGKTMDITVKGLKHPHRYVLDAAQTHIYMLMKKDSYARYLKSPIYKDMLAKAIEPQETTKKSSTLPFMRRHLRSSPSPVILRQLEEEAKAREAANTVDITQ

SEQ ID NO: 36832 - protein, 484 aa, Homo sapiens
MTIRHQGQQYRPRMAFLQKIEALVKDMQNPETGVRMQNQRVLVTSVPHAMTGSDVLQWIVQRLWISSLEAQNLGNFIVRYGYIYPLQDPKNLILKPDGSLYRFQTPYFWPTQQWPAEDTDYAIYLAKRNIKKKGILEEYEKENYNFLNQKMNYKWDFVIMQAKEQYRAGKERNKADRYALDCQEKAYWLVHRCPPGMDNVLDYGLDRVTNPNEVKKQTVVAVKKEIMYYQQALMRSTVKSSVSLGGIVKYSEQFSSNDAIMSGCLPSNPWITDDTQFWDLNAKLVEIPTKMRVERWAFNFSELIRDPKGRQSFQYFLKKEFSGENLGFWEACEDLKYGDQSKVKEKAEEIYKLFLAPGARRWINIDGKTMDITVKGLKHPHRYVLDAAQTHIYMLMKKDSYARYLKSPIYKDMLAKAIEPQETTKKSSTLPFMRRHLRSSPSPVILRQLEEEAKAREAANTVDITQVMSKLDRRSQLKKELPPK

SEQ ID NO: 36833 - protein, 445 aa, Homo sapiens
MYYQQALMRSTVKSSVSLGGIVKYSEQFSSNDAIMSGCLPSNPWITDDTQFWDLNAKLVEIPTKMRVERWAFNFSELIRDPKGRQSFQYFLKKEFSGENLGFWEACEDLKYGDQSKVKEKAEEIYKLFLAPGARRWINIDGKTMDITVKGLKHPHRYVLDAAQTHIYMLMKKDSYARYLKSPIYKDMLAKAIEPQETTKKSSTLPFMRRHLRSSPSPVILRQLEEEAKAREAANTVDITQPGQHMAPSPHLTVYTGTCMPPSPSSPFSSSCRSPRKPFASPSRFIRRPSTTICPSPIRVALESSSGLEQKGECSGSMAPRGPSVTESSEASLDTSWPRSRPRAPPKARMALSFSRFLRRGCLASPVFARLSPKCPAVSHGRVQPLGDVGQQLPRLKSKRVANFFQIKMDVPTGSGTCLMDSEDAGTGESGDRATEKEVICPWESL

SEQ ID NO: 36834 - protein, 671 aa, Homo sapiens
MTIRHQGQQYRPRMAFLQKIEALVKDMQNPETGVRMQNQRVLVTSVPHAMTGSDVLQWIVQRLWISSLEAQNLGNFIVRYGYIYPLQDPKNLILKPDGSLYRFQTPYFWPTQQWPAEDTDYAIYLAKRNIKKKGILEEYEKENYNFLNQKMNYKWDFVIMQAKEQYRAGKERNKADRYALDCQEKAYWLVHRCPPGMDNVLDYGLDRVTNPNEVKKQTVVAVKKEIMYYQQALMRSTVKSSVSLGGIVKYSEQFSSNDAIMSGCLPSNPWITDDTQFWDLNAKLVEIPTKMRVERWAFNFSELIRDPKGRQSFQYFLKKEFSGENLGFWEACEDLKYGDQSKVKEKAEEIYKLFLAPGARRWINIDGKTMDITVKGLKHPHRYVLDAAQTHIYMLMKKDSYARYLKSPIYKDMLAKAIEPQETTKKSSTLPFMRRHLRSSPSPVILRQLEEEAKAREAANTVDITQPGQHMAPSPHLTVYTGTCMPPSPSSPFSSSCRSPRKPFASPSRFIRRPSTTICPSPIRVALESSSGLEQKGECSGSMAPRGPSVTESSEASLDTSWPRSRPRAPPKARMALSFSRFLRRGCLASPVFARLSPKCPAVSHGRVQPLGDVGQQLPRLKSKRVANFFQIKMDVPTGSGTCLMDSEDAGTGESGDRATEKEVICPWESL

SEQ ID NO: 36835 - protein, 814 aa, Homo sapiens
MGLPALEFSDCCLDSPHFRETLKSHEAELDKTNKFIKELIKDGKSLISALKNLSSAKRKFADSLNEFKFQCIGDAETDDEMCIARSLQEFATVLRNLEDERIRMIENASEVLITPLEKFRKEQIGAAKEAKKKYDKETEKYCGILEKHLNLSSKKKESQLQEADSQVDLVRQHFYEVSLEYVFKVQEVQERKMFEFVEPLLAFLQGLFTFYHHGYELAKDFGDFKTQLTISIQNTRNRFEGTRSEVESLMKKMKENPLEHKTISPYTMEGYLYVQEKRHFGTSWVKHYCTYQRDSKQITMVPFDQKSGGKGGEDESVILKSCTRRKTDSIEKRFCFDVEAVDRPGVITMQALSEEDRRLWMEAMDGREPVYNSNKDSQSEGTAQLDSIGFSIIRKCIHAVETRGINEQGLYRIVGVNSRVQKLLSVLMDPKTASETETDICAEWEIKTITSALKTYLRMLPGPLMMYQFQRSFIKAAKLENQESRVSEIHSLVHRLPEKNRQMLQLLMNHLANVANNHKQNLMTVANLGVVFGPTLLRPQEETVAAIMDIKFQNIVIEILIENHEKIFNTVPDMPLTNAQLHLSRKKSSDSKPPSCSERPLTLFHTVQSTEKQEQRNSIINSSLESVSSNPNSILNSSSSLQPNMNSSDPDLAVVKPTRPNSLPPNPSPTSPLSPSWPMFSAPSSPMPTSSTSSDSSPVRSVAGFVWFSVAAVVLSLARSSLHAVFSLLVNFVPCHPNLHLLFDRPEEAVHEDSSTPFRKAKALYACKAEHDSELSFTAGTVFDNVHPSQEPGWLEGTLNGKTGLIPENYVEFL

SEQ ID NO: 36836 - protein, 759 aa, Homo sapiens
MGLPALEFSDCCLDSPHFRETLKSHEAELDKTNKFIKELIKDGKSLISALKNLSSAKRKFADSLNEFKFQCIGDAETDDEMCIARSLQEFATVLRNLEDERIRMIENASEVLITPLEKFRKEQIGAAKEAKKKYDKETEKYCGILEKHLNLSSKKKESQLQEADSQVDLVRQHFYEVSLEYVFKVQEVQERKMFEFVEPLLAFLQGLFTFYHHGYELAKDFGDFKTQLTISIQNTRNRFEGTRSEVESLMKKMKENPLEHKTISPYTMEGYLYVQEKRHFGTSWVKHYCTYQRDSKQITMVPFDQKSGGKGGEDESVILKSCTRRKTDSIEKRFCFDVEAVDRPGVITMQALSEEDRRLWMEAMDGREPVYNSNKDSQSEGTAQLDSIGFSIIRKCIHAVETRGINEQGLYRIVGVNSRVQKLLSVLMDPKTASETETDICAEWEIKTITSALKTYLRMLPGPLMMYQFQRSFIKAAKLENQESRVSEIHSLVHRLPEKNRQMLQLLMNHLANVANNHKQNLMTVANLGVVFGPTLLRPQEETVAAIMDIKFQNIVIEILIENHEKIFNTVPDMPLTNAQLHLSRKKSSDSKPPSCSERPLTLFHTVQSTEKQEQRNSIINSSLESVSSNPNSILNSSSSLQPNMNSSDPDLAVVKPTRPNSLPPNPSPTSPLSPSWPMFSAPSSPMPTSSTSSDSSPVSTPFRKAKALYACKAEHDSELSFTAGTVFDNVHPSQEPGWLEGTLNGKTGLIPENYVEFL

SEQ ID NO: 36837 - protein, 1247 aa, Homo sapiens
MMREWVLLMSVLLCGLAGPTHLFQPSLVLDMAKVLLDNYCFPENLLGMQEAIQQAIKSHEILSISDPQTLASVLTAGVQSSLNDPRLVISYEPSTPEPPPQVPALTSLSEEELLAWLQRGLRHEVLEGNVGYLRVDSVPGQEVLSMMGEFLVAHVWGNLMGTSALVLDLRHCTGGQVSGIPYIISYLHPGNTILHVDTIYNRPSNTTTEIWTLPQVLGERYGADKDVVVLTSSQTRGVAEDIAHILKQMRRAIVVGERTGGGALDLRKLRIGESDFFFTVPVSRSLGPLGGGSQTWEGSGVLPCVGTPAEQALEKALAILTLRSALPGVVHCLQEVLKDYYTLVDRVPTLLQHLASMDFSTVVSEEDLVTKLNAGLQAASEDPRLLVRAIGPTETPSWPAPDAAAEDSPGVAPELPEDEAIRQALVDSVFQVSVLPGNVGYLRFDSFADASVLGVLAPYVLRQVWEPLQDTEHLIMDLRHNPGGPSSAVPLLLSYFQGPEAGPVHLFTTYDRRTNITQEHFSHMELPGPRYSTQRGVYLLTSHRTATAAEEFAFLMQSLGWATLVGEITAGNLLHTRTVPLLDTPEGSLALTVPVLTFIDNHGEAWLGGGVVPDAIVLAEEALDKAQEVLEFHQSLGALVEGTGHLLEAHYARPEVVGQTSALLRAKLAQGAYRTAVDLESLASQLTADLQEVSGDHRLLVFHSPGELVVEEAPPPPPAVPSPEELTYLIEALFKTEVLPGQLGYLRFDAMAELETVKAVGPQLVRLVWQQLVDTAALVIDLRYNPGSYSTAIPLLCSYFFEAEPRQHLYSVFDRATSKVTEVWTLPQVAGQRYGSHKDLYILMSHTSGSAAEAFAHTMQDLQRATVIGEPTAGGALSVGIYQVGSSPLYASMPTQMAMSATTGKAWDLAGVEPDITVPMSEALSIAQDIVALRAKVPTVLQTAGKLVADNYASAELGAKMATKLSGLQSRYSRVTSEVALAEILGADLQMLSGDPHLKAAHIPENAKDRIPGIVPMQIPSPEVFEELIKFSFHTNVLEDNIGYLRFDMFGDGELLTQVSRLLVEHIWKKIMHTDAMIIDMRFNIGGPTSSIPILCSYFFDEGPPVLLDKIYSRPDDSVSELWTHAQVVGERYGSKKSMVILTSSVTAGTAEEFTYIMKRLGRALVIGEVTSGGCQPPQTYHVDDTNLYLTIPTARSVGASDGSSWEGVGVTPHVVVPAEEALARAKEMLQHNQLRVKRSPGLQDHL

SEQ ID NO: 36838 - protein, 135 aa, Homo sapiens
MPPNLTGYYRFVSQKNMEDYLQALNISLAVRKIALLLKPDKEIEHQGNHMTVRTLSTFRNYTVQFDVGVEFEEDLRSVDGRKCQTIVTWEEEHLVCVQKGEVPNRGWRHWLEGEMLYLELTARDAVCEQVFRKVR

SEQ ID NO: 36839 - protein, 774 aa, Homo sapiens
MEPEREGTERHPRKVRESRQAPNKLVGAAEAMKAGWDLEESQPEAKKARLSTILFTDNCEVTHDQLCELLKYAVLGKSNVPKPSWCQLFHQNHLNNVVVFVLQGMSQLHFYRFYLEFGCLRKAFRHKFRLPPPSSDFLADVVGLQTEQRAGDLPKTMEGPLPSNAKAAINLQDDPIIQKYGSKKVGLTRCLLTKEEMRTFHFPLQGFPDCENFLLTKCNGSIADNSPLFGLDCEMCLTSKGRELTRISLVAEGGCCVMDELVKPENKILDYLTSFSGITKKILNPVTTKLKDVQRQLKALLPPDAVLVGHSLDLDLRALKMIHPYVIDTSLLYVREQGRRFKLKFLAKVILGKDIQCPDRLGHDATEDARTILELARYFLKHGPKKIAELNLEALANHQEIQAAGQEPKNTAEVLQHPNTSVLECLDSVGQKLLFLTRETDAGELPSSRNCQTIKCLSNKEVLEQARVEIPLFPFSIVQFSFKAFSPVLTEEMNKRMRIKWTEISTVYAGPFSKNCNLRALKRLFKSFGPVQSMTFVLETRQPHLCIQYEVLEAAQLAIESLDGILVDGICIKVQRPVTELTLDCDTLVNELEGDSENQGSIYLSGVSETFKEQLLQEPRLFLGLEAVILPKDLKSGKQKKYCFLKFKSFGSAQQALNILTGKDWKLKGRHALTPRHLHAWLRGLPPESTRLPGLRVVPPPFEQEALQTLKLDHPKIAAWRWSRKIGKLYNSLCPGTLCLILLPGTKSTHGSLSGLGLMGIKEEEESAGPGLCS

SEQ ID NO: 36840 - protein, 743 aa, Homo sapiens
MEPEREGTERHPRKVRESRQAPNKLVGAAEAMKAGWDLEESQPEAKKARLSTILFTDNCEVTHDQLCELLKYAVLGKSNVPKPSWCQLFHQNHLNNVVVFVLQGMSQLHFYRFYLEFGCLRKAFRHKFRLPPPSSDFLADVVGLQTEQRAGDLPKTMEGPLPSNAKAAINLQDDPIIQKYGSKKVGLTRCLLTKEEMRTFHFPLQGFPDCENFLLTKCNGSIADNSPLFGLDCEMCLTSKGRELTRISLVAEGGCCVMDELVKPENKILDYLTSFSGITKKILNPVTTKLKDVQRQLKALLPPDAVLVGHSLDLDLRALKMIHPYVIDTSLLYVREQGRRFKLKFLAKVILGKDIQCPDRLGHDATEDARTILELARYFLKHGPKKIAELNLEALANHQEIQAAGQEPKNTAEVLQHPNTSVLECLDSVGQKLLFLTRETDAGELPSSRNCQTIKCLSNKEVLEQARVEIPLFPFSIVQFSFKAFSPVLTEEMNKRMRIKWTEISTVYAGPFSKNCNLRALKRLFKSFGPVQSMTFVLETRQVQRPVTELTLDCDTLVNELEGDSENQGSIYLSGVSETFKEQLLQEPRLFLGLEAVILPKDLKSGKQKKYCFLKFKSFGSAQQALNILTGKDWKLKGRHALTPRHLHAWLRGLPPESTRLPGLRVVPPPFEQEALQTLKLDHPKIAAWRWSRKIGKLYNSLCPGTLCLILLPGTKSTHGSLSGLGLMGIKEEEESAGPGLCS

SEQ ID NO: 36841 - protein, 616 aa, Homo sapiens
MAEDEPDAKSPKTGGRAPPGGAEAGEPTTLLQRLRGTISKAVQNKVEGILQDVQKFSDNDKLYLYLQLPSGPTTGDKSSEPSTLSNEEYMYAYRWIRNHLEEHTDTCLPKQSVYDAYRKYCESLACCRPLSTANFGKIIREIFPDIKARRLGGRGQSKYCYSGIRRKTLVSMPPLPGLDLKGSESPEMGPEVTPAPRDELVEAACALTCDWAERILKRSFSSIVEVARFLLQQHLISARSAHAHVLKAMGLAEEDEHAPRERSSKPKNGLENPEGGAHKKPERLAQPPKDLEARTGAGPLARGERKKSVVESSAPGANNLQVNALVARLPLLLPRAPRSLIPPIPVSPPILAPRLSSGALKVATLPLSSRAGAPPAAVPIINMILPTVPALPGPGPGPGRAPPGGLTQPRGTENREVGIGGDQGPHDKGVKRTAEVPVSEASGQAPPAKAAKQDIEDTASDAKRKRGRPRKKSGGSGERNSTPLKSAAAMESAQSSRLPWETWGSGGEGNSAGGAERPGPMGEAEKGAVLAQGQGDGTVSKGGRGPGSQHTKEAEDKIPLVPSKVSVIKGSRSQKEAFPLAKGEVDTAPQGNKDLKEHVLQSSLSQEHKDPKATPP

SEQ ID NO: 36842 - protein, 576 aa, Homo sapiens
MAEDEPDAKSPKTGGRAPPGGAEAGEPTTLLQRLRGTISKAVQNKVEGILQDVQKFSDNDKLYLYLQLPSGPTTGDKRKYCESLACCRPLSTANFGKIIREIFPDIKARRLGGRGQSKYCYSGIRRKTLVSMPPLPGLDLKGSESPEMGPEVTPAPRDELVEAACALTCDWAERILKRSFSSIVEVARFLLQQHLISARSAHAHVLKAMGLAEEDEHAPRERSSKPKNGLENPEGGAHKKPERLAQPPKDLEARTGAGPLARGERKKSVVESSAPGANNLQVNALVARLPLLLPRAPRSLIPPIPVSPPILAPRLSSGALKVATLPLSSRAGAPPAAVPIINMILPTVPALPGPGPGPGRAPPGGLTQPRGTENREVGIGGDQGPHDKGVKRTAEVPVSEASGQAPPAKAAKQDIEDTASDAKRKRGRPRKKSGGSGERNSTPLKSAAAMESAQSSRLPWETWGSGGEGNSAGGAERPGPMGEAEKGAVLAQGQGDGTVSKGGRGPGSQHTKEAEDKIPLVPSKVSVIKGSRSQKEAFPLAKGEVDTAPQGNKDLKEHVLQSSLSQEHKDPKATPP

SEQ ID NO: 36843 - protein, 271 aa, Homo sapiens
MAPRALPGSAVLAAAVFVGGAVSSPLVAPDNGSSRTLHSRTETTPSPSNDTGNGHPEYIAYALVPVFFIMGLFGVLICHLLKKKGYRCTTEAEQDIEEEKVEKIELNDSVNENSDTVGQIVHYIMKNEANADVLKAMVADNSLYDPESPVTPSTPGSPPVSPGPLSPGGTPGKHVCGHHLHTVGGVVERDVCHRCRHKRWHFIKPTNKSRESRPRRQGEVTVLSVGRFRVTKVEHKSNQKERRSLMSVSGAETVNGEVPATPVKRERSGTE

SEQ ID NO: 36844 - protein, 3460 aa, Homo sapiens
MERSGWARQTFLLALLLGATLRARAAAGYYPRFSPFFFLCTHHGELEGDGEQGEVLISLHIAGNPTYYVPGQEYHVTISTSTFFDGLLVTGLYTSTSVQASQSIGGSSAFGFGIMSDHQFGNQFMCSVVASHVSHLPTTNLSFIWIAPPAGTGCVNFMATATHRGQVIFKDALAQQLCEQGAPTDVTVHPHLAEIHSDSIILRDDFDSYHQLQLNPNIWVECNNCETGEQCGAIMHGNAVTFCEPYGPRELITTGLNTTTASVLQFSIGSGSCRFSYSDPSIIVLYAKNNSADWIQLEKIRAPSNVSTIIHILYLPEDAKGENVQFQWKQENLRVGEVYEACWALDNILIINSAHRQVVLEDSLDPVDTGNWLFFPGATVKHSCQSDGNSIYFHGNEGSEFNFATTRDVDLSTEDIQEQWSEEFESQPTGWDVLGAVIGTECGTIESGLSMVFLKDGERKLCTPSMDTTGYGNLRFYFVMGGICDPGNSHENDIILYAKIEGRKEHITLDTLSYSSYKVPSLVSVVINPELQTPATKFCLRQKNHQGHNRNVWAVDFFHVLPVLPSTMSHMIQFSINLGCGTHQPGNSVSLEFSTNHGRSWSLLHTECLPEICAGPHLPHSTVYSSENYSGWNRITIPLPNAALTRNTRIRWRQTGPILGNMWAIDNVYIGPSCLKFCSGRGQCTRHGCKCDPGFSGPACEMASQTFPMFISESFGSSRLSSYHNFYSIRGAEVSFGCGVLASGKALVFNKDGRRQLITSFLDSSQSRFLQFTLRLGSKSVLSTCRAPDQPGEGVLLHYSYDNGITWKLLEHYSYLSYHEPRIISVELPGDAKQFGIQFRWWQPYHSSQREDVWAIDEIIMTSVLFNSISLDFTNLVEVTQSLGFYLGNVQPYCGHDWTLCFTGDSKLASSMRYVETQSMQIGASYMIQFSLVMGCGQKYTPHMDNQVKLEYSTNHGLTWHLVQEECLPSMPSCQEFTSASIYHASEFTQWRRVIVLLPQKTWSSATRFRWSQSYYTAQDEWALDSIYIGQQCPNMCSGHGSCDHGICRCDQGYQGTECHPEAALPSTIMSDFENQNGWESDWQEVIGGEIVKPEQGCGVISSGSSLYFSKAGKRQLVSWDLDTSWVDFVQFYIQIGGESASCNKPDSREEGVLLQYSNNGGIQWHLLAEMYFSDFSKPRFVYLELPAAAKTPCTRFRWWQPVFSGEDYDQWAVDDIIILSEKQKQIIPVINPTLPQNFYEKPAFDYPMNQMSVWLMLANEGMVKNETFCAATPSAMIFGKSDGDRFAVTRDLTLKPGYVLQFKLNIGCANQFSSTAPVLLQYSHDAGMSWFLVKEGCYPASAGKGCEGNSRELSEPTMYHTGDFEEWTRITIVIPRSLASSKTRFRWIQESSSQKNVPPFGLDGVYISEPCPSYCSGHGDCISGVCFCDLGYTAAQGTCVSNVPNHNEMFDRFEGKLSPLWYKITGAQVGTGCGTLNDGKSLYFNGPGKREARTVPLDTRNIRLVQFYIQIGSKTSGITCIKPRTRNEGLIVQYSNDNGILWHLLRELDFMSFLEPQIISIDLPQDAKTPATAFRWWQPQHGKHSAQWALDDVLIGMNDSSQTGFQDKFDGSIDLQANWYRIQGGQVDIDCLSMDTALIFTENIGKPRYAETWDFHVSASTFLQFEMSMGCSKPFSNSHSVQLQYSLNNGKDWHLVTEECVPPTIGCLHYTESSIYTSERFQNWKRITVYLPLSTISPRTRFRWIQANYTVGADSWAIDNVVLASGCPWMCSGRGICDAGRCVCDRGFGGPYCVPVVPLPSILKDDFNGNLHPDLWPEVYGAERGNLNGETIKSGTSLIFKGEGLRMLISRDLDCTNTMYVQFSLRFIAKSTPERSHSILLQFSISGGITWHLMDEFYFPQTTNILFINVPLPYTAQTNATRFRLWQPYNNGKKEEIWIVDDFIIDGNNVNNPVMLLDTFDFGPREDNWFFYPGGNIGLYCPYSSKGAPEEDSAMVFVSNEVGEHSITTRDLNVNENTIIQFEINVGCSTDSSSADPVRLEFSRDFGATWHLLLPLCYHSSSHVSSLCSTEHHPSSTYYAGTMQGWRREVVHFGKLHLCGSVRFRWYQGFYPAGSQPVTWAIDNVYIGPQCEEMCNGQGSCINGTKCICDPGYSGPTCKISTKNPDFLKDDFEGQLESDRFLLMSGGKPSRKCGILSSGNNLFFNEDGLRMLMTRDLDLSHARFVQFFMRLGCGKGVPDPRSQPVLLQYSLNGGLSWSLLQEFLFSNSSNVGRYIALEIPLKARSGSTRLRWWQPSENGHFYSPWVIDQILIGGNISGNTVLEDDFTTLDSRKWLLHPGGTKMPVCGSTGDALVFIEKASTRYVVSTDVAVNEDSFLQIDFAASCSVTDSCYAIELEYSVDLGLSWHPLVRDCLPTNVECSRYHLQRILVSDTFNKWTRITLPLPPYTRSQATRFRWHQPAPFDKQQTWAIDNVYIGDGCIDMCSGHGRCIQGNCVCDEQWGGLYCDDPETSLPTQLKDNFNRAPSSQNWLTVNGGKLSTVCGAVASGMALHFSGGCSRLLVTVDLNLTNAEFIQFYFMYGCLITPNNRNQGVLLEYSVNGGITWNLLMEIFYDQYSKPGFVNILLPPDAKEIATRFRWWQPRHDGLDQNDWAIDNVLISGSADQRTVMLDTFSSAPVPQHERSPADAGPVGRIAFDMFMEDKTSVNEHWLFHDDCTVERFCDSPDGVMLCGSHDGREVYAVTHDLTPTEGWIMQFKISVGCKVSEKIAQNQIHVQYSTDFGVSWNYLVPQCLPADPKCSGSVSQPSVFFPTKGWKRITYPLPESLVGNPVRFRFYQKYSDMQWAIDNFYLGPGCLDNCRGHGDCLREQCICDPGYSGPNCYLTHTLKTFLKERFDSEEIKPDLWMSLEGGSTCTECGILAEDTALYFGGSTVRQAVTQDLDLRGAKFLQYWGRIGSENNMTSCHRPICRKEGVLLDYSTDGGITWTLLHEMDYQKYISVRHDYILLPEDALTNTTRLRWWQPFVISNGIVVSGVERAQWALDNILIGGAEINPSQLVDTFDDEGTSHEENWSFYPNAVRTAGFCGNPSFHLYWPNKKKDKTHNALSSRELIIQPGYMMQFKIVVGCEATSCGDLHSVMLEYTKDARSDSWQLVQTQCLPSSSNSIGCSPFQFHEATIYNSVNSSSWKRITIQLPDHVSSSATQFRWIQKGEETEKQSWAIDHVYIGEACPKLCSGHGYCTTGAICICDESFQGDDCSVFSHDLPSYIKDNFESARVTEANWETIQGGVIGSGCGQLAPYAHGDSLYFNGCQIRQAATKPLDLTRASKIMFVLQIGSMSQTDSCNSDLSGPHAVDKAVLLQYSVNNGITWHVIAQHQPKDFTQAQRVSYNVPLEARMKGVLLRWWQPRHNGTGHDQWALDHVEVVLVSTRKQNYMMNFSRQHGLRHFYNRRRRSLRRYP

SEQ ID NO: 36845 - protein, 3458 aa, Homo sapiens
MERSGWARQTFLLALLLGATLRARAAAGYYPRFSPFFFLCTHHGELEGDGEQGEVLISLHIAGNPTYYVPGQEYHVTISTSTFFDGLLVTGLYTSTSVQASQSIGGSSAFGFGIMSDHQFGNQFMCSVVASHVSHLPTTNLSFIWIAPPAGTGCVNFMATATHRGQVIFKDALAQQLCEQGAPTDVTVHPHLAEIHSDSIILRDDFDSYHQLQLNPNIWVECNNCETGEQCGAIMHGNAVTFCEPYGPRELITTGLNTTTASVLQFSIGSGSCRFSYSDPSIIVLYAKNNSADWIQLEKIRAPSNVSTIIHILYLPEDAKGENVQFQWKQENLRVGEVYEACWALDNILIINSAHRQVVLEDSLDPVDTGNWLFFPGATVKHSCQSDGNSIYFHGNEGSEFNFATTRDVDLSTEDIQEQWSEEFESQPTGWDVLGAVIGTECGTIESGLSMVFLKDGERKLCTPSMDTTGYGNLRFYFVMGGICDPGNSHENDIILYAKIEGRKEHITLDTLSYSSYKVPSLVSVVINPELQTPATKFCLRQKNHQGHNRNVWAVDFFHVLPVLPSTMSHMIQFSINLGCGTHQPGNSVSLEFSTNHGRSWSLLHTECLPEICAGPHLPHSTVYSSENYSGWNRITIPLPNAALTRNTRIRWRQTGPILGNMWAIDNVYIGPSCLKFCSGRGQCTRHGCKCDPGFSGPACEMASQTFPMFISESFGSSRLSSYHNFYSIRGAEVSFGCGVLASGKALVFNKDGRRQLITSFLDSSQSRFLQFTLRLGSKSVLSTCRAPDQPGEGVLLHYSYDNGITWKLLEHYSYLSYHEPRIISVELPGDAKQFGIQFRWWQPYHSSQREDVWAIDEIIMTSVLFNSISLDFTNLVEVTQSLGFYLGNVQPYCGHDWTLCFTGDSKLASSMRYVETQSMQIGASYMIQFSLVMGCGQKYTPHMDNQVKLEYSTNHGLTWHLVQEECLPSMPSCQEFTSASIYHASEFTQWRRVIVLLPQKTWSSATRFRWSQSYYTAQDEWALDSIYIGQQCPNMCSGHGSCDHGICRCDQGYQGTECHPEAALPSTIMSDFENQNGWESDWQEVIGGEIVKPEQGCGVISSGSSLYFSKAGKRQLVSWDLDTSWVDFVQFYIQIGGESASCNKPDSREEGVLLQYSNNGGIQWHLLAEMYFSDFSKPRFVYLELPAAAKTPCTRFRWWQPVFSGEDYDQWAVDDIIILSEKQKQIIPVINPTLPQNFYEKPAFDYPMNQMSVWLMLANEGMVKNETFCAATPSAMIFGKSDGDRFAVTRDLTLKPGYVLQFKLNIGCANQFSSTAPVLLQYSHDAGMSWFLVKEGCYPASAGKGCEGNSRELSEPTMYHTGDFEEWTRITIVIPRSLASSKTRFRWIQESSSQKNVPPFGLDGVYISEPCPSYCSGHGDCISGVCFCDLGYTAAQGTCVSNVPNHNEMFDRFEGKLSPLWYKITGAQVGTGCGTLNDGKSLYFNGPGKREARTVPLDTRNIRLVQFYIQIGSKTSGITCIKPRTRNEGLIVQYSNDNGILWHLLRELDFMSFLEPQIISIDLPQDAKTPATAFRWWQPQHGKHSAQWALDDVLIGMNDSSQTGFQDKFDGSIDLQANWYRIQGGQVDIDCLSMDTALIFTENIGKPRYAETWDFHVSASTFLQFEMSMGCSKPFSNSHSVQLQYSLNNGKDWHLVTEECVPPTIGCLHYTESSIYTSERFQNWKRITVYLPLSTISPRTRFRWIQANYTVGADSWAIDNVVLASGCPWMCSGRGICDAGRCVCDRGFGGPYCVPVVPLPSILKDDFNGNLHPDLWPEVYGAERGNLNGETIKSGTSLIFKGEGLRMLISRDLDCTNTMYVQFSLRFIAKSTPERSHSILLQFSISGGITWHLMDEFYFPQTTNILFINVPLPYTAQTNATRFRLWQPYNNGKKEEIWIVDDFIIDGNNVNNPVMLLDTFDFGPREDNWFFYPGGNIGLYCPYSSKGAPEEDSAMVFVSNEVGEHSITTRDLNVNENTIIQFEINVGCSTDSSSADPVRLEFSRDFGATWHLLLPLCYHSSSHVSSLCSTEHHPSSTYYAGTMQGWRREVVHFGKLHLCGSVRFRWYQGFYPAGSQPVTWAIDNVYIGPQCEEMCNGQGSCINGTKCICDPGYSGPTCKISTKNPDFLKDDFEGQLESDRFLLMSGGKPSRKCGILSSGNNLFFNEDGLRMLMTRDLDLSHARFVQFFMRLGCGKGVPDPRSQPVLLQYSLNGGLSWSLLQEFLFSNSSNVGRYIALEIPLKARSGSTRLRWWQPSENGHFYSPWVIDQILIGGNISGNTVLEDDFTTLDSRKWLLHPGGTKMPVCGSTGDALVFIEKASTRYVVSTDVAVNEDSFLQIDFAASCSVTDSCYAIELEYSVDLGLSWHPLVRDCLPTNVECSRYHLQRILVSDTFNKWTRITLPLPPYTRSQATRFRWHQPAPFDKQQTWAIDNVYIGDGCIDMCSGHGRCIQGNCVCDEQWGGLYCDDPETSLPTQLKDNFNRAPSSQNWLTVNGGKLSTVCGAVASGMALHFSGGCSRLLVTVDLNLTNAEFIQFYFMYGCLITPNNRNQGVLLEYSVNGGITWNLLMEIFYDQYSKPGFVNILLPPDAKEIATRFRWWQPRHDGLDQNDWAIDNVLISGSADQRTVMLDTFSSAPVPQHERSPADAGPVGRIAFDMFMEDKTSVNEHWLFHDDCTVERFCDSPDGVMLCGSHDGREVYAVTHDLTPTEGWIMQFKISVGCKVSEKIAQNQIHVQYSTDFGVSWNYLVPQCLPADPKCSGSVSQPSVFFPTKGWKRITYPLPESLVGNPVRFRFYQKYSDMQWAIDNFYLGPGCLDNCRGHGDCLREQCICDPGYSGPNCYLTHTLKTFLKERFDSEEIKPDLWMSLEGGSTCTECGILAEDTALYFGGSTVRQAVTQDLDLRGAKFLQYWGRIGSENNMTSCHRPICRKEGVLLDYSTDGGITWTLLHEMDYQKYISVRHDYILLPEDALTNTTRLRWWQPFVISNGIVVSGVERAQWALDNILIGGAEINPSQLVDTFDDEGTSHEENWSFYPNAVRTAGFCGNPSFHLYWPNKKKDKTHNALSSRELIIQPGYMMQFKIVVGCEATSCGDLHSVMLEYTKDARSDSWQLVQTQCLPSSSNSIGCSPFQFHEATIYNSVNSSSWKRITIQLPDHVSSSATQFRWIQKGEETEKQSWAIDHVYIGEACPKLCSGHGYCTTGAICICDESFQGDDCSVFSHDLPSYIKDNFESARVTEANWETIQGGVIGSGCGQLAPYAHGDSLYFNGCQIRQAATKPLDLTRASKIMFVLQIGSMSQTDSCNSDLSGPHAVDKAVLLQYSVNNGITWHVIAQHQPKDFTQAQRVSYNVPLEARMKGVLLRWWQPRHNGTGHDQWALDHVEVVLTRKQNYMMNFSRQHGLRHFYNRRRRSLRRYP

SEQ ID NO: 36846 - protein, 3427 aa, Homo sapiens
MERSGWARQTFLLALLLGATLRARAAAGYYPRFSPFFFLCTHHGELEGDGEQGEVLISLHIAGNPTYYVPGQEYHVTISTSTFFDGLLVTGLYTSTSVQASQSIGGSSAFGFGIMSDHQFGNQFMCSVVASHVSHLPTTNLSFIWIAPPAGTGCVNFMATATHRGQVIFKDALAQQLCEQGAPTDVTVHPHLAEIHSDSIILRDDFDSYHQLQLNPNIWVECNNCETGEQCGAIMHGNAVTFCEPYGPRELITTGLNTTTASVLQFSIGSGSCRFSYSDPSIIVLYAKNNSADWIQLEKIRAPSNVSTIIHILYLPEDAKGENVQFQWKQENLRVGEVYEACWALDNILIINSAHRQVVLEDSLDPVDTGNWLFFPGATVKHSCQSDGNSIYFHGNEGSEFNFATTRDVDLSTEDIQEQWSEEFESQPTGWDVLGAVIGTECGTIESGLSMVFLKDGERKLCTPSMDTTGYGNLRFYFVMGGICDPGNSHENDIILYAKIEGRKEHITLDTLSYSSYKVPSLVSVVINPELQTPATKFCLRQKNHQGHNRNVWAVDFFHVLPVLPSTMSHMIQFSINLGCGTHQPGNSVSLEFSTNHGRSWSLLHTECLPEICAGPHLPHSTVYSSENYSGWNRITIPLPNAALTRNTRIRWRQTGPILGNMWAIDNVYIGPSCLKFCSGRGQCTRHGCKCDPGFSGPACEMASQTFPMFISESFGSSRLSSYHNFYSIRGAEVSFGCGVLASGKALVFNKDGRRQLITSFLDSSQSRFLQFTLRLGSKSVLSTCRAPDQPGEGVLLHYSYDNGITWKLLEHYSYLSYHEPRIISVELPGDAKQFGIQFRWWQPYHSSQREDVWAIDEIIMTSVLFNSISLDFTNLVEVTQSLGFYLGNVQPYCGHDWTLCFTGDSKLASSMRYVETQSMQIGASYMIQFSLVMGCGQKYTPHMDNQVKLEYSTNHGLTWHLVQEECLPSMPSCQEFTSASIYHASEFTQWRRVIVLLPQKTWSSATRFRWSQSYYTAQDEWALDSIYIGQQCPNMCSGHGSCDHGICRCDQGYQGTECHPEAALPSTIMSDFENQNGWESDWQEVIGGEIVKPEQGCGVISSGSSLYFSKAGKRQLVSWDLDTSWVDFVQFYIQIGGESASCNKPDSREEGVLLQYSNNGGIQWHLLAEMYFSDFSKPRFVYLELPAAAKTPCTRFRWWQPVFSGEDYDQWAVDDIIILSEKQKQIIPVINPTLPQNFYEKPAFDYPMNQMSVWLMLANEGMVKNETFCAATPSAMIFGKSDGDRFAVTRDLTLKPGYVLQFKLNIGCANQFSSTAPVLLQYSHDAGMSWFLVKEGCYPASAGKGCEGNSRELSEPTMYHTGDFEEWTRITIVIPRSLASSKTRFRWIQESSSQKNVPPFGLDGVYISEPCPSYCSGHGDCISGVCFCDLGYTAAQGTCVSNVPNHNEMFDRFEGKLSPLWYKITGAQVGTGCGTLNDGKSLYFNGPGKREARTVPLDTRNIRLVQFYIQIGSKTSGITCIKPRTRNEGLIVQYSNDNGILWHLLRELDFMSFLEPQIISIDLPQDAKTPATAFRWWQPQHGKHSAQWALDDVLIGMNDSSQTGFQDKFDGSIDLQANWYRIQGGQVDIDCLSMDTALIFTENIGKPRYAETWDFHVSASTFLQFEMSMGCSKPFSNSHSVQLQYSLNNGKDWHLVTEECVPPTIGCLHYTESSIYTSERFQNWKRITVYLPLSTISPRTRFRWIQANYTVGADSWAIDNVVLASGCPWMCSGRGICDAGRCVCDRGFGGPYCVPVVPLPSILKDDFNGNLHPDLWPEVYGAERGNLNGETIKSGTSLIFKGEGLRMLISRDLDCTNTMYVQFSLRFIAKSTPERSHSILLQFSISGGITWHLMDEFYFPQTTNILFINVPLPYTAQTNATRFRLWQPYNNGKKEEIWIVDDFIIDGNNVNNPVMLLDTFDFGPREDNWFFYPGGNIGLYCPYSSKGAPEEDSAMVFVSNEVGEHSITTRDLNVNENTIIQFEINVGCSTDSSSADPVRLEFSRDFGATWHLLLPLCYHSSSHVSSLCSTEHHPSSTYYAGTMQGWRREVVHFGKLHLCGSVRFRWYQGFYPAGSQPVTWAIDNVYIGPQCEEMCNGQGSCINGTKCICDPGYSGPTCKISTKNPDFLKDDFEGQLESDRFLLMSGGKPSRKCGILSSGNNLFFNEDGLRMLMTRDLDLSHARFVQFFMRLGCGKGVPDPRSQPVLLQYSLNGGLSWSLLQEFLFSNSSNVGRYIALEIPLKARSGSTRLRWWQPSENGHFYSPWVIDQILIGGNISGNTVLEDDFTTLDSRKWLLHPGGTKMPVCGSTGDALVFIEKASTRYVVSTDVAVNEDSFLQIDFAASCSVTDSCYAIELEYSVDLGLSWHPLVRDCLPTNVECSRYHLQRILVSDTFNKWTRITLPLPPYTRSQATRFRWHQPAPFDKQQTWAIDNVYIGDGCIDMCSGHGRCIQGNCVCDEQWGGLYCDDPETSLPTQLKDNFNRAPSSQNWLTVNGGKLSTVCGAVASGMALHFSGGCSRLLVTVDLNLTNAEFIQFYFMYGCLITPNNRNQGVLLEYSVNGGITWNLLMEIFYDQYSKPGFVNILLPPDAKEIATRFRWWQPRHDGLDQNDWAIDNVLISGSADQRTVMLDTFSSAPVPQHERSPADAGPVGRIAFDMFMEDKTSVNEHWLFHDDCTVERFCDSPDGVMLCGSHDGREVYAVTHDLTPTEGWIMQFKISVGCKVSEKIAQNQIHVQYSTDFGVSWNYLVPQCLPADPKCSGSVSQPSVFFPTKGWKRITYPLPESLVGNPVRFRFYQKYSDMQWAIDNFYLGPGCLDNCRGHGDCLREQCICDPGYSGPNCYLTHTLKTFLKERFDSEEIKPDLWMSLEGGSTCTECGILAEDTALYFGGSTVRQAVTQDLDLRGAKFLQYWGRIGSENNMTSCHRPICRKEGVLLDYSTDGGITWTLLHEMDYQKYISVRHDYILLPEDALTNTTRLRWWQPFVISNGIVVSGVERAQWALDNILIGGAEINPSQLVDTFDDEGTSHEENWSFYPNAVRTAGFCGNPSFHLYWPNKKKDKTHNALSSRELIIQPGYMMQFKIVVGCEATSCGDLHSVMLEYTKDARSDSWQLVQTQCLPSSSNSIGCSPFQFHEATIYNSVNSSSWKRITIQLPDHVSSSATQFRWIQKGEETEKQSWAIDHVYIGEACPKLCSGHGYCTTGAICICDESFQGDDCSVFSHDLPSYIKDNFESARVTEANWETIQGGVIGSGCGQLAPYAHGDSLYFNGCQIRQAATKPLDLTRASKIMFVLQIGSMSQTDSCNSDLSGPHAVDKAVLLQYSVNNGITWHVIAQHQPKDFTQAQRVSYNVPLEARMKGVLLRWWQPRHNGTGHDQWALDHVEVVL

SEQ ID NO: 36847 - protein, 108 aa, Homo sapiens
MLLFCPGCGNGLIVEEGQRCHRFSCNTCPYVHNITRKVTNRKYPKLKEVDDVLGGAAAWENVDSTAESCPKCEHPRAYFMQLQTRSADEPMTTFYKCCNAQCGHRWRD

SEQ ID NO: 36848 - protein, 256 aa, Homo sapiens
MPLHKYPVWLWKRLQLREGICSRLPGHYLRSLEEERTPTPVHYRPHGAKFKINPKNGQRERVEDVPIPIYFPPESQRGLWGGEGWILGQIYANNDKLSKRLKKVWKPQLFEREFYSEILDKKFTVTVTMRTLDLIDEAYGLDFYILKTPKEDLCSKFGMDLKRGMLLRLARQDPQLHPEDPERRAAIYDKYKEFAIPEEEAEWVGLTLEEAIEKQRLLEEKDPVPLFKIYVAELIQQLQQQALSEPAVVQKRASGQ

SEQ ID NO: 36849 - protein, 465 aa, Homo sapiens
MTTIPRKGSSHLPGSLHTCKLKLQEDRRQQEKSVIAQPIFVFEKGEQTFKRPAEDTLYEAAEPECNGFPTKRVRSSSFTFHITDSQSQGVRKNNVFMTSALVQSSVDIKSAEQGPVKHSKHVIRPAILQLPQARSCAKVRKTFGHKALESCKTKEKTNNKISEGNSYLLSENLSRARISVQLSTNQDFLGATSVGCQPNEDKCSFKSCSSNFVFGENMVERVLGTQKLTQPQLENDSYAKEKPFKSIPKFPVNFLSSRTDSIKNTSLIESAAAFSSQPSRKCLLEKIDVITGEETEHNVLKINCKLFIFNKTTQSWIERGRGTLRLNDTASTDCGTLQSRLIMRNQGSLRLILNSKLWAQMKIQRANHKNVRITATDLEDYSIKIFLIQASAQDTAYLYAAIHHRLVALQSFNKQRDVNQAESLSETAQQLNCESCDENEDDFIQVTKNGSDPSSWTHRQSVACS

SEQ ID NO: 36850 - protein, 321 aa, Homo sapiens
MTTIPRKGSSHLPGSLHTCKLKLQEDRRQQEKSVIAQPIFVFEKGEQTFKRPAEDTLYEAAEPECNGFPTKRVRSSSFTFHITDSQSQGVRKNNVFMTSALVQSSVDIKSAEQGPVKHSKHVIRPAILQLPQARSCAKVRKTFGHKALESCKTKEKTNNKISEGNSYLLSENLSRARISVQLSTNQDFLGATSVGCQPNEDKCSFKSCSSNFVFGENMVERVLGTQKLTQPQLENDSYAKEKPFKSIPKFPVNFLSSRTDSIKNTSLIESAAAFSSQPSRKCLLEKIDVITGEETEHNVLKVCISCFTLSGSIYILGIKLT

SEQ ID NO: 36851 - protein, 490 aa, Homo sapiens
MTTIPRKGSSHLPGSLHTCKLKLQEDRRQQEKSVIAQPIFVFEKGEQTFKRPAEDTLYEAAEPECNGFPTKRVRSSSFTFHITDSQSQGVSTLSQKQMRCSSVTNLPTFPHSGPVRKNNVFMTSALVQSSVDIKSAEQGPVKHSKHVIRPAILQLPQARSCAKVRKTFGHKALESCKTKEKTNNKISEGNSYLLSENLSRARISVQLSTNQDFLGATSVGCQPNEDKCSFKSCSSNFVFGENMVERVLGTQKLTQPQLENDSYAKEKPFKSIPKFPVNFLSSRTDSIKNTSLIESAAAFSSQPSRKCLLEKIDVITGEETEHNVLKINCKLFIFNKTTQSWIERGRGTLRLNDTASTDCGTLQSRLIMRNQGSLRLILNSKLWAQMKIQRANHKNVRITATDLEDYSIKIFLIQASAQDTAYLYAAIHHRLVALQSFNKQRDVNQAESLSETAQQLNCESCDENEDDFIQVTKNGSDPSSWTHRQSVACS

SEQ ID NO: 36852 - protein, 1105 aa, Homo sapiens
MAATASAGVPATVSEKQEFYQLLKNLINPSCMVRRQAEEIYENIPGLCKTTFLLDAVRNRRAGYEVRQMAAALLRRLLSSGFEEVYPNLPADVQRDVKIELILAVKLETHASMRKKLCDIFAVLARNLIDEDGTNHWPEGLKFLIDSIYSKNVVLWEVALHVFWHFPGIFGTQERHDLDIIKRLLDQCIQDQEHPAIRTLSARAAAAFVLANENNIALFKDFADLLPGILQAVNDSCYQDDDSVLESLVEIADTVPKYLGPYLEDTLQLSLKLCGDSRLSNLQRQLALEVIVTLSETATPMLKKHTNIIAQAVPHILAMMVDLQDDEDWVNADEMEEDDFDSNAVAAESALDRLACGLGGKVVLPMTKEHIMQMLQSPDWKYRHAGLMALSAIGEGCHQQMESILDETVNSVLLFLQDPHPRVRAAACTTLGQMATDFAPNFQKKFHETVIAALLRTMENQGNQRVQSHAASALIIFIEDCPKSLLVLYVDSMVKNLHSVLVIKLQELIRNGTKLALEQLVTTIASVADTIEEKFVPYYDIFMPSLKHIVELAVQKELKLLRGKTIECISHIGLAVGKEKFMQDASNVMQLLLKTQSDLNNMEDDDPQTSYMVSAWARMCKILGKDFQQYLPLVIEPLIKTASAKPDVALLDTQDVENMSDDDGWQFVNLGDQQSFGIKTSGLEAKATACQMLVYYAKELREGFVEYTEQVVKLMVPLLKFYFHDNVRVAAAESMPFLLECARIRGPEYLAQMWQFICDPLIKAIGTEPDTDVLSEIMNSFAKSIEVMGDGCLNDEHLEELGGILKAKLEGHFKNQELRQVKRQEENYDQQVEMSLQDEDECDVYILTKVSDILHSLFSTYKEKILPWFEQLLPLIVNLICSSRPWPDRQWGLCIFDDIIEHCSPTSFKYVEYFRWPMLLNMRDNNPEVRQAAAYGLGVMAQFGGDDYRSLCSEAVPLLVKVIKCANSKTKKNVIATENCISAIGKILKFKPNCVNVDEVLPHWLSWLPLHEDKEEAIQTLSFLCDLIESNHPVVIGPNNSNLPKIISIIAEGKINETINYEDPCAKRLANVVRQVQTSEDLWLECVSQLDDEQQEALQELLNFA

SEQ ID NO: 36853 - protein, 531 aa, Homo sapiens
MEPRAVAEAVETGEEDVIMEALRSYNQEHSQSFTFDDAQQEDRKRLAELLVSVLEQGLPPSHRVIWLQSVRILSRDRNCLDPFTSRQSLQALACYADISVSEGSVPESADMDVVLESLKCLCNLVLSSPVAQMLAAEARLVVKLTERVGLYRERSFPHDVQFFDLRLLFLLTALRTDVRQQLFQELKGVRLLTDTLELTLGVTPEGNPPPTLLPSQETERAMEILKVLFNITLDSIKGEVDEEDAALYRHLGTLLRHCVMIATAGDRTEEFHGHAVNLLGNLPLKCLDVLLTLEPHGDSTEFMGVNMDVIRALLIFLEKRLHKTHRLKESVAPVLSVLTECARMHRPARKFLKAQVLPPLRDVRTRPEVGEMLRNKLVRLMTHLDTDVKRVAAEFLFVLCSESVPRFIKYTGYGNAAGLLAARGLMAGGRPEGQYSEDEDTDTDEYKEAKASINPVTGRVEEKPPNPMEGMTEEQKEHEAMKLVTMFDKLSRNRVIQPMGMSPRGHLTSLQDAMCETMEQQLSSDPDSDPD

SEQ ID NO: 36854 - protein, 525 aa, Homo sapiens
MMPNRRTGRWVLAQGVKGQGRVAPGRRAWWSRSSPCPQRLAELLVSVLEQGLPPSHRVIWLQSVRILSRDRNCLDPFTSRQSLQALACYADISVSEGSVPESADMDVVLESLKCLCNLVLSSPVAQMLAAEARLVVKLTERVGLYRERSFPHDVQFFDLRLLFLLTALRTDVRQQLFQELKGVRLLTDTLELTLGVTPEGNPPPTLLPSQETERAMEILKVLFNITLDSIKGEVDEEDAALYRHLGTLLRHCVMIATAGDRTEEFHGHAVNLLGNLPLKCLDVLLTLEPHGDSTEFMGVNMDVIRALLIFLEKRLHKTHRLKESVAPVLSVLTECARMHRPARKFLKAQVLPPLRDVRTRPEVGEMLRNKLVRLMTHLDTDVKRVAAEFLFVLCSESVPRFIKYTGYGNAAGLLAARGLMAGGRPEGQYSEDEDTDTDEYKEAKASINPVTGRVEEKPPNPMEGMTEEQKEHEAMKLVTMFDKLSRNRVIQPMGMSPRGHLTSLQDAMCETMEQQLSSDPDSDPD

SEQ ID NO: 36855 - protein, 537 aa, Homo sapiens
MEPRAVAEAVETGEEDVIMEALRSYNQEHSQSFTFDDAQQEDRKRLAELLVSVLEQGLPPSHRVIWLQSVRILSRDRNCLDPFTSRQSLQALACYADISVSEGSVPESADMDVVLESLKCLCNLVLSSPVAQMLAAEARLVVKLTERVGLYRERSFPHDVQFFDLRLLFLLTALRTDVRQQLFQELKGVRLLTDTLELTLGVTPEGNPPPTLLPSQETERAMEILKVLFNITLDSIKGEVDEEDAALYRHLGTLLRHCVMIATAGDRTEEFHGHAVNLLGNLPLKCLDVLLTLEPHGDSTEFMGVNMDVIRALLIFLEKRLHKTHRLKESVAPVLSVLTECARMHRPARKFLKAQGWPPPQVLPPLRDVRTRPEVGEMLRNKLVRLMTHLDTDVKRVAAEFLFVLCSESVPRFIKYTGYGNAAGLLAARGLMAGGRPEGQYSEDEDTDTDEYKEAKASINPVTGRVEEKPPNPMEGMTEEQKEHEAMKLVTMFDKLSRNRVIQPMGMSPRGHLTSLQDAMCETMEQQLSSDPDSDPD

SEQ ID NO: 36856 - protein, 530 aa, Homo sapiens
MEPRAVAEAVETGEEDVIMEALRSYNQEHSQSFTFDDAQQEDRKRLAELLVSVLEQGLPPSHRVIWLQSVRILSRDRNCLDPFTSRQSLQALACYADISVSEGSVPESADMDVVLESLKCLCNLVLSSPVAQMLAAEARLVVKLTERVGLYRERSFPHDVQFFDLRLLFLLTALRTDVRQQLFQELKGVRLLTDTLELTLGVTPEGNPPTLLPSQETERAMEILKVLFNITLDSIKGEVDEEDAALYRHLGTLLRHCVMIATAGDRTEEFHGHAVNLLGNLPLKCLDVLLTLEPHGDSTEFMGVNMDVIRALLIFLEKRLHKTHRLKESVAPVLSVLTECARMHRPARKFLKAQVLPPLRDVRTRPEVGEMLRNKLVRLMTHLDTDVKRVAAEFLFVLCSESVPRFIKYTGYGNAAGLLAARGLMAGGRPEGQYSEDEDTDTDEYKEAKASINPVTGRVEEKPPNPMEGMTEEQKEHEAMKLVTMFDKLSRNRVIQPMGMSPRGHLTSLQDAMCETMEQQLSSDPDSDPD

SEQ ID NO: 36857 - protein, 270 aa, Homo sapiens
MWNSGFESYGSSSYGGAGGYTQSPGGFGSPAPSQAEKKSRARAQHIVPCTISQLLSATLVDEVFRIGNVEISQVTIVGIIRHAEKAPTNIVYKIDDMTAAPMDVRQWVDTDDTSSENTVVPPETYVKVAGHLRSFQNKKSLVAFKIMPLEDMNEFTTHILEVINAHMVLSKANSQPSAGRAPISNPGMSEAGNFGGNSFMPANGLTVAQNQVLNLIKACPRPEGLNFQDLKNQLKHMSVSSIKQAVDFLSNEGHIYSTVDDDHFKSTDAE

SEQ ID NO: 36858 - protein, 278 aa, Homo sapiens
MGRGDRNKRSIRGFESYGSSSYGGAGGYTQSPGGFGSPAPSQAEKKSRARAQHIVPCTISQLLSATLVDEVFRIGNVEISQVTIVGIIRHAEKAPTNIVYKIDDMTAAPMDVRQWVDTDDTSSENTVVPPETYVKVAGHLRSFQNKKSLVAFKIMPLEDMNEFTTHILEVINAHMVLSKANSQPSAGRAPISNPGMSEAGNFGGNSFMPANGLTVAQNQVLNLIKACPRPEGLNFQDLKNQLKHMSVSSIKQAVDFLSNEGHIYSTVDDDHFKSTDAE

SEQ ID NO: 36859 - protein, 358 aa, Homo sapiens
MWNSNDGGAGWRRKRIAGGFSKRASLGSERRVVAGEEGRERSWGVWGSPAGRRRGRLGRLGQCLKGRSLREPAGFSEAWDVAQALILLFKTGGFESYGSSSYGGAGGYTQSPGGFGSPAPSQAEKKSRARAQHIVPCTISQLLSATLVDEVFRIGNVEISQVTIVGIIRHAEKAPTNIVYKIDDMTAAPMDVRQWVDTDDTSSENTVVPPETYVKVAGHLRSFQNKKSLVAFKIMPLEDMNEFTTHILEVINAHMVLSKANSQPSAGRAPISNPGMSEAGNFGGNSFMPANGLTVAQNQVLNLIKACPRPEGLNFQDLKNQLKHMSVSSIKQAVDFLSNEGHIYSTVDDDHFKSTDAE

SEQ ID NO: 36860 - protein, 483 aa, Homo sapiens
MKEEKEHRPKEKRVTLLTPAGATGSGGGTSGDSSKGEDKQDRNKEKKEALSKVVIRRLPPTLTKEQLQEHLQPMPEHDYFEFFSNDTSLYPHMYARAYINFKNQEDIILFRDRFDGYVFLDNKGQEYPAIVEFAPFQKAAKKKTKKRDTKVGTIDDDPEYRKFLESYATDNEKMTSTPETLLEEIEAKNRELIAKKTTPLLSFLKNKQRMREEKREERRRREIERKRQREEERRKWKEEEKRKRKDIEKLKKIDRIPERDKLKDEPKIKVHRFLLQAVNQKNLLKKPEKGDEKELDKREKAKKLDKENLSDERASGQSCTLPKRSDSELKDEKPKRPEDESGRDYREREREYERDQERILRERERLKRQEEERRRQKERYEKEKTFKRKEEEMKKEKDTLRDKGKKAESTESIGSSEKTEKKEEVVKRDRIRNKDRPAMQLYQPGARSRNRLCPPDDSTKSGDSAAERKQESGISHRKEGGEE

SEQ ID NO: 36861 - protein, 470 aa, Homo sapiens
MKEEKEHRPKEKRVTLLTPAGATGSGGGTSGDSSKGEDKQDRNKEKKEALSKVVIRRLPPTLTKEQLQEHLQPMPEHDYFEFFSNDTSLYPHMYARAYINFKNQEDIILFRDRFDGYVFLDNKGQEYPAIVEFAPFQKAAKKKTKKRDTKVGTIDDDPEYRKFLESYATDNEKMTSTPETLLEEIEAKNRELIAKKTTPLLSFLKNKQRMREEKREERRRREIERKRQREEERRKWKEEEKRKRKDIEKLKKIDRIPERDKLKDEPKIKLLKKPEKGDEKELDKREKAKKLDKENLSDERASGQSCTLPKRSDSELKDEKPKRPEDESGRDYREREREYERDQERILRERERLKRQEEERRRQKERYEKEKTFKRKEEEMKKEKDTLRDKGKKAESTESIGSSEKTEKKEEVVKRDRIRNKDRPAMQLYQPGARSRNRLCPPDDSTKSGDSAAERKQESGISHRKEGGEE

SEQ ID NO: 36862 - protein, 121 aa, Homo sapiens
MVDMMDLPRSRINAGMLAQFIDKPVCFVGRLEKIHPTGKMFILSDGEGKNGTIELMEPLDEEISGIVEVVGRVTAKATILCTSYVQFKEDSHPFDLGLYNEAVKIIHDFPQFYPLGIVQHD

SEQ ID NO: 36863 - protein, 473 aa, Homo sapiens
MPQTPPFSAMFDSSGYNRNLYQSAEDSCGGLYYHDNNLLSGSLEALIQHLVPNVDYYPDRTYIFTFLLSSRLFMHPYELMAKVCHLCVEHQRLSDPDSDKNQMRKIAPKILQLLTEWTETFPYDFRDERMMRNLKDLAHRIASGEEQTYRKNVQQMMQCLIRKLAALSQYEEVLAKISSTSTDRLTVLKTKPQSIQRDIITVCNDPYTLAQQLTHIELERLNYIGPEEFVQAFVQKDPLDNDKSCYSERKKTRNLEAYVEWFNRLSYLVATEICMPVKKKHRARMIEYFIDVARECFNIGNFNSLMAIISGMNMSPVSRLKKTWAKVKTAKFDILEHQMDPSSNFYNYRTALRGAAQRSLTAHSSREKIVIPFFSLLIKDIYFLNEGCANRLPNGHVNFEKFWELAKQVSEFMTWKQVECPFERDRKILQYLLTVPVFSEDALYLASYESEGPENHIEKDRWKSLRSSLLGRV

SEQ ID NO: 36864 - protein, 431 aa, Homo sapiens
MPQTPPFSAMFDSSGYNRNLYQSAEDSCGGLYYHDNNLLSGSLEALIQHLVPNVDYYPDNQMRKIAPKILQLLTEWTETFPYDFRDERMMRNLKDLAHRIASGEETYRKNVQQMMQCLIRKLAALSQYEEVLAKISSTSTDRLTVLKTKPQSIQRDIITVCNDPYTLAQQLTHIELERLNYIGPEEFVQAFVQKDPLDNDKSCYSERKKTRNLEAYVEWFNRLSYLVATEICMPVKKKHRARMIEYFIDVARECFNIGNFNSLMAIISGMNMSPVSRLKKTWAKVKTAKFDILEHQMDPSSNFYNYRTALRGAAQRSLTAHSSREKIVIPFFSLLIKDIYFLNEGCANRLPNGHVNFEKFWELAKQVSEFMTWKQVECPFERDRKILQYLLTVPVFSEDALYLASYESEGPENHIEKDRWKSLRSSLLGRV

SEQ ID NO: 36865 - protein, 472 aa, Homo sapiens
MPQTPPFSAMFDSSGYNRNLYQSAEDSCGGLYYHDNNLLSGSLEALIQHLVPNVDYYPDRTYIFTFLLSSRLFMHPYELMAKVCHLCVEHQRLSDPDSDKNQMRKIAPKILQLLTEWTETFPYDFRDERMMRNLKDLAHRIASGEETYRKNVQQMMQCLIRKLAALSQYEEVLAKISSTSTDRLTVLKTKPQSIQRDIITVCNDPYTLAQQLTHIELERLNYIGPEEFVQAFVQKDPLDNDKSCYSERKKTRNLEAYVEWFNRLSYLVATEICMPVKKKHRARMIEYFIDVARECFNIGNFNSLMAIISGMNMSPVSRLKKTWAKVKTAKFDILEHQMDPSSNFYNYRTALRGAAQRSLTAHSSREKIVIPFFSLLIKDIYFLNEGCANRLPNGHVNFEKFWELAKQVSEFMTWKQVECPFERDRKILQYLLTVPVFSEDALYLASYESEGPENHIEKDRWKSLRSSLLGRV

SEQ ID NO: 36866 - protein, 1708 aa, Homo sapiens
MAAIGRGRSLKNLRVRGRNDSGEENVPLDLTREPSDNLREILQNVARLQGVSNMRKLGHLNNFTKLLCDIGHSEEKLGFHYEDIIICLRLALLNEAKEVRAAGLRALRYLIQDSSILQKVLKLKVDYLIARCIDIQQSNEVERTQALRLVRKMITVNASLFPSSVTNSLIAVGNDGLQERDRMVRACIAIICELALQNPEVVALRGGLNTILKNVIDCQLSRINEALITTILHLLNHPKTRQYVRADVELERILAPYTDFHYRHSPDTAEGQLKEDREARFLASKMGIIATFRSWAGIINLCKPGNSGIQSLIGVLCIPNMEIRRGLLEVLYDIFRLPLPVVTEEFIEALLSVDPGRFQDSWRLSDGFVAAEAKTILPHRARSRPDLMDNYLALILSAFIRNGLLEGLVEVITNSDDHISVRATILLGELLHMANTILPHSHSHHLHCLPTLMNMAASFDIPKEKRLRASAALNCLKRFHEMKKRGPKPYSLHLDHIIQKAIATHQKRDQYLRVQKDIFILKDTEEALLINLRDSQVLQHKENLEWNWNLIGTILKWPNVNLRNYKDEQLHRFVRRLLYFYKPSSKLYANLDLDFAKAKQLTVVGCQFTEFLLESEEDGQGYLEDLVKDIVQWLNASSGMKPERSLQNNGLLTTLSQHYFLFIGTLSCHPHGVKMLEKCSVFQCLLNLCSLKNQDHLLKLTVSSLDYSRDGLARVILSKILTAATDACRLYATKHLRVLLRANVEFFNNWGIELLVTQLHDKNKTISSEALDILDEACEDKANLHALIQMKPALSHLGDKGLLLLLRFLSIPKGFSYLNERGYVAKQLEKWHREYNSKYVDLIEEQLNEALTTYRKPVDGDNYVRRSNQRLQRPHVYLPIHLYGQLVHHKTGCHLLEVQNIITELCRNVRTPDLDKWEEIKKLKASLWALGNIGSSNWGLNLLQEENVIPDILKLAKQCEVLSIRGTCVYVLGLIAKTKQGCDILKCHNWDAVRHSRKHLWPVVPDDVEQLCNELSSIPSTLSLNSESTSSRHNSESESVPSSMFILEDDRFGSSSTSTFFLDINEDTEPTFYDRSGPIKDKNSFPFFASSKLVKNRILNSLTLPNKKHRSSSDPKGGKLSSESKTSNRRIRTLTEPSVDFNHSDDFTPISTVQKTLQLETSFMGNKHIEDTGSTPSIGENDLKFTKNFGTENHRENTSRERLVVESSTSSHMKIRSQSFNTDTTTSGISSMSSSPSRETVGVDATTMDTDCGSMSTVVSTKTIKTSHYLTPQSNHLSLSKSNSVSLVPPGSSHTLPRRAQSLKAPSIATIKSLADCNFSYTSSRDAFGYATLKRLQQQRMHPSLSHSEALASPAKDVLFTDTITMKANSFESRLTPSRFMKALSYASLDKEDLLSPINQNTLQRSSSVRSMVSSATYGGSDDYIGLALPVDINDIFQVKDIPYFQTKNIPPHDDRGARAFAHDAGGLPSGTGGLVKNSFHLLRQQMSLTEIMNSIHSDASLFLESTEDTGLQEHTDDNCLYCVCIEILGFQPSNQLSAICSHSDFQDIPYSDWCEQTIHNPLEVVPSKFSGISGCSDGVSQEGSASSTKSTELLLGVKTIPDDTPMCRILLRKEVLRLVINLSSSVSTKCHETGLLTIKEKYPQTFDDICLYSEVSHLLSHCTFRLPCRRFIQELFQDVQFLQMHEEAEAVLATPPKQPIVDTSAES

SEQ ID NO: 36867 - protein, 257 aa, Homo sapiens
MAAIGRGRSLKNLRVRGRNDSGEENVPLDLTREPSDNLREILQNVARLQGVSNMRKLGHLNNFTKLLCDIGHSEEKLGFHYEDIIICLRLALLNEAKEVRAAGLRALRYLIQDSSILQKVLKLKVDYLIARCIDIQQSNEVERTQALRLVRKMITVNASLFPSSVTNSLIAVGNDGLQERDRMVRACIAIICELALQNPEVVALRGGLNTILKNVIDCQLSRINEALITTILHLLNHPKTRQYVRADVELENFSTLY

SEQ ID NO: 36868 - protein, 1732 aa, Homo sapiens
MAAIGRGRSLKNLRVRGRNDSGEENVPLDLTREPSDNLREILQNVARLQGVSNMRKLGHLNNFTKLLCDIGHSEEKLGFHYEDIIICLRLALLNEAKEVRAAGLRALRYLIQDSSILQKVLKLKVDYLIARCIDIQQSNEVERTQALRLVRKMITVNASLFPSSVTNSLIAVGNDGLQERDRMVRACIAIICELALQNPEVVALRGGLNTILKNVIDCQLSRINEALITTILHLLNHPKTRQYVRADVELERILAPYTDFHYRHSPDTAEGQLKEDREARFLASKMGIIATFRSWAGIINLCKPGNSGIQSLIGVLCIPNMEIRRGLLEVLYDIFRLPLPVVTEEFIEALLSVDPGRFQDSWRLSDGFVAAEAKTILPHRARSRPDLMDNYLALILSAFIRNGLLEGLVEVITNSDDHISVRATILLGELLHMANTILPHSHSHHLHCLPTLMNMAASFDIPKEKRLRASAALNCLKRFHEMKKRGPKPYSLHLDHIIQKAIATHQKRDQYLRVQKDIFILKDTEEALLINLRDSQVLQHKENLEWNWNLIGTILKWPNVNLRNYKDEQLHRFVRRLLYFYKPSSKLYANLDLDFAKAKQLTVVGCQFTEFLLESEEDGQGYLEDLVKDIVQWLNASSGMKPERSLQNNGLLTTLSQHYFLFIGTLSCHPHGVKMLEKCSVFQCLLNLCSLKNQDHLLKLTVSSLDYSRDGLARVILSKILTAATDACRLYATKHLRVLLRANVEFFNNWGIELLVTQLHDKNKTISSEALDILDEACEDKANLHALIQMKPALSHLGDKGLLLLLRFLSIPKGFSYLNERGYVAKQLEKWHREYNSKYVDLIEEQLNEALTTYRKPVDGDNYVRRSNQRLQRPHVYLPIHLYGQLVHHKTGCHLLEVQNIITELCRNVRTPDLDKWEEIKKLKASLWALGNIGSSNWGLNLLQEENVIPDILKLAKQCEVLSIRGTCVYVLGLIAKTKQGCDILKCHNWDAVRHSRKHLWPVVPDDVEQLCNELSSIPSTLSLNSESTSSRHNSESESVPSSMFILEDDRFGSSSTSTFFLDINEDTEPTFYDRSGPIKDKNSFPFFASSKLVKNRILNSLTLPNKKHRSSSDPKGGKLSSESKTSNRRIRTLTEPSVDFNHSDDFTPISTVQKTLQLETSFMGNKHIEDTGSTPSIGENDLKFTKNFGTENHRENTSRERLVVESSTSSHMKIRSQSFNTDTTTSGISSMSSSPSRETVGVDATTMDTDCGSMSTVVSTKTIKTSHYLTPQSNHLSLSKSNSVSLVPPGSSHTLPRRAQSLKAPSIATIKSLADCNFSYTSSRDAFGYATLKRLQQQRMHPSLSHSEALASPAKDVLFTDTITMKANSFESRLTPSRIDFKKKHVGGIRSLRPTITNNLFRFMKALSYASLDKEDLLSPINQNTLQRSSSVRSMVSSATYGGSDDYIGLALPVDINDIFQVKDIPYFQTKNIPPHDDRGARAFAHDAGGLPSGTGGLVKNSFHLLRQQMSLTEIMNSIHSDASLFLESTEDTGLQEHTDDNCLYCVCIEILGFQPSNQLSAICSHSDFQDIPYSDWCEQTIHNPLEVVPSKFSGISGCSDGVSQEGSASSTKSTELLLGVKTIPDDTPMCRILLRKEVLRLVINLSSSVSTKCHETGLLTIKEKYPQTFDDICLYSEVSHLLSHCTFRLPCRRFIQELFQDVQFLQMHEEAEAVLATPPKQPIVDTSAES

SEQ ID NO: 36869 - protein, 157 aa, Homo sapiens
MNLDGSAQDPEKREYSSVCVGREDDIKKSERMTAVVHDREVVIFYHKGEYHAMDIRCYHSGGPLHLGDIEDFDGRPCIVCPWHKYKITLATGEGLYQSINPKDPSAKPKWCSKGIKQRIHTVTVDNGNIYVTLSNEPFKCDSDFYATGDFKVIKSSS

SEQ ID NO: 36870 - protein, 210 aa, Homo sapiens
MLKCFRNCLRPSSLSTLPLQYGILFPKLLACLVHLHFGHFSSAVISVTSFYLSMNLDGSAQDPEKREYSSVCVGREDDIKKSERMTAVVHDREVVIFYHKGEYHAMDIRCYHSGGPLHLGDIEDFDGRPCIVCPWHKYKITLATGEGLYQSINPKDPSAKPKWCSKGIKQRIHTVTVDNGNIYVTLSNEPFKCDSDFYATGDFKVIKSSS

SEQ ID NO: 36871 - protein, 363 aa, Homo sapiens
MWATCCNWFCLDGQPEEVPPPQGARMQAYSNPGYSSFPSPTGLEPSCKSCGAHFANTARKQTCLDCKKNFCMTCSSQVGNGPRLCLLCQRFRATAFQREELMKMKVKDLRDYLSLHDISTEMCREKEELVLLVLGQQPVISQEDRTRASTLSPDFPEQQAFLTQPHSSMVPPTSPNLPSSSAQATSVPPAQVQENQQANGHVSQDQEEPVYLESVARVPAEDETQSIDSEDSFVPGRRASLSDLTDLEDIEGLTVRQLKEILARNFVNYKGCCEKWELMERVTRLYKDQKGLQHLVSGAEDQNGGAVPSGLEENLCKICMDSPIDCVLLECGHMVTCTKCGKRMNECPICRQYVIRAVHVFRS

SEQ ID NO: 36872 - protein, 355 aa, Homo sapiens
MWATCCNWFCLDGQPEEVPPPQGARMQAYSNPGYSSFPSPTGLEPSCKSCGAHFANTARKQTCLDCKKNFCMTCSSQVGNGPRLCLLCQRFRATAFQREELMKMKVKDLRDYLSLHDISTEMCREKEELVLLVLGQQPVISQEDRTRASTLSPDFPEQQAFLTQPHSSMVPPTSPNLPSSSAQATSVPPAQVQENQQANGHVSQDQEEPVYLESVARVPAEDETQSIDSEDSFVPGRRASLSDLTDLEDIEGLTVRQLKEILARNFVNYKGCCEKWELMERVTRLYKDQKGLQHLGGAVPSGLEENLCKICMDSPIDCVLLECGHMVTCTKCGKRMNECPICRQYVIRAVHVFRS

SEQ ID NO: 36873 - protein, 327 aa, Homo sapiens
MWATCCNWFCLDGQPEEVPPPQGARMQAYSNPGYSSFPSPTGLEPSCKSCGAHFANTARKQTCLDCKKNFCMTCSSQVGNGPRLCLLCQRFRATAFQREELMKMKVKDLRDYLSLHDISTEMCREKEELVLLVLGQQPVISQEDRTRASTLSPDFPEQQAFLTQPHSSMVPPTSPNLPSSSAQATSVPPAQVQENQQSIDSEDSFVPGRRASLSDLTDLEDIEGLTVRQLKEILARNFVNYKGCCEKWELMERVTRLYKDQKGLQHLGGAVPSGLEENLCKICMDSPIDCVLLECGHMVTCTKCGKRMNECPICRQYVIRAVHVFRS

SEQ ID NO: 36874 - protein, 350 aa, Homo sapiens
MAVFVVLLALVAGVLGNEFSILKSPGSVVFRNGNWPIPGERIPDVAALSMGFSVKEDLSWPGLAVGNLFHRPRATVMVMVKGVNKLALPPGSVISYPLENAVPFSLDSVANSIHSLFSEETPVVLQLAPSEERVYMVGKANSVFEDLSVTLRQLRNRLFQENSVLSSLPLNSLSRNNEVDLLFLSELQVLHDISSLLSRHKHLAKDHSPDLYSLELAGLDEIGKRYGEDSEQFRDASKILVDALQKFADDMYSLYGGNAVVELVTVKSFDTSLIRKTRTILEAKQAKNPASPYNLAYKYNFEYSVVFNMVLWIMIALALAVIITSYNIWNMDPGYDSIIYRMTNQKIRMD

SEQ ID NO: 36875 - protein, 318 aa, Homo sapiens
MAVFVVLLALVAGVLGNEFSILKSPGSVVFRNGNWPIPGERIPDVAALSMGFSVKEDLSWPGLAVGNLFHRPRATVMVMVKGVNKLALPPGSVISYPLENRVYMVGKANSVFEDLSVTLRQLRNRLFQENSVLSSLPLNSLSRNNEVDLLFLSELQVLHDISSLLSRHKHLAKDHSPDLYSLELAGLDEIGKRYGEDSEQFRDASKILVDALQKFADDMYSLYGGNAVVELVTVKSFDTSLIRKTRTILEAKQAKNPASPYNLAYKYNFEYSVVFNMVLWIMIALALAVIITSYNIWNMDPGYDSIIYRMTNQKIRMD

SEQ ID NO: 36876 - protein, 512 aa, Homo sapiens
MMLSEQAQKWFPTHVQVTVLQAKDLKPKGKSGTNDTYTIIQLGKEKYSTSVAEKTLEPVWKEEASFELPGLLIQGSPEKYILFLIVMHRSLVGLDKFLGQVAINLNDIFEDKQRRKTEWFRLESKQGKRIKNRGEIKVNIQFMRNNMTASMFDLSMKDKTRSPFAKLKDKMKGRKNDGTFSDTSSAIIPSTHMPDANSEFSSGEIQMKSKPKKPFLLGPQRLSSAHSMSDLSGSHMSSEKLKAGTIGQTHLLGHQLDSFGTVPESGSLKSPHRRTLSFDTSKMNQPDSIVDEGELCFGRQNDPFTNVTASLPQKFATLPRKKNPFEESSETWDSSMNLFSKPIEIRKENKREKREKVSLFERVTGKKDSRRSDKLNNGGSDSPCDLKSPNAFSENRQDYFDYESTNPFTAKFRASNIMPSSSFHMSPTSNEDLRKIPDSNPFDATAGYRSLTYEEVLQELVKHKELLRRKDTHIRELEDYIDNLLVRVMEETPSILRVPYEPSRKAGKFSNS

SEQ ID NO: 36877 - protein, 532 aa, Homo sapiens
MMLSEQAQKWFPTHVQVTVLQAKDLKPKGKSGTNDTYTIIQLGKEKYSTSVAEKTLEPVWKEEASFELPGLLIQGSPEKYILFLIVMHRSLVGLDKFLGQVAINLNDIFEDKQRRKTEWFRLESKQGKRIKNRGEIKVNIQFMRNNMTASMFDLSMKDKTRSPFAKLKDKMKGRKNDGTFSDTSSAIIPSTHMPDANSEFSSGEIQMKSKPKKPFLLGPQRLSSAHSMSDLSGSHMSSEKLKAGTIGQTHLLGHQLDSFGTVPESGSLKSPHRRTLSFDTSKMNQPDSIVDEGELCFGRQNDPFTNVTASLPQKFATLPRKKNPFEESSETWDSSMNLFSKPIEIRKENKREKREKVSLFERVTGKKDSRRSDKLNNGGSDSPCDLKSPNAFSENRQDYFDYESTNPFTAKFRASNIMPSSRNTLLTPAVAEWRGSLRWAELFHMSPTSNEDLRKIPDSNPFDATAGYRSLTYEEVLQELVKHKELLRRKDTHIRELEDYIDNLLVRVMEETPSILRVPYEPSRKAGKFSNS

SEQ ID NO: 36878 - protein, 216 aa, Homo sapiens
MVGHLHLQGMEDSLKEQGREGLLDSPDSGLPPSPSPSPPFYSLAPGILDARAGGAGASSEPPGPSEARAPPSQLPNPPASEMRPRMLPVFFGESIKVNPEPTHEIRCNSEVKYASEKHFQDKVFYAPVPTVTAYSETIVAAPNCTWRNYRSQLTLEPRPRALRFRSTTIIFPKHARSTFRTTLHCSLGRPSRWFTASVQLQLCQDPAPSLLGPATL

SEQ ID NO: 36879 - protein, 135 aa, Homo sapiens
MRPRMLPVFFGESIKVNPEPTHEIRCNSEVKYASEKHFQDKVFYAPVPTVTAYSETIVAAPNCTWRNYRSQLTLEPRPRALRFRSTTIIFPKHARSTFRTTLHCSLGRPSRWFTASVQLQLCQDPAPSLLGPATL

SEQ ID NO: 36880 - protein, 219 aa, Homo sapiens
MAESLRSPRRSLYKLVGSPPWKEAFRQRCLERMRNSRDRLLNRYRQAGSSGPGNSQNSFLVQEVMEEEWNALQSVENCPEDLAQLEELIDMAVLEEIQQELINQEQSIISEYEKSLQFDEKCLSIMLAEWEANPLICPVCTKYNLRITSGVVVCQCGLSIPSHSSELTEQKLRACLEGSINEHSAHCPHTPEFSVTGGTEEKSSLLMSCLACDTWAVIL

SEQ ID NO: 36881 - protein, 172 aa, Homo sapiens
MAESLRSPRRSLYKLVGSPPWKEAFRQRCLERMRNSRDRLLNRYRQAGSSGPGNSQNSFLVQEVMEEEWNALQSVENCPEDLAQLEELIDMAVLEEIQQELINQEQSIISEYEKSLQFDEKCLSIMLAEWEANPLICPVCTKYNLRITSGVVVCQCGLSIPSHACDTWAVIL

SEQ ID NO: 36882 - protein, 142 aa, Homo sapiens
MAESLRSPRRSLYKLVGSPPWKEAFRQRCLERMRNSRDRLLNRYRQAGSSGPGNSQNSFLVQEVMEEEWNALQSVENCPEDLAQLEELIDMAVLEEIQQELINQEQSIISEYEKSLQFDEKCLSIMLAEWEANPLICPVCTK

SEQ ID NO: 36883 - protein, 145 aa, Homo sapiens
MAESLRSPRRSLYKLVGSPPWKEAFRQRCLERMRNSRDRLLNRYRQAGSSGPGNSQNSFLVQEVMEEEWNALQSVENCPEDLAQLEELIDMAVLEEIQQELINQEQSIISEYEKSLQFDEKCLSIMLAEWEANPLICPVCTNLLS

SEQ ID NO: 36884 - protein, 106 aa, Homo sapiens
MAESLRSPRRSLYKLVGSPPWKEAFRQRCLERMRNSRDRLLNRYRQAGSSGPGNSQNSFLVQEVMEEEWNALQSVENCPEDLAQLEELIDMAVLEEIQQELINQVF

SEQ ID NO: 36885 - protein, 106 aa, Homo sapiens
MAESLRSPRRSLYKLVGSPPWKEAFRQRCLERMRNSRDRLLNRYRQAGSSGPGNSQNSFLVQEVMEEEWNALQSVENCPEDLAQLEELIDMAVLEEIQQELINQGL

SEQ ID NO: 36886 - protein, 107 aa, Homo sapiens
MAESLRSPRRSLYKLVGSPPWKEAFRQRCLERMRNSRDRLLNRYRQAGSSGPGNSQNSFLVQEVMEEEWNALQSVENCPEDLAQLEELIDMAVLEEIQQELINQGTT

SEQ ID NO: 36887 - protein, 231 aa, Homo sapiens
MAESLRSPRRSLYKLVGSPPWKEAFRQRCLERMRNSRDRLLNRYRQAGSSGPGNSQNSFLVQEVMEEEWNALQSVENCPEDLAQLEELIDMAVLEEIQQELINQEQSIISEYEKSLQFDEKCLSIMLAEWEANPLICPVCTKYNLRITSGVVVCQCGLSIPSHSSELTEQKLRACLEGSINEHSAHCPHTPEFSVTGGTEEKSSLLMSCLVSVSWDPLCGKRDLWLVLFPP

SEQ ID NO: 36888 - protein, 148 aa, Homo sapiens
MAESLRSPRRSLYKLVGSPPWKEAFRQRCLERMRNSRDRLLNRYRQAGSSGPGNSQNSFLVQEVMEEEWNALQSVENCPEDLAQLEELIDMAVLEEIQQELINQEQSIISEYEKSLQFDEKCLSIMLAEWEANPLICPVCTKPVILGL

SEQ ID NO: 36889 - protein, 136 aa, Homo sapiens [sequence omitted]

SEQ ID NO: 36890 - protein, 70 aa, Homo sapiens [sequence omitted]

SEQ ID NO: 36891 - protein, 317 aa, Homo sapiens
MSEGVGTFRMVPEEEQELRAQLEQLTTKDHGPVFGPCSQLPRHTLQKAKDELNEREETREEAVRELQEMVQAQAASGEELAVAVAERVQEKDSGFFLRFIRARKFNVGRAYELLRGYVNFRLQYPELFDSLSPEAVRCTIEAGYPGVLSSRDKYGRVVMLFNIENWQSQEITFDEILQAYCFILEKLLENEETQINGFCIIENFKGFTMQQAASLRTSDLRKMVDMLQDSFPARFKAIHFIHQPWYFTTTYNVVKPFLKSKLLERVFVHGDDLSGFYQEIDENILPSDFGGTLPKYDGKAVAEQLFGPQAQAENTAF

SEQ ID NO: 36892 - protein, 25 aa, Homo sapiens [sequence omitted]

SEQ ID NO: 36893 - protein, 497 aa, Homo sapiens
MSTGPDVKATVGDISSDGNLNVAQEECSRKGFCSVRHGLALILQLCNFSIYTQQMNLSIAIPAMVNNTAPPSQPNASTERPSTDSQGYWNETLKEFKAMAPAYDWSPEIQGIILSSLNYGSFLAPIPSGYVAGIFGAKYVVGAGLFISSFLTLFIPLAANAGVALLIVLRIVQGIAQVMVLTGQYSIWVKWAPPLERSQLTTIAGSGSMLGSFIVLLAGGLLCQTIGWPYVFYIFGGIGCACCPLWFPLIYDDPVNHPFISAGEKRYIVCSLAQQDCSPGWSLPIRAMIKSLPLWAILVSYFCEYWLFYTIMAYTPTYISSVLQANLRDSGILSALPFVVGCICIILGGLLADFLLSRKILRLITIRKLFTAIGVLFPSVILVSLPWVRSSHSMTMTFLVLSSAISSFCESGALVNFLDIAPRYTGFLKGLLQVFAHIAGAISPTAAGFFISQDSEFGWRNVFLLSAAVNISGLVFYLIFGRADVQDWAKEQTFTHL

SEQ ID NO: 36894 - protein, 443 aa, Homo sapiens
MNLSIAIPAMVNNTAPPSQPNASTERPSTDSQGYWNETLKEFKAMAPAYDWSPEIQGIILSSLNYGSFLAPIPSGYVAGIFGAKYVVGAGLFISSFLTLFIPLAANAGVALLIVLRIVQGIAQVMVLTGQYSIWVKWAPPLERSQLTTIAGSGSMLGSFIVLLAGGLLCQTIGWPYVFYIFGGIGCACCPLWFPLIYDDPVNHPFISAGEKRYIVCSLAQQDCSPGWSLPIRAMIKSLPLWAILVSYFCEYWLFYTIMAYTPTYISSVLQANLRDSGILSALPFVVGCICIILGGLLADFLLSRKILRLITIRKLFTAIGVLFPSVILVSLPWVRSSHSMTMTFLVLSSAISSFCESGALVNFLDIAPRYTGFLKGLLQVFAHIAGAISPTAAGFFISQDSEFGWRNVFLLSAAVNISGLVFYLIFGRADVQDWAKEQTFTHL

SEQ ID NO: 36895 - protein, 267 aa, Homo sapiens
MSTGPDVKATVGDISSDGNLNVAQEECSRKGFCSVRHGLALILQLCNFSIYTQQMNLSIAIPAMVNNTAPPSQPNASTERPSTDSQGYWNETLKEFKAMSGILSALPFVVGCICIILGGLLADFLLSRKILRLITIRKLFTAIGVLFPSVILVSLPWVRSSHSMTMTFLVLSSAISSFCESGALVNFLDIAPRYTGFLKGLLQVFAHIAGAISPTAAGFFISQDSEFGWRNVFLLSAAVNISGLVFYLIFGRADVQDWAKEQTFTHL

SEQ ID NO: 36896 - protein, 221 aa, Homo sapiens
MNLSIAIPAMVNNTAPPSQPNASTERPSTDSQGYWNETLKEFKAMDCSPGWSLPIRAMIKSLPLWAILVSYFCEYWLFYTIMAYTPTYISSVLQANLRDSGILSALPFVVGCICIILGGLLADFLLSRKILRLITIRKLFTAIGKGETGHRGERGKLRAAFSLLCVCPPTPGVLFPSVILVSLPWVRSSHSMTMTFLVLSSAISSFCESGALVNFLDIAPR

SEQ ID NO: 36897 - protein, 495 aa, Homo sapiens
MRSPVRDLARNDGEESTDRTPLLPGAPRAEAAPVCCSARYNLAILAFFGFFIVYALRVNLSVALVDMVDSNTTLEDNRTSKACPEHSAPIKVHHNQTGKKYQWDAETQGWILGSFFYGYIITQIPGGYVASKIGGKMLLGFGILGTAVLTLFTPIAADLGVGPLIVLRALEGLGEGVTFPAMHAMWSSWAPPLERSKLLSISYAGAQLGTVISLPLSGIICYYMNWTYVFYFFGTIGIFWFLLWIWLVSDTPQKHKRISHYEKEYILSSLRNQLSSQKSVPWVPILKSLPLWAIVVAHFSYNWTFYTLLTLLPTYMKEILRFNVQENGFLSSLPYLGSWLCMILSGQAADNLRAKWNFSTLCVRRIFSLIGMIGPAVFLVAAGFIGCDYSLAVAFLTISTTLGGFCSSGFSINHLDIAPSYAGILLGITNTFATIPGMVGPVIAKSLTPDNTVGEWQTVFYIAAAINVFGAIFFTLFAKGEVQNWALNDHHGHRH

SEQ ID NO: 36898 - protein, 277 aa, Homo sapiens
MRSPVRDLARNDGEESTDRTPLLPGAPRAEAAPVCCSARYNLAILAFFGFFIVYALRVNLSVALVDMVDSNTTLEDNRTSKACPEHSAPIKVHHNQTGKKYQWDAETQGWILGSFFYGYIITQIPGGYVASKIGGKMLLGFGILGTAVLTLFTPIAADLGVGPLIVLRALEGLGEGVTFPAMHAMWSSWAPPLERSKLLSISYAGAQLGTVISLPLSGIICYYMNWTYVFYFFGTIGIFWFLLWIWLVSDTPQKHKRISHYEKEYILSSLRNQAGVQ

SEQ ID NO: 36899 - protein, 232 aa, Homo sapiens
MKERRAPQPVVARCKLVLVGDVQCGKTAMLQVLAKDCYPETYVPTVFENYTACLETEEQRVELSLWDTSGSPYYDNVRPLCYSDSDAVLLCFDISRPETVDSALKKWRTEILDYCPSTRVLLIGCKTDLRTDLSTLMELSHQKQAPISYEQGCAIAKQLGAEIYLEGSAFTSEKSIHSIFRTASMLCLNKPSPLPQKSPVRSLSKRLLHLPSRSELISSTFKKEKAKSCSIM

SEQ ID NO: 36900 - protein, 686 aa, Homo sapiens
MAIDRRREAAGGGPGRQPAPAEENGSLPPGDAAASAPLGGRAGPGGGAEIQPLPPLHPGGGPHPSCCSAAAAPSLLLLDYDGSVLPFLGGLGGGYQKTLVLLTWIPALFIGFSQFSDSFLLDQPNFWCRGAGKGTELAGVTTTGRGGDMGNWTSLPTTPFATAPWEAAGNRSNSSGADGGDTPPLPSPPDKGDNASNCDCRAWDYGIRAGLVQNVVSKWDLVCDNAWKVHIAKFSLLVGLIFGYLITGCIADWVGRRPVLLFSIIFILIFGLTVALSVNVTMFSTLRFFEGFCLAGIILTLYALRIELCPPGKRFMITMVASFVAMAGQFLMPGLAALCRDWQVLQALIICPFLLMLLYWSIFPESLRWLMATQQFESAKRLILHFTQKNRMNPEGDIKGVIPELEKELSRRPKKVCIVKVVGTRNLWKNIVVLCVNSLTGYGIHHCFARSMMGHEVKVPLLENFYADYYTTASIALVSCLAMCVVVRFLGRRGGLLLFMILTALASLLQLGLLNLIGKYSQHPDSGMSDSVKDKFSIAFSIVGMFASHAVGSLSVFFCAEITPTVIRCGGLGLVLASAGFGMLTAPIIELHNQKGYFLHHIIFACCTLICIICILLLPESRDQNLPENISNGEHYTRQPLLPHKKGEQPLLLTNAELKDYSGLHDAAAAGDTLPEGATANGMKAM

SEQ ID NO: 36901 - protein, 405 aa, Homo sapiens
MFSTLRFFEGFCLAGIILTLYALRIELCPPGKRFMITMVASFVAMAGQFLMPGLAALCRDWQVLQALIICPFLLMLLYWSIFPESLRWLMATQQFESAKRLILHFTQKNRMNPEGDIKGVIPELEKELSRRPKKVCIVKVVGTRNLWKNIVVLCVNSLTGYGIHHCFARSMMGHEVKVPLLENFYADYYTTASIALVSCLAMCVVVRFLGRRGGLLLFMILTALASLLQLGLLNLIGKYSQHPDSGMSDSVKDKFSIAFSIVGMFASHAVGSLSVFFCAEITPTVIRCGGLGLVLASAGFGMLTAPIIELHNQKGYFLHHIIFACCTLICIICILLLPESRDQNLPENISNGEHYTRQPLLPHKKGEQPLLLTNAELKDYSGLHDAAAAGDTLPEGATANGMKAM

SEQ ID NO: 36902 - protein, 316 aa, Homo sapiens
MATQQFESAKRLILHFTQKNRMNPEGDIKGVIPELEKELSRRPKKVCIVKVVGTRNLWKNIVVLCVNSLTGYGIHHCFARSMMGHEVKVPLLENFYADYYTTASIALVSCLAMCVVVRFLGRRGGLLLFMILTALASLLQLGLLNLIGKYSQHPDSGMSDSVKDKFSIAFSIVGMFASHAVGSLSVFFCAEITPTVIRCGGLGLVLASAGFGMLTAPIIELHNQKGYFLHHIIFACCTLICIICILLLPESRDQNLPENISNGEHYTRQPLLPHKKGEQPLLLTNAELKDYSGLHDAAAAGDTLPEGATANGMKAM

SEQ ID NO: 36903 - protein, 361 aa, Homo sapiens
MAIDRRREAAGGGPGRQPAPAEENGSLPPGDAAASAPLGGRAGPGGGAEIQPLPPLHPGGGPHPSCCSAAAAPSLLLLDYDGSVLPFLGGLGGGYQKTLVLLTWIPALFIGFSQFSDSFLLDQPNFWCRGAGKGTELAGVTTTGRGGDMGNWTSLPTTPFATAPWEAAGNRSNSSGADGGDTPPLPSPPDKGDNASNCDCRAWDYGIRAGLVQNVVSKWDLVCDNAWKVHIAKFSLLVGLIFGYLITGCIADWVGRRPVLLFSIIFILIFGLTVALSVNVTMFSTLRFFEGFCLAGIILTLYALRIELCPPGKRFMITMVASFVAMAGQFLMPGLAALCRDWQVLQALIICPFLLMLLYWS

SEQ ID NO: 36904 - protein, 442 aa, Homo sapiens
MALPGARARGWAAAARAAQRRRRVENAGGSPSPEPAGRRAALYVHWPYCEKRCSYCNFNKYIPRRLEEAAMQKCLVTEAQTLLRLSGVQRVESVFFGGGTPSLASPHTVAAVLEAVAQAAHLPADLEVTLEANPTSAPGSRLAEFGAAGVNRLSIGLQSLDDTELRLLGRTHSACDALRTLAEARRLFPGRVSVDLMLGLPAQQVGPWLGQLQELLHHCDDHLSLYQLSLERGTALFAQVQRGALPAPDPELAAEMYQRGRAVLREAGFHQYEVSNFARNGALSTHNWTYWQCGQYLGVGPGAHGRFMPQGAGGHTREARIQTLEPDNWMKEVMLFGHGTRKRVPLGRLELLEEVLALGLRTDVGITHQHWQQFEPQLTLWDVFGANKEVQELLERGLLQLDHRGLRCSWEGLAVLDSLLLTLLPQLQEAWQQRTPSPVPGG

SEQ ID NO: 36905 - protein, 195 aa, Homo sapiens
MALPGARARGWAAAARAAQRRRRVENAGGSPSPEPAGRRAALYVHSLDDTELRLLGRTHSACDALRTLAEARRLFPGRVSVDLMLGLPAQQVGPWLGQLQELLHHCDDHLSLYQLSLERGTALFAQVQRGALPAPDPELAAEMYQRGRAVLREAGFHQYEVSNFARNGPMDDLCPRGLEATPGRLGSRHWSLTTG

SEQ ID NO: 36906 - protein, 552 aa, Homo sapiens
MGFDVLLDQVGGMGRFQICLIAFFCITNILLFPNIVLENFTAFTPSHRCWVPLLDNDTVSDNDTGTLSKDDLLRISIPLDSNLRPQKCQRFIHPQWQLLHLNGTFPNTNEPDTEPCVDGWVYDRSSFLSTIVTEWDLVCESQSLKSMVQSLFMAGSLLGGLIYGHLSDRVGRKIICKLCFLQLAISNTCAAFAPTFLVYCILRFLAGFSTMTILGNTFILSLEWTLPRSRSMTIMVLLCSYSVGQMLLGGLAFAIQDWHILQLTVSTPIIVLFLSSWKMVESARWLIINNQLDEGLKELRRVAHINGKKNTEETLTTELVRSTMKKELDAVRIKTSIFSLFRAPKLRMRVFGLCFVRFAITVPFYGLILNLQHLGSNVSLFQILCGAVTFTARCVSLLTLNHMGRRISQILFTFPVGLFILVNTFLPQEMQILRVVLATLGIGSVSAASNSASVHHNELVPTILRSTVAGINAVSGRTGAALAPLLMTLMAYSPHLPWISYGVFPILAVPVILLLPETRDLPLPNTIQDVENDRKDSRNIKQEDTCMKVTQF

SEQ ID NO: 36907 - protein, 322 aa, Homo sapiens
MGFDVLLDQVGGMGRFQICLIAFFCITNILLFPNIVLENFTAFTPSHRCWVPLLDNDTVSDNDTGTLSKDDLLRISIPLDSNLRPQKCQRFIHPQWQLLHLNGTFPNTNEPDTEPCVDGWVYDRSSFLSTIVTEWDLVCESQSLKSMVQSLFMAGSLLGGLIYGHLSDRVGRKIICKLCFLQLAISNTCAAFAPTFLVYCILRFLAGFSTMTILGNTFILSLEWTLPRSRSMTIMVLLCSYSVGQMLLGGLAFAIQDWHILQLTVSTPIIVLFLSSWYEQSPHSLPVSEAMVDIERKILTPGICSVSGLVLSHDVHSTYCVT

SEQ ID NO: 36908 - protein, 551 aa, Homo sapiens
MGFDVLLDQVGGMGRFQICLIAFFCITNILLFPNIVLENFTAFTPSHRCWVPLLDNDTVSDNDTGTLSKDDLLRISIPLDSNLRPQKCQRFIHPQWQLLHLNGTFPNTNEPDTEPCVDGWVYDRSSFLSTIVTEWDLVCESQSLKSMVQSLFMAGSLLGGLIYGHLSDRVGRKIICKLCFLQLAISNTCAAFAPTFLVYCILRFLAGFSTMTILGNTFILSLEWTLPRSRSMTIMVLLCSYSVGQMLLGGLAFAIQDWHILQLTVSTPIIVLFLSSWKMVESARWLIINNQLDEGLKELRRVAHINGKKNTEETLTTELVRSTMKKELDAVRIKTSIFSLFRAPKLRMRVFGLCFVRFAITVPFYGLILNLQHLGSNVSLFQILCGAVTFTARCVSLLTLNHMGRRISQILFTFPVGLFILVNTFLPQEMQILRVVLATLGIGSVSAASNSASVHHNELVPTILRSTVAGINAVSGRTGAALAPLLMTLMAYSPHLPWISYGVFPILAVPVILLLPETRDLPLPNTIQDVENEKDSRNIKQEDTCMKVTQF

SEQ ID NO: 36909 - protein, 547 aa, Homo sapiens
MAFQDLLDQVGGLGRFQILQMVFLIMFNVIVYHQTQLENFAAFILDHRCWVHILDNDTIPDNDPGTLSQDALLRISIPFDSNLRPEKCRRFVHPQWKLIHLNGTFPNTSEPDTEPCVDGWVYDQSSFPSTIVTKWDLVCESQPLNSVAKFLFMAGMMVGGNLYGHLSDRFGRKFVLRWSYLQLAIVGTCAAFAPTILVYCSLRFLAGAATFSIIVNTVLLIVEWITHQFCAMALTLTLCAASIGHITLGSLAFVIRDQCILQLVMSAPCFVFFLFSRWLAESARWLIINNKPEEGLKELRKAAHRNGMKNAEDILTMEVLKSTMKQELEAAQKKHSLCELLRIPNICKRICFLSFVRFASTIPFWGLTLHLQHLGNNVFLLQTLFGAVTLLANCVAPWALNHMSRRLSQMLLMFLLATCLLAIIFVPQEMQTLRVVLATLGVGAASLGITCSTAQENELIPSIIRGRATGITGNFANIGGALASLMMILSIYSRPLPWIIYGVFAILSGLVVLLLPETRNQPLLDSIQDVENEGVNSLAAPQRSSVL

SEQ ID NO: 36910 - protein, 556 aa, Homo sapiens
MEQEARVLRAAGGFGRARRLLASASWVPCIVLGLVLSSEELLTAQPAPHCRPDPTLLPPALRALRGPALLDAAIPRLGPTRAPAEALGVLSPSYLAPLTRAPRPSSWASCSGAAAGPTWNLVCGDGWKVPLEQVSHLLGWLLGCVILGAGCDRFGRRAVFVASLVLTTGLGASEALAASFPTLLVLRLLHGGTLAGALLALYLARLELCDPPHRLAFSMGAGLFSVVGTLLLPGLAALVQDWRLLQGLGALMSGLLLLFWGFPALFPESPCWLLATGQVARARKILWRFAEASGVGPGDSSLEENSLATELTMLSARSPQPRYHSPLGLLRTRVTWRNGLILGFSSLVGGGIRASFRRSLAPQVPTFYLPYFLEAGLEAAALVFLLLTADCCGRRPVLLLGTMVTGLASLLLLAGAQYLPGWTVLFLSVLGLLASRAVSALSSLFAAEVFPTVIRGAGLGLVLGAGFLGQAAGPLDTLHGRQGFFLQQVVFASLAVLALLCVLLLPESRSRGLPQSLQDADRLRRSPLLRGRPRQDHLPLLPPSNSYWAGHTPEQH

SEQ ID NO: 36911 - protein, 228 aa, Homo sapiens
MTMGDKKSPTRPKRQAKPAADEGFWDCSVCTFRNSAEAFKCSICDVRKGTSTRKPRINSQLVAQQVAQQYATPPPPKKEKKEKVEKQDKEKPEKDKEISPSVTKKNTNKKTKPKSDILKDPPSEANSIQSANATTKTSETNHTSRPRLKNVDRSTAQQLAVTVGNVTVIITDFKEKTRSSSTSSSTVTSSAGSEQQNQSSSGSESTDKGSSRSSTPKGDMSAVNDESF

SEQ ID NO: 36912 - protein, 361 aa, Homo sapiens
MWVLTPAAFAGKLLSVFRQPLSSLWRSLVPLFCWLRATFWLLATKRRKQQLVLRGPDETKEEEEDPPLPTTPTSVNYHFTRQCNYKCGFCFHTAKTSFVLPLEEAKRGLLLLKEAGMEKINFSGGEPFLQDRGEYLGKLVRFCKVELRLPSVSIVSNGSLIRERWFQNYGEYLDILAISCDSFDEEVNVLIGRGQGKKNHVENLQKLRRWCRDYRVAFKINSVINRFNVEEDMTEQIKALNPVRWKVFQCLLIEGENCGEDALREAERFVIGDEEFERFLERHKEVSCLVPESNQKMKDSYLILDEYMRFLNCRKGRKDPSKSILDVGVEEAIKFSGFDEKMFLKRGGKYIWSKADLKLDW

SEQ ID NO: 36913 - protein, 463 aa, Homo sapiens
MATVTATTKVPEIRDVTRIERIGAHSHIRGLGLDDALEPRQASQGMVGQLAARRAAGVVLEMIREGKIAGRAVLIAGQPGTGKTAIAMGMAQALGPDTPFTAIAGSEIFSLEMSKTEALTQAFRRSIGVRIKEETEIIEGEVVEIQIDRPATGTGSKVGKLTLKTTEMETIYDLGTKMIESLTKDKVQAGDVITIDKATGKISKLGRSFTRARDYDAMGSQTKFVQCPDGELQKRKEVVHTVSLHEIDVINSRTQGFLALFSGDTGEIKSEVREQINAKVAEWREEGKAEIIPGVLFIDEVHMLDIESFSFLNRALESDMAPVLIMATNRGITRIRGTSYQSPHGIPIDLLDRLLIVSTTPYSEKDTKQILRIRCEEEDVEMSEDAYTVLTRIGLETSLRYAIQLITAASLVCRKRKGTEVQVDDIKRVYSLFLDESRSTQYMKEYQDAFLFNELKGETMDTS

SEQ ID NO: 36914 - protein, 418 aa, Homo sapiens
MVGQLAARRAAGVVLEMIREGKIAGRAVLIAGQPGTGKTAIAMGMAQALGPDTPFTAIAGSEIFSLEMSKTEALTQAFRRSIGVRIKEETEIIEGEVVEIQIDRPATGTGSKVGKLTLKTTEMETIYDLGTKMIESLTKDKVQAGDVITIDKATGKISKLGRSFTRARDYDAMGSQTKFVQCPDGELQKRKEVVHTVSLHEIDVINSRTQGFLALFSGDTGEIKSEVREQINAKVAEWREEGKAEIIPGVLFIDEVHMLDIESFSFLNRALESDMAPVLIMATNRGITRIRGTSYQSPHGIPIDLLDRLLIVSTTPYSEKDTKQILRIRCEEEDVEMSEDAYTVLTRIGLETSLRYAIQLITAASLVCRKRKGTEVQVDDIKRVYSLFLDESRSTQYMKEYQDAFLFNELKGETMDTS

SEQ ID NO: 36915 - protein, 598 aa, Homo sapiens
MRAQEDLEGRTQHETTRDPSTPLPTEPKFDMLYKIEDVPPWYLCILLGFQHYLTCFSGTIAVPFLLAEALCVGHDQHMVSQLIGTIFTCVGITTLIQTTVGIRLPLFQASAFAFLVPAKAILALERWKCPPEEEIYGNWSLPLNTSHIWHPRIREVQGAIMVSSVVEVVIGLLGLPGALLNYIGPLTVTPTVSLIGLSVFQAAGDRAGSHWGISACSILLIILFSQYLRNLTFLLPVYRWGKGLTLLRIQIFKMFPIMLAIMTVWLLCYVLTLTDVLPTDPKAYGFQARTDARGDIMAIAPWIRIPYPCQWGLPTVTAAAVLGMFSATLAGIIESIGDYYACARLAGAPPPPVHAINRGIFTEGICCIIAGLLGTGNGSTSSSPNIGVLGITKVGSRRVVQYGAAIMLVLGTIGKFTALFSSLPDPILGGMFCTLFGMITAVGLSNLQFVDMNSSRNLFVLGFSMFFGLTLPNYLESNPGAINTGILEVDQILIVLLTTEMFVGGCLAFILDNTVPGSPEERGLIQWKAGAHANSDMSSSLKSYDFPIGMGIVKRITFLKYIPICPVFKGFSSSSKDQIAIPEDTPENTETASVCTKV

SEQ ID NO: 36916 - protein, 602 aa, Homo sapiens
MRAQEDLEGRTQHETTRDPSTPLPTEPKFDMLYKIEDVPPWYLCILLGFQHYLTCFSGTIAVPFLLAEALCVGHDQHMVSQLIGTIFTCVGITTLIQTTVGIRLPLFQASAFAFLVPAKAILALERWKCPPEEEIYGNWSLPLNTSHIWHPRIREVGLHVQGAIMVSSVVEVVIGLLGLPGALLNYIGPLTVTPTVSLIGLSVFQAAGDRAGSHWGISACSILLIILFSQYLRNLTFLLPVYRWGKGLTLLRIQIFKMFPIMLAIMTVWLLCYVLTLTDVLPTDPKAYGFQARTDARGDIMAIAPWIRIPYPCQWGLPTVTAAAVLGMFSATLAGIIESIGDYYACARLAGAPPPPVHAINRGIFTEGICCIIAGLLGTGNGSTSSSPNIGVLGITKVGSRRVVQYGAAIMLVLGTIGKFTALFSSLPDPILGGMFCTLFGMITAVGLSNLQFVDMNSSRNLFVLGFSMFFGLTLPNYLESNPGAINTGILEVDQILIVLLTTEMFVGGCLAFILDNTVPGSPEERGLIQWKAGAHANSDMSSSLKSYDFPIGMGIVKRITFLKYIPICPVFKGFSSSSKDQIAIPEDTPENTETASVCTKV

SEQ ID NO: 36917 - protein, 259 aa, Homo sapiens
MRAQEDLEGRTQHETTRDPSTPLPTEPKFDMLYKIEDVPPWYLCILLGFQHYLTCFSGTIAVPFLLAEALCVGHDQHMVSQLIGTIFTCVGMFCTLFGMITAVGLSNLQFVDMNSSRNLFVLGFSMFFGLTLPNYLESNPGAINTGILEVDQILIVLLTTEMFVGGCLAFILDNTVPGSPEERGLIQWKAGAHANSDMSSSLKSYDFPIGMGIVKRITFLKYIPICPVFKGFSSSSKDQIAIPEDTPENTETASVCTKV

SEQ ID NO: 36918 - protein, 650 aa, Homo sapiens
MMGIGKNTTSKSMEAGSSTEGKYEDEAKHPAFFTLPVVINGGATSSGEQDNEDTELMAIYTTENGIAEKSSLAETLDSTGSLDPQRSDMIYTIEDVPPWYLCIFLGLQHYLTCFSGTIAVPFLLADAMCVGYDQWATSQLIGTIFFCVGITTLLQTTFGCRLPLFQASAFAFLAPARAILSLDKWKCNTTDVSVANGTAELLHTEHIWYPRIREIQGAIIMSSLIEVVIGLLGLPGALLKYIGPLTITPTVALIGLSGFQAAGERAGKHWGIAMLTIFLVLLFSQYARNVKFPLPIYKSKKGWTAYKLQLFKMFPIILAILVSWLLCFIFTVTDVFPPDSTKYGFYARTDARQGVLLVAPWFKVPYPFQWGLPTVSAAGVIGMLSAVVASIIESIGDYYACARLSCAPPPPIHAINRGIFVEGLSCVLDGIFGTGNGSTSSSPNIGVLGITKVGSRRVIQCGAALMLALGMIGKFSALFASLPDPVLGALFCTLFGMITAVGLSNLQFIDLNSSRNLFVLGFSIFFGLVLPSYLRQNPLVTGITGIDQVLNVLLTTAMFVGGCVAFILDNTIPGTPEERGIRKWKKGVGKGNKSLDGMESYNLPFGMNIIKKYRCFSYLPISPTFVGYTWKGLRKSDNSRSSDEDSQATG

SEQ ID NO: 36919 - protein, 536 aa, Homo sapiens
MMGIGKNTTSKSMEAGSSTEGKYEDEAKHPAFFTLPVVINGGATSSGEQDNEDTELMAIYTTENGIAEKSSLAETLDSTGSLDPQRSDMIYTIEDVPPWYLCIFLGLQHYLTCFSGTIAVPFLLADAMCVGYDQWATSQLIGTIFFCVGITTLLQTTFGCRTIFLVLLFSQYARNVKFPLPIYKSKKGWTAYKLQLFKMFPIILAILVSWLLCFIFTVTDVFPPDSTKYGFYARTDARQGVLLVAPWFKVPYPFQWGLPTVSAAGVIGMLSAVVASIIESIGDYYACARLSCAPPPPIHAINRGIFVEGLSCVLDGIFGTGNGSTSSSPNIGVLGITKVGSRRVIQCGAALMLALGMIGKFSALFASLPDPVLGALFCTLFGMITAVGLSNLQFIDLNSSRNLFVLGFSIFFGLVLPSYLRQNPLVTGITGIDQVLNVLLTTAMFVGGCVAFILDNTIPGTPEERGIRKWKKGVGKGNKSLDGMESYNLPFGMNIIKKYRCFSYLPISPTFVGYTWKGLRKSDNSRSSDEDSQATG

SEQ ID NO: 36920 - protein, 607 aa, Homo sapiens
MRGAARLGRPGRSCLPGARGLRAPPPPPLLLLLALLPLLPAPGAAAAPAPRPPELQSASAGPSVSLYLSEDEVRRLIGLDAELYYVRNDLISHYALSFSLLVPSETNFLHFTWHAKSKVEYKLGFQVDNVLAMDMPQVNISVQGEVPRTLSVFRVELSCTGKVDSEVMILMQLNLTVNSSKNFTVLNFKRRKMCYKKLEEVKTSALDKNTSRTIYDPVHAAPTTSTRVFYISVGVCCAVIFLVAIILAVLHLHSMKRIELDDSISASSSSQGLSQPSTQTTQYLRADTPNNATPITSYPTLRIEKNDLRSVTLLEAKGKVKDIAISRERITLKDVLQEGTFGRIFHGILIDEKDPNKEKQAFVKTVKDQASEIQVTMMLTESCKLRGLHHRNLLPITHVCIEEGEKPMVILPYMNWGNLKLFLRQCKLVEANNPQAISQQDLVHMAIQIACGMSYLARREVIHKDLAARNCVIDDTLQVKITDNALSRDLFPMDYHCLGDNENRPVRWMALESLVNNEFSSASDVWAFGVTLWELMTLGQTPYVDIDPFEMAAYLKDGYRIAQPINCPDELFAVMACCWALDPEERPKFQQLVQCLTEFHAALGAYV

SEQ ID NO: 36921 - protein, 610 aa, Homo sapiens
MRGAARLGRPGRSCLPGARGLRAPPPPPLLLLLALLPLLPAPGAAAAPAPRPPELQSASAGPSVSLYLSEDEVRRLIGLDAELYYVRNDLISHYALSFSLLVPSETNFLHFTWHAKSKVEYKLGFQVDNVLAMDMPQVNISVQGEVPRTLSVFRVELSCTGKVDSEVMILMQLNLTVNSSKNFTVLNFKRRKMCYKKLEEVKTSALDKNTSRTIYDPVHAAPTTSTRVFYISVGVCCAVIFLVAIILAVLHLHSMKRIELDDSISASSSSQGLSQPSTQTTQYLRADTPNNATPITSSLGYPTLRIEKNDLRSVTLLEAKGKVKDIAISRERITLKDVLQEGTFGRIFHGILIDEKDPNKEKQAFVKTVKDQASEIQVTMMLTESCKLRGLHHRNLLPITHVCIEEGEKPMVILPYMNWGNLKLFLRQCKLVEANNPQAISQQDLVHMAIQIACGMSYLARREVIHKDLAARNCVIDDTLQVKITDNALSRDLFPMDYHCLGDNENRPVRWMALESLVNNEFSSASDVWAFGVTLWELMTLGQTPYVDIDPFEMAAYLKDGYRIAQPINCPDELFAVMACCWALDPEERPKFQQLVQCLTEFHAALGAYV

SEQ ID NO: 36922 - protein, 95 aa, Homo sapiens
MTELETAMGMIIDVFSRYSGSEGSTQTLTKGELKVLMEKELPGFLQSGKDKDAVDKLLKDLDANGDAQVDFSEFIVFVAAITSACHKYFEKAGLK

SEQ ID NO: 36923 - protein, 99 aa, Homo sapiens
MPTQLEMAMDTMIRIFHRYSGKERKRFKLSKGELKLLLQRELTEFLSCQKETQLVDKIVQDLDANKDNEVDFNEFVVMVAALTVACNDYFVEQLKKKGK

SEQ ID NO: 36924 - protein, 94 aa, Homo sapiens
MGSELETAMETLINVFHAHSGKEGDKYKLSKKELKELLQTELSGFLDAQKDVDAVDKVMKELDENGDGEVDFQEYVVLVAALTVACNNFFWENS

SEQ ID NO: 36925 - protein, 98 aa, Homo sapiens
MMCSSLEQALAVLVTTFHKYSCQEGDKFKLSKGEMKELLHKELPSFVGEKVDEEGLKKLMGSLDENSDQQVDFQEYAVFLALITVMCNDFFQGCPDRP

SEQ ID NO: 36926 - protein, 101 aa, Homo sapiens
MARPLEQAVAAIVCTFQEYAGRCGDKYKLCQAELKELLQKELATWTPTEFRECDYNKFMSVLDTNKDCEVDFVEYVRSLACLCLYCHEYFKDCPSEPPCSQ

SEQ ID NO: 36927 - protein, 101 aa, Homo sapiens
MACPLEKALDVMVSTFHKYSGKEGDKFKLNKSELKELLTRELPSFLGKRTDEAAFQKLMSNLDSNRDNEVDFQEYCVFLSCIAMMCNEFFEGFPDKQPRKK

SEQ ID NO: 36928 - protein, 92 aa, Homo sapiens
METPLEKALTTMVTTFHKYSGREGSKLTLSRKELKELIKKELCLGEMKESSIDDLMKSLDKNSDQEIDFKEYSVFLTMLCMAYNDFFLEDNK

SEQ ID NO: 36929 - protein, 110 aa, Homo sapiens
MPAAWILWAHSHSELHTVMETPLEKALTTMVTTFHKYSGREGSKLTLSRKELKELIKKELCLGEMKESSIDDLMKSLDKNSDQEIDFKEYSVFLTMLCMAYNDFFLEDNK

SEQ ID NO: 36930 - protein, 90 aa, Homo sapiens
MACPLDQAIGLLVAIFHKYSGREGDKHTLSKKELKELIQKELTIGSKLQDAEIARLMEDLDRNKDQEVNFQEYVTFLGALALIYNEALKG

SEQ ID NO: 36931 - protein, 101 aa, Homo sapiens
MSNTQAERSIIGMIDMFHKYTRRDDKIEKPSLLTMMKENFPNFLSACDKKGTNYLADVFEKKDKNEDKKIDFSEFLSLLGDIATDYHKQSHGAAPCSGGSQ

SEQ ID NO: 36932 - protein, 93 aa, Homo sapiens
MLTELEKALNSIIDVYHKYSLIKGNFHAVYRDDLKKLLETECPQYIRKKGADVWFKELDINTDGAVNFQEFLILVIKMGVAAHKKSHEESHKE

SEQ ID NO: 36933 - protein, 114 aa, Homo sapiens
MTCKMSQLERNIETIINTFHQYSVKLGHPDTLNQGEFKELVRKDLQNFLKKENKNEKVIEHIMEDLDTNADKQLSFEEFIMLMARLTWASHEKMHEGDEGPGHHHKPGLGEGTP

SEQ ID NO: 36934 - protein, 97 aa, Homo sapiens
MPSQMEHAMETMMFTFHKFAGDKGYLTKEDLRVLMEKEFPGFLENQKDPLAVDKIMKDLDQCRDGKVGFQSFFSLIAGLTIACNDYFVVHMKQKGKK

SEQ ID NO: 36935 - protein, 105 aa, Homo sapiens
MAKISSPTETERCIESLIAVFQKYAGKDGYNYTLSKTEFLSFMNTELAAFTKNQKDPGVLDRMMKKLDTNSDGQLDFSEFLNLIGGLAMACHDSFLKAVPSQKRT

SEQ ID NO: 36936 - protein, 755 aa, Homo sapiens
MKKQRKILWRKGIHLAFSEKWNTGFGGFKKFYFHQHLCILKAKLGRPVTWNRQLRHFQGRKKALQIQKTWIKDEPLCAKTKFNVATQNVSTLSSKVKRKDAKHFISSSKTLLRLQAEKLLSSAKNSDHEYCREKNLLKAVTDFPSNSALGQANGHRPRTDPQPSDFPMKFNGESQSPGESGTIVVTLNNHKRKGFCYGCCQGPEHHRNGGPLIPKKFQLNQHRRIKLSPLMMYEKLSMIRFRYRILRSQHFRTKSKVCKLRKAQRSWVQKVTGDHQETRRENGEGGSCSPFPSPEPKDPSCRHQPYFPDMDSSAVVKGTNSHVPDCHTKGSSFLGKELSLDEAFPDQQNGSATNAWDQSSCSSPKWECTELIHDIPLPEHRSNTMFISETEREIMTLGQENQTSSVSDDRVKLSVSGADTSVSSVDGPVSQKAVQNENSYQMEEDGSLKQSILSSELLDHPYCKSPLEAPLVCSGLKLENQVGGGKNSQKASPVDDEQLSVCLSGFLDEVMKKYGSLVPLSEKEVLGRLKDVFNEDFSNRKPFINREITNYRARHQKCNFRIFYNKHMLDMDDLATLDGQNWLNDQVINMYGELIMDAVPDKVHFFNSFFHRQLVTKGYNGVKRWTKKVDLFKKSLLLIPIHLEVHWSLITVTLSNRIISFYDSQGIHFKFCVENIRKYLLTEAREKNRPEFLQGWQTAVTKCIPQQKNDSDCGVFVLQYCKCLALEQPFQFSQEDMPRVRKRIYKELCECRLMD

SEQ ID NO: 36937 - protein, 709 aa, Homo sapiens
MKKQRKILWRKGIHLAFSEKWNTGFGGFKKFYFHQHLCILKAKLGRPVTWNRQLRHFQGRKKALQIQKTWIKDEPLCAKTKFNVATQNVSTLSSKVKRKDAKHFISSSKTLLRLQAEKLLSSAKNSDHEYCREKNLLKAVTDFPSNSALGQANGHRPRTDPQPSDFPMKFNGESQSPGESGTIVVTLNNHKRKGFCYGCCQGPEHHRNGGPLIPKKFQLNQHRRIKLSPLMMYEKLSMIRFRYRILRSQHFRTKSKVCKLRKAQRSWVQKVTGDHQETRRENGEGGSCSPFPSPEPKDPSCRHQPYFPDMDSSAVVKGTNSHVPDCHTKGSSFLGKELSLDEAFPDQQNGSATNAWDQSSCSSPKWECTELIHDIPLPEHRSNTMFISETEREIMTLGQENQTSSVSDDRVKLSVSGADTSVSSVDGPVSQKAVQNENSYQMEEDGSLKQSILSSELLDHPYCKSPLEAPLVCSGLKLENQVGGGKNSQKASPVDDEQLSVCLSGFLDEVMKKYGSLVPLSEKEVLGRLKDVFNEDFSNRKPFINREITNYRARHQKCNFRIFYNKHMLDMDDLATLDGQNWLNDQVINMYGELIMDAVPDKVHFFNSFFHRQLVTKGYNGVKRWTKKNIRKYLLTEAREKNRPEFLQGWQTAVTKCIPQQKNDSDCGVFVLQYCKCLALEQPFQFSQEDMPRVRKRIYKELCECRLMD

SEQ ID NO: 36938 - protein, 988 aa, Homo sapiens
MGAAAVRWHLCVLLALGTRGRLAGGSGLPGSVDVDECSEGTDDCHIDAICQNTPKSYKCLCKPGYKGEGKQCEDIDECENDYYNGGCVHECINIPGNYRCTCFDGFMLAHDGHNCLDVDECQDNNGGCQQICVNAMGSYECQCHSGFFLSDNQHTCIHRSNEGMNCMNKDHGCAHICRETPKGGVACDCRPGFDLAQNQKDCTLTCNYGNGGCQHSCEDTDTGPTCGCHQKYALHSDGRTCIETCAVNNGGCDRTCKDTATGVRCSCPVGFTLQPDGKTCKDINECLVNNGGCDHFCRNTVGSFECGCRKGYKLLTDERTCQDIDECSFERTCDHICINSPGSFQCLCHRGYILYGTTHCGDVDECSMSNGSCDQGCVNTKGSYECVCPPGRRLHWNGKDCVETGKCLSRAKTSPRAQLSCSKAGGVESCFLSCPAHTLFVPDSENSYVLSCGVPGPQGKALQKRNGTSSGLGPSCSDAPTTPIKQKARFKIRDAKCHLRPHSQARAKETARQPLLDHCHVTFVTLKCDSSKKRRRGRKSPSKEVSHITAEFEIETKMEEASDTCEADCLRKRAEQSLQAAIKTLRKSIGRQQFYVQVSGTEYEVAQRPAKALEGQGACGAGQVLQDSKCVACGPGTHFGGELGQCVSCMPGTYQDMEGQLSCTPCPSSDGLGLPGARNVSECGGQCSPGFFSADGFKPCQACPVGTYQPEPGRTGCFPCGGGLLTKHEGTTSFQDCEAKVHCSPGHHYNTTTHRCIRCPVGTYQPEFGQNHCITCPGNTSTDFDGSTNVTHCKNQHCGGELGDYTGYIESPNYPGDYPANAECVWHIAPPPKRRILIVVPEIFLPIEDECGDVLVMRKSASPTSITTYETCQTYERPIAFTSRSRKLWIQFKSNEGNSGKGFQVPYVTYDEDYQQLIEDIVRDGRLYASENHQEILKDKKLIKALFDVLAHPQNYFKYTAQESKEMFPRSFIKLLRSKVSRFLRPYK

SEQ ID NO: 36939 - protein, 1112 aa, Homo sapiens
MAAGKSGGSAGEITFLEALARSESKRDGGFKNNWSFDHEEESEGDTDKDGTNLLSVDEDEDSETSKGKKLNRRSEIVANSSGEFILKTYVRRNKSESFKTLKGNPIGLNMLSNNKKLSENTQNTSLCSGTVVHGRRFHHAHAQIPVVKTAAQSSLDRKERKEYPPHVQKVEINPVRLSRLQGVERIMKKTEESESQVEPEIKRKVQQKRHCSTYQPTPPLSPASKKCLTHLEDLQRNCRQAITLNESTGPLLRTSIHQNSGGQKSQNTGLTTKKFYGNNVEKVPIDIIVNCDDSKHTYLQTNGKVILPGAKIPKITNLKERKTSLSDLNDPIILSSDDDDDNDRTNRRESISPQPADSACSSPAPSTGKVEAALNENTCRAERELRSIPEDSELNTVTLPRKARMKDQFGNSIINTPLKRRKVFSQEPPDALALSCQSSFDSVILNCRSIRVGTLFRLLIEPVIFCLDFIKIQLDEPDHDPVEIILNTSDLTKCEWCNVRKLPVVFLQAIPAVYQKLSIQLQMNKEDKVWNDCKGVNKLTNLEEQYIILIFQNGLDPPANMVFESIINEIGIKNNISNFFAKIPFEEANGRLVACTRTYEESIKGSCGQKENKIKTVSFESKIQLRSKQEFQFFDEEEETGENHTIFIGPVEKLIVYPPPPAKGGISVTNEDLHCLNEGEFLNDVIIDFYLKYLVLEKLKKEDADRIHIFSSFFYKRLNQRERRNHETTNLSIQQKRHGRVKTWTRHVDIFEKDFIFVPLNEAAHWFLAVVCFPGLEKPKYEPNPHYHENAVIQKCSTVEDSCISSSASEMESCSQNSSAKPVIKKMLNKKHCIAVIDSNPGQEESDPRYKRNICSVKYSVKKINHTASENEEFNKGESTSQKVADRTKSENGLQNESLSSTHHTDGLSKIRLNYSDESPEAGKMLEDELVDFSEDQDNQDDSSDDGFLADDNCSSEIGQWHLKPTICKQPCILLMDSLRGPSRSNVVKILREYLEVEWEVKKGSKRSFSKDVMKGSNPKVPQQNNFSDCGVYVLQYVESFFENPILSFELPMNLANWFPPPRMRTKREEIRNIILKLQEDQSKEKRKHKDTYSTEAPLGEGTEQYVNSISD

SEQ ID NO: 36940 - protein, 1105 aa, Homo sapiens
MAAGKSGGSAGEITFLEALARSESKRDGGFKNNWSFDHEEESEGDTDKDGTNLLSVDEDEDSETSKGKKLNRRSEIVANSSGEFILKTYVRRNKSESFKTLKGNPIGLNMLSNNKKLSENTQNTSLCSGTVVHGRRFHHAHAQIPVVKTAAQRKEYPPHVQKVEINPVRLSRLQGVERIMKKTEESESQVEPEIKRKVQQKRHCSTYQPTPPLSPASKKCLTHLEDLQRNCRQAITLNESTGPLLRTSIHQNSGGQKSQNTGLTTKKFYGNNVEKVPIDIIVNCDDSKHTYLQTNGKVILPGAKIPKITNLKERKTSLSDLNDPIILSSDDDDDNDRTNRRESISPQPADSACSSPAPSTGKVEAALNENTCRAERELRSIPEDSELNTVTLPRKARMKDQFGNSIINTPLKRRKVFSQEPPDALALSCQSSFDSVILNCRSIRVGTLFRLLIEPVIFCLDFIKIQLDEPDHDPVEIILNTSDLTKCEWCNVRKLPVVFLQAIPAVYQKLSIQLQMNKEDKVWNDCKGVNKLTNLEEQYIILIFQNGLDPPANMVFESIINEIGIKNNISNFFAKIPFEEANGRLVACTRTYEESIKGSCGQKENKIKTVSFESKIQLRSKQEFQFFDEEEETGENHTIFIGPVEKLIVYPPPPAKGGISVTNEDLHCLNEGEFLNDVIIDFYLKYLVLEKLKKEDADRIHIFSSFFYKRLNQRERRNHETTNLSIQQKRHGRVKTWTRHVDIFEKDFIFVPLNEAAHWFLAVVCFPGLEKPKYEPNPHYHENAVIQKCSTVEDSCISSSASEMESCSQNSSAKPVIKKMLNKKHCIAVIDSNPGQEESDPRYKRNICSVKYSVKKINHTASENEEFNKGESTSQKVADRTKSENGLQNESLSSTHHTDGLSKIRLNYSDESPEAGKMLEDELVDFSEDQDNQDDSSDDGFLADDNCSSEIGQWHLKPTICKQPCILLMDSLRGPSRSNVVKILREYLEVEWEVKKGSKRSFSKDVMKGSNPKVPQQNNFSDCGVYVLQYVESFFENPILSFELPMNLANWFPPPRMRTKREEIRNIILKLQEDQSKEKRKHKDTYSTEAPLGEGTEQYVNSISD

SEQ ID NO: 36941 - protein, 220 aa, Homo sapiens
MNGFTPDEMSRGGDAAAAVAAVVAAAAAAASAGNGTGAGTGAEVPGAGAVSAAGPPGAAGPGPGQLCCLREDGERCGRAAGNASFSKRIQKSISQKKVKIELDKSARHLYICDYHKNLIQSVRNRRKRKGSDDDGGDSPVQDIDTPEVDLYQLQVNTLRRYKRHFKLPTRPGLNKAQLVEIVGCHFRSIPVNEKDTLTYFIYSVKNDKNKSDLKVDSGVH

SEQ ID NO: 36942 - protein, 448 aa, Homo sapiens
MAAPTLGRLVLTHLLVALFGMGSWAAVNGIWVELPVVVKDLPEGWSLPSYLSVVVALGNLGLLVVTLWRQLAPGKGEQVPIQVVQVLSVVGTALLAPLWHHVAPVAGQLHSVAFLTLALVLAMACCTSNVTFLPFLSHLPPPFLRSFFLGQGLSALLPCVLALVQGVGRLECPPAPTNGTSGPPLDFPERFPASTFFWALTALLVTSAAAFRGLLLLLPSLPSVTTGGSGPELQLGSPGAEEEEKEEEEALPLQEPPSQAAGTIPGPDPEAHQLFSAHGAFLLGLMAFTSAVTNGVLPSVQSFSCLPYGRLAYHLAVVLGSAANPLACFLAMGVLCRSLAGLVGLSLLGMLFGAYLMALAILSPCPPLVGTTAGVVLVVLSWVLCLCVFSYVKVAASSLLHGGGRPALLAAGVAIQVGSLLGAGAMFPPTSIYHVFQSRKDCVDPCGP

SEQ ID NO: 36943 - protein, 167 aa, Homo sapiens
MAAPTLGRLVLTHLLVALFGMGSWAAVNGIWVELPVVVKDLPEGEWEGGTGKRGAGMPRKVACGSSLSLSHCAPDMASFLPCRLEPPLIPLCGCGAGKPGSAGGDPVEAAGPGQGRAGPHPGGTGAECSGHSPAGPSVAPRGPSGRAAPLCGLPNSGLGVGNGLLYL

SEQ ID NO: 36944 - protein, 445 aa, Homo sapiens
MAAPTPARPVLTHLLVALFGMGSWAAVNGIWVELPVVVKELPEGWSLPSYVSVLVALGNLGLLVVTLWRRLAPGKDEQVPIRVVQVLGMVGTALLASLWHHVAPVAGQLHSVAFLALAFVLALACCASNVTFLPFLSHLPPRFLRSFFLGQGLSALLPCVLALVQGVGRLECPPAPINGTPGPPLDFLERFPASTFFWALTALLVASAAAFQGLLLLLPPPPSVPTGELGSGLQVGAPGAEEEVEESSPLQEPPSQAAGTTPGPDPKAYQLLSARSACLLGLLAATNALTNGVLPAVQSFSCLPYGRLAYHLAVVLGSAANPLACFLAMGVLCRSLAGLGGLSLLGVFCGGYLMALAVLSPCPPLVGTSAGVVLVVLSWVLCLGVFSYVKVAASSLLHGGGRPALLAAGVAIQVGSLLGAVAMFPPTSIYHVFHSRKDCADPCDS

SEQ ID NO: 36945 - protein, 875 aa, Homo sapiens
MAAATRRVFHLQPCENSPTMSQNGYFEDSSYYKCDTDDTFEAREEILGDEAFDTANSSIVSGESIRFFVNVNLEMQATNTENEATSGGCVLLHTSRKYLKLKNFKEEIRAHRDLDGFLAQASIVLNETATSLDNVLRTMLRRFARDPDNNEPNCNLDLLMAMLFTDAGAPMRGKVHLLSDTIQGVTATVTGVRYQQSWLCIICTMKALQKRHVCISRLVRPQNWGENSCEVRFVILVLAPPKMKSTKTAMEVARTFATMFSDIAFRQKLLETRTEEEFKEALVHQRQLLTMVSHGPVAPRTKERSTVSLPAHRHPEPPKCKDFVPFGKGIREDIARRFPLYPLDFTDGIIGKNKAVGKYITTTLFLYFACLLPTIAFGSLNDENTDGAIDVQKTIAGQSIGGLLYALFSGQPLVILLTTAPLALYIQVIRVICDDYDLDFNSFYAWTGLWNSFFLALYAFFNLSLVMSLFKRSTEEIIALFISITFVLDAVKGTVKIFWKYYYGHYLDDYHTKRTSSLVSLSGLGASLNASLHTALNASFLASPTELPSATHSGQATAVLSLLIMLGTLWLGYTLYQFKKSPYLHPCVREILSDCALPIAVLAFSLISSHGFREIEMSKFRYNPSESPFAMAQIQSLSLRAVSGAMGLGFLLSMLFFIEQNLVAALVNAPENRLVKGTAYHWDLLLLAIINTGLSLFGLPWIHAAYPHSPLHVRALALVEERVENGHIYDTIVNVKETRLTSLGASVLVGLSLLLLPVPLQWIPKPVLYGLFLYIALTSLDGNQLVQRVALLLKEQTAYPPTHYIRRVPQRKIHYFTGLQVLQLLLLCAFGMSSLPYMKMIFPLIMIAMIPIRYILLPRIIEAKYLDVMDAEHRP

SEQ ID NO: 36946 - protein, 891 aa, Homo sapiens
MSQVGGRGDRCTQEVQGLVHGAGDLSASLAENSPTMSQNGYFEDSSYYKCDTDDTFEAREEILGDEAFDTANSSIVSGESIRFFVNVNLEMQATNTENEATSGGCVLLHTSRKYLKLKNFKEEIRAHRDLDGFLAQASIVLNETATSLDNVLRTMLRRFARDPDNNEPNCNLDLLMAMLFTDAGAPMRGKVHLLSDTIQGVTATVTGVRYQQSWLCIICTMKALQKRHVCISRLVRPQNWGENSCEVRFVILVLAPPKMKSTKTAMEVARTFATMFSDIAFRQKLLETRTEEEFKEALVHQRQLLTMVSHGPVAPRTKERSTVSLPAHRHPEPPKCKDFVPFGKGIREDIARRFPLYPLDFTDGIIGKNKAVGKYITTTLFLYFACLLPTIAFGSLNDENTDGAIDVQKTIAGQSIGGLLYALFSGQPLVILLTTAPLALYIQVIRVICDDYDLDFNSFYAWTGLWNSFFLALYAFFNLSLVMSLFKRSTEEIIALFISITFVLDAVKGTVKIFWKYYYGHYLDDYHTKRTSSLVSLSGLGASLNASLHTALNASFLASPTELPSATHSGQATAVLSLLIMLGTLWLGYTLYQFKKSPYLHPCVREILSDCALPIAVLAFSLISSHGFREIEMSKFRYNPSESPFAMAQIQSLSLRAVSGAMGLGFLLSMLFFIEQNLVAALVNAPENRLVKGTAYHWDLLLLAIINTGLSLFGLPWIHAAYPHSPLHVRALALVEERVENGHIYDTIVNVKETRLTSLGASVLVGLSLLLLPVPLQWIPKPVLYGLFLYIALTSLDGNQLVQRVALLLKEQTAYPPTHYIRRVPQRKIHYFTGLQVLQLLLLCAFGMSSLPYMKMIFPLIMIAMIPIRYILLPRIIEAKYLDVMDAEHRP

SEQ ID NO: 36947 - protein, 409 aa, Homo sapiens
MSLFKRSTEEIIALFISITFVLDAVKGTVKIFWKYYYGHYLDDYHTKRTSSLVSLSGLGASLNASLHTALNASFLASPTELPSATHSGQATAVLSLLIMLGTLWLGYTLYQFKKSPYLHPCVREILSDCALPIAVLAFSLISSHGFREIEMSKFRYNPSESPFAMAQIQSLSLRAVSGAMGLGFLLSMLFFIEQNLVAALVNAPENRLVKGTAYHWDLLLLAIINTGLSLFGLPWIHAAYPHSPLHVRALALVEERVENGHIYDTIVNVKETRLTSLGASVLVGLSLLLLPVPLQWIPKPVLYGLFLYIALTSLDGNQLVQRVALLLKEQTAYPPTHYIRRVPQRKIHYFTGLQVLQLLLLCAFGMSSLPYMKMIFPLIMIAMIPIRYILLPRIIEAKYLDVMDAEHRP

SEQ ID NO: 36948 - protein, 918 aa, Homo sapiens
MGVYGPQDRSESEKRDVQRDPPPWHPRREGERPARARSLPLAAAGQGFLRKTWISEHENSPTMSQNGYFEDSSYYKCDTDDTFEAREEILGDEAFDTANSSIVSGESIRFFVNVNLEMQATNTENEATSGGCVLLHTSRKYLKLKNFKEEIRAHRDLDGFLAQASIVLNETATSLDNVLRTMLRRFARDPDNNEPNCNLDLLMAMLFTDAGAPMRGKVHLLSDTIQGVTATVTGVRYQQSWLCIICTMKALQKRHVCISRLVRPQNWGENSCEVRFVILVLAPPKMKSTKTAMEVARTFATMFSDIAFRQKLLETRTEEEFKEALVHQRQLLTMVSHGPVAPRTKERSTVSLPAHRHPEPPKCKDFVPFGKGIREDIARRFPLYPLDFTDGIIGKNKAVGKYITTTLFLYFACLLPTIAFGSLNDENTDGAIDVQKTIAGQSIGGLLYALFSGQPLVILLTTAPLALYIQVIRVICDDYDLDFNSFYAWTGLWNSFFLALYAFFNLSLVMSLFKRSTEEIIALFISITFVLDAVKGTVKIFWKYYYGHYLDDYHTKRTSSLVSLSGLGASLNASLHTALNASFLASPTELPSATHSGQATAVLSLLIMLGTLWLGYTLYQFKKSPYLHPCVREILSDCALPIAVLAFSLISSHGFREIEMSKFRYNPSESPFAMAQIQSLSLRAVSGAMGLGFLLSMLFFIEQNLVAALVNAPENRLVKGTAYHWDLLLLAIINTGLSLFGLPWIHAAYPHSPLHVRALALVEERVENGHIYDTIVNVKETRLTSLGASVLVGLSLLLLPVPLQWIPKPVLYGLFLYIALTSLDGNQLVQRVALLLKEQTAYPPTHYIRRVPQRKIHYFTGLQVLQLLLLCAFGMSSLPYMKMIFPLIMIAMIPIRYILLPRIIEAKYLDVMDAEHRP

SEQ ID NO: 36949 - protein, 856 aa, Homo sapiens
MSQNGYFEDSSYYKCDTDDTFEAREEILGDEAFDTANSSIVSGESIRFFVNVNLEMQATNTENEATSGGCVLLHTSRKYLKLKNFKEEIRAHRDLDGFLAQASIVLNETATSLDNVLRTMLRRFARDPDNNEPNCNLDLLMAMLFTDAGAPMRGKVHLLSDTIQGVTATVTGVRYQQSWLCIICTMKALQKRHVCISRLVRPQNWGENSCEVRFVILVLAPPKMKSTKTAMEVARTFATMFSDIAFRQKLLETRTEEEFKEALVHQRQLLTMVSHGPVAPRTKERSTVSLPAHRHPEPPKCKDFVPFGKGIREDIARRFPLYPLDFTDGIIGKNKAVGKYITTTLFLYFACLLPTIAFGSLNDENTDGAIDVQKTIAGQSIGGLLYALFSGQPLVILLTTAPLALYIQVIRVICDDYDLDFNSFYAWTGLWNSFFLALYAFFNLSLVMSLFKRSTEEIIALFISITFVLDAVKGTVKIFWKYYYGHYLDDYHTKRTSSLVSLSGLGASLNASLHTALNASFLASPTELPSATHSGQATAVLSLLIMLGTLWLGYTLYQFKKSPYLHPCVREILSDCALPIAVLAFSLISSHGFREIEMSKFRYNPSESPFAMAQIQSLSLRAVSGAMGLGFLLSMLFFIEQNLVAALVNAPENRLVKGTAYHWDLLLLAIINTGLSLFGLPWIHAAYPHSPLHVRALALVEERVENGHIYDTIVNVKETRLTSLGASVLVGLSLLLLPVPLQWIPKPVLYGLFLYIALTSLDGNQLVQRVALLLKEQTAYPPTHYIRRVPQRKIHYFTGLQVLQLLLLCAFGMSSLPYMKMIFPLIMIAMIPIRYILLPRIIEAKYLDVMDAEHRP

SEQ ID NO: 36950 - protein, 310 aa, Homo sapiens
MLVVEVANGRSLVWGAEAVQALRERLGVGGRTVGALPRGPRQNSRLGLPLLLMPEEARLLAEIGAVTLVSAPRPDSRHHSLALTSFKRQQEESFQEQSALAAEARETRRQELLEKITEGQAAKKQKLEQASGASSSQEAGSSQAAKEDETSDGQASGEQEEAGPSSSQAGPSNGVAPLPRSALLVQLATARPRPVKARPLDWRVQSKDWPHAGRPAHELRYSIYRDLWERGFFLSAAGKFGGDFLVYPGDPLRFHAHYIAQCWAPEDTIPLQDLVAAGRLGTSVRKTLLLCSPQPDGKVVYTSLQWASLQ

SEQ ID NO: 36951 - protein, 681 aa, Homo sapiens
MSKELAAMGPGASGDGVRTETAPHIALDSRVGLHAYDISVVVIYFVFVIAVGIWSSIRASRGTIGGYFLAGRSMSWWPIGASLMSSNVGSGLFIGLAGTGAAGGLAVGGFEWNATWLLLALGWVFVPVYIAAGVVTMPQYLKKRFGGQRIQVYMSVLSLILYIFTKISTDIFSGALFIQMALGWNLYLSTGILLVVTAVYTIAGGLMAVIYTDALQTVIMVGGALVLMFLGFQDVGWYPGLEQRYRQAIPNVTVPNTTCHLPRPDAFHILRDPVSGDIPWPGLIFGLTVLATWCWCTDQVIVQRSLSAKSLSHAKGGSVLGGYLKILPMFFIVMPGMISRALFPDEVGCVDPDVCQRICGARVGCSNIAYPKLVMALMPVGLRGLMIAVIMAALMSSLTSIFNSSSTLFTIDVWQRFRRKSTEQELMVVGRVFVVFLVVISILWIPIIQSSNSGQLFDYIQAVTSYLAPPITALFLLAIFCKRVTEPGAFWGLVFGLGVGLLRMILEFSYPAPACGEVDRRPAVLKDFHYLYFAILLCGLTAIVIVIVSLCTTPIPEEQLTRLTWWTRNCPLSELEKEAHESTPEISERPAGECPAGGGAAENSSLGQEQPEAPSRSWGKLLWSWFCGLSGTPEQALSPAEKAALEQKLTSIEEEPLWRHVCNINAVLLLAINIFLWGYFA

SEQ ID NO: 36952 - protein, 706 aa, Homo sapiens
MSKELAAMGPGASGDGVRTETAPHIALDSRVGLHAYDISVVVIYFVFVIAVGIWSSIRASRGTIGGYFLAGRSMSWWPIGASLMSSNVGSGLFIGLAGTGAAGGLAVGGFEWNMRKSRSGGDRGIHPRSHGRTGVRSQATWLLLALGWVFVPVYIAAGVVTMPQYLKKRFGGQRIQVYMSVLSLILYIFTKISTDIFSGALFIQMALGWNLYLSTGILLVVTAVYTIAGGLMAVIYTDALQTVIMVGGALVLMFLGFQDVGWYPGLEQRYRQAIPNVTVPNTTCHLPRPDAFHILRDPVSGDIPWPGLIFGLTVLATWCWCTDQVIVQRSLSAKSLSHAKGGSVLGGYLKILPMFFIVMPGMISRALFPDEVGCVDPDVCQRICGARVGCSNIAYPKLVMALMPVGLRGLMIAVIMAALMSSLTSIFNSSSTLFTIDVWQRFRRKSTEQELMVVGRVFVVFLVVISILWIPIIQSSNSGQLFDYIQAVTSYLAPPITALFLLAIFCKRVTEPGAFWGLVFGLGVGLLRMILEFSYPAPACGEVDRRPAVLKDFHYLYFAILLCGLTAIVIVIVSLCTTPIPEEQLTRLTWWTRNCPLSELEKEAHESTPEISERPAGECPAGGGAAENSSLGQEQPEAPSRSWGKLLWSWFCGLSGTPEQALSPAEKAALEQKLTSIEEEPLWRHVCNINAVLLLAINIFLWGYFA

SEQ ID NO: 36953 - protein, 702 aa, Homo sapiens
MSKELAAMGPGASGDGVRTETAPHIALDSRVGLHAYDISVVVIYFVFVIAVGIWSSIRASRGTIGGYFLAGRSMSWWPIGASLMSSNVGSGLFIGLAGTGAAGGLAVGGFEWNMRKSRSGGDRGIHPRSHGRTGATWLLLALGWVFVPVYIAAGVVTMPQYLKKRFGGQRIQVYMSVLSLILYIFTKISTDIFSGALFIQMALGWNLYLSTGILLVVTAVYTIAGGLMAVIYTDALQTVIMVGGALVLMFLGFQDVGWYPGLEQRYRQAIPNVTVPNTTCHLPRPDAFHILRDPVSGDIPWPGLIFGLTVLATWCWCTDQVIVQRSLSAKSLSHAKGGSVLGGYLKILPMFFIVMPGMISRALFPDEVGCVDPDVCQRICGARVGCSNIAYPKLVMALMPVGLRGLMIAVIMAALMSSLTSIFNSSSTLFTIDVWQRFRRKSTEQELMVVGRVFVVFLVVISILWIPIIQSSNSGQLFDYIQAVTSYLAPPITALFLLAIFCKRVTEPGAFWGLVFGLGVGLLRMILEFSYPAPACGEVDRRPAVLKDFHYLYFAILLCGLTAIVIVIVSLCTTPIPEEQLTRLTWWTRNCPLSELEKEAHESTPEISERPAGECPAGGGAAENSSLGQEQPEAPSRSWGKLLWSWFCGLSGTPEQALSPAEKAALEQKLTSIEEEPLWRHVCNINAVLLLAINIFLWGYFA

SEQ ID NO: 36954 - protein, 596 aa, Homo sapiens
MAANSTSDLHTPGTQLSVADIIVITVYFALNVAVGIWSSCRASRNTVNGYFLAGRDMTWWPIGASLFASSEGSGLFIGLAGSGAAGGLAVAGFEWNATYVLLALAWVFVPIYISSEIVTLPEYIQKRYGGQRIRMYLSVLSLLLSVFTKISLDLYAGALFVHICLGWNFYLSTILTLGITALYTIAGGLAAVIYTDALQTLIMVVGAVILTIKAFDQIGGYGQLEAAYAQAIPSRTIANTTCHLPRTDAMHMFRDPHTGDLPWTGMTFGLTIMATWYWCTDQVIVQRSLSARDLNHAKAGSILASYLKMLPMGLIIMPGMISRALFPDDVGCVVPSECLRACGAEVGCSNIAYPKLVMELMPIGLRGLMIAVMLAALMSSLTSIFNSSSTLFTMDIWRRLRPRSGERELLLVGRLVIVALIGVSVAWIPVLQDSNSGQLFIYMQSVTSSLAPPVTAVFVLGVFWRRANEQGAFWGLIAGLVVGATRLVLEFLNPAPPCGEPDTRPAVLGSIHYLHFAVALFALSGAVVVAGSLLTPPPQSVQIENLTWWTLAQDVPLGTKAGDGQTPQKHAFWARVCGFNAILLMCVNIFFYAYFA

SEQ ID NO: 36955 - protein, 569 aa, Homo sapiens
MAANSTSDLHTPGTQLSVADIIVITVYFALNVAVGIWSSCRASRNTVNGYFLAGRDMTWWPIGASLFASSEGSGLFIGLAGSGAAGGLAVAGFEWNATYVLLALAWVFVPIYISSEIVTLPEYIQKRYGGQRIRMYLSVLSLLLSVFTKISLDLYAGALFVHICLGWNFYLSTILTLGITALYTIAAFDQIGGYGQLEAAYAQAIPSRTIANTTCHLPRTDAMHMFRDPHTGDLPWTGMTFGLTIMATWYWCTDQVIVQRSLSARDLNHAKAGSILASYLKMLPMGLIIMPGMISRALFPDDVGCVVPSECLRACGAEVGCSNIAYPKLVMELMPIGLRGLMIAVMLAALMSSLTSIFNSSSTLFTMDIWRRLRPRSGERELLLVGRLVIVALIGVSVAWIPVLQDSNSGQLFIYMQSVTSSLAPPVTAVFVLGVFWRRANEQGAFWGLIAGLVVGATRLVLEFLNPAPPCGEPDTRPAVLGSIHYLHFAVALFALSGAVVVAGSLLTPPPQSVQIENLTWWTLAQDVPLGTKAGDGQTPQKHAFWARVCGFNAILLMCVNIFFYAYFA

SEQ ID NO: 36956 - protein, 566 aa, Homo sapiens
MTWWPIGASLFASSEGSGLFIGLAGSGAAGGLAVAGFEWNATYVLLALAWVFVPIYISSEIVTLPEYIQKRYGGQRIRMYLSVLSLLLSVFTKISLDLYAGALFVHICLGWNFYLSTILTLGITALYTIAAFDQIGGYGQLEAAYAQAIPSRTIANTTCHLPRTDAMHMFRDPHTGDLPWTGMTFGLTIMATWYWCTDQVIVQRSLSARDLNHAKAGSILASYLKMLPMGLIIMPGMISRALFPGAHVYEERHQVSVSRTDDVGCVVPSECLRACGAEVGCSNIAYPKLVMELMPIGLRGLMIAVMLAALMSSLTSIFNSSSTLFTMDIWRRLRPRSGERELLLVGRTGIPSTPPAPQSRLSFLLPETPPLERYLLGLVVMDLWLVIVALIGVSVAWIPVLQDSNSGQLFIYMQSVTSSLAPPVTAVFVLGVFWRRANEQGAFWGLIAGLVVGATRLVLEFLNPAPPCGEPDTRPAVLGSIHYLHFAVALFALSGAVVVAGSLLTPPPQSVQIENLTWWTLAQDVPLGTKAGDGQTPQKHAFWARVCGFNAILLMCVNIFFYAYFA

SEQ ID NO: 36957 - protein, 612 aa, Homo sapiens
MAANSTSDLHTPGTQLSVADIIVITVYFALNVAVGIWSSCRASRNTVNGYFLAGRDMTWWPIGASLFASSEGSGLFIGLAGSGAAGGLAVAGFEWNATYVLLALAWVFVPIYISSEIVTLPEYIQKRYGGQRIRMYLSVLSLLLSVFTKISLDLYAGALFVHICLGWNFYLSTILTLGITALYTIAGGLAAVIYTDALQTLIMVVGAVILTIKAFDQIGGYGQLEAAYAQAIPSRTIANTTCHLPRTDAMHMFRDPHTGDLPWTGMTFGLTIMATWYWCTDQVIVQRSLSARDLNHAKAGSILASYLKMLPMGLIIMPGMISRALFPGAHVYEERHQVSVSRTDDVGCVVPSECLRACGAEVGCSNIAYPKLVMELMPIGLRGLMIAVMLAALMSSLTSIFNSSSTLFTMDIWRRLRPRSGERELLLVGRLVIVALIGVSVAWIPVLQDSNSGQLFIYMQSVTSSLAPPVTAVFVLGVFWRRANEQGAFWGLIAGLVVGATRLVLEFLNPAPPCGEPDTRPAVLGSIHYLHFAVALFALSGAVVVAGSLLTPPPQSVQIENLTWWTLAQDVPLGTKAGDGQTPQKHAFWARVCGFNAILLMCVNIFFYAYFA

SEQ ID NO: 36958 - protein, 560 aa, Homo sapiens
MAANSTSDLHTPGTQLSVADIIVITVYFALNVAVGIWSSCRASRNTVNGYFLAGRDMTWWPIGASLFASSEGSGLFIGLAGSGAAGGLAVAGFEWNATYVLLALAWVFVPIYISSEIVTLPEYIQKRYGGQRIRMYLSVLSLLLSVFTKISLDLYAGALFVHICLGWNFYLSTILTLGITALYTIAGGLAAVIYTDALQTLIMVVGAVILTIKAFDQIGGYGQLEAAYAQAIPSRTIANTTCHLPRTDAMHMFRDPHTGDLPWTGMTFGLTIMATWYWCTDQVIVQRSLSARDLNHAKAGSILASYLKMLPMGLIIMPGMISRALFPGLRGLMIAVMLAALMSSLTSIFNSSSTLFTMDIWRRLRPRSGERELLLVGRLVIVALIGVSVAWIPVLQDSNSGQLFIYMQSVTSSLAPPVTAVFVLGVFWRRANEQGAFWGLIAGLVVGATRLVLEFLNPAPPCGEPDTRPAVLGSIHYLHFAVALFALSGAVVVAGSLLTPPPQSVQIENLTWWTLAQDVPLGTKAGDGQTPQKHAFWARVCGFNAILLMCVNIFFYAYFA

SEQ ID NO: 36959 - protein, 606 aa, Homo sapiens
MKVRSAGGDGDALCVTEEDLAGDDEDMPTFPCTQKGRPGPRCSRCQKNLSLHTSVRILYLFLALLLVAVAVLASLVFRKVDSLSEDISLTQSIYDKKLVLMQKNLQGLDPKALNNCSFCHEAGQLGPEIRKLQEELEGIQKLLLAQEVQLDQTLQAQEVLSTTSRQISQEMGSCSFSIHQVNQSLGLFLAQVRGWQATTAGLDLSLKDLTQECYDVKAAVHQINFTVGQTSEWIHGIQRKTDEETLTLQKIVTDWQNYTRLFSGLRTTSTKTGEAVKNIQATLGASSQRISQNSESMHDLVLQVMGLQLQLDNISSFLDDHEENMHDLQYHTHYAQNRTVERFESLEGRMASHEIEIGTIFTNINATDNHVHSMLKYLDDVRLSCTLGFHTHAEELYYLNKSVSIMLGTTDLLRERFSLLSARLDLNVRNLSMIVEEMKAVDTQHGEILRNVTILRGAPGPPGPRGFKGDMGVKGPVGGRGPKGDPGSLGPLGPQGPQGQPGEAGPVGERGPVGPRGFPGLKGSKGSFGTGGPRGQPGPKGDIGPPGPEGPPGSPGPSGPQGKPGIAGKTGSPGQRGAMGPKGEPGIQGPPGLPGPPGPPGSQSFY

SEQ ID NO: 36960 - protein, 466 aa, Homo sapiens
MKVRSAGGDGDALCVTEEDLAGDDEDMPTFPCTQKGRPGPRCSRCQKNLSLHTSVRILYLFLALLLVAVAVLASLVFRKVDSLSEDISLTQSIYDKKLVLMQKNLQGLDPKALNNCSFCHEAGQLGPEIRKLQEELEGIQKLLLAQEVQLDQTLQAQEVLSTTSRQISQEMGSCSFSIHQVNQSLGLFLAQVRGWQATTAGLDLSLKDLTQECYDVKAAVHQINFTVGQTSEWIHGIQRKTDEETLTLQKIVTDWQNYTRLFSGLRTTSTKTGEAVKNIQATLGASSQRISQNSESMHDLVLQVMGLQLQLDNISSFLDDHEENMHDLQYHTHYAQNRTVERFESLEGRMASHEIEIGTIFTNINATDNHVHSMLKYLDDVRLSCTLGFHTHAEELYYLNKSVSIMLGTTDLLRERFSLLSARLDLNVRNLSMIVEEMKAVDTQHGEILRNVTILRGHTLFSHNRI

SEQ ID NO: 36961 - protein, 1079 aa, Homo sapiens
MEDEAVLDRGASFLKHVCDEEEVEGHHTIYIGVHVPKSYRRRRRHKRKTGHKEKKEKERISENYSDKSDIENADESSSSILKPLISPAAERIRFILGEEDDSPAPPQLFTELDELLAVDGQEMEWKETARWIKFEEKVEQGGERWSKPHVATLSLHSLFELRTCMEKGSIMLDREASSLPQLVEMIVDHQIETGLLKPELKDKVTYTLLRKHRHQTKKSNLRSLADIGKTVSSASRMFTNPDNGSPAMTHRNLTSSSLNDISDKPEKDQLKNKFMKKLPRDAEASNVLVGEVDFLDTPFIAFVRLQQAVMLGALTEVPVPTRFLFILLGPKGKAKSYHEIGRAIATLMSDEVFHDIAYKAKDRHDLIAGIDEFLDEVIVLPPGEWDPAIRIEPPKSLPSSDKRKNMYSGGENVQMNGDTPHDGGHGGGGHGDCEELQRTGRFCGGLIKDIKRKAPFFASDFYDALNIQALSAILFIYLATVTNAITFGGLLGDATDNMQGVLESFLGTAVSGAIFCLFAGQPLTILSSTGPVLVFERLLFNFSKDNNFDYLEFRLWIGLWSAFLCLILVATDASFLVQYFTRFTEEGFSSLISFIFIYDAFKKMIKLADYYPINSNFKVGYNTLFSCTCVPPDPANISISNDTTLAPEYLPTMSSTDMYHNTTFDWAFLSKKECSKYGGNLVGNNCNFVPDITLMSFILFLGTYTSSMALKKFKTSPYFPTTARKLISDFAIILSILIFCVIDALVGVDTPKLIVPSEFKPTSPNRGWFVPPFGENPWWVCLAAAIPALLVTILIFMDQQITAVIVNRKEHKLKKGAGYHLDLFWVAILMVICSLMALPWYVAATVISIAHIDSLKMETETSAPGEQPKFLGVREQRVTGTLVFILTGLSVFMAPILKFIPMPVLYGVFLYMGVASLNGVQFMDRLKLLLMPLKHQPDFIYLRHVPLRRVHLFTFLQVLCLALLWILKSTVAAIIFPVMILALVAVRKGMDYLFSQHDLSFLDDVIPEKDKKKKEDEKKKKKKKGSLDSDNDDSDCPYSEKVPSIKIPMDIMEQQPFLSDSKPSDRERSPTFLERHTSC

SEQ ID NO: 36962 - protein, 1035 aa, Homo sapiens
MSTENVEGKPSNLGERGRARSSTFLRVVQPMFNHSIFTSAVSPAAERIRFILGEEDDSPAPPQLFTELDELLAVDGQEMEWKETARWIKFEEKVEQGGERWSKPHVATLSLHSLFELRTCMEKGSIMLDREASSLPQLVEMIVDHQIETGLLKPELKDKVTYTLLRKHRHQTKKSNLRSLADIGKTVSSASRMFTNPDNGSPAMTHRNLTSSSLNDISDKPEKDQLKNKFMKKLPRDAEASNVLVGEVDFLDTPFIAFVRLQQAVMLGALTEVPVPTRFLFILLGPKGKAKSYHEIGRAIATLMSDEVFHDIAYKAKDRHDLIAGIDEFLDEVIVLPPGEWDPAIRIEPPKSLPSSDKRKNMYSGGENVQMNGDTPHDGGHGGGGHGDCEELQRTGRFCGGLIKDIKRKAPFFASDFYDALNIQALSAILFIYLATVTNAITFGGLLGDATDNMQGVLESFLGTAVSGAIFCLFAGQPLTILSSTGPVLVFERLLFNFSKDNNFDYLEFRLWIGLWSAFLCLILVATDASFLVQYFTRFTEEGFSSLISFIFIYDAFKKMIKLADYYPINSNFKVGYNTLFSCTCVPPDPANISISNDTTLAPEYLPTMSSTDMYHNTTFDWAFLSKKECSKYGGNLVGNNCNFVPDITLMSFILFLGTYTSSMALKKFKTSPYFPTTARKLISDFAIILSILIFCVIDALVGVDTPKLIVPSEFKPTSPNRGWFVPPFGENPWWVCLAAAIPALLVTILIFMDQQITAVIVNRKEHKLKKGAGYHLDLFWVAILMVICSLMALPWYVAATVISIAHIDSLKMETETSAPGEQPKFLGVREQRVTGTLVFILTGLSVFMAPILKFIPMPVLYGVFLYMGVASLNGVQFMDRLKLLLMPLKHQPDFIYLRHVPLRRVHLFTFLQVLCLALLWILKSTVAAIIFPVMILALVAVRKGMDYLFSQHDLSFLDDVIPEKDKKKKEDEKKKKKKKGSLDSDNDDSDCPYSEKVPSIKIPMDIMEQQPFLSDSKPSDRERSPTFLERHTSC

SEQ ID NO: 36963 - protein, 646 aa, Homo sapiens
MSTENVEGKPSNLGERGRARSSTFLRVVQPMFNHSIFTSAVSPAAERIRFILGEEDDSPAPPQLFTELDELLAVDGQEMEWKETARWIKFEEKVEQGGERWSKPHVATLSLHSLFELRTCMEKGSIMLDREASSLPQLVEMIVDHQIETGLLKPELKDKVTYTLLRKHRHQTKKSNLRSLADIGKTVSSASRMFTNPDNGSPAMTHRNLTSSSLNDISDKPEKDQLKNKFMKKLPRDAEASNVLVGEVDFLDTPFIAFVRLQQAVMLGALTEVPVPTRFLFILLGPKGKAKSYHEIGRAIATLMSDEVFHDIAYKAKDRHDLIAGIDEFLDEVIVLPPGEWDPAIRIEPPKSLPSSDKRKNMYSGGENVQMNGDTPHDGGHGGGGHGDCEELQRTGRFCGGLIKDIKRKAPFFASDFYDALNIQALSAILFIYLATVTNAITFGGLLGDATDNMQGVLESFLGTAVSGAIFCLFAGQPLTILSSTGPVLVFERLLFNFSKDNNFDYLEFRLWIGLWSAFLCLILVATDASFLVQYFTRFTEEGFSSLISFIFIYDAFKKMIKLADYYPINSNFKVGYNTLFSCTCVPPDPGEGITLCVYARFVFGGRCRLHACKFSTCCHGPQELVLFFSLKNSATEFDVSLPEVF

SEQ ID NO: 36964 - protein, 995 aa, Homo sapiens
MEDEAVLDRGASFLKHVCDEEEVEGHHTIYIGVHVPKSYRRRRRHKRKTGHKEKKEKERISENYSDKSDIENADESSSSILKPLISPAAERIRFILGEEDDSPAPPQLFTELDELLAVDGQEMEWKETARWIKFEEKVEQGGERWSKPHVATLSLHSLFELRTCMEKGSIMLDREASSLPQLVEMIVDHQIETGLLKPELKDKVTYTLLRKHRHQTKKSNLRSLADIGKTVSSASRMFTNPDNGSPAMTHRNLTSSSLNDISDKPEKDQLKNKFMKKLPRDAEASNVLVGEVDFLDTPFIAFVRLQQAVMLGALTEVPVPTRFLFILLGPKGKAKSYHEIGRAIATLMSDEVFHDIAYKAKDRHDLIAGIDEFLDEVIVLPPGEWDPAIRIEPPKSLPSSDKRKNMYSGGENVQMNGDTPHDGGHGGGGHGDCEELQRTGRFCGGLIKDIKRKAPFFASDFYDALNIQALSAILFIYLATVTNAITFGGLLGDATDNMQGVLESFLGTAVSGAIFCLFAGQPLTILSSTGPVLVFERLLFNFSKDNNFDYLEFRLWIGLWSAFLCLILVATDASFLVQYFTRFTEEGFSSLISFIFIYDAFKKMIKLADYYPINSNFKVGYNTLFSCTCVPPDPANISISNDTTLAPEYLPTMSSTDMYHNTTFDWAFLSKKECSKYGGNLVGNNCNFVPDITLMSFILFLGTYTSSMALKKFKTSPYFPTTARKLISDFAIILSILIFCVIDALVGVDTPKLIVPSEFKPTSPNRGWFVPPFGENPWWVCLAAAIPALLVTILIFMDQQITAVIVNRKEHKLKFIPMPVLYGVFLYMGVASLNGVQFMDRLKLLLMPLKHQPDFIYLRHVPLRRVHLFTFLQVLCLALLWILKSTVAAIIFPVMILALVAVRKGMDYLFSQHDLSFLDDVIPEKDKKKKEDEKKKKKKKGSLDSDNDDSDCPYSEKVPSIKIPMDIMEQQPFLSDSKPSDRERSPTFLERHTSC

SEQ ID NO: 36965 - protein, 1094 aa, Homo sapiens
MEDEAVLDRGASFLKHVCDEEEVEGHHTIYIGVHVPKSYRRRRRHKRKTGHKEKKEKERISENYSDKSDIENADESSSSILKPLISPAAERIRFILGEEDDSPAPPQLFTELDELLAVDGQEMEWKETARWIKFEEKVEQGGERWSKPHVATLSLHSLFELRTCMEKGSIMLDREASSLPQLVEMIVDHQIETGLLKPELKDKVTYTLLRKHRHQTKKSNLRSLADIGKTVSSASRMFTNPDNGSPAMTHRNLTSSSLNDISDKPEKDQLKNKFMKKLPRDAEASNVLVGEVDFLDTPFIAFVRLQQAVMLGALTEVPVPTRFLFILLGPKGKAKSYHEIGRAIATLMSDEVFHDIAYKAKDRHDLIAGIDEFLDEVIVLPPGEWDPAIRIEPPKSLPSSDKRKNMYSGGENVQMNGDTPHDGGHGGGGHGDCEELQRTGRFCGGLIKDIKRKAPFFASDFYDALNIQALSAILFIYLATVTNAITFGGLLGDATDNMQGVLESFLGTAVSGAIFCLFAGQPLTILSSTGPVLVFERLLFNFSKDNNFDYLEFRLWIGLWSAFLCLILVATDASFLVQYFTRFTEEGFSSLISFIFIYDAFKKMIKLADYYPINSNFKVGYNTLFSCTCVPPDPANISISNDTTLAPEYLPTMSSTDMYHNTTFDWAFLSKKECSKYGGNLVGNNCNFVPDITLMSFILFLGTYTSSMALKKFKTSPYFPTTARKLISDFAIILSILIFCVIDALVGVDTPKLIVPSEFKPTSPNRGWFVPPFGENPWWVCLAAAIPALLVTILIFMDQQITAVIVNRKEHKLKKGAGYHLDLFWVAILMVICSLMALPWYVAATVISIAHIDSLKMETETSAPGEQPKFLGVREQRVTGTLVFILTGLSVFMAPILKFIPMPVLYGVFLYMGVASLNGVQFMDRLKLLLMPLKHQPDFIYLRHVPLRRVHLFTFLQVLCLALLWILKSTVAAIIFPVMILALVAVRKGMDYLFSQHDLSFLDDVIPEKDKKKKEDEKKKKKKKGSLDSDNDDEKDHQHSLNATHHADKIPFLQSLGMPSPPRTPVKVVPQIRIELEPEDNDYFWRSKGTETTL

SEQ ID NO: 36966 - protein, 526 aa, Homo sapiens
MEPEPEPAAVEVPAGRVLSARELFAARSRSQKLPQRSHGPKDFLPDGSAAQAERLRRCREELWQLLAEQRVERLGSLVAAEWRPEEGFVELKSPAGKFWQTMGFSEQGRQRLHPEEALYLLECGSIHLFHQDLPLSIQEAYQLLLTDHTVTFLQYQVFSHLKRLGYVVRRFQPSSVLSPYERQLNLDASVQHLEDGDGKRKRSSSSPRSINKKAKALDNSLQPKSLAASSPPPCSQPSQCPEEKPQESSPMKGPGGPFQLLGSLGPSPGPAREGVGCSWESGRAENGVTGAGKRRWNFEQISFPNMASDSRHTLLRAPAPELLPANVAGRETDAESWCQKLNQRKEKLSRREREHHAEAAQFQEDVNADPEVQRCSSWREYKELLQRRQVQRSQRRAPHLWGQPVTPLLSPGQASSPAVVLQHISVLQTTHLPDGGARLLEKSGGLEIIFDVYQADAVATFRKNNPGKPYARMCISGFDEPVPDLCSLKRLSYQSGDVPLIFALVDHGDISFYSFRDFTLPQDVGH

SEQ ID NO: 36967 - protein, 177 aa, Homo sapiens
MEPEPEPAAVEVPAGRVLSARELFAARSRSQKLPQRSHGPKDFLPDGSAAQAERLRRCREELWQLLAEQRVERLGSLVAAEWRPEEGFVELKSPAGKFWQTMGFSEQGRQRLHPEEALYLLECGSIHLFHQDLPLSIQEAYQLLLTDHTVTFLQYQPPEEVGLCGSTIPTKLCPVPV

SEQ ID NO: 36968 - protein, 495 aa, Homo sapiens
MENKAMYLHTVSDCDTSSICEDSFDGRSLSKLNLCEDGPCHKRRASICCTQLGSLSALKHAVLGLYLLVFLILVGIFILAVSRPRSSPDDLKALTRNVNRLNESFRDLQLRLLQAPLQADLTEQVWKVQDALQNQSDSLLALAGAVQRLEGALWGLQAQAVQTEQAVALLRDRTGQQSDTAQLELYQLQVESNSSQLLLRRHAGLLDGLARRVGILGEELADVGGVLRGLNHSLSYDVALHRTRLQDLRVLVSNASEDTRRLRLAHVGMELQLKQELAMLNAVTEDLRLKDWEHSIALRNISLAKGPPGPKGDQGDEGKEGRPGIPGLPGLRGLPGERGTPGLPGPKGDDGKLGATGPMGMRGFKGDRGPKGEKGEKGDRAGDASGVEAPMMIRLVNGSGPHEGRVEVYHDRRWGTVCDDGWDKKDGDVVCRMLGFRGVEEVYRTARFGQGTGRIWMDDVACKGTEETIFRCSFSKWGVTNCGHAEDASVTCNRH

SEQ ID NO: 36969 - protein, 400 aa, Homo sapiens
MENKAMYLHTVSDCDTSSICEDSFDGRSLSKLNLCEDGPCHKRRASICCTQLGSLSALKHAVLGLYLLVFLILVGIFILAVSRPRSSPDDLKALTRNVNRLNESFRDLQLRLLQAPLQADLTEQVWKVQDALQNQSDSLLALAGAVQRLEGALWGLQAQAVQTEQAVALLRDRTGQQSDTAQLELYQLQVESNSSQLLLRRHAGLLDGLARRVGILGEELADVGGVLRGLNHSLSYDVALHRTRLQDLRVLVSNASEDTRRLRLAHVGMELQLKQELAMLNAVTEDLRLKDWEHSIALRNISLAKGPPGPKGDQGDEGKEGRPGIPGLPGLRGLPGERGTPGLPGPKGDDGKLGATGPMGMRGFKGDRGPKGEKGEKGDRAGDASKDILLGPWDMVLAQG

SEQ ID NO: 36970 - protein, 357 aa, Homo sapiens
MENKAMYLHTVSDCDTSSICEDSFDGRSLSKLNLCEDVSRPRSSPDDLKALTRNVNRLNESFRDLQLRLLQAPLQADLTEQVWKVQDALQNQSDSLLALAGAVQRLEGALWGLQAQAVQTEQAVALLRDRTGQQSDTAQLELYQLQVESNSSQLLLRRHAGLLDGLARRVGILGEELADVGGVLRGLNHSLSYDVALHRTRLQDLRVLVSNASEDTRRLRLAHVGMELQLKQELAMLNAVTEDLRLKDWEHSIALRNISLAKGPPGPKGDQGDEGKEGRPGIPGLPGLRGLPGERGTPGLPGPKGDDGKLGATGPMGMRGFKGDRGPKGEKGEKGDRAGDASKDILLGPWDMVLAQG

SEQ ID NO: 36971 - protein, 270 aa, Homo sapiens
MENKAMYLHTVSDCDTSSICEDSFDGRSLSKLNLCEDGPCHKRRASICCTQLGSLSALKHAVLGLYLLVFLILVGIFILAGPPGPKGDQGDEGKEGRPGIPGLPGLRGLPGERGTPGLPGPKGDDGKLGATGPMGMRGFKGDRGPKGEKGEKGDRAGDASGVEAPMMIRLVNGSGPHEGRVEVYHDRRWGTVCDDGWDKKDGDVVCRMLGFRGVEEVYRTARFGQGTGRIWMDDVACKGTEETIFRCSFSKWGVTNCGHAEDASVTCNRH

SEQ ID NO: 36972 - protein, 675 aa, Homo sapiens
MESGTSSPQPPQLDPLDAFPQKGLEPGDIAVLVLYFLFVLAVGLWSTVKTKRDTVKGYFLAGGDMVWWPVGASLFASNVGSGHFIGLAGSGAATGISVSAYELNGLFSVLMLAWIFLPIYIAGQVTTMPEYLRKRFGGIRIPIILAVLYLFIYIFTKISVDMYAGAIFIQQSLHLDLYLAIVGLLAITAVYTVAGGLAAVIYTDALQTLIMLIGALTLMGYSFAAVGGMEGLKEKYFLALASNRSENSSCGLPREDAFHIFRDPLTSDLPWPGVLFGMSIPSLWYWCTDQVIVQRTLAAKNLSHAKGGALMAAYLKVLPLFIMVFPGMVSRILFPDQVACADPEICQKICSNPSGCSDIAYPKLVLELLPTGLRGLMMAVMVAALMSSLTSIFNSASTIFTMDLWNHLRPRASEKELMIVGRVFVLLLVLVSILWIPVVQASQGGQLFIYIQSISSYLQPPVAVVFIMGCFWKRTNEKGAFWGLISGLLLGLVRLVLDFIYVQPRCDQPDERPVLVKSIHYLYFSMILSTVTLITVSTVSWFTEPPSKEMVSHLTWFTRHDPVVQKEQAPPAAPLSLTLSQNGMPEASSSSSVQFEMVQENTSKTHSCDMTPKQSKVVKAILWLCGIQEKGKEELPARAEAIIVSLEENPLVKTLLDVNLIFCVSCAIFIWGYFA

SEQ ID NO: 36973 - protein, 640 aa, Homo sapiens
MESGTSSPQPPQLDPLDAFPQKGLEPGDIAVLVLYFLFVLAVGLWSTVKTKRDTVKGYFLAGGDMVWWPVGASLFASNVGSGHFIGLAGSGAATGISVSAYELNGLFSVLMLAWIFLPIYIAGQVDMYAGAIFIQQSLHLDLYLAIVGLLAITAVYTVAGGLAAVIYTDALQTLIMLIGALTLMGYSFAAVGGMEGLKEKYFLALASNRSENSSCGLPREDAFHIFRDPLTSDLPWPGVLFGMSIPSLWYWCTDQVIVQRTLAAKNLSHAKGGALMAAYLKVLPLFIMVFPGMVSRILFPDQVACADPEICQKICSNPSGCSDIAYPKLVLELLPTGLRGLMMAVMVAALMSSLTSIFNSASTIFTMDLWNHLRPRASEKELMIVGRVFVLLLVLVSILWIPVVQASQGGQLFIYIQSISSYLQPPVAVVFIMGCFWKRTNEKGAFWGLISGLLLGLVRLVLDFIYVQPRCDQPDERPVLVKSIHYLYFSMILSTVTLITVSTVSWFTEPPSKEMVSHLTWFTRHDPVVQKEQAPPAAPLSLTLSQNGMPEASSSSSVQFEMVQENTSKTHSCDMTPKQSKVVKAILWLCGIQEKGKEELPARAEAIIVSLEENPLVKTLLDVNLIFCVSCAIFIWGYFA

SEQ ID NO: 36974 - protein, 611 aa, Homo sapiens
MVWWPVGASLFASNVGSGHFIGLAGSGAATGISVSAYELNGLFSVLMLAWIFLPIYIAGQVTTMPEYLRKRFGGIRIPIILAVLYLFIYIFTKISVDMYAGAIFIQQSLHLDLYLAIVGLLAITAVYTVAGGLAAVIYTDALQTLIMLIGALTLMGYSFAAVGGMEGLKEKYFLALASNRSENSSCGLPREDAFHIFRDPLTSDLPWPGVLFGMSIPSLWYWCTDQVIVQRTLAAKNLSHAKGGALMAAYLKVLPLFIMVFPGMVSRILFPDQVACADPEICQKICSNPSGCSDIAYPKLVLELLPTGLRGLMMAVMVAALMSSLTSIFNSASTIFTMDLWNHLRPRASEKELMIVGRVFVLLLVLVSILWIPVVQASQGGQLFIYIQSISSYLQPPVAVVFIMGCFWKRTNEKGAFWGLISGLLLGLVRLVLDFIYVQPRCDQPDERPVLVKSIHYLYFSMILSTVTLITVSTVSWFTEPPSKEMVSHLTWFTRHDPVVQKEQAPPAAPLSLTLSQNGMPEASSSSSVQFEMVQENTSKTHSCDMTPKQSKVVKAILWLCGIQEKGKEELPARAEAIIVSLEENPLVKTLLDVNLIFCVSCAIFIWGYFA

SEQ ID NO: 36975 - protein, 742 aa, Homo sapiens
MESGTSSPQPPQLDPLDAFPQKGLEPGDIAVLVLYFLFVLAVGLWVGSPSVAQGTRTQWWQSWLTPASTSWAQVILSPRLPDTEEVLSTRNRLSPDTKPLGALILNFQVSRISTVKTKRDTVKGYFLAGGDMVWWPVGASLFASNVGSGHFIGLAGSGAATGISVSAYELNGLFSVLMLAWIFLPIYIAGQVTTMPEYLRKRFGGIRIPIILAVLYLFIYIFTKISVDMYAGAIFIQQSLHLDLYLAIVGLLAITAVYTVAGGLAAVIYTDALQTLIMLIGALTLMGYSFAAVGGMEGLKEKYFLALASNRSENSSCGLPREDAFHIFRDPLTSDLPWPGVLFGMSIPSLWYWCTDQVIVQRTLAAKNLSHAKGGALMAAYLKVLPLFIMVFPGMVSRILFPDQVACADPEICQKICSNPSGCSDIAYPKLVLELLPTGLRGLMMAVMVAALMSSLTSIFNSASTIFTMDLWNHLRPRASEKELMIVGRVFVLLLVLVSILWIPVVQASQGGQLFIYIQSISSYLQPPVAVVFIMGCFWKRTNEKGAFWGLISGLLLGLVRLVLDFIYVQPRCDQPDERPVLVKSIHYLYFSMILSTVTLITVSTVSWFTEPPSKEMVSHLTWFTRHDPVVQKEQAPPAAPLSLTLSQNGMPEASSSSSVQFEMVQENTSKTHSCDMTPKQSKVVKAILWLCGIQEKGKEELPARAEAIIVSLEENPLVKTLLDVNLIFCVSCAIFIWGYFA

SEQ ID NO: 36976 - protein, 605 aa, Homo sapiens
MESGTSSPQPPQLDPLDAFPQKGLEPGDIAVLVLYFLFVLAVGLWSTVKTKRDTVKGYFLAGGDMVWWPGLFSVLMLAWIFLPIYIAGQVDMYAGAIFIQQSLHLDLYLAIVGLLAITAVYTVAGGLAAVIYTDALQTLIMLIGALTLMGYSFAAVGGMEGLKEKYFLALASNRSENSSCGLPREDAFHIFRDPLTSDLPWPGVLFGMSIPSLWYWCTDQVIVQRTLAAKNLSHAKGGALMAAYLKVLPLFIMVFPGMVSRILFPDQVACADPEICQKICSNPSGCSDIAYPKLVLELLPTGLRGLMMAVMVAALMSSLTSIFNSASTIFTMDLWNHLRPRASEKELMIVGRVFVLLLVLVSILWIPVVQASQGGQLFIYIQSISSYLQPPVAVVFIMGCFWKRTNEKGAFWGLISGLLLGLVRLVLDFIYVQPRCDQPDERPVLVKSIHYLYFSMILSTVTLITVSTVSWFTEPPSKEMVSHLTWFTRHDPVVQKEQAPPAAPLSLTLSQNGMPEASSSSSVQFEMVQENTSKTHSCDMTPKQSKVVKAILWLCGIQEKGKEELPARAEAIIVSLEENPLVKTLLDVNLIFCVSCAIFIWGYFA

SEQ ID NO: 36977 - protein, 519 aa, Homo sapiens
MVWWPVGASLFASNVGSGHFIGLAGSGAATGISVSAYELNGLFSVLMLAWIFLPIYIAGQVTTMPEYLRKRFGGIRIPIILAVLYLFIYIFTKISVDMYAGAIFIQQSLHLDLYLAIVGLLAITAVYTVAGGLAAVIYTDALQTLIMLIGALTLMGYSDCPADSGCQEPVPCQRRCSDGCIPEGAAPLHNGVPWDGQPHPLPRSSGLCRSRDLPEDLQQPLRLFGHRVSQTRAGTPAHSASTIFTMDLWNHLRPRASEKELMIVGRVFVLLLVLVSILWIPVVQASQGGQLFIYIQSISSYLQPPVAVVFIMGCFWKRTNEKGAFWGLISGLLLGLVRLVLDFIYVQPRCDQPDERPVLVKSIHYLYFSMILSTVTLITVSTVSWFTEPPSKEMVSHLTWFTRHDPVVQKEQAPPAAPLSLTLSQNGMPEASSSSSVQFEMVQENTSKTHSCDMTPKQSKVVKAILWLCGIQEKGKEELPARAEAIIVSLEENPLVKTLLDVNLIFCVSCAIFIWGYFA

SEQ ID NO: 36978 - protein, 248 aa, Homo sapiens
MQTCPLAFPGHVSQALGTLLFLAASLSAQNEGWDSPICTEGVVSVSWGENTVMSCNISNAFSHVNIKLRAHGQESAIFNEVAPGYFSRDGWQLQVQGGVAQLVIKGARDSHAGLYMWHLVGHQRNNRQVTLEVSGAEPQSAPDTGFWPVPAVVTAVFILLVALVMFAWYRCRCSQQRREKKFFLLEPQMKVAALRAGAQQGLSRASAELWTPDSEPTPRPLALVFKPSPLGALELLSPQPLFPYAADP

SEQ ID NO: 36979 - protein, 151 aa, Homo sapiens
MFQVFKPHAGEDYKYPRETETIWSHPYVVEGSHKSPLESLSLHGCLAAMAPSITSSEDSSPSQRDKKDLSLDLLLTRKKRSQGLHWSHWQGLNHMSIRIHTPEQGSPSLGQNWSWGNRKEKGVAQRQVPTTGTHSFFHCTSEGNKEKPHHF

SEQ ID NO: 36980 - protein, 153 aa, Homo sapiens
MAVESRVTQEEIKKEPEKPIDREKTCPLLLRVFTTNNGRHHRMDEFSRGNVPSSELQIYTWMDATLKELTSLVKEVYPEARKKGTHFNFAIVFTDVKRPGYRVKEIGSTMSGRKGTDDSMTLQSQKFQIGDYLDIAITPPNRAPPPSGRMRPY

SEQ ID NO: 36981 - protein, 172 aa, Homo sapiens
MLAAGVGGQGERLAGRRRKMAVESRVTQEEIKKEPEKPIDREKTCPLLLRVFTTNNGRHHRMDEFSRGNVPSSELQIYTWMDATLKELTSLVKEVYPEARKKGTHFNFAIVFTDVKRPGYRVKEIGSTMSGRKGTDDSMTLQSQKFQIGDYLDIAITPPNRAPPPSGRMRPY

SEQ ID NO: 36982 - protein, 618 aa, Homo sapiens
MEVKNFAVWDYVVFAALFFISSGIGVFFAIKERKKATSREFLVGGRQMSFGPVGLSLTASFMSAVTVLGTPSEVYRFGASFLVFFIAYLFVILLTSELFLPVFYRSGITSTYEYLQLRFNKPVRYAATVIYIVQTILYTGVVVYAPALALNQVTGFDLWGSVFATGIVCTFYCTLGGLKAVVWTDAFQMVVMIVGFLTVLIQGSTHAGGFHNVLEQSTNGSRLHIFDFDVDPLRRHTFWTITVGGTFTWLGIYGVNQSTIQRCISCKTEKHAKLALYFNLLGLWIILVCAVFSGLIMYSHFKDCDPWTSGIISAPDQLMPYFVMEIFATMPGLPGLFVACAFSGTLSTVASSINALATVTFEDFVKSCFPHLSDKLSTWISKGLCLLFGVMCTSMAVAASVMGGVVQASLSIHGMCGGPMLGLFSLGIVFPFVNWKGALGGLLTGITLSFWVAIGAFIYPAPASKTWPLPLSTDQCIKSNVTATGPPVLSSRPGIADTWYSISYLYYSAVGCLGCIVAGVIISLITGRQRGEDIQPLLIRPVCNLFCFWSKKYKTLCWCGVQHDSGTEQENLENGSARKQGAESVLQNGLRRESLVHVPGYDPKDKSYNNMAFETTHF

SEQ ID NO: 36983 - protein, 396 aa, Homo sapiens
MEVKNFAVWDYVVFAALFFISSGIGVFFAIKERKKATSREFLVGGRQMSFGPVGLSLTASFMSAVTVLGTPSEVYRFGASFLVFFIAYLFVILLTSELFLPVFYRSGITSTYEYLQLRFNKPVRYAATVIYIVQTILYTGVVVYAPALALNQVTGFDLWGSVFATGIVCTFYCTLGGLKAVVWTDAFQMVVMIVGFLTVLIQGSTHAGGFHNVLEQSTNGSRLHIFDFDVDPLRRHTFWTITVGGTFTWLGIYGVNQSTIQRCISCKTEKHAKLALYFNLLGLWIILVCAVFSGLIMYSHFKDCDPWTSGIISAPDQLMPYFVMEIFATMPGLPGLFVACAFSGTLSTVASSINALATVTFEDFVKSCFPHLSDKLSTWISKGLCRYSWWTFYSIS

SEQ ID NO: 36984 - protein, 199 aa, Homo sapiens
MTPLAPWDPKYEAKAGPRPVWGANCSSGASFSGRTLCHPSFWPLYEAASGRGLRPVAPATGHWNGQQAPPDAGFPVVCCEDVFLSDPLLPRGQRVPLYLSKAPQQMMGSLKLLPPPPIMSARVLPRPSPSRGPSTAWLSGPELIALTGLLQMSQGEPRPSSSAVGPPDHTSDPPSPCGSPSSSQGADLSLPQTPDTHCP

SEQ ID NO: 36985 - protein, 440 aa, Homo sapiens
MRPHLSPPLQQLLLPVLLACAAHSTGALPRLCDVLQVLWEEQDQCLQELSREQTGDLGTEQPVPGCEGMWDNISCWPSSVPGRMVEVECPRFLRMLTSRNGSLFRNCTQDGWSETFPRPNLACGVNVNDSSNEKRHSYLLKLKVMYTVGYSSSLVMLLVALGILCAFRRLHCTRNYIHMHLFVSFILRALSNFIKDAVLFSSDDVTYCDAHRAGCKLVMVLFQYCIMANYSWLLVEGLYLHTLLAISFFSERKYLQGFVAFGWGSPAIFVALWAIARHFLEDVGCWDINANASIWWIIRGPVILSILINFILFINILRILMRKLRTQETRGNEVSHYKRLARSTLLLIPLFGIHYIVFAFSPEDAMEIQLFFELALGSFQGLVVAVLYCFLNGEVQLEVQKKWQQWHLREFPLHPVASFSNSTKASHLEQSQGTCRTSII

SEQ ID NO: 36986 - protein, 574 aa, Homo sapiens
MKETIQGTGSWGPEPPGPGIPPAYSSPRRERLRWPPPPKPRLKSGGGFGPDPGSGTTVPARRLPVPRPSFDASASEEEEEEEEEEDEDEEEEVAAWRLPPRWSQLGTSQRPRPSRPTHRKTCSQRRRRAMRAFRMLLYSKSTSLTFHWKLWGRHRGRRRGLAHPKNHLSPQQGGATPQVPSPCCRFDSPRGPPPPRLGLLGALMAEDGVRGSPPVPSGPPMEEDGLRWTPKSPLDPDSGLLSCTLPNGFGGQSGPEGERSLAPPDASILISNVCSIGDHVAQELFQGSDLGMAEEAERPGEKAGQHSPLREEHVTCVQSILDEFLQTYGSLIPLSTDEVVEKLEDIFQQEFSTPSRKGLVLQLIQSYQRMPGNAMVRGFRVAYKRHVLTMDDLGTLYGQNWLNDQVMNMYGDLVMDTVPEKVHFFNSFFYDKLRTKGYDGVKRWTKNVDIFNKELLLIPIHLEVHWSLISVDVRRRTITYFDSQRTLNRRCPKHIAKYLQAEAVKKDRLDFHQGWKGYFKMNVARQNNDSDCGAFVLQYCKHLALSQPFSFTQQDMPKLRRQIYKELCHCKLTV

SEQ ID NO: 36987 - protein, 1093 aa, Homo sapiens
MPAAGSNEPDGVLSYQRPDEEAVVDQGGTSTILNIHYEKEELEGHRTLYVGVRMPLGRQSHRHHRTHGQKHRRRGRGKGASQGEEGLEALAHDTPSQRVQFILGTEEDEEHVPHELFTELDEICMKEGEDAEWKETARWLKFEEDVEDGGERWSKPYVATLSLHSLFELRSCLINGTVLLDMHANSIEEISDLILDQQELSSDLNDSMRVKVREALLKKHHHQNEKKRNNLIPIVRSFAEVGKKQSDPHLMDKHGQTVSPQSVPTTNLEVKNGVNCEHSPVDLSKVDLHFMKKIPTGAEASNVLVGEVDILDRPIVAFVRLSPAVLLSGLTEVPIPTRFLFILLGPVGKGQQYHEIGRSMATIMTDEIFHDVAYKAKERDDLLAGIDEFLDQVTVLPPGEWDPSIRIEPPKNVPSQEKRKMPGVPNGNVCHIEQEPHGGHSGPELQRTGRLFGGLVLDIKRKAPWYWSDYRDALSLQCLASFLFLYCACMSPVITFGGLLGEATEGRISAIESLFGASMTGIAYSLFAGQALTILGSTGPVLVFEKILFKFCKDYALSYLSLRACIGLWTAFLCIVLVATDASSLVCYITRFTEEAFASLICIIFIYEAIEKLIHLAETYPIHMHSQLDHLSLYYCRCTLPENPNNHTLQYWKDHNIVTAEVHWANLTVSECQEMHGEFMGSACGHHGPYTPDVLFWSCILFFTTFILSSTLKTFKTSRYFPTRVRSMVSDFAVFLTIFTMVIIDFLIGVPSPKLQVPSVFKPTRDDRGWIINPIGPNPWWTVIAAIIPALLCTILIFMDQQITAVIINRKEHKLKKGCGYHLDLLMVAIMLGVCSIMGLPWFVAATVLSITHVNSLKLESECSAPGEQPKFLGIREQRVTGLMIFVLMGCSVFMTAILKFIPMPVLYGVFLYMGVSSLQGIQFFDRLKLFGMPAKHQPDFIYLRHVPLRKVHLFTLIQLTCLVLLWVIKASPAAIVFPMMVLALVFVRKVMDLCFSKRELSWLDDLMPESKKKKLDDAKKKAKEEEEAEKMLEIGGDKFPLESRKLLSSPGKNISCRCDPSEINISDEMPKTTVWKALSMNSGNAKEKSLFN

SEQ ID NO: 36988 - protein, 1071 aa, Homo sapiens
MFNKNNSNKLRSTPRYRRGDPGYLNFTELGPLKPEQKDQWSQHRPDEEAVVDQGGTSTILNIHYEKEELEGHRTLYVGVRMPLGRQSHRHHRTHGQKHRRRGRGKGASQGEEGLEALAHDTPSQRVQFILGTEEDEEHVPHELFTELDEICMKEGEDAEWKETARWLKFEEDVEDGGERWSKPYVATLSLHSLFELRSCLINGTVLLDMHANSIEEISDLILDQQELSSDLNDSMRVKVREALLKKHHHQNEKKRNNLIPIVRSFAEVGKKQSDPHLMDKHGQTVSPQSVPTTNLEVKNGVNCEHSPVDLSKVDLHFMKKIPTGAEASNVLVGEVDILDRPIVAFVRLSPAVLLSGLTEVPIPTRFLFILLGPVGKGQQYHEIGRSMATIMTDEIFHDVAYKAKERDDLLAGIDEFLDQVTVLPPGEWDPSIRIEPPKNVPSQEKRKMPGVPNGNVCHIEQEPHGGHSGPELQRTGRLFGGLVLDIKRKAPWYWSDYRDALSLQCLASFLFLYCACMSPVITFGGLLGEATEGRISAIESLFGASMTGIAYSLFAGQALTILGSTGPVLVFEKILFKFCKDYALSYLSLRACIGLWTAFLCIVLVATDASSLVCYITRFTEEAFASLICIIFIYEAIEKLIHLAETYPIHMHSQLDHLSLYYCRCTLPENPNNHTLQYWKDHNIVTAEVHWANLTVSECQEMHGEFMGSACGHHGPYTPDVLFWSCILFFTTFILSSTLKTFKTSRYFPTRVRSMVSDFAVFLTIFTMVIIDFLIGVPSPKLQVPSVFKPTRDDRGWIINPIGPNPWWTVIAAIIPALLCTILIFMDQQITAVIINRKEHKLKKGCGYHLDLLMVAIMLGVCSIMGLPWFVAATVLSITHVNSLKLESECSAPGEQPKFLGIREQRVTGLMIFVLMGCSVFMTAILKFIPMPVLYGVFLYMGVSSLQGIQFFDRLKLFGMPAKHQPDFIYLRHVPLRKVHLFTLIQLTCLVLLWVIKASPAAIVFPMMVLALVFVRKVMDLCFSKRELSWLDDLMPESKKKKLDDAKKKAKEEEVIVLAPTVYLGASNYRT

SEQ ID NO: 36989 - protein, 1044 aa, Homo sapiens
MPAAGSNEPDGVLSYQRPDEEAVVDQGGTSTILNIHYEKEELEGHRTLYVGVRMPLGRQSHRHHRTHGQKHRRRGRGKGASQGEEGLEALAHDTPSQRVQFILGTEEDEEHVPHELFTELDEICMKEGEDAEWKETARWLKFEEDVEDGGERWSKPYVATLSLHSLFELRSCLINGTVLLDMHANSIEEISDLILDQQELSSDLNDSMRVKVREALLKKHHHQNEKKRNNLIPIVRSFAEVGKKQSDPHLMDKHGQTVSPQSVPTTNLEVKNGVNCEHSPVDLSKVDLHFMKKIPTGAEASNVLVGEVDILDRPIVAFVRLSPAVLLSGLTEVPIPTRFLFILLGPVGKGQQYHEIGRSMATIMTDEIFHDVAYKAKERDDLLAGIDEFLDQVTVLPPGEWDPSIRIEPPKNVPSQEKRKMPGVPNGNVCHIEQEPHGGHSGPELQRTGRLFGGLVLDIKRKAPWYWSDYRDALSLQCLASFLFLYCACMSPVITFGGLLGEATEGRISAIESLFGASMTGIAYSLFAGQALTILGSTGPVLVFEKILFKFCKDYALSYLSLRACIGLWTAFLCIVLVATDASSLVCYITRFTEEAFASLICIIFIYEAIEKLIHLAETYPIHMHSQLDHLSLYYCRCTLPENPNNHTLQYWKDHNIVTAEVHWANLTVSECQEMHGEFMGSACGHHGPYTPDVLFWSCILFFTTFILSSTLKTFKTSRYFPTRVRSMVSDFAVFLTIFTMVIIDFLIGVPSPKLQVPSVFKPTRDDRGWIINPIGPNPWWTVIAAIIPALLCTILIFMDQQITAVIINRKEHKLKKGCGYHLDLLMVAIMLGVCSIMGLPWFVAATVLSITHVNSLKLESECSAPGEQPKFLGIREQRVTGLMIFVLMGCSVFMTAILKFIPMPVLYGVFLYMGVSSLQGIQFFDRLKLFGMPAKHQPDFIYLRHVPLRKVHLFTLIQLTCLVLLWVIKASPAAIVFPMMVLALVFVRKVMDLCFSKRELSWLDDLMPESKKKKLDDAKKKAKEEEVIVLAPTVYLGASNYRT

SEQ ID NO: 36990 - protein, 991 aa, Homo sapiens
MPLGRQSHRHHRTHGQKHRRRGRGKGASQGEEGLEALAHDTPSQRVQFILGTEEDEEHVPHELFTELDEICMKEGEDAEWKETARWLKFEEDVEDGGERWSKPYVATLSLHSLFELRSCLINGTVLLDMHANSIEEISDLILDQQELSSDLNDSMRVKVREALLKKHHHQNEKKRNNLIPIVRSFAEVGKKQSDPHLMDKHGQTVSPQSVPTTNLEVKNGVNCEHSPVDLSKVDLHFMKKIPTGAEASNVLVGEVDILDRPIVAFVRLSPAVLLSGLTEVPIPTRFLFILLGPVGKGQQYHEIGRSMATIMTDEIFHDVAYKAKERDDLLAGIDEFLDQVTVLPPGEWDPSIRIEPPKNVPSQEKRKMPGVPNGNVCHIEQEPHGGHSGPELQRTGRLFGGLVLDIKRKAPWYWSDYRDALSLQCLASFLFLYCACMSPVITFGGLLGEATEGRISAIESLFGASMTGIAYSLFAGQALTILGSTGPVLVFEKILFKFCKDYALSYLSLRACIGLWTAFLCIVLVATDASSLVCYITRFTEEAFASLICIIFIYEAIEKLIHLAETYPIHMHSQLDHLSLYYCRCTLPENPNNHTLQYWKDHNIVTAEVHWANLTVSECQEMHGEFMGSACGHHGPYTPDVLFWSCILFFTTFILSSTLKTFKTSRYFPTRVRSMVSDFAVFLTIFTMVIIDFLIGVPSPKLQVPSVFKPTRDDRGWIINPIGPNPWWTVIAAIIPALLCTILIFMDQQITAVIINRKEHKLKKGCGYHLDLLMVAIMLGVCSIMGLPWFVAATVLSITHVNSLKLESECSAPGEQPKFLGIREQRVTGLMIFVLMGCSVFMTAILKFIPMPVLYGVFLYMGVSSLQGIQFFDRLKLFGMPAKHQPDFIYLRHVPLRKVHLFTLIQLTCLVLLWVIKASPAAIVFPMMVLALVFVRKVMDLCFSKRELSWLDDLMPESKKKKLDDAKKKAKEEEVIVLAPTVYLGASNYRT

SEQ ID NO: 36991 - protein, 1040 aa, Homo sapiens
MPLGRQSHRHHRTHGQKHRRRGRGKGASQGEEGLEALAHDTPSQRVQFILGTEEDEEHVPHELFTELDEICMKEGEDAEWKETARWLKFEEDVEDGGERWSKPYVATLSLHSLFELRSCLINGTVLLDMHANSIEEISDLILDQQELSSDLNDSMRVKVREALLKKHHHQNEKKRNNLIPIVRSFAEVGKKQSDPHLMDKHGQTVSPQSVPTTNLEVKNGVNCEHSPVDLSKVDLHFMKKIPTGAEASNVLVGEVDILDRPIVAFVRLSPAVLLSGLTEVPIPTRFLFILLGPVGKGQQYHEIGRSMATIMTDEIFHDVAYKAKERDDLLAGIDEFLDQVTVLPPGEWDPSIRIEPPKNVPSQEKRKMPGVPNGNVCHIEQEPHGGHSGPELQRTGRLFGGLVLDIKRKAPWYWSDYRDALSLQCLASFLFLYCACMSPVITFGGLLGEATEGRISAIESLFGASMTGIAYSLFAGQALTILGSTGPVLVFEKILFKFCKDYALSYLSLRACIGLWTAFLCIVLVATDASSLVCYITRFTEEAFASLICIIFIYEAIEKLIHLAETYPIHMHSQLDHLSLYYCRCTLPENPNNHTLQYWKDHNIVTAEVHWANLTVSECQEMHGEFMGSACGHHGPYTPDVLFWSCILFFTTFILSSTLKTFKTSRYFPTRVRSMVSDFAVFLTIFTMVIIDFLIGVPSPKLQVPSVFKPTRDDRGWIINPIGPNPWWTVIAAIIPALLCTILIFMDQQITAVIINRKEHKLKKGCGYHLDLLMVAIMLGVCSIMGLPWFVAATVLSITHVNSLKLESECSAPGEQPKFLGIREQRVTGLMIFVLMGCSVFMTAILKFIPMPVLYGVFLYMGVSSLQGIQFFDRLKLFGMPAKHQPDFIYLRHVPLRKVHLFTLIQLTCLVLLWVIKASPAAIVFPMMVLALVFVRKVMDLCFSKRELSWLDDLMPESKKKKLDDAKKKAKEEEEAEKMLEIGGDKFPLESRKLLSSPGKNISCRCDPSEINISDEMPKTTVWKALSMNSGNAKEKSLFN

SEQ ID NO: 36992 - protein, 691 aa, Homo sapiens
MPAAGSNEPDGVLSYQRPDEEAVVDQGGTSTILNIHYEKEELEGHRTLYVGVRMPLGRQSHRHHRTHGQKHRRRGRGKGASQGEEGLEALAHDTPSQRVQFILGTEEDEEHVPHELFTELDEICMKEGEDAEWKETARWLKFEEDVEDGGERWSKPYVATLSLHSLFELRSCLINGTVLLDMHANSIEEISDLILDQQELSSDLNDSMRVKVREALLKKHHHQNEKKRNNLIPIVRSFAEVGKKQSDPHLMDKHGQTVSPQSVPTTNLEVKNGVNCEHSPVDLSKVDLHFMKKIPTGAEASNVLVGEVDILDRPIVAFVRLSPAVLLSGLTEVPIPTRFLFILLGPVGKGQQYHEIGRSMATIMTDEIFHDVAYKAKERDDLLAGIDEFLDQVTVLPPGEWDPSIRIEPPKNVPSQEKRKMPGVPNGNVCHIEQEPHGGHSGPELQRTGRLFGGLVLDIKRKAPWYWSDYRDALSLQCLASFLFLYCACMSPVITFGGLLGEATEGRISAIESLFGASMTGIAYSLFAGQALTILGSTGPVLVFEKILFKFCKDYALSYLSLRACIGLWTAFLCIVLVATDASSLVCYITRFTEEAFASLICIIFIYEAIEKLIHLAETYPIHMHSQLDHLSLYYCRCTLPENPNNHTLQYWKDHNIVTAEVHWANLTVSVSLGAARCPSIVTTGLGGTSK

SEQ ID NO: 36993 - protein, 747 aa, Homo sapiens
MPLGRQSHRHHRTHGQKHRRRGRGKGASQGEEGLEALAHDTPSQRVQFILGTEEDEEHVPHELFTELDEICMKEGEDAEWKETARWLKFEEDVEDGGERWSKPYVATLSLHSLFELRSCLINGTVLLDMHANSIEEISDLILDQQELSSDLNDSMRVKVREALLKKHHHQNEKKRNNLIPIVRSFAEVGKKQSDPHLMDKHGQTVSPQSVPTTNLEVKNGVNCEHSPVDLSKVDLHFMKKIPTGAEASNVLVGEVDILDRPIVAFVRLSPAVLLSGLTEVPIPTRFLFILLGPVGKGQQYHEIGRSMATIMTDEIFHDVAYKAKERDDLLAGIDEFLDQVTVLPPGEWDPSIRIEPPKNVPSQEKRKMPGVPNGNVCHIEQEPHGGHSGPELQRTGRLFGGLVLDIKRKAPWYWSDYRDALSLQCLASFLFLYCACMSPVITFGGLLGEATEGRISAIESLFGASMTGIAYSLFAGQALTILGSTGPVLVFEKILFKFCKDYALSYLSLRACIGLWTAFLCIVLVATDASSLVCYITRFTEEAFASLICIIFIYEAIEKLIHLAETYPIHMHSQLDHLSLYYCRCTLPENPNNHTLQYWKDHNIVTAEVHWANLTVSECQEMHGEFMGSACGHHGPYTPDVLFWSCILFFTTFILSSTLKTFKTSRYFPTRMESCSVAWLECGGVILAHCNLRLLPSSWDYRHAPPQPANFCIFSRDGVSPCWPGWSQSLDLVICLPRPPKMLGLQA

SEQ ID NO: 36994 - protein, 638 aa, Homo sapiens
MPLGRQSHRHHRTHGQKHRRRGRGKGASQGEEGLEALAHDTPSQRVQFILGTEEDEEHVPHELFTELDEICMKEGEDAEWKETARWLKFEEDVEDGGERWSKPYVATLSLHSLFELRSCLINGTVLLDMHANSIEEISDLILDQQELSSDLNDSMRVKVREALLKKHHHQNEKKRNNLIPIVRSFAEVGKKQSDPHLMDKHGQTVSPQSVPTTNLEVKNGVNCEHSPVDLSKVDLHFMKKIPTGAEASNVLVGEVDILDRPIVAFVRLSPAVLLSGLTEVPIPTRFLFILLGPVGKGQQYHEIGRSMATIMTDEIFHDVAYKAKERDDLLAGIDEFLDQVTVLPPGEWDPSIRIEPPKNVPSQEKRKMPGVPNGNVCHIEQEPHGGHSGPELQRTGRLFGGLVLDIKRKAPWYWSDYRDALSLQCLASFLFLYCACMSPVITFGGLLGEATEGRISAIESLFGASMTGIAYSLFAGQALTILGSTGPVLVFEKILFKFCKDYALSYLSLRACIGLWTAFLCIVLVATDASSLVCYITRFTEEAFASLICIIFIYEAIEKLIHLAETYPIHMHSQLDHLSLYYCRCTLPENPNNHTLQYWKDHNIVTAEVHWANLTVSVSLGAARCPSIVTTGLGGTSK

SEQ ID NO: 36995 - protein, 96 aa, Homo sapiens
MPGPTPSGTNVGSSGRSPSKAVAARAAGSTVRQRKNASCGTRSAGRTTSAGTGGMWRFYTEDSPGLKVGPVPVLVMSLLFIASVFMLHIWGKYTRS

SEQ ID NO: 36996 - protein, 469 aa, Homo sapiens
MAFLMHLLVCVFGMGSWVTINGLWVELPLLVMELPEGWYLPSYLTVVIQLANIGPLLVTLLHHFRPSCLSEVPIIFTLLGVGTVTCIIFAFLWNMTSWVLDGHHSIAFLVLTFFLALVDCTSSVTFLPFMSRLPTYYLTTFFVGEGLSGLLPALVALAQGSGLTTCVNVTEISDSVPSPVPTRETDIAQGVPRALVSALPGMEAPLSHLESRYLPAHFSPLVFFLLLSIMMACCLVAFFVLQRQPRCWEASVEDLLNDQVTLHSIRPREENDLGPAGTVDSSQGQGYLEEKAAPCCPAHLAFIYTLVAFVNALTNGMLPSVQTYSCLSYGPVAYHLAATLSIVANPLASLVSMFLPNRSLLFLGVLSVLGTCFGGYNMAMAVMSPCPLLQGHWGGEVLIVASWVLFSGCLSYVKVMLGVVLRDLSRSALLWCGAAVQLGSLLGALLMFPLVNVLRLFSSADFCNLHCPA

SEQ ID NO: 36997 - protein, 415 aa, Homo sapiens
MAFLMHLLVCVFGMGSWVTINGLWVELPLLVMELPEGWYLPSYLTVVIQLANIGPLLVTLLHHFRPSCLSEVPIIFTLLGVGTVTCIIFAFLWNMTSWVLDGHHSIAFLVLTFFLALVDCTSSVTFLPFMSRLPTYYLTTFFVGEGLSGLLPALVALAQGSGLTTCVNVTEISDSVPSPVPTRETDIAQGVPRALVSALPGMEAPLSHLESRYLPAHFSPLVFFLLLSIMMACCLVAFFVLQRQPRCWEASVEDLLNDQVTLHSIRPREENDLGPAGTVDSSQGQGYLEEKAAPCCPAHLAFIYTLVAFVNALTNGMLPSVQTYSCLSYGPVAYHLAATLSIVANPLASLVSMFLPNRSLLFLGVLSVLGTCFGGYNMAMAVMSPCPLLQGHWGGEVLIVSIRPVGLLPLRTPHP

SEQ ID NO: 36998 - protein, 602 aa, Homo sapiens
MDSRVSGTTSNGETKPVYPVMEKKEEDGTLERGHWNNKMEFVLSVAGEIIGLGNVWRFPYLCYKNGGGAFFIPYLVFLFTCGIPVFLLETALGQYTSQGGVTAWRKICPIFEGIGYASQMIVILLNVYYIIVLAWALFYLFSSFTIDLPWGGCYHEWNTEHCMEFQKTNGSLNGTSENATSPVIEFWERRVLKISDGIQHLGALRWELALCLLLAWVICYFCIWKGVKSTGKVVYFTATFPYLMLVVLLIRGVTLPGAAQGIQFYLYPNLTRLWDPQVWMDAGTQIFFSFAICLGCLTALGSYNKYHNNCYRDCIALCFLNSGTSFVAGFAIFSILGFMSQEQGVPISEVAESGPGLAFIAYPRAVVMLPFSPLWACCFFFMVVLLGLDSQFVCVESLVTALVDMYPHVFRKKNRREVLILGVSVVSFLVGLIMLTEGGMYVFQLFDYYAASGMCLLFVAIFESLCVAWVYGAKRFYDNIEDMIGYRPWPLIKYCWLFLTPAVCTATFLFSLIKYTPLTYNKKYTYPWWGDALGWLLALSSMVCIPAWSLYRLGTLKGPFRERIRQLMCPAEDLPQRNPAGPSAPATPRTSLLRLTELESHC

SEQ ID NO: 36999 - protein, 510 aa, Homo sapiens
MDSRVSGTTSNGETKPVYPVMEKKEEDGTLERGHWNNKMEFVLSVAGEIIGLGNVWRFPYLCYKNGGEHCMEFQKTNGSLNGTSENATSPVIEFWERRVLKISDGIQHLGALRWELALCLLLAWVICYFCIWKGVKSTGKVVYFTATFPYLMLVVLLIRGVTLPGAAQGIQFYLYPNLTRLWDPQVWMDAGTQIFFSFAICLGCLTALGSYNKYHNNCYRDCIALCFLNSGTSFVAGFAIFSILGFMSQEQGVPISEVAESGPGLAFIAYPRAVVMLPFSPLWACCFFFMVVLLGLDSQFVCVESLVTALVDMYPHVFRKKNRREVLILGVSVVSFLVGLIMLTEGGMYVFQLFDYYAASGMCLLFVAIFESLCVAWVYGAKRFYDNIEDMIGYRPWPLIKYCWLFLTPAVCTATFLFSLIKYTPLTYNKKYTYPWWGDALGWLLALSSMVCIPAWSLYRLGTLKGPFRERIRQLMCPAEDLPQRNPAGPSAPATPRTSLLRLTELESHC

SEQ ID NO: 37000 - protein, 97 aa, Homo sapiens
MDSRVSGTTSNGETKPVYPVMEKKEEDGTLERGHWNNKMEFVLSVAGEIIGLGNVWRFPYLCYKNGGGEMRALVPPHPLLEGGYFHLLHLRPLWGVP

SEQ ID NO: 37001 - protein, 521 aa, Homo sapiens
MLCALLLLPSLLGATRASPTSGPQECAKGSTVWCQDLQTAARCGAVGYCQGAVWNKPTAKSLPCDVCQDIAAAAGNGLNPDATESDILALVMKTCEWLPSQESSAGCKWMVDAHSSAILSMLRGAPDSAPAQVCTALSLCEPLQRHLATLRPLSKEDTFEAVAPFMANGPLTFHPRQAPEGALCQDCVRQVSRLQEAVRSNLTLADLNIQEQCESLGPGLAVLCKNYLFQFFVPADQALRLLPPQELCRKGGFCEELGAPARLTQVVAMDGVPSLELGLPRKQSEMQMKAGVTCEVCMNVVQKLDHWLMSNSSELMITHALERVCSVMPASITKECIILVDTYSPSLVQLVAKITPEKVCKFIRLCGNRRRARAVHDAYAIVPSPEWDAENQGSFCNGCKRLLTVSSHNLESKSTKRDILVAFKGGCSILPLPYMIQCKHFVTQYEPVLIESLKDMMDPVAVCKKVGACHGPRTPLLGTDQCALGPSFWCRSQEAAKLCNAVQHCQKHVWKEMHLHAGEHA

SEQ ID NO: 37002 - protein, 642 aa, Homo sapiens
MDKLKCPSFFKCREKEKVSASSENFHVGENDENQDRGNWSKKSDYLLSMIGYAVGLGNVWRFPYLTYSNGGGAFLIPYAIMLALAGLPLFFLECSLGQFASLGPVSVWRILPLFQGVGITMVLISIFVTIYYNVIIAYSLYYMFASFQSELPWKNCSSWSDKNCSRSPIVTHCNVSTVNKGIQEIIQMNKSWVDINNFTCINGSEIYQPGQLPSEQYWNKVALQRSSGMNETGVIVWYLALCLLLAWLIVGAALFKGIKSSGKVVYFTALFPYVVLLILLVRGATLEGASKGISYYIGAQSNFTKLKEAEVWKDAATQIFYSLSVAWGGLVALSSYNKFKNNCFSDAIVVCLTNCLTSVFAGFAIFSILGHMAHISGKEVSQVVKSGFDLAFIAYPEALAQLPGGPFWSILFFFMLLTLGLDSQFASIETITTTIQDLFPKVMKKMRVPITLGCCLVLFLLGLVCVTQAGIYWVHLIDHFCAGWGILIAAILELVGIIWIYGGNRFIEDTEMMIGAKRWIFWLWWRACWFVITPILLIAIFIWSLVQFHRPNYGAIPYPDWGVALGWCMIVFCIIWIPIMAIIKIIQAKGNIFQRLISCCRPASNWGPYLEQHRGERYKDMVDPKKEADHEIPTVSGSRKPE

SEQ ID NO: 37003 - protein, 620 aa, Homo sapiens
MATKEKLQCLKDFHKDILKPSPGKSPGTRPEDEAEGKPPQREKWSSKIDFVLSVAGGFVGLGNVWRFPYLCYKNGGGAFLIPYFIFLFGSGLPVFFLEIIIGQYTSEGGITCWEKICPLFSGIGYASVVIVSLLNVYYIVILAWATYYLFQSFQKELPWAHCNHSWNTPHCMEDTMRKNKSVWITISSTNFTSPVIEFWERNVLSLSPGIDHPGSLKWDLALCLLLVWLVCFFCIWKGVRSTGKVVYFTATFPFAMLLVLLVRGLTLPGAGAGIKFYLYPDITRLEDPQVWIDAGTQIFFSYAICLGAMTSLGSYNKYKYNSYRDCMLLGCLNSGTSFVSGFAIFSILGFMAQEQGVDIADVAESGPGLAFIAYPKAVTMMPLPTFWSILFFIMLLLLGLDSQFVEVEGQITSLVDLYPSFLRKGYRREIFIAFVCSISYLLGLTMVTEGGMYVFQLFDYYAASGVCLLWVAFFECFVIAWIYGGDNLYDGIEDMIGYRPGPWMKYSWAVITPVLCVGCFIFSLVKYVPLTYNKTYVYPNWAIGLGWSLALSSMLCVPLVIVIRLCQTEGPFLVRVKYLLTPREPNRWAVEREGATPYNSRTVMNGALVKPTHIIVETMM

SEQ ID NO: 37004 - protein, 200 aa, Homo sapiens
MATKEKLQCLKDFHKDILKPSPGKSPGTRPEDEAEGKPPQREKWSSKIDFVLSVAGGFVGLGNVWRFPYLCYKNGGGAFLIPYFIFLFGSGLPVFFLEIIIGQYTSEGGITCWEKICPLFSGIGYASVVIVSLLNVYYIVILAWATYYLFQSFQKELPWAHCNHSWNTPHCMEDTMRKNKSVWITISSTNFTSPVIEFWE

SEQ ID NO: 37005 - protein, 145 aa, Homo sapiens
MDTFTVQDSTAMSWWRNNFWIILAVAIIVVSVGLGLILYCVCKWQLRRGKKWEIAKPLKHKQVDEEKMYENVLNESPVQLPPLPPRNWPSLEDSSPQEAPSQPPATYSLVNKVKNKKTVSIPSYIEPEDDYDDVEIPANTEKASF

SEQ ID NO: 37006 - protein, 123 aa, Homo sapiens
MDTFTVQDSTAMSWWRNNFWIILAVAIIVVSVGLGLILYCVCKKWEIAKPLKHKQVDEEKMYENVLNESPVQLPPLPPRNWPSLEDSYGVLLCHPGWSAMARSRLTASSASRVHAILLPQPPE

SEQ ID NO: 37007 - protein, 138 aa, Homo sapiens
MDTFTVQDSTAMSWWRNNFWIILAVAIIVVSVGLGLILYCVCKKWEIAKPLKHKQVDEEKMYENVLNESPVQLPPLPPRNWPSLEDSSPQEAPSQPPATYSLVNKVKNKKTVSIPSYIEPEDDYDDVEIPANTEKASF

SEQ ID NO: 37008 - protein, 122 aa, Homo sapiens
MKLLTGLVFCSLVLGVSSRSFFSFLGEAFDGARDMWRAYSDMREANYIGSDKYFHARGNYDAAKRGPGGVWAAEAISDARENIQRFFGHGAEDSLADQAANEWGRSGKDPNHFRPAGLPEKY

SEQ ID NO: 37009 - protein, 362 aa, Homo sapiens
MLKNKGHSSKKDNLAVNAVALQDHILHDLQLRNLSVADHSKTQVQKKENKSLKRDTKAIIDTGLKKTTQCPKLEDSEKEYVLDPKPPPLTLAQKLGLIGPPPPPLSSDEWEKVKQRSLLQGDSVQPCPICKEEFELRPQVLLSCSHVFHKACLQAFEKFTNKKTCPLCRKNQYQTRVIHDGARLFRIKCVTRIQAYWRGCVVRKWYRNLRKTVPPTDAKLRKKFFEKKFTEISHRILCSYNTNIEELFAEIDQCLAINRSVLQQLEEKCGHEITEEEWEKIQVQALRRETHECSICLAPLSAAGGQRVGAGRRSREMALLSCSHVFHHACLLALEEFSVGDRPPFHACPLCRSCYQKKILEC

SEQ ID NO: 37010 - protein, 338 aa, Homo sapiens
MLKNKGHSSKKDNLAVNAVALQDHILHDLQLRNLSVADHSKTQVQKKENKSLKRDTKAIIDTGLKKTTQCPKLEDSEKEYVLDPKPPPLTLAQKLGLIGPPPPPLSSDEWEKVKQRSLLQGDSVQPCPICKEEFELRPQVFSIRGKNQYQTRVIHDGARLFRIKCVTRIQAYWRGCVVRKWYRNLRKTVPPTDAKLRKKFFEKKFTEISHRILCSYNTNIEELFAEIDQCLAINRSVLQQLEEKCGHEITEEEWEKIQVQALRRETHECSICLAPLSAAGGQRVGAGRRSREMALLSCSHVFHHACLLALEEFSVGDRPPFHACPLCRSCYQKKILEC

SEQ ID NO: 37011 - protein, 235 aa, Homo sapiens
MLKNKGHSSKKDNLAVNAVALQDHILHDLQLRNLSVADHSKTQVQKKENKSLKRDTKAIIDTGLKKTTQCPKLEDSEKEYVLDPKPPPLTLAQKLGLIGPPPPPLSSDEWEKVKQRSLLQGDSVQPCPICKEEFELRPQVLLSCSHVFHKACLQAFEKFTNKKTCPLCRKNQYQTRVIHDGARLFRIKCVTRIQAYWRGCVVRKWYRNLRKTVPPTDAKLRKKFFEKKTQDWKPA

SEQ ID NO: 37012 - protein, 179 aa, Homo sapiens
MLKNKGHSSKKDNLAVNAVALQDHILHDLQLRNLSVADHSKTQVQKKENKSLKRDTKAIIDTGLKKTTQCPKLEDSEKEYVLDPKPPPLTLAQKLGLIGPPPPPLSSDEWEKVKQRSLLQGDSVQPCPICKEEFELRPQVLLSCSHVFHKACLQAFEKFTNKKTCPLCRSCYQKKILEC

SEQ ID NO: 37013 - protein, 95 aa, Homo sapiens
MLKNKGHSSKKDNLAVNAVALQDHILHDLQLRNLSVADHSKTQVQKKENKSLKRDTKAIIDTGLKKTTQCPKLEDSEKEYVLDPKPPPLTLGYHS

SEQ ID NO: 37014 - protein, 210 aa, Homo sapiens
MDDEEETYRLWKIRKTIMQLCHDRGYLVTQDELDQTLEEFKAQSGDKPSEGRPRRTDLTVLVAHNDDPTDQMFVFFPEEPKVGIKTIKVYCQRMQEENITRALIVVQQGMTPSAKQSLVDMAPKYILEQFLQQELLINITEHELVPEHVVMTKEEVTELLARYKLRENQLPRIQAGDPVARYFGIKRGQVVKIIRPSETAGRYITYRLVQ

SEQ ID NO: 37015 - protein, 391 aa, Homo sapiens
MDQCVTVERELEKVLHKFSGYGQLCERGLEELIDYTGGLKHEILQSHGQDAELSGTLSLVLTQCCKRIKDTVQKLASDHKDIHSSVSRVGKAIDKNFDSDISSVGIDGCWQADSQRLLNEVMVEHFFRQGMLDVAEELCQESGLSVDPSQKEPFVELNRILEALKVRVLRPALEWAVSNREMLIAQNSSLEFKLHRLYFISLLMGGTTNQREALQYAKNFQPFALNHQKDIQVLMGSLVYLRQGIENSPYVHLLDANQWADICDIFTRDACALLGLSVESPLSVSFSAGCVALPALINIKAVIEQRQCTGVWNQKDELPIEVDLGKKCWYHSIFACPILRQQTTDNNPPMKLVCGHIISRDALNKMFNGSKLKCPYCPMEQSPGDAKQIFF

SEQ ID NO: 37016 - protein, 98 aa, Homo sapiens
MDQCVTVERELEKVLHKFSGYGQLCERGLEELIDYTGGLKHEILQSHGQDAELSGTLSLVLTQCCKRIKDTVQKLASDHKDIHSSVSRVGKAIDKDSL

SEQ ID NO: 37017 - protein, 963 aa, Homo sapiens
MATAAETSASEPEAESKAGPKADGEEDEVKAARTRRKVLSRAVAAATYKTMGPAWDQQEEGVSESDGDEYAMASSAESSPGEYEWEYDEEEEKNQLEIERLEEQLSINVYDYNCHVDLIRLLRLEGELTKVRMARQKMSEIFPLTEELWLEWLHDEISMAQDGLDREHVYDLFEKAVKDYICPNIWLEYGQYSVGGIGQKGGLEKVRSVFERALSSVGLHMTKGLALWEAYREFESAIVEAARLEKVHSLFRRQLAIPLYDMEATFAEYEEWSEDPIPESVIQNYNKALQQLEKYKPYEEALLQAEAPRLAEYQAYIDFEMKIGDPARIQLIFERALVENCLVPDLWIRYSQYLDRQLKVKDLVLSVHNRAIRNCPWTVALWSRYLLAMERHGVDHQVISVTFEKALNAGFIQATDYVEIWQAYLDYLRRRVDFKQDSSKELEELRAAFTRALEYLKQEVEERFNESGDPSCVIMQNWARIEARLCNNMQKARELWDSIMTRGNAKYANMWLEYYNLERAHGDTQHCRKALHRAVQCTSDYPEHVCEVLLTMERTEGSLEDWDIAVQKTETRLARVNEQRMKAAEKEAALVQQEEEKAEQRKRARAEKKALKKKKKIRGPEKRGADEDDEKEWGDDEEEQPSKRRRVENSIPAAGETQNVEVAAGPAGKCAAVDVEPPSKQKEKAASLKRDMPKVLHDSSKDSITVFVSNLPYSMQEPDTKLRPLFEACGEVVQIRPIFSNRGDFRGYCYVEFKEEKSALQALEMDRKSVEGRPMFVSPCVDKSKNPDFKVFRYSTSLEKHKLFISGLPFSCTKEELEEICKAHGTVKDLRLVTNRAGKPKGLAYVEYENESQASQAVMKMDGMTIKENIIKVAISNPPQRKVPEKPETRKAPGGPMLLPQTYGARGKGRTQLSLLPRALQRPSAAAPQAENGPAAAPAVAAPAATEAPKMSNADFAKLFLRK

SEQ ID NO: 37018 - protein, 364 aa, Homo sapiens
MATAAETSASEPEAESKAGPKADGEEDEVKAARTRRKVLSRAVAAATYKTMGPAWDQQEEGVSESDGDEYAMASSAESSPGEYEWEYDEEEEKNQLEIERLEEQLSINVYDYNCHVDLIRLLRLEGELTKVRMARQKMSEIFPLTEELWLEWLHDEISMAQDGLDREHVYDLFEKAVKDYICPNIWLEYGQYSVGGIGQKGGLEKVRSVFERALSSVGLHMTKGLALWEAYREFESAIVEAARLEKVHSLFRRQLAIPLYDMEATFAEYEEWSEDPIPESVIQNYNKALQQLEKYKPYEEALLQAEAPRLAEYQAYIDFEMKIGDPARIQLIFERALVENCLVPDLWIRYRSTTESKGFGFICT

SEQ ID NO: 37019 - protein, 129 aa, Homo sapiens
MATAAETSASEPEAESKAGPKADGEEDEVKAARTRRKVLSRAVAAATYKTMGPAWDQQEEGVSESDGDEYAMASSAESSPGEYEWEYDEEEEKNQLEIERLEEQVGPGVGSGHLPVFQVLGSPCPGPPP

SEQ ID NO: 37020 - protein, 927 aa, Homo sapiens
MATAAETSASEPEAESKAGPKADGEEDEVKAARTRRKVLSRAVAAATYKTMGPAWDQQEEGVSESDGDEYAMASSAESSPGEYEWEYDEEEEKNQLEIERLEEQLSINVYDYNCHVDLIRLLRLEGELTKVRMARQKMSEIFPLTEELWLEWLHDEISMAQDGLDREHVYDLFEKAVKDYICPNIWLEYGQYSVGGIGQKGGLEKVRSVFERALSSVGLHMTKGLALWEAYREFESAIVEAARLEKVHSLFRRQLAIPLYDMEATFAEYEEWSEDPIPESVIQNYNKALQQLEKYKPYEEALLQAEAPRLAEYQAYIDFEMKIGDPARIQLIFERALVENCLVPDLWIRYSQYLDRQLKVKDLVLSVHNRAIRNCPWTVALWSRYLLAMERHGVDHQVISDSSKELEELRAAFTRALEYLKQEVEERFNESGDPSCVIMQNWARIEARLCNNMQKARELWDSIMTRGNAKYANMWLEYYNLERAHGDTQHCRKALHRAVQCTSDYPEHVCEVLLTMERTEGSLEDWDIAVQKTETRLARVNEQRMKAAEKEAALVQQEEEKAEQRKRARAEKKALKKKKKIRGPEKRGADEDDEKEWGDDEEEQPSKRRRVENSIPAAGETQNVEVAAGPAGKCAAVDVEPPSKQKEKAASLKRDMPKVLHDSSKDSITVFVSNLPYSMQEPDTKLRPLFEACGEVVQIRPIFSNRGDFRGYCYVEFKEEKSALQALEMDRKSVEGRPMFVSPCVDKSKNPDFKVFRYSTSLEKHKLFISGLPFSCTKEELEEICKAHGTVKDLRLVTNRAGKPKGLAYVEYENESQASQAVMKMDGMTIKENIIKVAISNPPQRKVPEKPETRKAPGGPMLLPQTYGARGKGRTQLSLLPRALQRPSAAAPQAENGPAAAPAVAAPAATEAPKMSNADFAKLFLRK

SEQ ID NO: 37021 - protein, 122 aa, Homo sapiens
MKLLTGLVFCSLVLSVSSRSFFSFLGEAFDGARDMWRAYSDMREANYIGSDKYFHARGNYDAAKRGPGGAWAAEVISNARENIQRLTGRGAEDSLADQAANKWGRSGRDPNHFRPAGLPEKY

SEQ ID NO: 37022 - protein, 83 aa, Homo sapiens
MKLLTGLVFCSLVLSVSSRSFFSFLGEAFDGARDMWRAYSDMREANYIGSDKYFHARGNYDAAKRGPGGAWAAEVISLFSAEL

SEQ ID NO: 37023 - protein, 228 aa, Homo sapiens
MASGCKIGPSILNSDLANLGAKCLQMLDSGADYLHLDVMDGHFVPNITFGHPVVESLRKQLGQDPFFDMHMMVSKPEQWVKPMAVAEANQYTFHLEATENPGTLIKDIRENGMKVGLAIKPGTSVEYLAPWANQIDMALVMTVEPGFGEQKFMEDMMPKVHWLRTQFPSLDIEGDGGVGSDTVHKCAEAGANMTVSGSAIMRSEDPRSVINLLRNICSEAAQKRSLDR

SEQ ID NO: 37024 - protein, 127 aa, Homo sapiens
MSDNEDNFDGDDFDDVEEDEGLDDLENAEEEGQENVEILPSGERPQANQKRITTPYMTKYERARVLGTRALQIAMCAPVMVELEGETDPLLIAMKELKARKIPIIIRRYLPDGSYEDWGVDELIITD

SEQ ID NO: 37025 - protein, 479 aa, Homo sapiens
MVGRSRRRGAAKWAAVRAKAGPTLTDENGDDLGLPPSPGDTSYYQDQVDDFHEARSRAALAKGWNEVQSGDEEDGEEEEEEVLALDMDDEDDEDGGNAGEEEEEENADDDGGSSVQSEAEASVDPSLSWGQRKKLYYDTDYGSKSRGRQSQQEAEEEEREEEEEAQIIQRRLAQALQEDDFGVAWVEAFAKPVPQVDEAETRVVKDLAKVSVKEKLKMLRKESPELLELIEDLKVKLTEVKDELEPLLELVEQGIIPPGKGSQYLRTKYNLYLNYCSNISFYLILKARRVPAHGHPVIERLVTYRNLINKLSVVDQKLSSEIRHLLTLKDDAVKKELIPKAKSTKPKPKSVSKTSAAACAVTDLSDDSDFDEKAKLKYYKEIEDRQKLKRKKEENSTEEQALEDQNAKRAITYQIAKNRGLTPRRKKIDRNPRVKHREKFRRAKIRRRGQVREVRKEEQRYSGELSGIRAGVKKSIKLK

SEQ ID NO: 37026 - protein, 201 aa, Homo sapiens
MRRAWILLTLGLVACVSAESRAELTSDKDMYLDNSSIEEASGVYPIDDDDYASASGSGADEDVESPELTTSRPLPKILLTSAAPKVETTTLNIQNKIPAQTKSPEETDKEKVHLSDSERKMDPAEEDTNVYTEKHSDSLFKRTEVLAAVIAGGVIGFLFAIFLILLLVYRMRKKDEGSYDLGERKPSSAAYQKAPTKEFYA

SEQ ID NO: 37027 - protein, 70 aa, Homo sapiens
MSEKKQPVDLGLLEEDDEFEEFPAEDWAGLDEDEDAHVWEDNWDDDNVEDDFSNQLRAELEKHGYKMETS

SEQ ID NO: 37028 - protein, 315 aa, Homo sapiens
MADTIFGSGNDQWVCPNDRQLALRAKLQTGWSVHTYQTEKQRRKQHLSPAEVEAILQVIQRAERLDVLEQQRIGRLVERLETMRRNVMGNGLSQCLLCGEVLGFLGSSSVFCKDCRKKVCTKCGIEASPGQKRPLWLCKICSEQREVWKRSGAWFYKGLPKYILPLKTPGRADDPHFRPLPTEPAEREPRSSETSRIYTWARGRVVSSDSDSDSDLSSSSLEDRLPSTGVRDRKGDKPWKESGGSVEAPRMGFTHPPGHLSGCQSSLASGETGTGSADPPGGPRPGLTRRAPVKDTPGRAPAADAAPAGPSSCLG

SEQ ID NO: 37029 - protein, 286 aa, Homo sapiens
MADTIFGSGNDQWVCPNDRQLALRAKLQTGWSVHTYQTEKQRRKQHLSPAEVEAILQVIQRAERLDVLEQQRIGRLVERLETMRRNVMGNGLSQCLLCGEVLGFLGSSSVFCKDCRKVWKRSGAWFYKGLPKYILPLKTPGRADDPHFRPLPTEPAEREPRSSETSRIYTWARGRVVSSDSDSDSDLSSSSLEDRLPSTGVRDRKGDKPWKESGGSVEAPRMGFTHPPGHLSGCQSSLASGETGTGSADPPGGPRPGLTRRAPVKDTPGRAPAADAAPAGPSSCLG

SEQ ID NO: 37030 - protein, 663 aa, Homo sapiens
MIEKMQGSRMDEQRCSFPPPLKTEEDYIPYPSVHEVLGREGPFPLILLPQFGGYWIEGTNHEITSIPETEPLQSPTTKVKLECNPTARIYRKHFLGKEHFNYYSLDAALGHLVFSLKYDVIGDQEHLRLLLRTKCRTYHDVIPISCLTEFPNVVQMAKLVCEDVNVDRFYPVLYPKASRLIVTFDEHVISNNFKFGVIYQKLGQTSEEELFSTNEESPAFVEFLEFLGQKVKLQDFKGFRGGLDVTHGQTGTESVYCNFRNKEIMFHVSTKLPYTEGDAQQLQRKRHIGNDIVAVVFQDENTPFVPDMIASNFLHAYVVVQAEGGGPDGPLYKVSVTARDDVPFFGPPLPDPAVFRKGPEFQEFLLTKLINAEYACYKAEKFAKLEERTRAALLETLYEELHIHSQSMMGLGGDEDKMENGSGGGGFFESFKRVIRSRSQSMDAMGLSNKKPNTVSTSHSGSFAPNNPDLAKAAGISLIVPGKSPTRKKSGPFGSRRSSAIGIENIQEVQEKRESPPAGQKTPDSGHVSQEPKSENSSTQSSPEMPTTKNRAETAAQRAEALKDFSRSSSSASSFASVVEETEGVDGEDTGLESVSSSGTPHKRDSFIYSTWLEDSVSTTSGGSSPGPSRSPHPDAGKLGDPACPEIKIQLEASEQHMPQLGC

SEQ ID NO: 37031 - protein, 681 aa, Homo sapiens
MIEKMQGSRMDEQRCSFPPPLKTEEDYIPYPSVHEVLGREGPFPLILLPQFGGYWIEGTNHEITSIPETEPLQSPTTKVKLECNPTARIYRKHFLGKEHFNYYSLDAALGHLVFSLKYDVIGDQEHLRLLLRTKCRTYHDVIPISCLTEFPNVVQMAKLVCEDVNVDRFYPVLYPKASRLIVTFDEHVISNNFKFGVIYQKLGQTSEEELFSTNEESPAFVEFLEFLGQKVKLQDFKGFRGGLDVTHGQTGTESVYCNFRNKEIMFHVSTKLPYTEGDAQQLQRKRHIGNDIVAVVFQDENTPFVPDMIASNFLHAYVVVQAEGGGPDGPLYKVSVTARDDVPFFGPPLPDPAVFRKGPEFQEFLLTKLINAEYACYKAEKFAKLEERTRAALLETLYEELHIHSQSMMGLGGDEDKMENGSGGGGFFESFKRVIRSRSQSMDAMGLSNKKPNTVSTSHSGSFAPNNPDLAKAAGISLLIPGKSASRFGRRGSAIGIGTVEESLIVPGKSPTRKKSGPFGSRRSSAIGIENIQEVQEKRESPPAGQKTPDSGHVSQEPKSENSSTQSSPEMPTTKNRAETAAQRAEALKDFSRSSSSASSFASVVEETEGVDGEDTGLESVSSSGTPHKRDSFIYSTWLEDSVSTTSGGSSPDAGKLGDPACPEIKIQLEASEQHMPQLGC

SEQ ID NO: 37032 - protein, 693 aa, Homo sapiens
MAQLRPAVPPGRPRRGSLPAGASWQNTDLFEMIEKMQGSRMDEQRCSFPPPLKTEEDYIPYPSVHEVLGREGPFPLILLPQFGGYWIEGTNHEITSIPETEPLQSPTTKVKLECNPTARIYRKHFLGKEHFNYYSLDAALGHLVFSLKYDVIGDQEHLRLLLRTKCRTYHDVIPISCLTEFPNVVQMAKLVCEDVNVDRFYPVLYPKASRLIVTFDEHVISNNFKFGVIYQKLGQTSEEELFSTNEESPAFVEFLEFLGQKVKLQDFKGFRGGLDVTHGQTGTESVYCNFRNKEIMFHVSTKLPYTEGDAQLQRKRHIGNDIVAVVFQDENTPFVPDMIASNFLHAYVVVQAEGGGPDGPLYKVSVTARDDVPFFGPPLPDPAVFRKGPEFQEFLLTKLINAEYACYKAEKFAKLEERTRAALLETLYEELHIHSQSMMGLGGDEDKMENGSGGGGFFESFKRVIRSRSQSMDAMGLSNKKPNTVSTSHSGSFAPNNPDLAKAAGISLIVPGKSPTRKKSGPFGSRRSSAIGIENIQEVQEKRESPPAGQKTPDSGHVSQEPKSENSSTQSSPEMPTTKNRAETAAQRAEALKDFSRSSSSASSFASVVEETEGVDGEDTGLESVSSSGTPHKRDSFIYSTWLEDSVSTTSGGSSPGPSRSPHPDAGKLGDPACPEIKIQLEASEQHMPQLGC

SEQ ID NO: 37033 - protein, 727 aa, Homo sapiens
MSGRKRSFTFGAYGGVDKSFTSRRSVWRSDGQNQHFPQALDLSRVNLVPSYTPSLYPKNTDLFEMIEKMQGSRMDEQRCSFPPPLKTEEDYIPYPSVHEVLGREGPFPLILLPQFGGYWIEGTNHEITSIPETEPLQSPTTKVKLECNPTARIYRKHFLGKEHFNYYSLDAALGHLVFSLKYDVIGDQEHLRLLLRTKCRTYHDVIPISCLTEFPNVVQMAKLVCEDVNVDRFYPVLYPKASRLIVTFDEHVISNNFKFGVIYQKLGQTSEEELFSTNEESPAFVEFLEFLGQKVKLQDFKGFRGGLDVTHGQTGTESVYCNFRNKEIMFHVSTKLPYTEGDAQQLQRKRHIGNDIVAVVFQDENTPFVPDMIASNFLHAYVVVQAEGGGPDGPLYKVSVTARDDVPFFGPPLPDPAVFRKGPEFQEFLLTKLINAEYACYKAEKFAKLEERTRAALLETLYEELHIHSQSMMGLGGDEDKMENGSGGGGFFESFKRVIRSRSQSMDAMGLSNKKPNTVSTSHSGSFAPNNPDLAKAAGISLIVPGKSPTRKKSGPFGSRRSSAIGIENIQEVQEKRESPPAGQKTPDSGHVSQEPKSENSSTQSSPEMPTTKNRAETAAQRAEALKDFSRSSSSASSFASVVEETEGVDGEDTGLESVSSSGTPHKRDSFIYSTWLEDSVSTTSGGSSPGPSRSPHPDAGKLGDPACPEIKIQLEASEQHMPQLGC

SEQ ID NO: 37034 - protein, 171 aa, Homo sapiens
MAKFVIRPATAADCSDILRLIKELAKYEYMEEQVILTEKDLLEDGFGEHPFYHCLVAEVPKEHWTPEGHSIVGFAMYYFTYDPWIGKLLYLEDFFVMSDYRGFGIGSEILKNLSQVAMRCRCSSMHFLVAEWNEPSINFYKRRGASDLSSEEGWRLFKIDKEYLLKMATEE

SEQ ID NO: 37035 - protein, 142 aa, Homo sapiens
MAAGGSDPRAGDVEEDASQLIFPKEFETAETLLNSEVHMLLEHRKQQNESAEDEQELSEVFMKTLNYTARFSRFKNRETIASVRSLLLQKKLHKFELACLANLCPETAEESKALIPSLEGRFEDEELQQILDDIQTKRSFQY

SEQ ID NO: 37036 - protein, 646 aa, Homo sapiens
MRAPGAGAASVVSLALLWLLGLPWTWSAAAALGVYVGSGGWRFLRIVCKTARRDLFGLSVLIRVRLELRRHQRAGHTIPRIFQAVVQRQPERLALVDAGTGECWTFAQLDAYSNAVANLFRQLGFAPGDVVAIFLEGRPEFVGLWLGLAKAGMEAALLNVNLRREPLAFCLGTSGAKALIFGGEMVAAVAEVSGHLGKSLIKFCSGDLGPEGILPDTHLLDPLLKEASTAPLAQIPSKGMDDRLFYIYTSGTTGLPKAAIVVHSRYYRMAAFGHHAYRMQAADVLYDCLPLYHSAGNIIGVGQCLIYGLTVVLRKKFSASRFWDDCIKYNCTVVQYIGEICRYLLKQPVREAERRHRVRLAVGNGLRPAIWEEFTERFGVRQIGEFYGATECNCSIANMDGKVGSCGFNSRILPHVYPIRLVKVNEDTMELLRDAQGLCIPCQAGEPGLLVGQINQQDPLRRFDGYVSESATSKKIAHSVFSKGDSAYLSGDVLVMDELGYMYFRDRSGDTFRWRGENVSTTEVEGVLSRLLGQTDVAVYGVAVPGVEGKAGMAAVADPHSLLDPNAIYQELQKVLAPYARPIFLRLLPQVDTTGTFKIQKTRLQREGFDPRQTSDRLFFLDLKQGHYLPLNEAVYTRICSGAFAL

SEQ ID NO: 37037 - protein, 467 aa, Homo sapiens
MTHVLGTTAVAEVSGHLGKSLIKFCSGDLGPEGILPDTHLLDPLLKEASTAPLAQIPSKGMDDRLFYIYTSGTTGLPKAAIVVHSRYYRMAAFGHHAYRMQAADVLYDCLPLYHSAGNIIGVGQCLIYGLTVVLRKKFSASRFWDDCIKYNCTVVQYIGEICRYLLKQPVREAERRHRVRLAVGNGLRPAIWEEFTERFGVRQIGEFYGATECNCSIANMDGKVGSCGFNSRILPHVYPIRLVKVNEDTMELLRDAQGLCIPCQAGEPGLLVGQINQQDPLRRFDGYVSESATSKKIAHSVFSKGDSAYLSGDVLVMDELGYMYFRDRSGDTFRWRGENVSTTEVEGVLSRLLGQTDVAVYGVAVPGVEGKAGMAAVADPHSLLDPNAIYQELQKVLAPYARPIFLRLLPQVDTTGTFKIQKTRLQREGFDPRQTSDRLFFLDLKQGHYLPLNEAVYTRICSGAFAL

SEQ ID NO: 37038 - protein, 631 aa, Homo sapiens
MPRPALSVTSFCHRLGKRERKQSFMGNSGNSWSHTPFPKLELGLGPQPMAPRELPTCSICLERLRDPISLDCGHDFCIRCFSTHRLPGCEPPCCPECRKICKQKRGLRSLGEKMKLLPQRPLPPALQETCPVRAEPLLLVRINASGGLILRMGAINRCLKHPLARDTPVCLLAVLGEQHSGKSFLLNHLLQGLPGLESGEGGRPRGGEASLQGCRWGANGLARGIWMWSHPFLLGKEGKKVAVFLVDTGDAMSPELSRETRIKLCALTTMLSSYQILSTSQELKDTDLDYLEMFVHVAEVMGKHYGMVPIQHLDLLVRDSSHPNKAGQGHVGNIFQRLSGRYPKVQELLQGKRARCCLLPAPGRRRMNQGHASPGDTDDDFRHLLGAYVSDVLSAAPQHAKSRCQGYWNEGRAVARGDRRLLTGQQLAQEIKNLSGWMGRTGPGFTSPDEMAAQLHDLRKVEAAKREFEEYVRQQDVATKRIFSALRVLPDTMRNLLSTQKDAILARHGVALLCKGRDQTLEALEAELQATAKAFMDSYTMRFCGHLAAVGGAVGAGLMGLAGGVVGAGMAAAALAAEAGMVAAGAAVGATGAAVVGGGVGAGLAATVGCMEKEEDERLLEGDREPLLQEE

SEQ ID NO: 37039 - protein, 632 aa, Homo sapiens
MPRPALSVTSFCHRLGKRERKQSFMGNSGNSWSHTPFPKLELGLGPQPMAPRELPTCSICLERLRDPISLDCGHDFCIRCFSTHRLPGCEPPCCPECRKICKQKRGLRSLGEKMKLLPQRPLPPALQETCPVRAEPLLLVRINASGGLILRMGAINRCLKHPLARDTPVCLLAVLGEQHSGKSFLLNHLLQGLPGLESGEGGRPRGGEASLQGCRWGANGLARGIWMWSHPFLLGKEGKKVAVFLVDTGDAMSPELSRETRIKLCALTTMLSSYQILSTSQELKDTDLDYLEMFVHVAEVMGKHYGMVPIQHLDLLVRDSSHPNKAGQGHVGNIFQRLSGRYPKVQELLQGKRARCCLLPAPGRRRMNQGHASPGGDTDDDFRHLLGAYVSDVLSAAPQHAKSRCQGYWNEGRAVARGDRRLLTGQQLAQEIKNLSGWMGRTGPGFTSPDEMAAQLHDLRKVEAAKREFEEYVRQQDVATKRIFSALRVLPDTMRNLLSTQKDAILARHGVALLCKGRDQTLEALEAELQATAKAFMDSYTMRFCGHLAAVGGAVGAGLMGLAGGVVGAGMAAAALAAEAGMVAAGAAVGATGAAVVGGGVGAGLAATVGCMEKEEDERLLEGDREPLLQEE

SEQ ID NO: 37040 - protein, 306 aa, Homo sapiens [sequence omitted]

SEQ ID NO: 37041 - protein, 258 aa, Homo sapiens
MAKYQGEVQSLKLDDDSVIEGVSDQVLVAVVVSFALIATLVYALFRNVHQNIHPENQELVRVLREQLQTEQDAPAATRQQFYTDMYCPICLHQASFPVETNCGHLFCGACIIAYWRYGSWLGAISCPICRQTVTLLLTVFGEDDQSQDVLRLHQDINDYNRRFSGQPRSIMERIMDLPTLLRHAFREMFSVGGLFWMFRIRIILCLMGAFFYLISPLDFVPEALFGILGFLDDFFVIFLLLIYISIMYREVITQRLTR

SEQ ID NO: 37042 - protein, 236 aa, Homo sapiens
MAKYQGEVQSLKLDDDSVIEGVSDQVLVAVVVSFALIATLVYALFRNVHQNIHPENQELVRVLREQLQTEQDAPAATRQQFYTDMYCPICLHQASFPVETNCGHLFCGACIIAYWRYGSWLGAISCPICRQTVTLLLTVFGEDDQSQDVLRLHQDINDYNRRFSGQPRSVSNAKACSKLEEDTFLLFCKVRFTNKYSLTMRNLGQAQWLAPIVLALWEAKAGGSLEPRSLRPALET

SEQ ID NO: 37043 - protein, 200 aa, Homo sapiens
MAKYQGEVQSLKLDDDSVIEGVSDQVLVAVVVSFALIATLVYALFRNVHQNIHPENQELVRVLREQLQTEQDAPAATRQQFYTDMYCPICLHQASFPVETNCGHLFCGACIIAYWRYGSWLGAISCPICRQTGSSEKSSRASEQTHQEAVACLDTQNSPACTVGCRSGPQHIPHDRMLPSASPRLCFTLLDCVSILWFSG

SEQ ID NO: 37044 - protein, 162 aa, Homo sapiens
MHLLPLDSSSTLTCTVPSACTKPPSRWRPTVDIFFVVTLLLTVFGEDDQSQDVLRLHQDINDYNRRFSGQPRSIMERIMDLPTLLRHAFREMFSVGGLFWMFRIRIILCLMGAFFYLISPLDFVPEALFGILGFLDDFFVIFLLLIYISIMYREVITQRLTR

SEQ ID NO: 37045 - protein, 116 aa, Homo sapiens
MAKYQGEVQSLKLDDDSVIEGVSDQVLVAVVVSFALIATLVYALFRNVHQNIHPENQELVRVLREQLQTEQDAPAATRQQFYTDMYCPICLHQASFPVETNCGHLFCGNLTPNSIW

SEQ ID NO: 37046 - protein, 174 aa, Homo sapiens
MYCPICLHQASFPVETNCGHLFCGACIIAYWRYGSWLGAISCPICRQTVTLLLTVFGEDDQSQDVLRLHQDINDYNRRFSGQPRSIMERIMDLPTLLRHAFREMFSVGGLFWMFRIRIILCLMGAFFYLISPLDFVPEALFGILGFLDDFFVIFLLLIYISIMYREVITQRLTR

SEQ ID NO: 37047 - protein, 261 aa, Homo sapiens
MPSDPGPEAGSGWPGLLMSCLKGPHVILKMEAMKIVHPEKFPELPAAPCFPPAPRPTPTLAPKRAWPSDTEIIVNQACGGDMPALEGAPHTPPLPRRPRKGSSELGFPRVAPEDEVIVNQYVIRPGPSASAASSAAAGEPLECPTCGHSYNVTQRRPRVLSCLHSVCEQCLQILYESCPKYKFISCPTCRRETVLFTDYGLAALAVNTSILSRLPPEALTAPSGGQWGAEPEGSCYQTFRQYCGAACTCHVRNPLSACSIM

SEQ ID NO: 37048 - protein, 838 aa, Homo sapiens
MQEQEIGFISKYNEGLCVNTDPVSILTSILDMSLHRQMGSDRDLQSSASSVSLPSVKKAPKKRRISIGSLFRRKKDNKRKSRELNGGVDGIASIESIHSEMCTDKNSIFSTNTSSDNGLTSISKQIGDFIECPLCLLRHSKDRFPDIMTCHHRSCVDCLRQYLRIEISESRVNISCPECTERFNPHDIRLILSDDVLMEKYEEFMLRRWLVADPDCRWCPAPDCGYAVIAFGCASCPKLTCGREGCGTEFCYHCKQIWHPNQTCDAARQERAQSLRLRTIRSSSISYSQESGAAADDIKPCPRCAAYIIKMNDGSCNHMTCAVCGCEFCWLCMKEISDLHYLSPSGCTFWGKKPWSRKKKILWQLGTLVGAPVGIALIAGIAIPAMIIGIPVYVGRKIHNRYEGKDVSKHKRNLAIAGGVTLSVIVSPVVAAVTVGIGVPIMLAYVYGVVPISLCRSGGCGVSAGNGKGVRIEFDDENDINVGGTNTAVDTTSVAEARHNPSIGEGSVGGLTGSLSASGSHMDRIGAIRDNLSETASTMALAGASITGSLSGSAMVNCFNRLEVQADVQKERYSLSGESGTVSLGTVSDNASTKAMAGSILNSYIPLDKEGNSMEVQVDIESKPSKFRHNSGSSSVDDGSATRSHAGGSSSGLPEGKSSATKWSKEATAGKKSKSGKLRKKGNMKINETREDMDAQLLEQQSTNSSEFEAPSLSDSMPSVADSHSSHFSEFSCSDLESMKTSCSHGSSDYHTRFATVNILPEVENDRLENSPHQCSISVVTQTASCSEVSQLNHIAEEHGNNGIKPNVDLYFGDALKETNNNHSHQTMELKVAIQTEI

SEQ ID NO: 37049 - protein, 602 aa, Homo sapiens
MQEQEIGFISKYNEGLCVNTDPVSILTSILDMSLHRQMGSDRDLQSSASSVSLPSVKKAPKKRRISIGSLFRRKKDNKRKSRELNGGVDGIASIESIHSEMCTDKNSIFSTNTSSDNGLTSISKQIGDFIECPLCLLRHSKDRFPDIMTCHHRSCVDCLRQYLRIEISESRVNISCPECTERFNPHDIRLILSDDVLMEKYEEFMLRRWLVADPDCRWCPAPDCGYAVIAFGCASCPKLTCGREGCGTEFCYHCKQIWHPNQTCDAARQERAQSLRLRTIRSSSISYSQESGAAADDIKPCPRCAAYIIKMNDGSCNHMTCAVCGCEFCWLCMKEISDLHYLSPSGCTFWGKKPWSRKKKILWQLGTLVGAPVGIALIAGIAIPAMIIGIPVYVGRKIHNRYEGKDVSKHKRNLAIAGGVTLSVIVSPVVAAVTVGIGVPIMLAYVYGVVPISLCRSGGCGVSAGNGKGVRIEFDDENDINVGGTNTAVDTTSVAEARHNPSIGEGSVGGLTGSLSASGSHMDRIGAIRDNLSETASTMALAGASITGSLSGSAMVNCFNRLEVQADVQKEAAVAAAGRWAYSPATLRCRRSEELKNIHDSS

SEQ ID NO: 37050 - protein, 807 aa, Homo sapiens
MSLHRQMGSDRDLQSSASSVSLPSVKKAPKKRRISIGSLFRRKKDNKRKSRELNGGVDGIASIESIHSEMCTDKNSIFSTNTSSDNGLTSISKQIGDFIECPLCLLRHSKDRFPDIMTCHHRSCVDCLRQYLRIEISESRVNISCPECTERFNPHDIRLILSDDVLMEKYEEFMLRRWLVADPDCRWCPAPDCGYAVIAFGCASCPKLTCGREGCGTEFCYHCKQIWHPNQTCDAARQERAQSLRLRTIRSSSISYSQESGAAADDIKPCPRCAAYIIKMNDGSCNHMTCAVCGCEFCWLCMKEISDLHYLSPSGCTFWGKKPWSRKKKILWQLGTLVGAPVGIALIAGIAIPAMIIGIPVYVGRKIHNRYEGKDVSKHKRNLAIAGGVTLSVIVSPVVAAVTVGIGVPIMLAYVYGVVPISLCRSGGCGVSAGNGKGVRIEFDDENDINVGGTNTAVDTTSVAEARHNPSIGEGSVGGLTGSLSASGSHMDRIGAIRDNLSETASTMALAGASITGSLSGSAMVNCFNRLEVQADVQKERYSLSGESGTVSLGTVSDNASTKAMAGSILNSYIPLDKEGNSMEVQVDIESKPSKFRHNSGSSSVDDGSATRSHAGGSSSGLPEGKSSATKWSKEATAGKKSKSGKLRKKGNMKINETREDMDAQLLEQQSTNSSEFEAPSLSDSMPSVADSHSSHFSEFSCSDLESMKTSCSHGSSDYHTRFATVNILPEVENDRLENSPHQCSISVVTQTASCSEVSQLNHIAEEHGNNGIKPNVDLYFGDALKETNNNHSHQTMELKVAIQTEI

SEQ ID NO: 37051 - protein, 1042 aa, Homo sapiens
MPMWAGGVGSPRRGMAPASTDDLFARKLRQPARPPLTPHTFEPRPVRGPLLRSGSDAGEARPPTPASPRARAHSHEEASRPAATSTRLFTDPLALLGLPAEEPEPAFPPVLEPRWFAHYDVQSLLFDWAPRSQGMGSHSEASSGTLASAEDQAASSDLLHGAPGFVCELGGEGELGLGGPASPPVPPALPNAAVSILEEPQNRTSAYSLEHADLGAGYYRKYFYGKEHQNFFGMDESLGPVAVSLRREEKEGSGGGTLHSYRVIVRTTQLRTLRGTISEDALPPGPPRGLSPRKLLEHVAPQLSPSCLRLGSASPKVPRTLLTLDEQVLSFQRKVGILYCRAGQGSEEEMYNNQEAGPAFMQFLTLLGDVVRLKGFESYRAQLDTKTDSTGTHSLYTTYQDHEIMFHVSTMLPYTPNNQQQLLRKRHIGNDIVTIVFQEPGSKPFCPTTIRSHFQHVFLVVRAHTPCTPHTTYRVAVSRTQDTPAFGPALPAGGGPFAANADFRAFLLAKALNGEQAAGHARQFHAMATRTRQQYLQDLATNEVTTTSLDSASRFGLPSLGGRRRAAPRGPGAELQAAGSLVWGVRAAPGARVAAGAQASGPEGIEVPCLLGISAEALVLVAPRDGRVVFNCACRDVLAWTFSEQQLDLYHGRGEAITLRFDGSPGQAVGEVVARLQLVSRGCETRELALPRDGQGRLGFEVDAEGFVTHVERFTFAETAGLRPGARLLRVCGQTLPSLRPEAAAQLLRSAPKVCVTVLPPDESGRPRRSFSELYTLSLQEPSRRGAPDPVQDEVQGVTLLPTTKQLLHLCLQDGGSPPGPGDLAEERTEFLHSQNSLSPRSSLSDEAPVLPNTTPDLLLATTAKPSVPSADSETPLTQDRPGSPSGSEDKGNPAPELRASFLPRTLSLRNSISRIMSEAGSGTLEDEWQAISEIASTCNTILESLSREGQPIPESGDPKGTPKSDAEPEPGNLSEKVSHLESMLRKLQEDLQKEKADRAALEEEVRSLRHNNRRLQAESESAATRLLLASKQLGSPTADLA

SEQ ID NO: 37052 - protein, 367 aa, Homo sapiens
MNSSPAGTPSPQPSRANGNINLGPSANPNAQPTDFDFLKVIGKGNYGKVLLAKRKSDGAFYAVKVLQKKSILKKKEQSHIMAERSVLLKNVRHPFLVGLRYSFQTPEKLYFVLDYVNGGELFFHLQRERRFLEPRARFYAAEVASAIGYLHSLNIIYRDLKPENILLDCQGHVVLTDFGLCKEGVEPEDTTSTFCGTPEYLAPEVLRKEPYDRAVDWWCLGAVLYEMLHGLPPFYSQDVSQMYENILHQPLQIPGGRTVAACDLLQSLLHKDQRQRLGSKADFLEIKNHVFFSPINWDDLYHKRLTPPFNPNVTGPADLKHFDPEFTQEAVSKSIGCTPDTVASSSGASSAFLGFSYAPEDDDILDC

SEQ ID NO: 37053 - protein, 427 aa, Homo sapiens
MQGLLTSGRKPSGGGRCTGRGGWRGQWCLKPWMGGADPPTPTLSCLLLPVPPELPDHCYRMNSSPAGTPSPQPSRANGNINLGPSANPNAQPTDFDFLKVIGKGNYGKVLLAKRKSDGAFYAVKVLQKKSILKKKEQSHIMAERSVLLKNVRHPFLVGLRYSFQTPEKLYFVLDYVNGGELFFHLQRERRFLEPRARFYAAEVASAIGYLHSLNIIYRDLKPENILLDCQGHVVLTDFGLCKEGVEPEDTTSTFCGTPEYLAPEVLRKEPYDRAVDWWCLGAVLYEMLHGLPPFYSQDVSQMYENILHQPLQIPGGRTVAACDLLQSLLHKDQRQRLGSKADFLEIKNHVFFSPINWDDLYHKRLTPPFNPNVTGPADLKHFDPEFTQEAVSKSIGCTPDTVASSSGASSAFLGFSYAPEDDDILDC

SEQ ID NO: 37054 - protein, 393 aa, Homo sapiens
MQGLLTSGRKPSGGGRCTELPDHCYRMNSSPAGTPSPQPSRANGNINLGPSANPNAQPTDFDFLKVIGKGNYGKVLLAKRKSDGAFYAVKVLQKKSILKKKEQSHIMAERSVLLKNVRHPFLVGLRYSFQTPEKLYFVLDYVNGGELFFHLQRERRFLEPRARFYAAEVASAIGYLHSLNIIYRDLKPENILLDCQGHVVLTDFGLCKEGVEPEDTTSTFCGTPEYLAPEVLRKEPYDRAVDWWCLGAVLYEMLHGLPPFYSQDVSQMYENILHQPLQIPGGRTVAACDLLQSLLHKDQRQRLGSKADFLEIKNHVFFSPINWDDLYHKRLTPPFNPNVTGPADLKHFDPEFTQEAVSKSIGCTPDTVASSSGASSAFLGFSYAPEDDDILDC

SEQ ID NO: 37055 - protein, 259 aa, Homo sapiens
MPGANYRAGAGAGAGARRPRGARDREEDGGGLEPAAVARDLLRGTSNMSFEELLELQSQVGTKTYKQLVAGNSPKKQASRPPIQNACVADKHRPLEMSAKIRVPFLRQVVPISKKVARDPRFDDLSGEYNPEVFDKTYQFLNDIRAKEKELVKKQLKKHLSGEEHEKLQQLLQRMEQQEMAQQERKQQQELHLALKQERRAQAQQGHRPYFLKKSEQRQLALAEKFKELKRSKKLENFLSRKRRRNAGKDRRHLPLSKE

SEQ ID NO: 37056 - protein, 253 aa, Homo sapiens
MPGANYRAGAGAGAGARDREEDGGGLEPAAVARDLLRGTSNMSFEELLELQSQVGTKTYKQLVAGNSPKKQASRPPIQNACVADKHRPLEMSAKIRVPFLRQVVPISKKVARDPRFDDLSGEYNPEVFDKTYQFLNDIRAKEKELVKKQLKKHLSGEEHEKLQQLLQRMEQQEMAQQERKQQQELHLALKQERRAQAQQGHRPYFLKKSEQRQLALAEKFKELKRSKKLENFLSRKRRRNAGKDRRHLPLSKE

SEQ ID NO: 37057 - protein, 456 aa, Homo sapiens
MFEEPEWAEAAPVAAGLGPVISRPPPAASSQNKGSKRRQLLATLRALEAASLSQHPPSLCISDSEEEEEERKKKCPKKASFASASAEVGKKGKKKCQKQGPPCSDSEEEVERKKKCHKQALVGSDSAEDEKRKRKCQKHAPINSAQHLDNVDQTGPKAWKGSTTNDPPKQSPGSTSPKPPHTLSRKQWRNRQKNKRRCKNKFQPPQVPDQAPAEAPTEKTEVSPVPRTDSHEARAGALRARMAQRLDGARFRYLNEQLYSGPSSAAQRLFQEDPEAFLLYHRGFQSQVKKWPLQPVDRIARDLRQRPASLVVADFGCGDCRLASSIRNPVHCFDLASLDPRVTVCDMAQVPLEDESVDVAVFCLSLMGTNIRDFLEEANRVLKPGGLLKVAEVSSRFEDVRTFLRAVTKLGFKIVSKDLTNSHFFLFDFQKTGPPLVGPKAQLSGLQLQPCLYKRR

SEQ ID NO: 37058 - protein, 363 aa, Homo sapiens
MATLRRLREAPRHLLVCEKSNFGNHKSRHRHLVQTHYYNYRVSFLIPECGILSEELKNLVMNTGPYYFVKNLPLHELITPEFISTFIKKGSCYALTYNTHIDEDNTVALLPNGKLILSLDKDTYEETGLQGHPSQFSGRKIMKFIVSIDLMELSLNLDSKKYERISWSFKEKKPLKFDFLLAWHKTGSEESTMMSYFSKYQIQEHQPKVALSTLRDLQCPVLQSSELEGTPEVSCRALELFDWLGAVFSNVDLNNEPNNFISTYCCPEPSTVVAKAYLCTITGFILPEKICLLLEHLCHYFDEPKLAPWVTLSVQGFADSPVSWEKNEHGFRKGGEHLYNFVIFNNQDYWLQMAVGANDHCPP

SEQ ID NO: 37059 - protein, 340 aa, Homo sapiens
MATLRRLREAPRHLLVCEKSNFGNHKSRHRHLVQTHYYNYRVSFLIPECGILSEELKNLVMNTGPYYFVKNLPLHELITPEFISTFIKKGKLILSLDKDTYEETGLQGHPSQFSGRKIMKFIVSIDLMELSLNLDSKKYERISWSFKEKKPLKFDFLLAWHKTGSEESTMMSYFSKYQIQEHQPKVALSTLRDLQCPVLQSSELEGTPEVSCRALELFDWLGAVFSNVDLNNEPNNFISTYCCPEPSTVVAKAYLCTITGFILPEKICLLLEHLCHYFDEPKLAPWVTLSVQGFADSPVSWEKNEHGFRKGGEHLYNFVIFNNQDYWLQMAVGANDHCPP

SEQ ID NO: 37060 - protein, 1530 aa, Homo sapiens
MPIRPDLQQLEKCIDDALRKNDFKPLKTLLQIDICEDVKIKCSKQFFHKVDNLICRELNKEDIHNVSAILVSVGRCGKNISVLGQAGLLTMIKQGLIQKMVAWFEKSKDIIQSQGNSKDEAVLNMIEDLVDLLLVIHDVSDEGKKQVVESFVPRICSLVIDSRVNICIQQEIIKKMNAMLDKMPQDARKILSNQEMLILMSSMGERILDAGDYDLQVGIVEALCRMTTEKQRQELAHQWFSMDFIAKAFKRIKDSEFETDCRIFLNLVNGMLGDKRRVFTFPCLSAFLDKYELQIPSDEKLEEFWIDFNLGSQTLSFYIAGDNDDHQWEAVTVPEEKVQIYSIEVRESKKLLTIILKNTVKISKREGKELLLYFDASLEITNVTQKIFGATKHRESIRKQGISVAKTSLHILFDASGSQILVPESQISPVGEELVSLKEKSKSPKEFAKPSKYIKNSDKGNRNNSQLEKTTPSKRKMSEASMIVSGADRYTMRSPVLFSNTSIPPRRRRIKPPLQMTSSAEKPSVSQTSENRVDNAASLKSRSSEGRHRRDNIDKHIKTAKCVENTENKNVEFPNQNFSELQDVIPDSQAAEKRDHTILPGVLDNICGNKIHSKWACWTPVTNIELCNNQRASTSSGDTLNQDIVINKKLTKQKSSSSISDHNSEGTGKVKYKKEQTDHIKIDKAEVEVCKKHNQQQNHPKYSGQKNTENAKQSDWPVESETTFKSVLLNKTIEESLIYRKKYILSKDVNTATCDKNPSASKNVQSHRKAEKELTSELNSWDSKQKKMREKSKGKEFTNVAESLISQINKRYKTKDDIKSTRKLKESLINSGFSNKPVVQLSKEKVQKKSYRKLKTTFVNVTSECPVNDVYNFNLNGADDPIIKLGIQEFQATAKEACADRSIRLVGPRNHDELKSSVKTKDKKIITNHQKKNLFSDTETEYRCDDSKTDISWLREPKSKPQLIDYSRNKNVKNHKSGKSRSSLEKGQPSSKMTPSKNITKKMDKTIPEGRIRLPRKATKTKKNYKDLSNSESECEQEFSHSFKENIPVKEENIHSRMKTVKLPKKQQKVFCAETEKELSKQWKNSSLLKDAIRDNCLDLSPRSLSGSPSSIEVTRCIEKITEKDFTQDYDCITKSISPYPKTSSLESLNSNSGVGGTIKSPKNNEKNFLCASESCSPIPRPLFLPRHTPTKSNTIVNRKKISSLVLTQETQNSNSYSDVSSYSSEERFMEIESPHINENYIQSKREESHLASSLSKSSEGREKTWFDMPCDATHVSGPTQHLSRKRIYIEDNLSNSNEVEMEEKGERRANLLPKKLCKIEDADHHIHKMSESVSSLSTNDFSIPWETWQNEFAGIEMTYETYERLNSEFKRRNNIRHKMLSYFTTQSWKTAQQHLRTMNHQSQDSRIKKLDKFQFIIIEELENFEKDSQSLKDLEKEFVDFWEKIFQKFSAYQKSEQQRLHLLKTSLAKSVFCNTDSEETVFTSEMCLMKEDMKVLQDRLLKDMLEEELLNVRRELMSVFMSHERNANV

SEQ ID NO: 37061 - protein, 272 aa, Homo sapiens
MSSTESAGRTADKSPRQQVDRLLVGLRWRRLEEPLGFIKVLQWLFAIFAFGSCGSYSGETGAMVRCNNEAKDVSSIIVAFGYPFRLHRIQYEMPLCDEESSSKTMHLMGDFSAPAEFFVTLGIFSFFYTMAALVIYLRFHNLYTENKRFPLVDFCVTVSFTFFWLVAAAAWGKGLTDVKGATRPSSLTAAMSVCHGEEAVCSAGATPSMGLANISVLFGFINFFLWAGNCWFVFKETPWHGQGQGQDQDQDQDQGQGPSQESAAEQGAVEKQ

SEQ ID NO: 37062 - protein, 236 aa, Homo sapiens
MSSTESAGRTADKSPRQQVDRLLVGLRWRRLEEPLGFIKVLQWLFAIFAFGSCGSYSGETGAMVRCNNEAKDVSSIIVAFGYPFRLHRIQYEMPLCDEESSSKTMHLMGDFSAPAEFFVTLGIFSFFYTMAALVIYLRFHNLYTENKRFPLVDFCVTVSFTFFWLVAAAAWGKGLTDVKGATRPSSLTAAMSVCHGEEAVCSAGATPSMGLANISVVRPVATAGSSTSPAAQACPS

SEQ ID NO: 37063 - protein, 509 aa, Homo sapiens
MSENLDKSNVNEAGKSKSNDSEEGLEDAVEGADEALQKAIKSDSSSPQRVQRPHSSPPRFVTVEELLETARGVTNMALAHEIVVNGDFQIKPVELPENSLKKRVKEIVHKAFWDCLSVQLSEDPPAYDHAIKLVGEIKETLLSFLLPGHTRLRNQITEVLDLDLIKQEAENGALDISKLAEFIIGMMGTLCAPARDEEVKKLKDIKEIVPLFREIFSVLDLMKVDMANFAISSIRPHLMQQSVEYERKKFQEILERQPNSLDFVTQWLEEASEDLMTQKYKHALPVGGMAAGSGDMPRLSPVAVQNYAYLKLLKWDHLQRPFPETVLMDQSRFHELQLQLEQLTILGAVLLVTFSMAAPGISSQADFAEKLKMIVKILLTDMHLPSFHLKDVLTTIGEKVCLEVSSCLSLCGSSPFTTDKETVLKGQIQAVASPDDPIRRIMESRILTFLETYLASGHQKPLPTVPGGLSPVQRELEEVAIKFARLVNYNKMVFCPYYDAILSKILVRS

SEQ ID NO: 37064 - protein, 520 aa, Homo sapiens
MALSSRARAFSVEALVGRPSKRKLQDPIQAEQPELREKKGGEEEEERRSSAAGKSEPLEKQPKTEPSTSASSGCGSDSGYGNSSESLEEKDIQMELQGSELWKRFHDIGTEMIITKAGRRMFPSVRVKVKGLDPGKQYHVAIDVVPVDSKRYRYVYHSSQWMVAGNTDHLCIIPRFYVHPDSPCSGETWMRQIISFDRMKLTNNEMDDKGHIILQSMHKYKPRVHVIEQGSSVDLSQIQSLPTEGVKTFSFKETEFTTVTAYQNQQITKLKIERNPFAKGFRDTGRNRGVLDGLLETYPWRPSFTLDFKTFGADTQSGSSGSSPVTSSGGAPSPLNSLLSPLCFSPMFHLPTSSLGMPCPEAYLPNVNLPLCYKICPTNFWQQQPLVLPAPERLASSNSSQSLAPLMMEVPMLSSLGVTNSKSGSSEDSSDQYLQAPNSTNQMLYGLQSPGNIFLPNSITPEALSCSFHPSYDFYRYNFSMPSRLISGSNHLKVNDDSQVSFGEGKCNHVHWYPAINHYL

SEQ ID NO: 37065 - protein, 400 aa, Homo sapiens
MFPSVRVKVKGLDPGKQYHVAIDVVPVDSKRYRYVYHSSQWMVAGNTDHLCIIPRFYVHPDSPCSGETWMRQIISFDRMKLTNNEMDDKGHIILQSMHKYKPRVHVIEQGSSVDLSQIQSLPTEGVKTFSFKETEFTTVTAYQNQQITKLKIERNPFAKGFRDTGRNRGVLDGLLETYPWRPSFTLDFKTFGADTQSGSSGSSPVTSSGGAPSPLNSLLSPLCFSPMFHLPTSSLGMPCPEAYLPNVNLPLCYKICPTNFWQQQPLVLPAPERLASSNSSQSLAPLMMEVPMLSSLGVTNSKSGSSEDSSDQYLQAPNSTNQMLYGLQSPGNIFLPNSITPEALSCSFHPSYDFYRYNFSMPSRLISGSNHLKVNDDSQVSFGEGKCNHVHWYPAINHYL

SEQ ID NO: 37066 - protein, 743 aa, Homo sapiens
MSLSMRDPVIPGTSMAYHPFLPHRAPDFAMSAVLGHQPPFFPALTLPPNGAAALSLPGALAKPIMDQLVGAAETGIPFSSLGPQAHLRPLKTMEPEEEVEDDPKVHLEAKELWDQFHKRGTEMVITKSGRRMFPPFKVRCSGLDKKAKYILLMDIIAADDCRYKFHNSRWMVAGKADPEMPKRMYIHPDSPATGEQWMSKVVTFHKLKLTNNISDKHGFTLAFPSDHATWQGNYSFGTQTILNSMHKYQPRFHIVRANDILKLPYSTFRTYLFPETEFIAVTAYQNDKITQLKIDNNPFAKGFRDTGNGRREKRKQLTLQSMRVFDERHKKENGTSDESSSEQAAFNCFAQASSPAASTVGTSNLKDLCPSEGESDAEAESKEEHGPEACDAAKISTTTSEEPCRDKGSPAVKAHLFAAERPRDSGRLDKASPDSRHSPATISSSTRGLGAEERRSPVREGTAPAKVEEARALPGKEAFAPLTVQTDAAAAHLAQGPLPGLGFAPGLAGQQFFNGHPLFLHPSQFAMGGAFSSMAAAGMGPLLATVSGASTGVSGLDSTAMASAAAAQGLSGASAATLPFHLQQHVLASQGLAMSPFGSLFPYPYTYMAAAAAASSAAASSSVHRHPFLNLNTMRPRLRYSPYSIPVPVPDGSSLLTTALPSMAAAAGPLDGKVAALAASPASVAVDSGSELNSRSSTLSSSSMSLSPKLCAEKEAATSELQSIQRLVSGLEAKPDRSRSASP

SEQ ID NO: 37067 - protein, 723 aa, Homo sapiens
MSLSMRDPVIPGTSMAYHPFLPHRAPDFAMSAVLGHQPPFFPALTLPPNGAAALSLPGALAKPIMDQLVGAAETGIPFSSLGPQAHLRPLKTMEPEEEVEDDPKVHLEAKELWDQFHKRGTEMVITKSGRRMFPPFKVRCSGLDKKAKYILLMDIIAADDCRYKFHNSRWMVAGKADPEMPKRMYIHPDSPATGEQWMSKVVTFHKLKLTNNISDKHGFTILNSMHKYQPRFHIVRANDILKLPYSTFRTYLFPETEFIAVTAYQNDKITQLKIDNNPFAKGFRDTGNGRREKRKQLTLQSMRVFDERHKKENGTSDESSSEQAAFNCFAQASSPAASTVGTSNLKDLCPSEGESDAEAESKEEHGPEACDAAKISTTTSEEPCRDKGSPAVKAHLFAAERPRDSGRLDKASPDSRHSPATISSSTRGLGAEERRSPVREGTAPAKVEEARALPGKEAFAPLTVQTDAAAAHLAQGPLPGLGFAPGLAGQQFFNGHPLFLHPSQFAMGGAFSSMAAAGMGPLLATVSGASTGVSGLDSTAMASAAAAQGLSGASAATLPFHLQQHVLASQGLAMSPFGSLFPYPYTYMAAAAAASSAAASSSVHRHPFLNLNTMRPRLRYSPYSIPVPVPDGSSLLTTALPSMAAAAGPLDGKVAALAASPASVAVDSGSELNSRSSTLSSSSMSLSPKLCAEKEAATSELQSIQRLVSGLEAKPDRSRSASP

SEQ ID NO: 37068 - protein, 600 aa, Homo sapiens
MSLSMRDPVIPGTSMAYHPFLPHRAPDFAMSAVLGHQPPFFPALTLPPNGAAALSLPGALAKPIMDQLVGAAETGIPFSSLGPQAHLRPLKTMEPEEEVEDDPKVHLEAKELWDQFHKRGTEMVITKSGRRMFPPFKVRCSGLDKKAKYILLMDIIAADDCRYKFHNSRWMVAGKADPEMPKRMYIHPDSPATGEQWMSKVVTFHKLKLTNNISDKHGFTLAFPSDHATWQGNYSFGTQTILNSMHKYQPRFHIVRANDILKLPYSTFRTYLFPETEFIAVTAYQNDKITQLKIDNNPFAKGFRDTGNGRREKRKQLTLQSMRVFDERHKKENGTSDESSSEQAAFNCFAQASSPAASTVGTSNLKDLCPSEGESDAEAESKEEHGPEACDAAKISTTTSEEPCRDKGSPAVKAHLFAAERPRDSGRLDKASPDSRHSPATISSSTRGLGAEERRSPVREGTAPAKVEEARALPGKEAFAPLTVQTDAASAAASSSVHRHPFLNLNTMRPRLRYSPYSIPVPVPDGSSLLTTALAASPASVAVDSGSELNSRSSTLSSSSMSLSPKLCAEKEAATSELQSIQRLVSGLEAKPDRSRSASP

SEQ ID NO: 37069 - protein, 235 aa, Homo sapiens
MGIGKSKINSCPLSLSWGKRHSVDTSPGYHESDSKKSEDLSLCNVAEHSNTTEGPTGKQEGAQSVEEMFEEEAEEEVFLKFVILHAEDDTDEALRVQNLLQDDFGIKPGIIFAEMPCGRQHLQNLDDAVNGSAWTILLLTENFLRDTWCNFQFYTSLMNSVNRQHKYNSVIPMRPLNNPLPRERTPFALQTINALEEESRGFPTQVERIFQESVYKTQQTIWKETRNMVQRQFIA

SEQ ID NO: 37070 - protein, 404 aa, Homo sapiens
MPRPGSAQRWAAVAGRWGCRLLALLLLVPGPGGASEITFELPDNAKQCFYEDIAQGTKCTLEFQVITGGHYDVDCRLEDPDGKVLYKEMKKQYDSFTFTASKNGTYKFCFSNEFSTFTHKTVYFDFQVGEDPPLFPSENRVSALTQMESACVSIHEALKSVIDYQTHFRLREAQGRSRAEDLNTRVAYWHSVDTSPGYHESDSKKSEDLSLCNVAEHSNTTEGPTGKQEGAQSVEEMFEEEAEEEVFLKFVILHAEDDTDEALRVQNLLQDDFGIKPGIIFAEMPCGRQHLQNLDDAVNGSAWTILLLTENFLRDTWCNFQFYTSLMNSVNRQHKYNSVIPMRPLNNPLPRERTPFALQTINALEEESRGFPTQVERIFQESVYKTQQTIWKETRNMVQRQFIA

SEQ ID NO: 37071 - protein, 227 aa, Homo sapiens
MSHTEVKLKIPFGNKLLDAVCLVPNKSLTYGIILTHGASGDMNLPHLMSLASHLASHGFFCLRFTCKGLNIVHRIKAYKSVLNYLKTSGEYKLAGVFLGGRSMGSRAAASVMCHIEPDDGDDFVRGLICISYPLHHPKQQHKLRDEDLFRLKEPVLFVSGSADEMCEKNLLEKVAQKMQAPHKIHWIEKANHSMAVKGRSTNDVFKEINTQILFWIQEITEMDKKCH

SEQ ID NO: 37072 - protein, 113 aa, Homo sapiens
MSHTEVKLKIPFGNKLLDAVCLVPNKSLTYGIILTHGASGDMNLPHLMSLASHLASHGFFCLRFTCKGLNIVHRIKAYKSVLNYLKTSGEYKLAGVFLGELVGESGTENASSP

SEQ ID NO: 37073 - protein, 376 aa, Homo sapiens
MANSANTNTVPKLYRSVIEDVINDVRDIFLDDGVDEQVLMELKTLWENKLMQSRAVDGFHSEEQQLLLQVQQQHQPQQQQHHHHHHHQQAQPQQTVPQQAQTQQVLIPASQQATAPQVIVPDSKLIQHMNASNMSAAATAATLALPAGVTPVQQILTNSGQLLQVVRAANGAQYIFQPQQSVVLQQQVIPQMQPGGVQAPVIQQVLAPLPGGISPQTGVIIQPQQILFTGNKTQVIPTTVAAPTPAQAQITATGQQQPQAQPAQTQAPLVLQVDGTGDTSSEEDEDEEEDYDDDEEEDKEKDGAEDGQVEEEPLNSEDDVSDEEGQELFDTENVVVCQYDKIHRSKNKWKFHLKDGIMNLNGRDYIFSKAIGDAEW

SEQ ID NO: 37074 - protein, 337 aa, Homo sapiens
MELKTLWENKLMQSRAVDGFHSEEQQLLLQVQQQHQPQQQQHHHHHHHQQAQPQQTVPQQAQTQQVLIPASQQATAPQVIVPDSKLIQHMNASNMSAAATAATLALPAGVTPVQQILTNSGQLLQVVRAANGAQYIFQPQQSVVLQQQVIPQMQPGGVQAPVIQQVLAPLPGGISPQTGVIIQPQQILFTGNKTQVIPTTVAAPTPAQAQITATGQQQPQAQPAQTQAPLVLQVDGTGDTSSEEDEDEEEDYDDDEEEDKEKDGAEDGQVEEEPLNSEDDVSDEEGQELFDTENVVVCQYDKIHRSKNKWKFHLKDGIMNLNGRDYIFSKAIGDAEW

SEQ ID NO: 37075 - protein, 435 aa, Homo sapiens
MASNSWNASSSPGEAREDGPEGLDKGLDNDAEGVWSPDIEQSFQEALAIYPPCGRRKIILSDEGKMYGRNELIARYIKLRTGKTRTRKQVSSHIQVLARKKVREYQVGIKAMNLDQVSKDKALQSMASMSSAQIVSASVLQNKFSPPSPLPQAVFSTSSRFWSSPPLLGQQPGPSQDIKPFAQPAYPIQPPLPPTLSSYEPLAPLPSAAASVPVWQDRTIASSRLRLLEYSAFMEVQRDPDTYSKHLFVHIGQTNPAFSDPPLEAVDVRQIYDKFPEKKGGLKELYEKGPPNAFFLVKFWADLNSTIQEGPGAFYGVSSQYSSADSMTISVSTKVCSFGKQVVEKVETEYARLENGRFVYRIHRSPMCEYMINFIHKLKHLPEKYMMNSVLENFTILQVVTSRDSQETLLVIAFVFEVSTSEHGAQHHVYKLVKD

SEQ ID NO: 37076 - protein, 446 aa, Homo sapiens
MAQALGEDLVQPPELQDDSSSLGSDSELSGPGPYRQADRYGFIGGSSAEPGPGHPPADLIRQREMKWVEMTSHWEKTMSRRYKKVKMQCRKGIPSALRARCWPLLCGAHVCQKNSPGTYQELAEAPGDPQWMETIGRDLHRQFPLHEMFVSPQGHGQQGLLQVLKAYTLYRPEQGYCQAQGPVAAVLLMHLPPEEAFWCLVQICEVYLPGYYGPHMEAVRLDAEVFMALLRRLLPHVHKHLQQVGVGPLLYLPEWFLCLFARSLPFPTVLRVWDAFLSEGARVLFRVGLTLVRLALGTAEQRGACPGLLETLGALRAIPPAQLQEEAFMSQVHSVVLSERDLQREIKAQLAQLPDSAPGPPPRPQVRLAGAQAIFEAQQLAGVRRGAKPEVPRIVVQPPEEPRPPRRKPQTRGKTFHGLLTRARGPPIEGPPRPQRGSTSFLDTRF

SEQ ID NO: 37077 - protein, 310 aa, Homo sapiens
MAQALGEDLVQPPELQDDSSSLGSDSELSGPGPYRQADRYGFIGGSSAEPGPGHPPADLIRQREMKWVEMTSHWEKTMSRRYKKVKMQCRKGIPSALRARCWPLLCGAHVCQKNSPGTYQELAEAPGDPQWMETIGRDLHRQFPLHEMFVSPQGHGRGSCRCSRPTPCIDRSRATARPRGPWLLCCSCTCPQRRPSGAWCRSVRSTSLGTTGPTWCQSTVPCGADTGAPGAGHCRAARGLPWPPGDTGSPSSHPPRAAAGGGLHVTGAQRGAVRAGPAAGDQGPAGPAARFRAGTPAPATGPPRRGPSHL

SEQ ID NO: 37078 - protein, 45 aa, Homo sapiens; identical to SEQ ID NO: 8947

SEQ ID NO: 37079 - protein, 297 aa, Homo sapiens [sequence omitted]

SEQ ID NO: 37080 - protein, 148 aa, Homo sapiens
MHMLNGALLALLFPVVNTRLLPFELEIYYIQHVMLYVVPIYLLWKGGAYTPEPLSSFRWALLSTGLMFFYHFSVLQILGLVTEVNLNNMLCPAISDPFYGPWYRIWASGHQTLMTMTHGKLVILFSYMAGPLCKYLLDLLRLPAKKID

SEQ ID NO: 37081 - protein, 324 aa, Homo sapiens
MSPAAAAEPDGDQQDRHVSKLIFCFFVFGAVLLCVGVLLSIFGFQACQYKPLPDCPMVLKVAGPACAVVGLGAVILARSRAQLQLRAGLQRGQQMDPDRAFICGESRQFAQCLIFGFLFLTSGMLISVLGIWVPGCGSNWAQEPLNETDTGDSEPRMCGFLSLQIMGPLIVLVGLCFFVVAHVKKRNTLNAGQDASEREEGQIQIMEPVQVTVGDSVIIFPPPPPPYFPESSASAVAESPGTNSLLPNENPPSYYSIFNYGRTPTSEGAASERDCESIYTISGTNSSSEASHTPHLPSELPPRYEEKENAAATFLPLSSEPSPP

SEQ ID NO: 37082 - protein, 323 aa, Homo sapiens
MSPAAAAEPDGDQQDRHVSKLIFCFFVFGAVLLCVGVLLSIFGFQACQYKPLPDCPMVLKVAGPACAVVGLGAVILARSRAQLQLRAGLQRGQQMDPDRAFICGESRQFAQCLIFGFLFLTSGMLISVLGIWVPGCGSNWAQEPLNETDTGDSEPRMCGFLSLQIMGPLIVLVGLCFFVVAHVKKRNTLNAGQDASEREEGQIQIMEPVQVTVGDSVIIFPPPPPPYFPESSASAVAESPGTNSLLPNENPPSYYSIFNYGTPTSEGAASERDCESIYTISGTNSSSEASHTPHLPSELPPRYEEKENAAATFLPLSSEPSPP

SEQ ID NO: 37083 - protein, 329 aa, Homo sapiens
MGRTSKDKRDVYYRLAKENGWRARSAFKLLQLDKEFQLFQGVTRAVDLCAAPGSWSQVLSQKIGGQGSGHVVAVDLQAMAPLPGVVQIQGDITQLSTAKEIIQHFKGCPADLVVCDGAPDVTGLHDVDEYMQAQLLLAALNIATHVLKPGGCFVAKIFRGRDVTLLYSQLQVFFSSVLCAKPRSSRNSSIEAFAVCQGYDPPEGFIPDLSKPLLDHSYDPDFNQLDGPTRIIVPFVTCGDLSSYDSDRSYPLDLEGGSEYKYTPPTQPPISPPYQEACTLKRKGQLAKEIRPQDCPISRVDTFPQPLAAPQCHTLLAPEMEDNEMSCSP

SEQ ID NO: 37084 - protein, 327 aa, Homo sapiens
MGRTSKDKRDVYYRLAKENGWRARSAFKLLQLDKEFQLFQGVTRAVDLCAAPGSWSQVLSQKIGGQGSGHVVAVDLQAMAPLPGVVQIQGDITQLSTAKEIIQHFKGCPADLVVCDGAPDVTGLHDVDEYMQAQLLLAALNIATHVLKPGGCFVAKIFRGRDVTLLYSQLQVFFSSVLCAKPRSSRNSSIEAFAVCQGYDPPEGFIPDLSKPLLDHSYDFNQLDGPTRIIVPFVTCGDLSSYDSDRSYPLDLEGGSEYKYTPPTQPPISPPYQEACTLKRKGQLAKEIRPQDCPISRVDTFPQPLAAPQCHTLLAPEMEDNEMSCSP

SEQ ID NO: 37085 - protein, 351 aa, Homo sapiens
MSDKNQIAARASLIEQLMSKRNFEDLGNHLTELETIYVTKEHLQETDVVRAVYRVLKNCPSVALKKKAKCLLSKWKAVYKQTHSKARNSPKLFPVRGNKEENSGPSHDPSQNETLGICSSNSLSSQDVAKLSEMIVPENRAIQLKPKEEHFGDGDPESTGKRSSELLDPTTPMRTKCIELLYAALTSSSTDQPKADLWQNFAREIEEHVFTLYSKNIKKYKTCIRSKVANLKNPRNSHLQQNLLSGTTSPREFAEMTVMEMANKELKQLRASYTESCIQEHYLPQVIDGTQTNKIKCRRCEKYNCKVTVIDRGTLFLPSWVRNSNPDEQMMTYVICNECGEQWYHSKWVCW

SEQ ID NO: 37086 - protein, 381 aa, Homo sapiens
MISAHRKLCLPGSSNSPASAFRVAGTTAVKMSDKNQIAARASLIEQLMSKRNFEDLGNHLTELETIYVTKEHLQETDVVRAVYRVLKNCPSVALKKKAKCLLSKWKAVYKQTHSKARNSPKLFPVRGNKEENSGPSHDPSQNETLGICSSNSLSSQDVAKLSEMIVPENRAIQLKPKEEHFGDGDPESTGKRSSELLDPTTPMRTKCIELLYAALTSSSTDQPKADLWQNFAREIEEHVFTLYSKNIKKYKTCIRSKVANLKNPRNSHLQQNLLSGTTSPREFAEMTVMEMANKELKQLRASYTESCIQEHYLPQVIDGTQTNKIKCRRCEKYNCKVTVIDRGTLFLPSWVRNSNPDEQMMTYVICNECGEQWYHSKWVCW

SEQ ID NO: 37087 - protein, 362 aa, Homo sapiens
MASGSAGKPTGEAASPAPASAIGGASSQPRKRLVSVCDHCKGKMQLVADLLLLSSEARPVLFEGPASSGAGAESFEQCRDTIIARTKGLSILTHDVQSQLNMGRFGEAGDSLVELGDLVVSLTECSAHAAYLAAVATPGAQPAQPGLVDRYRVTRCRHEVEQGCAVLRATPLADMTPQLLLEVSQGLSRNLKFLTDACALASDKSRDRFSREQFKLGVKCMSTSASALLACVREVKVAPSELARSRCALFSGPLVQAVSALVGFATEPQFLGRAAAVSAEGKAVQTAILGGAMSVVSACVLLTQCLRDLAQHPDGGAKMSDHRERLRNSACAVSEGCTLLSQALRERSSPRTLPPVNSNSVN

SEQ ID NO: 37088 - protein, 200 aa, Homo sapiens
MLSSVWVALGLSLTCTSAFSLISPAWFQTPTFSFGILTYCSWPQGNSWNQSCVTFSSLEDIPDFAWKVSAVMLLGGWLLLAFNAIFLLSWAVAPKGLCPRRSSVPMPGVQAVAATAMIVGLLIFPIGLASPFIKEVCEASSMYYGGKCRLGWGYMTAILNAVLASLLPIISWPHTTKVQGRTIIFSSATERIIFVPEMNK

SEQ ID NO: 37089 - protein, 446 aa, Homo sapiens
MDSDFSHAFQKELTCVICLNYLVDPVTICCGHSFCRPCLCLSWEEAQSPANCPACREPSPKMDFKTNILLKNLVTIARKASLWQFLSSEKQICGTHRQTKKMFCDMDKSLLCLLCSNSQEHGAHKHHPIEEAAEEHREKLLKQMRILWKKIQENQRNLYEEGRTAFLWRGNVVLRAQMIRNEYRKLHPVLHKEEKQHLERLNKEYQEIFQQLQRSWVKMDQKSKHLKEMYQELMEMCHKPDVELLQDLGDIVARSESVLLHMPQPVNPELTAGPITGLVYRLNRFRVEISFHFEVTNHNIRLFEDVRSWMFRRGPLNSDRSDYFAAWGARVFSFGKHYWELDVDNSCDWALGVCNNSWIRKNSTMVNSEDIFLLLCLKVDNHFNLLTTSPVFPHYIEKPLGRVGVFLDFESGSVSFLNVTKSSLIWSYPAGSLTFPVRPFFYTGHR

SEQ ID NO: 37090 - protein, 924 aa, Homo sapiens
MDVLPTGGGRPGLRTELEFRGGGGEARLESQEEETIPAAPPAPRLRGAAERPRRSRDTWDGDEDTEPGEACGGRTSRTASLVSGLLNELYSCTEEEEAAGGGRGAEGRRRRRDSLDSSTEASGSDVVLGGRSGAGDSRVLQELQERPSQRHQMLYLRQKDANELKTILRELKYRIGIQSAKLLRHLKQKDRLLHKVQRNCDIVTACLQAVSQKRRVDTKLKFTLEPSLGQNGFQQWYDALKAVARLSTGIPKEWRRKVWLTLADHYLHSIAIDWDKTMRFTFNERSNPDDDSMGIQIVKDLHRTGCSSYCGQEAEQDRVVLKRVLLAYARWNKTVGYCQGFNILAALILEVMEGNEGDALKIMIYLIDKVLPESYFVNNLRALSVDMAVFRDLLRMKLPELSQHLDTLQRTANKESGGGYEPPLTNVFTMQWFLTLFATCLPNQTVLKIWDSVFFEGSEIILRVSLAIWAKLGEQIECCETADEFYSTMGRLTQEMLENDLLQSHELMQTVYSMAPFPFPQLAELREKYTYNITPFPATVKPTSVSGRHSKARDSDEENDPDDEDAVVNAVGCLGPFSGFLAPELQKYQKQIKEPNEEQSLRSNNIAELSPGAINSCRSEYHAAFNSMMMERMTTDINALKRQYSRIKKKQQQQVHQVYIRADKGPVTSILPSQVNSSPVINHLLLGKKMKMTNRAAKNAVIHIPGHTGGKISPVPYEDLKTKLNSPWRTHIRVHKKNMPRTKSHPGCGDTVGLIDEQNEASKTNGLGAAEAFPSGCTATAGREGSSPEGSTRRTIEGQSPEPVFGDADVDVSAVQAKLGALELNQRDAAAETELRVHPPCQRHCPEPPSAPEENKATSKAPQGSNSKTPIFSPFPSVKPLRKSATARNLGLYGPTERTPTVHFPQMSRSFSKPGGGNSGTKKR

SEQ ID NO: 37091 - protein, 761 aa, Homo sapiens
MRQDKLTGSLRRGGRCLKRQGGGVGTILSNVLKKRSCISRTAPRLLCTLEPGVDTKLKFTLEPSLGQNGFQQWYDALKAVARLSTGIPKEWRRKVWLTLADHYLHSIAIDWDKTMRFTFNERSNPDDDSMGIQIVKDLHRTGCSSYCGQEAEQDRVVLKRVLLAYARWNKTVGYCQGFNILAALILEVMEGNEGDALKIMIYLIDKVLPESYFVNNLRALSVDMAVFRDLLRMKLPELSQHLDTLQRTANKESGGGYEPPLTNVFTMQWFLTLFATCLPNQTVLKIWDSVFFEGSEIILRVSLAIWAKLGEQIECCETADEFYSTMGRLTQEMLENDLLQSHELMQTVYSMAPFPFPQLAELREKYTYNITPFPATVKPTSVSGRHSKARDSDEENDPDDEDAVVNAVGCLGPFSGFLAPELQKYQKQIKEPNEEQSLRSNNIAELSPGAINSCRSEYHAAFNSMMMERMTTDINALKRQYSRIKKKQQQQVHQVYIRADKGPVTSILPSQVNSSPVINHLLLGKKMKMTNRAAKNAVIHIPGHTGGKISPVPYEDLKTKLNSPWRTHIRVHKKNMPRTKSHPGCGDTVGLIDEQNEASKTNGLGAAEAFPSGCTATAGREGSSPEGSTRRTIEGQSPEPVFGDADVDVSAVQAKLGALELNQRDAAAETELRVHPPCQRHCPEPPSAPEENKATSKAPQGSNSKTPIFSPFPSVKPLRKSATARNLGLYGPTERTPTVHFPQMSRSFSKPGGGNSGTKKR

SEQ ID NO: 37092 - protein, 637 aa, Homo sapiens
MRQDKLTGSLRRGGRCLKRQGGGVGTILSNVLKKRSCISRTAPRLLCTLEPGVDTKLKFTLEPSLGQNGFQQWYDALKAVARLSTGIPKEWRRKVWLTLADHYLHSIAIDWDKTMRFTFNERSNPDDDSMGIQIVKDLHRTGCSSYCGQEAEQDRVVLKRVLLAYARWNKTVGYCQGFNILAALILEVMEGNEGDALKIMIYLIDKVLPESYFVNNLRALSVDMAVFRDLLRMKLPELSQHLDTLQRTANKESGGGYEPPLTNVFTMQWFLTLFATCLPNQTVLKIWDSVFFEGSEIILRVSLAIWAKLGEQIECCETADEFYSTMGRLTQEMLENDLLQSHELMQTVYSMAPFPFPQLAELREKYTYNITPFPATVKPTSVSGRHSKARDSDEENDPDDEDAVVNAVGCLGPFSGFLAPELQKYQKQIKEPNEEQSLRSNNIAELSPGAINSCRSEYHAAFNSMMMERMTTDINALKRQYSRIKKKQQQQVHQVYIRADKGPVTSILPSQVNSSPVINHLLLGKKMKMTNRAAKNAVIHIPGHTGGKISPVPYEDLKTKLNSPWRTHIRVHKKNMPRTKSHPGCGDTVGLIDEQNEASKTNGLGAAEAFPSGCTATAGREGSSPEGSSSYKSLQMI

SEQ ID NO: 37093 - protein, 244 aa, Homo sapiens
MGALGLEGRGGRLQGRGSLLLAVAGATSLVTLLLAVPITVLAVLALVPQDQGGLVTETADPGAQAQQGLGFQKLPEEEPETDLSPGLPAAHLIGAPLKGQGLGWETTKEQAFLTSGTQFSDAEGLALPQDGLYYLYCLVGYRGRAPPGGGDPQGRSVTLRSSLYRAGGAYGPGTPELLLEGAETVTPVLDPARRQGYGPLWYTSVGFGGLVQLRRGERVYVNISHPDMVDFARGKTFFGAVMVG

SEQ ID NO: 37094 - protein, 77 aa, Homo sapiens
MGALGLEGRGGRLQGRGSLLLAVAGATSLVTLLLAVPITVLAVLALVPQDQGGLGFRSCQRRSQKQISAPGSQLPTS

SEQ ID NO: 37095 - protein, 284 aa, Homo sapiens
MEPGMLGPHNLPHHEPISFGIDQILSGPETPGGGLGLGRGGQGHGENGAFSGGYHGASGYGPAGSLAPLPGSSGVGPGGVIRVPAHRPLPVPPPAGGAPAVPGPSGLGGAGGLAGLTFPWMDSGRRFAKDRLTAALSPFSGTRRIGHPYQNRTPPKRKKPRTSFSRSQVLELERRFLRQKYLASAERAALAKALRMTDAQVKTWFQNRRTKWRRQTAEEREAERHRAGRLLLHLQQDALPRPLRPPLPPDPLCLHNSSLFALQNLQPWAEDNKVASVSGLASVV

SEQ ID NO: 37096 - protein, 417 aa, Homo sapiens
MEQRPRGCAAVAAALLLVLLGARAQGGTRSPRCDCAGDFHKKIGLFCCRGCPAGHYLKAPCTEPCGNSTCLVCPQDTFLAWENHHNSECARCQACDEQASQVALENCSAVADTRCGCKPGWFVECQVSQCVSSSPFYCQPCLDCGALHRHTRLLCSRRDTDCGTCLPGFYEHGDGCVSCPTSTLGSCPERCAAVCGWRQMFWVQVLLAGLVVPLLLGATLTYTYRHCWPHKPLVTADEAGMEALTPPPATHLSPLDSAHTLLAPPDSSEKICTVQLVGNSWTPGYPETQEALCPQVTWSWDQLPSRALGPAAAPTLSPESPAGSPAMMLQPGPQLYDVMDAVPARRWKEFVRTLGLREAEIEAVEVEIGRFRDQQYEMLKRWRQQQPAGLGAVYAALERMGLDGCVEDLRSRLQRGP

SEQ ID NO: 37097 - protein, 418 aa, Homo sapiens
MEQRPRGCAAVAAALLLVLLGARAQGGTRSPRCDCAGDFHKKIGLFCCRGCPAGHYLKAPCTEPCGNSTCLVCPQDTFLAWENHHNSECARCQACDEQASQVALENCSAVADTRCGCKPGWFVECQVSQCVSSSPFYCQPCLDCGALHRHTRLLCSRRDTDCGTCLPGFYEHGDGCVSCPTSTLGSCPERCAAVCGWRQMFWVQVLLAGLVVPLLLGATLTYTYRHCWPHKPLVTAADEAGMEALTPPPATHLSPLDSAHTLLAPPDSSEKICTVQLVGNSWTPGYPETQEALCPQVTWSWDQLPSRALGPAAAPTLSPESPAGSPAMMLQPGPQLYDVMDAVPARRWKEFVRTLGLREAEIEAVEVEIGRFRDQQYEMLKRWRQQQPAGLGAVYAALERMGLDGCVEDLRSRLQRGP

SEQ ID NO: 37098 - protein, 218 aa, Homo sapiens
MEQRPRGCAAVAAALLLVLLGARAQGGTRSPRCDCAGDFHKKIGLFCCRGCPAGHYLKAPCTEPCGNSTCLVCPQDTFLAWENHHNSECARCQACDEQASQVALENCSAVADTRCGCKPGWFVECQVSQCVSSSPFYCQPCLDCGALHRHTRLLCSRRDTDCGTCLPGFYEHGDGCVSCPTVLGPGAPGWPCGPPPAWGHPDLHIPPLLASQAPGYCR

SEQ ID NO: 37099 - protein, 253 aa, Homo sapiens
MEQRPRGCAAVAAALLLVLLGARAQGGTRSPRCDCAGDFHKKIGLFCCRGCPAGHYLKAPCTEPCGNSTCLVCPQDTFLAWENHHNSECARCQACDEQASQVALENCSAVADTRCGCKPGWFVECQVSQCVSSSPFYCQPCLDCGALHRHTRLLCSRRDTDCGTCLPGFYEHGDGCVSCPTSTLGSCPERCAAVCGWRQSRWCAGNARGRTGMDRGEAGEEGGNHPTPTSCFQCSGSRCSWLALWSPSCLGPP

SEQ ID NO: 37100 - protein, 181 aa, Homo sapiens
MEQRPRGCAAVAAALLLVLLGARAQGGTRSPRCDCAGDFHKKIGLFCCRGCPAGHYLKAPCTEPCGNSTCLVCPQDTFLAWENHHNSECARCQACDEQASQVALENCSAVADTRCGCKPGWFVECQVSQCVSSSPFYCQPCLDCGALHRHTRLLCSRRDTDCGTCLPGFYEHGDGCVSCPT

SEQ ID NO: 37101 - protein, 136 aa, Homo sapiens
MEQRPRGCAAVAAALLLVLLGARAQGGTRSPRCDCAGDFHKKIGLFCCRGCPAASQVALENCSAVADTRCGCKPGWFVECQVSQCVSSSPFYCQPCLDCGALHRHTRLLCSRRDTDCGTCLPGFYEHGDGCVSCPT

SEQ ID NO: 37102 - protein, 126 aa, Homo sapiens
MEQRPRGCAAVAAALLLVLLGARAQGGTRSPRCDCAGDFHKKIGLFCCRGCPAASQVALENCSAVADTRCGCKPGWFVECQVSQCVSSSPFYCQPCLDCGALHRHTRLLCHPSVTLGQRPHPSSTS

SEQ ID NO: 37103 - protein, 234 aa, Homo sapiens
MEQRPRGCAAVAAALLLVLLGARAQGGTRSPRCDCAGDFHKKIGLFCCRGCPADEAGMEALTPPPATHLSPLDSAHTLLAPPDSSEKICTVQLVGNSWTPGYPETQEALCPQVTWSWDQLPSRALGPAAAPTLSPESPAGSPAMMLQPGPQLYDVMDAVPARRWKEFVRTLGLREAEIEAVEVEIGRFRDQQYEMLKRWRQQQPAGLGAVYAALERMGLDGCVEDLRSRLQRGP

SEQ ID NO: 37104 - protein, 372 aa, Homo sapiens
MEQRPRGCAAVAAALLLVLLGARAQGGTRSPRCDCAGDFHKKIGLFCCRGCPAASQVALENCSAVADTRCGCKPGWFVECQVSQCVSSSPFYCQPCLDCGALHRHTRLLCSRRDTDCGTCLPGFYEHGDGCVSCPTSTLGSCPERCAAVCGWRQMFWVQVLLAGLVVPLLLGATLTYTYRHCWPHKPLVTADEAGMEALTPPPATHLSPLDSAHTLLAPPDSSEKICTVQLVGNSWTPGYPETQEALCPQVTWSWDQLPSRALGPAAAPTLSPESPAGSPAMMLQPGPQLYDVMDAVPARRWKEFVRTLGLREAEIEAVEVEIGRFRDQQYEMLKRWRQQQPAGLGAVYAALERMGLDGCVEDLRSRLQRGP

SEQ ID NO: 37105 - protein, 380 aa, Homo sapiens
MEQRPRGCAAVAAALLLVLLGARAQGGTRSPRCDCAGDFHKKIGLFCCRGCPAGHYLKAPCTEPCGNSTCLVCPQDTFLAWENHHNSECARCQACDEQASQVALENCSAVADTRCGCKPGWFVECQVSQCVSSSPFYCQPCLDCGALHRHTRLLCSRRDTDCGTCLPGFYEHGDGCVSCPTSTLGSCPERCAAVCGWRQNEAGMEALTPPPATHLSPLDSAHTLLAPPDSSEKICTVQLVGNSWTPGYPETQEALCPQVTWSWDQLPSRALGPAAAPTLSPESPAGSPAMMLQPGPQLYDVMDAVPARRWKEFVRTLGLREAEIEAVEVEIGRFRDQQYEMLKRWRQQQPAGLGAVYAALERMGLDGCVEDLRSRLQRGP

SEQ ID NO: 37106 - protein, 426 aa, Homo sapiens
MEQRPRGCAAVAAALLLVLLGARAQGGTRSPRCDCAGDFHKKIGLFCCRGCPAGHYLKAPCTEPCGNSTCLVCPQDTFLAWENHHNSECARCQACDEQASQVALENCSAVADTRCGCKPGWFVECQVSQCVSSSPFYCQPCLDCGALHRHTRLLCSRRDTDCGTCLPGFYEHGDGCVSCPTPPPSLAGAPWGAVQSAVPLSVAGGRVGVFWVQVLLAGLVVPLLLGATLTYTYRHCWPHKPLVTADEAGMEALTPPPATHLSPLDSAHTLLAPPDSSEKICTVQLVGNSWTPGYPETQEALCPQVTWSWDQLPSRALGPAAAPTLSPESPAGSPAMMLQPGPQLYDVMDAVPARRWKEFVRTLGLREAEIEAVEVEIGRFRDQQYEMLKRWRQQQPAGLGAVYAALERMGLDGCVEDLRSRLQRGP

SEQ ID NO: 37107 - protein, 277 aa, Homo sapiens
MEQRPRGCAAVAAALLLVLLGARAQGGTRSPRCDCAGDFHKKIGLFCCRGCPAGHYLKAPCTEPCGNSTCLVCPQDTFLAWENHHNSECARCQACDEQASQVALENCSAVADTRCGCKPGWFVECQVSQCVSSSPFYCQPCLDCGALHRHTRLLCSRRDTDCGTCLPGFYEHGDGCVSCPTPPPSLAGAPWGAVQSAVPLSVAGGRVGGVLGMRVGELGWTEGRRVRRGATTQHPPAAFSVLGPGAPGWPCGPPPAWGHPDLHIPPLLASQAPGYCR

SEQ ID NO: 37108 - protein, 147 aa, Homo sapiens
MAPGPWPVSCLRGGPLGLTYLSLLLIPAAAGTYCECSLGLSREALIALLVVLAGISASCFCALVIVAIGVLRAKGETCPRQVDNRLVENFGVQEDLMDLHPVYVESQLMDADLEVSLVPPLEDQSLVAIPMEASSEEPPPPPPLPPE

SEQ ID NO: 37109 - protein, 219 aa, Homo sapiens
MSEQEAQAPGGRGLPPDMLAEQVELWWSQQPRRSALCFVVAVGLVAGCGAGGVALLSTTSSRSGEWRLATGTVLCLLALLVLVKQLMSSAVQDMNCIRQAHHVALLRSGGGADALVVLLSGLVLLVTGLTLAGLAAAPAPARPLAAMLSVGIALAALGSLLLLGLLLYQVGVSGHCPSICMATPSTHSGHGGHGSIFSISGQLSAGRRHETTSSIASLI

SEQ ID NO: 37110 - protein, 167 aa, Homo sapiens
MNRPAPVEISYENMRFLITHNPTNATLNKFTEELKKYGVTTLVRVCDATYDKAPVEKEGIHVLDWPFDDGAPPPNQIVDDWLNLLKTKFREEPGCCVAVHCVAGLGRAPVLVALALIECGMKYEDAVQFIRQKRRGAFNSKQLLYLEKYRPKMRLRFRDTNGHCCVQ

SEQ ID NO: 37111 - protein, 82 aa, Homo sapiens
MNRPAPVEISYENMRFLITHNPTNATLNKFTEELKKYGVTTLVRVCDATYDKAPVEKEGIHVLKKKGSVQFQTAALFGEIPT

SEQ ID NO: 37112 - protein, 136 aa, Homo sapiens
MNRPAPVEISYENMRFLITHNPTNATLNKFTEDWPFDDGAPPPNQIVDDWLNLLKTKFREEPGCCVAVHCVAGLGRAPVLVALALIECGMKYEDAVQFIRQKRRGAFNSKQLLYLEKYRPKMRLRFRDTNGHCCVQ

SEQ ID NO: 37113 - protein, 142 aa, Homo sapiens
MNRPAPVEISYENMRFLITHNPTNATLNKFTEELKKYGVTTLVRVCDATYDKAPVEKEGIHVLDWPFDDGAPPPNQIVDDWLNLLKTKFREEPGCCVAVHCVAGLGRKRRGAFNSKQLLYLEKYRPKMRLRFRDTNGHCCVQ

SEQ ID NO: 37114 - protein, 852 aa, Homo sapiens
MLGPAVLGLSLWALLHPGTGAPLCLSQQLRMKGDYVLGGLFPLGEAEEAGLRSRTRPSSPVCTRFSSNGLLWALAMKMAVEEINNKSDLLPGLRLGYDLFDTCSEPVVAMKPSLMFLAKAGSRDIAAYCNYTQYQPRVLAVIGPHSSELAMVTGKFFSFFLMPQVSYGASMELLSARETFPSFFRTVPSDRVQLTAAAELLQEFGWNWVAALGSDDEYGRQGLSIFSALAAARGICIAHEGLVPLPRADDSRLGKVQDVLHQVNQSSVQVVLLFASVHAAHALFNYSISSRLSPKVWVASEAWLTSDLVMGLPGMAQMGTVLGFLQRGAQLHEFPQYVKTHLALATDPAFCSALGEREQGLEEDVVGQRCPQCDCITLQNVSAGLNHHQTFSVYAAVYSVAQALHNTLQCNASGCPAQDPVKPWQLLENMYNLTFHVGGLPLRFDSSGNVDMEYDLKLWVWQGSVPRLHDVGRFNGSLRTERLKIRWHTSDNQKPVSRCSRQCQEGQVRRVKGFHSCCYDCVDCEAGSYRQNPDDIACTFCGQDEWSPERSTRCFRRRSRFLAWGEPAVLLLLLLLSLALGLVLAALGLFVHHRDSPLVQASGGPLACFGLVCLGLVCLSVLLFPGQPSPARCLAQQPLSHLPLTGCLSTLFLQAAEIFVESELPLSWADRLSGCLRGPWAWLVVLLAMLVEVALCTWYLVAFPPEVVTDWHMLPTEALVHCRTRSWVSFGLAHATNATLAFLCFLGTFLVRSQPGCYNRARGLTFAMLAYFITWVSFVPLLANVQVVLRPAVQMGALLLCVLGILAAFHLPRCYLLMRQPGLNTPEFFLGGGPGDAQGQNDGNTGNQGKHE

SEQ ID NO: 37115 - protein, 644 aa, Homo sapiens
MEAERGPERRPAERSSPGQTPEEGAQALAEFAALHGPALRASGVPERYWGRLLHKLEHEVFDAGEVFGIMQVEEVEEEEDEAAREVRKQQPNPGNELCYKVIVTRESGLQAAHPNSIFLIDHAWTCRVEHARQQLQQVPGLLHRMANLMGIEFHGELPSTEAVALVLEEMWKFNQTYQLAHGTAEEKMPVWYIMDEFGSRIQHADVPSFATAPFFYMPQQVAYTLLWPLRDLDTGEEVTRDFAYGETDPLIRKCMLLPWAPTDMLDLSSCTPEPPAEHYQAILEENKEKLPLDINPVVHPHGHIFKVYTDVQQVASSLTHPRFTLTQSEADADILFNFSHFKDYRKLSQERPGVLLNQFPCENLLTVKDCLASIARRAGGPEGPPWLPRTFNLRTELPQFVSYFQQRERWGEDNHWICKPWNLARSLDTHVTKSLHSIIRHRESTPKVVSKYIESPVLFLREDVGKVKFDIRYIVLLRSVRPLRLFVYDVFWLRFSNRAFALNDLDDYEKHFTVMNYDPDVVLKQVHCEEFIPEFEKQYPEFPWTDVQAEIFRAFTELFQVACAKPPPLGLCDYPSSRAMYAVDLMLKWDNGPDGRRVMQPQILEVNFNPDCERACRYHPTFFNDVFSTLFLDQPGGCHVTCLV

SEQ ID NO: 37116 - protein, 423 aa, Homo sapiens
MAGKVKWVTDIEKSVLINNFEKRGWVQVTENEDWNFYWMSVQTIRNVFSVEAGYRLSDDQIVNHFPNHYELTRKDLMVKNIKRYRKELEKEGSPLAEKDENGKYLYLDFVPVTYMLPADYNLFVEEFRKSPSSTWIMKPCGKAQGKGIFLINKLSQIKKWSRDSKTSSFVSQSNKEAYVISLYINNPLLIGGRKFDLRLYVLVSTYRPLRCYMYKLGFCRFCTVKYTPSTSELDNMFVHLTNVAIQKHGEDYNHIHGGKWTVSNLRLYLESTRGKEVTSKLFDEIHWIIVQSLKAVAPVMNNDKHCFECYGYDIIIDDKLKPWLIEVNASPSLTSSTANDRILKYNLINDTLNIAVPNGEIPDCKWNKSPPKEVLGNYEILYDEELAQGDGADRELRSRQGQSLGPRAGRSRDSGRAVLTTWK

SEQ ID NO: 37117 - protein, 59 aa, Homo sapiens
MAGKVKWVTDIEKSVLINNFEKRGWVQVTENEDWNFYWLLDLPEFRYRSCLNEFPDFRV

SEQ ID NO: 37118 - protein, 394 aa, Homo sapiens
MAGKVKWVTDIEKSVLINNFEKRGWVQVTENEDWNFYWMSVQTIRNVFSVEAGYRLSDDQIVNHFPNHYELTRKDLMVKNIKRYRKELEKEGSPLAEKDENGKYLYLDFVPVTYMLPADYNLFVEEFRKSPSSTWIMKPCGKAQGKGIFLINKLSQIKKWSRDSKTSSFVSQSNKEAYVISLYINNPLLIGGRKFDLRLYVLVSTYRPLRCYMYKLGFCRFCTVKYTPSTSELDNMFVHLTNVAIQKHGEDYNHIHGGKWTVSNLRLYLESTRGKEVTSKLFDEIHWIIVQSLKAVAVNASPSLTSSTANDRILKYNLINDTLNIAVPNGEIPDCKWNKSPPKEVLGNYEILYDEELAQGDGADRELRSRQGQSLGPRAGRSRDSGRAVLTTWK

SEQ ID NO: 37119 - protein, 268 aa, Homo sapiens
MSGKHYKGPEVSCCIKYFIFGFNVIFWFLGITFLGIGLWAWNEKGVLSNISSITDLGGFDPVWLFLVVGGVMFILGFAGCIGALRENTFLLKFFSVFLGIIFFLELTAGVLAFVFKDWIKDQLYFFINNNIRAYRDDIDLQNLIDFTQEYWQCCGAFGADDWNLNIYFNCTDSNASRERCGVPFSCCTKDPAEDVINTQCGYDARQKPEVDQQIVIYTKGCVPQFEKWLQDNLTIVAGIFIGIALLQIFGICLAQNLVSDIEAVRASW

SEQ ID NO: 37120 - protein, 308 aa, Homo sapiens
MRPEGSLTYRVPERLRQGFCGVGRAAQALVCASAKEGTAFRMEAVQEGAAGVESEQAALGEEAVLLLDDIMAEVEVVAEEEGLVERREEAQRAQQAVPGPGPMTPESAPEELLAVQVELEPVNAQARKAFSRQREKMERRRKPHLDRRGAVIQSVPGFWANVIANHPQMSALITDEDEDMLSYMVSLEVGEEKHPVHLCKIMLFFRSNPYFQNKVITKEYLVNITEYRASHSTPIEWYPDYEVEAYRRRHHNSSLNFFNWFSDHNFAGSNKIAEILCKDLWRNPLQYYKRMKPPEEGTETSGDSQLLS

SEQ ID NO: 37121 - protein, 294 aa, Homo sapiens
MRPEGSLTYRVPERLRQGFCGVGRAAQALVCASAKEGTAFRMEAVQEGAAGVESEQAALGEEAVLLLDDIMAEVEVVAEEEGLVERREEAQRAQQAVPGPGPMTPESAPEELLAVQVELEPVNAQARKAFSRQREKMERRRKPHLDRRGAVIQSVPGFWANVIANHPQMSALITDEDEDMLSYMVSLEVGEEKHPVHLCKIMLFFRSNPYFQNKVITKEYLVNITEYRASHSTPIEWYPDYEVEAYRRRHHNSSLNFFNWFSDHNFAGSNKIAESPDRSYVRTCGAIPCNTTRG

SEQ ID NO: 37122 - protein, 546 aa, Homo sapiens
MKNQDKKNGAAKQSNPKSSPGQPEAGPEGAQERPSQAAPAVEAEGPGSSQAPRKPEGAQARTAQSGALRDVSEELSRQLEDILSTYCVDNNQGGPGEDGAQGEPAEPEDAEKSRTYVARNGEPEPTPVVNGEKEPSKGDPNTEEIRQSDEVGDRDHRRPQEKKKAKGLGKEITLLMQTLNTLSTPEEKLAALCKKYAELLEEHRNSQKQMKLLQKKQSQLVQEKDHLRGEHSKAVLARSKLESLCRELQRHNRSLKEEGVQRAREEEEKRKEVTSHFQVTLNDIQLQMEQHNERNSKLRQENMELAERLKKLIEQYELREEHIDKVFKHKDLQQQLVDAKLQQAQEMLKEAEERHQREKDFLLKEAVESQRMCELMKQQETHLKQQLALYTEKFEEFQNTLSKSSEVFTTFKQEMEKMTKKIKKLEKETTMYRSRWESSNKALLEMAEEKTVRDKELEGLQVKIQRLEKLCRALQTERNDLNKRVQDLSAGGQGSLTDSGPERRPEGPGAQAPSSPRVTEAPCYPGAPSTEASGQTGPQEPTSARA

SEQ ID NO: 37123 - protein, 330 aa, Homo sapiens
MGSRKKEIALQVNISTQELWEEMLSSKGLTVVDVYQGWCGPCKPVVSLFQKMRIEVGLDLLHFALAEADRLDVLEKYRGKCEPTFLFYAGGELVAVVRGANAPLLQKTILDQLEAEKKVLAEGRERKVIKDEALSDEDECVSHGKNNGEDEDMVSSERTCTLAIIKPDAVAHGKTDEIIMKIQEAGFEILTNEERTMTEAEVRLFYQHKAGEEAFEKLVHHMCSGPSHLLILTRTEGFEDVVTTWRTVMGPRDPNVARREQPESLRAQYGTEMPFNAVHGSRDREDADRELALLFPSLKFSDKDTEAPQGGEAEATAGPTEALCFPEDVD

SEQ ID NO: 37124 - protein, 263 aa, Homo sapiens
MLSSKGLTVVDVYQGWCGPCKPVVSLFQKMRIEVGLDLLHFALAEADRLDVLEKYRGKCEPTFLFYAIKDEALSDEDECVSHGKNNGEDEDMVSSERTCTLAIIKPDAVAHGKTDEIIMKIQEAGFEILTNEERTMTEAEVRLFYQHKAGEEAFEKLVHHMCSGPSHLLILTRTEGFEDVVTTWRTVMGPRDPNVARREQPESLRAQYGTEMPFNAVHGSRDREDADRELALLFPSLKFSDKDTEAPQGESSTQPRLKITDLD

SEQ ID NO: 37125 - protein, 261 aa, Homo sapiens
MGSRKKEIALQVNISTQELWEEMLSSKGLTVVDVYQGWCGPCKPVVSLFQKMRIEVGLDLLHFALIKDEALSDEDECVSHGKNNGEDEDMVSSERTCTLAIIKPDAVAHGKTDEIIMKIQEAGFEILTNEERTMTEAEVRLFYQHKAGEEAFEKLVHHMCSGPSHLLILTRTEGFEDVVTTWRTVMGPRDPNVARREQPESLRAQYGTEMPFNAVHGSRDREDADRELALLFPSLKFSDKDTEAPQGESSTQPRLKITDLD

SEQ ID NO: 37126 - protein, 74 aa, Homo sapiens
MQLFVRAQELHTFEVTGQETVAQIKAHVASLEGIAPEDQVVLLAGAPLEDEATLGQCGVEALTTLEVAGRMLGG

SEQ ID NO: 37127 - protein, 404 aa, Homo sapiens
MAESVERLQQRVQELERELAQERSLQVPRSGDGGGGRVRIEKMSSEVVDSNPYSRLMALKRMGIVSDYEKIRTFAVAIVGVGGVGSVTAEMLTRCGIGKLLLFDYDKVELANMNRLFFQPHQAGLSKVQAAEHTLRNINPDVLFEVHNYNITTVENFQHFMDRISNGGLEEGKPVDLVLSCVDNFEARMTINTACNELGQTWMESGVSENAVSGHIQLIIPGESACFACAPPLVVAANIDEKTLKREGVCAASLPTTMGVVAGILVQNVLKFLLNFGTVSFYLGYNAMQDFFPTMSMKPNPQCDDRNCRKQQEEYKKKVAALPKQEVIQEEEEIIHEDNEWGIELVSEVSEEELKNFSGPVPDLPEGITVAYTIPKKQEDSVTELTVEDSGESLEDLMAKMKNM

SEQ ID NO: 37128 - protein, 348 aa, Homo sapiens
MALKRMGIVSDYEKIRTFAVAIVGVGGVGSVTAEMLTRCGIGKLLLFDYDKVELANMNRLFFQPHQAGLSKVQAAEHTLRNINPDVLFEVHNYNITTVENFQHFMDRISNGGLEEGKPVDLVLSCVDNFEARMTINTACNELGQTWMESGVSENAVSGHIQLIIPGESACFACAPPLVVAANIDEKTLKREGVCAASLPTTMGVVAGILVQNVLKFLLNFGTVSFYLGYNAMQDFFPTMSMKPNPQCDDRNCRKQQEEYKKKVAALPKQEVIQEEEEIIHEDNEWGIELVSEVSEEELKNFSGPVPDLPEGITVAYTIPKKQEDSVTELTVEDSGESLEDLMAKMKNM

SEQ ID NO: 37129 - protein, 479 aa, Homo sapiens
MAALEKMTFPKKMTFPEKPSHKKYRAALKKEKRKKRRQELARLRDSGLSQEEEEDTFIEEQQLEEEKLLERERERLHEEWLLREQKAQEEFRIKKEKEEAAKKWLEEQERKLKEQWKEQQRKEREEEEQKQQEKKEKEEAVQKMLDQAENDLENSTTWQNPEPPVDFRVMEKDRANCPFYSKTGACRFGDRCSRKHNFPTSSPTLLIKSMFTTFGMEQCRRDDYDPDASLEYSEEETYQQFLDFYEDVLPEFKNVGKVIQFKVSCNLEPHLRGNVYVQYQSEEECQAALSLFNGRWYAGRQLQCEFCPVTRWKMAICGLFEIQQCPRGKHCNFLHVFRNPNNEFWEANRDIYLSSDQTGSSFGKNSERREKMGHHDHYYSRQRGRRNPSPDHTYKRNGESERKKSSHRGKKSHKRTSKSRERHNSPSRGRNRHRSWDQGRRSQSRRSHRSRSQSSSRCRSRGRRKSGNRDRTVQSPQSK

SEQ ID NO: 37130 - protein, 259 aa, Homo sapiens
MDRSAEFRKWKAQCLSKADLSRKGSVDEDVVELVQFLNMRDQFFTTSSCAGRILLLDRGINGFEVQKQNCCWLLVTHKLCVKDDVIVALKKANGDATLKFEPFVLHVQCRQLQDAQILHSMAIDSGFRNSGITVGKRGKTMLAVRSTHGLEVPLSHKGKLMVTEEYIDFLLNVANQKMEENKKRIERFYNCLQHALERETMTNLHPKIKEKNNSSYIHKKKRNPEKTRAQCITKESDEELENDDDDDLGINVTIFPEDY

SEQ ID NO: 37131 - protein, 226 aa, Homo sapiens
MDRSAEFRKWKAQCLSKADLSRKGSVDEDVVELVQFLNMRDQFFTTSSCAGRILLLDRGINGFEVQKQNCCWLLVTHKLCVKDDVHSMAIDSGFRNSGITVGKRGKTMLAVRSTHGLEVPLSHKGKLMVTEEYIDFLLNVANQKMEENKKRIERFYNCLQHALERETMTNLHPKIKEKNNSSYIHKKKRNPEKTRAQCITKESDEELENDDDDDLGINVTIFPEDY

SEQ ID NO: 37132 - protein, 116 aa, Homo sapiens
MAGIELERCQQQANEVTEIMRNNFGKVLERGVKLAELQQRSDQLLDMSSTFNKTTQNLAQKKCWENIRYRICVGLVVVGVLLIILIVLLVVFLPQSSDSSSAPRTQDAGIASGPGN

SEQ ID NO: 37133 - protein, 1440 aa, Homo sapiens
MAGIIKKQILKHLSRFTKNLSPDKINLSTLKGEGQLTNLELDEEVLQNVLELPTWLAITRVYCNRASIRIQWTKLKTHPICLCLDKVEVEMKTCEDPRPPNGQSPIALASGQSEYGFAEKVVEGMFIIVNSITIKIHSKAFHASFELWQLQGYSVNPNWQQSDLRLTRITDPCRGEVLTFKEITWQTLRIEADATDNGDQDPVTTPLRLITNQGRIQIALKRRTKDCNVISSKLMFLLDDLLWVLTDSQLKAMMKYAESLSEAMEKSAHQRKSLAPEPVQITPPAPSAQQSWAQAFGGSQGNSNSSSSRLSQYFEKFDVKESSYHLLISRLDLHICDDSQSREPGVSANRLMGGAMQLTFRKMAFDYYPFHWAGDSCKHWVRHCEAMETRGQWAQKLVMEFQSKMEKWHEETGLKPPWHLGVDSLFRRKADSLSSPRKNPLERSPSQGRQPAFQPPAWNRLRSSCMVVRVDDLDIHQVSTAGQPSKKPSTLLSCSRKLHNLPTQVSAIHIEFTEYYFPDNQELPVPCPNLYIQLNGLTFTMDPVSLLWGNLFCLDLYRSLEQFKAIYKLEDSSQKDEHLDIRLDAFWLKVSFPLEKRERAELHRPQALVFSASGMIATNTRHAPHCSCSDLQSLFRGFAAAEFFHSNYDHFPKVPGGFSLLHMLFLHHAFQMDSCLPQPNTLPPQRPKASWDLWSVHFTQISLDFEGTENFKGHTLNFVAPFPLSIWACLPLRWQQAQARKLLLASEGRLKPSASFGSPVQSEALAPDSMSHPRSKTEHDLKSLSGLTEVMEILKEGSSGMDNKGPLTELEDVADVHMLVHSPAHVRVRLDHYQYLALLRLKEVLQRLQEQLTKDTESMTGSPLQNQTACIGVLFPSAEVALLMHPAPGAVDADSAGSDSTSLVDSELSPSEDRELKSDASSDQGPASPEKVLEESSIENQDVSQERPHSNGELQDSGPLAQQLAGKGHEAVESLQAKKLSRTQASSSPAALKPPAGRETAVNGQGELIPLKNIEGELSSAIHMTKDATKEALHATMDLTKEAVSLTKDAFSLGRDRMTSTMHKMLSLPPAKEPMAKTDEGVAAPVSGGAARLRFFSMKRTVSQQSFDGVSLDSSGPEDRISVDSDGSDSFVMLLESESGPESVPPGSLSNVSDNAGVQGSPLVNNYGQGSPAANSSVSPSGEDLIFHPVSVLVLKVNEVSFGIEVRGEDLTVALQAEELTLQQLGTVGLWQFLHGQCPGTCFQESSTLKTGHIRPAVGLRFEVGPGAAVHSPLASQNGFLHLLLHGCDLELLTSVLSGLGPFLEDEEIPVVVPMQIELLNSSITLKDDIPPIYPTSPGPIPITLAMEHVVLKRSDDGVFHIGAAAQDKPSAEVLKSEKRQPPKEQVFLVPTGEVFEQQVKELPILQKELIETKQALANANQDKEKLLQEIRKYNPFFEL

SEQ ID NO: 37134 - protein, 311 aa, Homo sapiens
MENQSSISEFFLRGISAPPEQQQSLFGIFLCMYLVTLTGNLLIILAIGSDLHLHTPMYFFLANLSFVDMGLTSSTVTKMLVNIQTRHHTISYTGCLTQMYFFLMFGDLDSFFLAAMAYDRYVAICHPLCYSTVMRPQVCALMLALCWVLTNIVALTHTFLMARLSFCVTGEIAHFFCDITPVLKLSCSDTHINEMMVFVLGGTVLIVPFLCIVTSYIHIVPAILRVRTRGGVGKAFSTCSSHLCVVCVFYGTLFSAYLCPPSIASEEKDIAAAAMYTIVTPMLNPFIYSLRNKDMKGALKRLFSHRSIVSS

SEQ ID NO: 37135 - protein, 314 aa, Homo sapiens
MERQNQSCVVEFILLGFSNYPELQGQLFVAFLVIYLVTLIGNAIIIVIVSLDQSLHVPMYLFLLNLSVVDLSFSAVIMPEMLVVLSTEKTTISFGGCFAQMYFILLFGGAECFLLGAMAYDRFAAICHPLNYQMIMNKGVFMKLIIFSWALGFMLGTVQTSWVSSFPFCGLNEINHISCETPAVLELACADTFLFEIYAFTGTFLIILVPFLLILLSYIRVLFAILKMPSTTGRQKAFSTCAAHLTSVTLFYGTASMTYLQPKSGYSPETKKVMSLSYSLLTPLLNLLIYSLRNSEMKRALMKLWRRRVVLHTI

SEQ ID NO: 37136 - protein, 309 aa, Homo sapiens
MKNRTMFGEFILLGLTNQPELQVMIFIFLFLTYMLSILGNLTIITLTLLDPHLQTPMYFFLRNFSFLEISFTSIFIPRFLTSMTTGNKVISFAGCLTQYFFAIFLGATEFYLLASMSYDRYVAICKPLHYLTIMSSRVCIQLVFCSWLGGFLAILPPIILMTQVDFCVSNILNHYYCDYGPLVELACSDTSLLELMVILLAVVTLMVTLVLVTLSYTYIIRTILRIPSAQQRTKAFSTCSSHMIVISLSYGSCMFMYINPSAKEGGAFNKGIAVLITSVTPLLNPFIYTLRNQQVKQAFKDSVKKIVKL

SEQ ID NO: 37137 - protein, 563 aa, Homo sapiens
MSDDAGDTLATGDKAEVTEMPNSDSLPEDAEVHCDSAAVSHEPTPADPRGEGHENAAVQGAGAAAIGPPVQPQDANALEPPLNGDVTEDTLAECIDSVSLEAEPRSEIPLQEQNYLAVDSPPSGGGWAGWGSWGKSLLSSASATVGHGLTAVKEKAGATLRIHGVNSGSSEGAQPNTENGVPEITDAATDQGPAESPPTSPSSASRGMLSAITNVVQNTGKSVLTGGLDALEFIGKKTMNVLAESDPGFKRTKTLMERTVSLSQMLREAKEKEKQRLAQQLTMERTAHYGMLFDEYQGLSHLEALEILSNESESKVQSFLASLDGEKLELLKNDLISIKDIFAAKELENEENQEEQGLEEKGEEFARMLTELLFELHVAATPDKLNKAMKRAHDWVEEDQTVVSVDVAKVSEEETKKEEKEEKSQDPQEDKKEEKKTKTIEEVYMSSIESLAEVTARCIEQLHKVAELILHGQEEEKPAQDQAKVLIKLTTAMCNEVASLSKKFTNSLTTVGSNKKAEVLNPMISSVLLEGCNSTTYIQDAFQLLLPVLQVSHIQTSCLKAQP

SEQ ID NO: 37138 - protein, 356 aa, Homo sapiens
MLSAITNVVQNTGKSVLTGGLDALEFIGKKTMNVLAESDPGFKRTKTLMERTVSLSQMLREAKEKEKQRLAQQLTMERTAHYGMLFDEYQGLSHLEALEILSNESESKVQSFLASLDGEKLELLKNDLISIKDIFAAKELENEENQEEQGLEEKGEEFARMLTELLFELHVAATPDKLNKAMKRAHDWVEEDQTVVSVDVAKVSEEETKKEEKEEKSQDPQEDKKEEKKTKTIEEVYMSSIESLAEVTARCIEQLHKVAELILHGQEEEKPAQDQAKVLIKLTTAMCNEVASLSKKFTNSLTTVGSNKKAEVLNPMISSVLLEGCNSTTYIQDAFQLLLPVLQVSHIQTSCLKAQP

SEQ ID NO: 37139 - protein, 355 aa, Homo sapiens
MEPEKQTEISEFFLQGLSEKPEHQTLLFTMFLSTYLVTIIGNALIILAIITDSHLHTPMYFFLFNLSLVDTLLSSTTVPKMLANIQAQSRAIPFVGCLTQMYAFHLFGTMDSFLLAVMAIDRFVAIVHPQRYLVLMCSPVCGLLLGASWMITNLQSLIHTCLMAQLTFCAGSEISHFFCDLMPLLKLSGSDTHTNELVIFAFGIVVGTSPFSCILLSYIRIFWTVFKIPSTRGKWKAFSTCGLHLTVVSLSYGTIFAVYLQPTSPSSSQKDKAAALMCGVFIPMLNPFIYSIRNKDMKAALGKLIGKVAVPCPRPEQLLDVYHVPGSLLAARDTEMHPIPYPGGVQSLAGNRDME

SEQ ID NO: 37140 - protein, 312 aa, Homo sapiens
MDGGNQSEGSEFLLLGMSESPEQQRILFWMFLSMYLVTVVGNVLIILAISSDSRLHTPVYFFLANLSFTDLFFVTNTIPKMLVNLQSHNKAISYAGCLTQLYFLVSLVALDNLILAVMAYDRYVAICCPLHYTTAMSPKLCILLLSLCWVLSVLYGLIHTLLMTRVTFCGSRKIHYIFCEMYVLLRMACSNIQINHTVLIATGCFIFLIPFGFVIISYVLIIRAILRIPSVSKKYKAFSTCASHLGAVSLFYGTLCMVYLKPLHTYSVKDSVATVMYAVVTPMMNPFIYSLRNKDMHGALGRLLDKHFKRLT

SEQ ID NO: 37141 - protein, 357 aa, Homo sapiens
MNWVNKSVPQEFILLVFSDQPWLEIPPFVMFLFSYILTIFGNLTIILVSHVDFKLHTPMYFFLSNLSLLDLCYTTSTVPQMLVNICNTRKVISYGGCVAQLFIFLALGSTECLLLAVMCFDRFVAICRPLHYSIIMHQRLCFQLAAASWISGFSNSVLQSTWTLKMPLCGHKEVDHFFCEVPALLKLSCVDTTANEAELFFISVLFLLIPVTLILISYAFIVQAVLRIQSAEGQRKAFGTCGSHLIVVSLFYGTAISMYLQPPSPSSKDRGKMVSLFCGIIAPMLNPLIYTLRNKEVKEAFKRLVAKSLLNQEIRNMQMISFAKDTVLTYLTNFSASCPIFVITIENYCNLPQRKFP

SEQ ID NO: 37142 - protein, 318 aa, Homo sapiens
MGFYHVGQAAFELLTSSFILVGFSDRPHLELIVFVVVLIFYLLTLLGNMTIVLLSALDSRLHTPMYFFLANLSFLDMCFTTGSIPQMLYNLWGPDKTISYVGCAIQLYFVLALGGVECVLLAVMAYDRYAAVCKPLHYTIIMHPRLCGQLASVAWLSGFGNSLIMAPQTLMLPRCGHRRVDHFLCEMPALIGMACVDTMMLEALAFALAIFIILAPLILILISYGYVGGTVLRIKSAAGRKKAFNTCSSHLIVVSLFYGTIIYMYLQPANTYSQDQGKFLTLFYTIVTPSVNPLIYTLRNKDVKEAMKKVLGKGSAEI

SEQ ID NO: 37143 - protein, 321 aa, Homo sapiens
MFLSSRMITSVSPSTSTNSSFLLTGFSGMEQQYPWLSIPFSSIYAMVLLGNCMVLHVIWTEPSLHQPMFYFLSMLALTDLCMGLSTVYTVLGILWGIIREISLDSCIAQSYFIHGLSFMESSVLLTMAFDRYIAICNPLRYSSILTNSRIIKIGLTIIGRSFFFITPPIICLKFFNYCHFHILSHSFCLHQDLLRLACSDIRFNSYYALMLVICILLLDAILILFSYILILKSVLAVASQEERHKLFQTCISHICAVLVFYIPIISLTMVHRFGKHLSPVAHVLIGNIYILFPPLMNPIIYSVKTQQIHTRMLRLFSLKRY

SEQ ID NO: 37144 - protein, 319 aa, Homo sapiens
MLQNQDTMEILSNSTSKFPTFLLTGIPGLESAHVWISIPFCCFYAIALSGNSVILFVIITQQSLHEPMYYFLFRLSATDLGLTVSSLSTTLGILWFEAREISLYSCIVQMFFLHGFTFMESGVLVATAFDRYVAICDPLRYTTILTNSRIIQMGLLMITRAIVLILPLLLLLKPLYFCRMNALSHSYCYHPDVIQLACSDIRANSICGLIDLILTTGIDTPCIVLSYILIIHSVLRIASPEEWHKVFSTCVSHVGAVAFFYIHMLSLSLVYRYGRSAPRVVHSVMANVYLLLPPVLNPIIDSVKTKQIRKAMLSLLLTK

SEQ ID NO: 37145 - protein, 311 aa, Homo sapiens
MAHTNESMVSEFVLLGLSNSWGLQLFFFAIFSIVYVTSVLGNVLIIVIISFDSHLNSPMYFLLSNLSFIDICQSNFATPKMLVDFFIERKTISFEGCMAQIFVLHSFVGSEMMLLVAMAYDRFIAICKPLHYSTIMNRRLCVIFVSISWAVGVLHSVSHLAFTVDLPFCGPNEVDSFFCDLPLVIELACMDTYEMEIMTLTNSGLISLSCFLALIISYTIILIGVRCRSSSGSSKALSTLTAHITVVILFFGPCIYFYIWPFSRLPVDKFLSVFYTVCTPLLNPIIYSLRNEDVKAAMWKLRNRHVNSWKN

SEQ ID NO: 37146 - protein, 326 aa, Homo sapiens
MYVSNCNPCAIHRKINYPNTKLDFEQVNNITEFILLGLTQNAEAQKLLFAVFTLIYFLTMVDNLIIVVTITTSPALDSPVYFFLSFFSFIDGCSSSTMAPKMIFDLLTEKKTISFSGCMTQLFVEHFFGGVEIILLVVMAYDCYVAICKPLYYLITMNRQVCGLLVAMAWVGGFLHALIQMLLIVWLPFCGPNVIDHFICDLFPLLKLSCTDTHVFGLFVAANSGLMCMLIFSILITSYVLILCSQRKALSTCAFHITVVVLFFVPCILVYLRPMITFPIDKAVSVFYTVVTPMLNPLIYTLRNTEVKNAMKQLWSQIIWGNNLCD

SEQ ID NO: 37147 - protein, 324 aa, Homo sapiens
MLESNYTMPTEFLFVGFTDYLPLRVTLFLVFLLVYTLTMVGNILLIILVNINSSLQIPMYYFLSNLSFLDISCSTAITPKMLANFLASRKSISPYGCALQMFFFASFADAECLILAAMAYDRYAAICNPLLYTTLMSRRVCVCFIVLAYFSGSTTSLVHVCLTFRLSFCGSNIVNHFFCDIPPLLALSCTDTQINQLLLFALCSFIQTSTFVVIFISYFCILITVLSIKSSGGRSKTFSTCASHLIAVTLFYGALLFMYLQPTTSYSLDTDKVVAVFYTVVFPMFNPIIYSFRNKDVKNALKKLLERIGYSNEWYLNRLRIVNI

SEQ ID NO: 37148 - protein, 316 aa, Homo sapiens
MTNTSSSDFTLLGLLVNSEAAGIVFTVILAVFLGAVTANLVMIFLIQVDSRLHTPMYFLLSQLSIMDTLFICTTVPKLLADMVSKEKIISFVACGIQIFLYLTMIGSEFFLLGLMAYDCYVAVCNPLRYPVLMNRKKCLLLAAGAWFGGSLDGFLLTPITMNVPYCGSRSINHFFCEIPAVLKLACADTSLYETLMYICCVLMLLIPISIISTSYSLILLTIHRMPSAEGRKKAFTTCSSHLTVVSIFYGAAFYTYVLPQSFHTPEQDKVVSAFYTIVTPMLNPLIYSLRNKDVIGAFKKVFACCSSAQKVATSDA

SEQ ID NO: 37149 - protein, 381 aa, Homo sapiens
MAESHLLQWLLLLLPTLCGPGTAAWTTSSLACAQGPEFWCQSLEQALQCRALGHCLQEVWGHVGADDLCQECEDIVHILNKMAKEAIFQDTMRKFLEQECNVLPLKLLMPQCNQVLDDYFPLVIDYFQNQTDSNGICMHLGLCKSRQPEPEQEPGMSDPLPKPLRDPLPDPLLDKLVLPVLPGALQARPGPHTQDLSEQQFPIPLPYCWLCRALIKRIQAMIPKGALAVAVAQVCRVVPLVAGGICQCLAERYSVILLDTLLGRMLPQLVCRLVLRCSMDDSAGPRSPTGEWLPRDSECHLCMSVTTQAGNSSEQAIPQAMLQACVGSWLDREKCKQFVEQHTPQLLTLVPRGWDAHTTCQALGVCGTMSSPLQCIHSPDL

SEQ ID NO: 37150 - protein, 480 aa, Homo sapiens
MLFRNRFLLLLALAALLAFVSLSLQFFHLIPVSTPKNGMSSKSRKRIMPDPVTEPPVTDPVYEALLYCNIPSVAERSMEGHAPHHFKLVSVHVFIRHGDRYPLYVIPKTKRPEIDCTLVANRKPYHPKLEAFISHMSKGSGASFESPLNSLPLYPNHPLCEMGELTQTGVVQHLQNGQLLRDIYLKKHKLLPNDWSADQLYLETTGKSRTLQSGLALLYGFLPDFDWKKIYFRHQPSALFCSGSCYCPVRNQYLEKEQRRQYLLRLKNSQLEKTYGEMAKIVDVPTKQLRAANPIDSMLCHFCHNVSFPCTRNGCVDMEHFKVIKTHQIEDERERREKKLYFGYSLLGAHPILNQTIGRMQRATEGRKEELFALYSAHDVTLSPVLSALGLSEARFPRFAARLIFELWQDREKPSEHSVRILYNGVDVTFHTSFCQDHHKRSPKPMCPLENLVRFVKRDMFVALGGSGTNYYDACHREGF

SEQ ID NO: 37151 - protein, 464 aa, Homo sapiens
MEHSVCPSSAVHLIPVSTPKNGMSSKSRKRIMPDPVTEPPVTDPVYEALLYCNIPSVAERSMEGHAPHHFKLVSVHVFIRHGDRYPLYVIPKTKRPEIDCTLVANRKPYHPKLEAFISHMSKGSGASFESPLNSLPLYPNHPLCEMGELTQTGVVQHLQNGQLLRDIYLKKHKLLPNDWSADQLYLETTGKSRTLQSGLALLYGFLPDFDWKKIYFRHQPSALFCSGSCYCPVRNQYLEKEQRRQYLLRLKNSQLEKTYGEMAKIVDVPTKQLRAANPIDSMLCHFCHNVSFPCTRNGCVDMEHFKVIKTHQIEDERERREKKLYFGYSLLGAHPILNQTIGRMQRATEGRKEELFALYSAHDVTLSPVLSALGLSEARFPRFAARLIFELWQDREKPSEHSVRILYNGVDVTFHTSFCQDHHKRSPKPMCPLENLVRFVKRDMFVALGGSGTNYYDACHREGF

SEQ ID NO: 37152 - protein, 81 aa, Homo sapiens
MSRSSKVVLGLSVLLTAATVAGVHVKQQWDQQRLRDGVIRDIERQIRKKENIRLLGEQIILTEQLEAEREKMLLAKGSQKS

SEQ ID NO: 37153 - protein, 1036 aa, Homo sapiens
MGFALERFAEAVDPALECKLCGQVLEEPLCTPCGHVFCASCLLPWAVRRRRCPLQCQPLAPGELYRVLPLRSLIQKLRVQCDYRARGCGHSVRLHELEAHVEHCDFGPARRLRSRGGCASGLGGGEVPARGGCGPTPRAGRGGGARGGPPGGRWGRGRGPGPRVLAWRRREKALLAQLWALQGEVQLTARRYQEKFTQYMAHVRNFVGDLGGGHRRDGEHKPFTIVLERENDTLGFNIIGGRPNQNNQEGTSTEGIYVSKILENGPADRADGLEIHDKIMEVNGKDLSKATHEEAVEAFRNAKEPIVVQVLRRTPLSRPAYGMASEVQLMNASTQTDITFEHIMALAKLRPPTPPVPDICPFLLSDSCHSLHPMEHEFYEDNEYISSLPADADRTEDFEYEEVELCRVSSQEKLGLTVCYRTDDEEDTGIYVSEVDPNSIAAKDGRIREGDRILQINGEDVQNREEAVALLSNDECKRIVLLVARPEIQLDEGWLEDERNEFLEELNLEMLEEEHNEAMQPTANEVEQPKKQEEEEGTTDTATSSSNNHEKDSGVGRTDESLRNDESSEQENAAEDPNSTSLKSKRDLGQSQDTLGSVELQYNESLVSGEYIDSDCIGNPDEDCERFRQLLELKCKIRNHGEYDLYYSSSTIECNQGEQEGVEHELQLLNEELRNIELECQNIMQAHRLQKVTDQYGDIWTLHDGGFRNYNTSIDMQRGKLDDIMEHPEKSDKDSSSAYNTAESCRSTPLTVDRSPDSSLPRVINLTNKKNLRSTMAATQSSSGQSSKESTSTKAKTTEQGCSAESKEKVLEGSKLPDQEKAVSEHIPYLSPYHSSSYRYANIPAHARHYQSYMQLIQQKSAVEYAQSQLSLVSMCKESQKCSEPKMEWKVKIRSDGTRYITKRPVRDRILKERALKIKEERSGMTTDDDTMSEMKMGRYWSKEERKQHLVRAKEQRRRREFMMRSRLECLKESPQSGSEGKKEINIIELSHKKMMKKRNKKILDNWMTIQELMTHGAKSPDGTRVHNAFLSVTTV

SEQ ID NO: 37154 - protein, 778 aa, Homo sapiens
MGCNLCTFQKREEHYKLLYEVSQVNGKDLSKATHEEAVEAFRNAKEPIVVQVLRRTPLSRPAYGMASEVQLMNASTQTDITFEHIMALAKLRPPTPPVPDICPFLLSDSCHSLHPMEHEFYEDNEYISSLPADADRTEDFEYEEVELCRVSSQEKLGLTVCYRTDDEEDTGIYVSEVDPNSIAAKDGRIREGDRILQINGEDVQNREEAVALLSNDECKRIVLLVARPEIQLDEGWLEDERNEFLEELNLEMLEEEHNEAMQPTANEVEQPKKQEEEEGTTDTATSSSNNHEKDSGVGRTDESLRNDESSEQENAAEDPNSTSLKSKRDLGQSQDTLGSVELQYNESLVSGEYIDSDCIGNPDEDCERFRQLLELKCKIRNHGEYDLYYSSSTIECNQGEQEGVEHELQLLNEELRNIELECQNIMQAHRLQKVTDQYGDIWTLHDGGFRNYNTSIDMQRGKLDDIMEHPEKSDKDSSSAYNTAESCRSTPLTVDRSPDSSLPRVINLTNKKNLRSTMAATQSSSGQSSKESTSTKAKTTEQGCSAESKEKVLEGSKLPDQEKAVSEHIPYLSPYHSSSYRYANIPAHARHYQSYMQLIQQKSAVEYAQSQLSLVSMCKESQKCSEPKMEWKVKIRSDGTRYITKRPVRDRILKERALKIKEERSGMTTDDDTMSEMKMGRYWSKEERKQHLVRAKEQRRRREFMMRSRLECLKESPQSGSEGKKEINIIELSHKKMMKKRNKKILDNWMTIQELMTHGAKSPDGTRVHNAFLSVTTV

SEQ ID NO: 37155 - protein, 776 aa, Homo sapiens
MSGKRQFFLKPLALLTCWPSTVNGKDLSKATHEEAVEAFRNAKEPIVVQVLRRTPLSRPAYGMASEVQLMNASTQTDITFEHIMALAKLRPPTPPVPDICPFLLSDSCHSLHPMEHEFYEDNEYISSLPADADRTEDFEYEEVELCRVSSQEKLGLTVCYRTDDEEDTGIYVSEVDPNSIAAKDGRIREGDRILQINGEDVQNREEAVALLSNDECKRIVLLVARPEIQLDEGWLEDERNEFLEELNLEMLEEEHNEAMQPTANEVEQPKKQEEEEGTTDTATSSSNNHEKDSGVGRTDESLRNDESSEQENAAEDPNSTSLKSKRDLGQSQDTLGSVELQYNESLVSGEYIDSDCIGNPDEDCERFRQLLELKCKIRNHGEYDLYYSSSTIECNQGEQEGVEHELQLLNEELRNIELECQNIMQAHRLQKVTDQYGDIWTLHDGGFRNYNTSIDMQRGKLDDIMEHPEKSDKDSSSAYNTAESCRSTPLTVDRSPDSSLPRVINLTNKKNLRSTMAATQSSSGQSSKESTSTKAKTTEQGCSAESKEKVLEGSKLPDQEKAVSEHIPYLSPYHSSSYRYANIPAHARHYQSYMQLIQQKSAVEYAQSQLSLVSMCKESQKCSEPKMEWKVKIRSDGTRYITKRPVRDRILKERALKIKEERSGMTTDDDTMSEMKMGRYWSKEERKQHLVRAKEQRRRREFMMRSRLECLKESPQSGSEGKKEINIIELSHKKMMKKRNKKILDNWMTIQELMTHGAKSPDGTRVHNAFLSVTTV

SEQ ID NO: 37156 - protein, 419 aa, Homo sapiens
MPAENSPAPAYKVSSHGGDSGLDGLGGPGVQLGSPDKKKRKANTQGPSFPPLSEYAPPPNPNSDHLVAANPFDDNYNTISYKPLPSSNPYLGPGYPGFGGYSTFRMPPHVPPRMSSPYCGPYSLRNQPHPFPQNPLGMGFNRPHAFNFGPHDNSSFGNPSYNNALSQNVNMPNQHFRQNPAENFSQIPPQNASQVSNPDLASNFVPGNNSNFTSPLESNHSFIPPPNTFGQAKAPPPKQDFTQGATKNTNQNSSAHPPHLNMDDTVNQSNIELKNVNRNNAVNQENSRSSSTEATNNNPANGTQNKPRQPRGAADACTTEKSNKSSLHPNRHGHSSSDPVYPCGICTNEVNDDQDAILCEASCQKWFHRICTGMTETAYGLLTAEASAVWGCDTCMADKDVQLMRTRETFGPSAVGSDA

SEQ ID NO: 37157 - protein, 419 aa, Homo sapiens
MSAEQEKDPISLKRVRGGDSGLDGLGGPGVQLGSPDKKKRKANTQGPSFPPLSEYAPPPNPNSDHLVAANPFDDNYNTISYKPLPSSNPYLGPGYPGFGGYSTFRMPPHVPPRMSSPYCGPYSLRNQPHPFPQNPLGMGFNRPHAFNFGPHDNSSFGNPSYNNALSQNVNMPNQHFRQNPAENFSQIPPQNASQVSNPDLASNFVPGNNSNFTSPLESNHSFIPPPNTFGQAKAPPPKQDFTQGATKNTNQNSSAHPPHLNMDDTVNQSNIELKNVNRNNAVNQENSRSSSTEATNNNPANGTQNKPRQPRGAADACTTEKSNKSSLHPNRHGHSSSDPVYPCGICTNEVNDDQDAILCEASCQKWFHRICTGMTETAYGLLTAEASAVWGCDTCMADKDVQLMRTRETFGPSAVGSDA

SEQ ID NO: 37158 - protein, 755 aa, Homo sapiens
MAAVAAEAAATAASPGEGGAGEAEPEMEPIPGSEAGTDPLPVTATEASVPDGETDGQQSAPQADEPPLPPPPPPPGELARSPEAVGPELEAEEKLSVRVAESAAAAPQGGPELPPSPASPPEQPPAPEEREEPPLPQPVAPALVPPAGGDSTVSQLIPGSEVRVTLDHIIEDALVVSFRFGEKLFSGVLMDLSKRFGPHGIPVTVFPKREYKDKPEAMPLQSNTFQEGTEVKCEANGAVPDDPSPVPHPELSLAESLWTSKPPPLFHEGAPYPPPLFIRDTYNQSIPQPPPRKIKRPKRKMYREEPTSIMNAIKLRPRQVLCDKCKNSVVAEKKEIRKGSSATDSSKYEDKKRRNESVTTVNKKLKTDHKVDGKNQNESQKRNAVVKVSNIAHSRGRVVKVSAQANTSKAQLSTKKVLQSKNMDHAKAREVLKIAKEKAQKKQNETSTSKNAHSKVHFTRRYQNPSSGSLPPRVRLKPQRYRNEENDSSLKTGLEKMRSGKMAPKPQSRCTSTRSAGEAPSENQSPSKGPEEASSEVQDTNEVHVPGDQDEPQTLGKKGSKNNISVYMTLNQKKSDSSSASVCSIDSTDDLKSSNSECSSSESFDFPPGSMHAPSTSSTSSSSKEEKKLSNSLKMKVFSKNVSKCVTPDGRTICVGDIVWAKIYGFPWWPARILTITVSRKDNGLLVRQEARISWFGSPTTSFLALSQLSPFLENFQSRFNKKRKGLYRKAITEAAKAAKQLTPEVRALLTQFET

SEQ ID NO: 37159 - protein, 560 aa, Homo sapiens
MAAVAAEAAATAASPGEGGAGEAEPEMEPIPGSEAGTDPLPVTATEASVPDGETDGQQSAPQADEPPLPPPPPPPGELARSPEAVGPELEAEEKLSVRVAESAAAAPQGGPELPPSPASPPEQPPAPEEREEPPLPQPVAPALVPPAGGDSTVSQLIPGSEVRVTLDHIIEDALVVSFRFGEKLFSGVLMDLSKRFGPHGIPVTVFPKREYKDKPEAMPLQSNTFQEGTEVKCEANGAVPDDPSPVPHPELSLAESLWTSKPPPLFHEGAPYPPPLFIRDTYNQSIPQPPPRKIKRPKRKMYREEPTSIMNAIKLRPRQVLCDKCKNSVVAEKKEIRKGSSATDSSKYEDKKRRNESVTTVNKKLKTDHKVDGKNQNESQKRNAVVKVSNIAHSRGRVVKVSAQANTSKAQLSTKKVLQSKNMDHAKAREVLKIAKEKAQKKQNETSTSKNAHSKVHFTRRYQNPSSGSLPPRVRLKPQRYRNEENDSSLKTGLEKMRSGKMAPKPQSRCTSTRSAGLNKWQLLHQTVTSPAAPLQCLTDHCGFRLGALKLTVKRAAQRH

SEQ ID NO: 37160 - protein, 520 aa, Homo sapiens
MAAVAAEAAATAASPGEGGAGEAEPEMEPIPGSEAGTDPLPVTATEASVPDGETDGQQSAPQADEPPLPPPPPPPGELARSPEAVGPELEAEEKLSVRVAESAAAAPQGGPELPPSPASPPEQPPAPEEREEPPLPQPVAPALVPPAGGDSTVSQLIPGSEVRVTLDHIIEDALVVSFRFGEKLFSGVLMDLSKRFGPHGIPVTVFPKREYKDKPEAMPLQSNTFQEGTEVKCEANGAVPDDPSPVPHPELSLAESLWTSKPPPLFHEGAPYPPPLFIRDTYNQSIPQPPPRKIKRPKRKMYREEPTSIMNAIKLRPRQVLCDKCKNSVVAEKKEIRKGSSATDSSKYEDKKRRNESVTTVNKKLKTDHKVDGKNQNESQKRNAVVKVSNIAHSRGRVVKVSAQANTSKAQLSTKKVLQSKNMDHAKAREVLKIAKEKAQKKQNETSTSKNAHSKVHFTRRYQNPSSGSLPPRVRLKPQRYRNEENDSSLKTGLEKMRSGKMAPKPQSRCTSTRSAAQRH

SEQ ID NO: 37161 - protein, 468 aa, Homo sapiens
MVDTESPLCPLSPLEAGDLESPLSEEFLQEMGNIQEISQSIGEDSSGSFGFTEYQYLGSCPGSDGSVITDTLSPASSPSSVTYPVVPGSVDESPSGALNIECRICGDKASGYHYGVHACEGCKGFFRRTIRLKLVYDKCDRSCKIQKKNRNKCQYCRFHKCLSVGMSHNAIRFGRMPRSEKAKLKAEILTCEHDIEDSETADLKSLAKRIYEAYLKNFNMNKVKARVILSGKASNNPPFVIHDMETLCMAEKTLVAKLVANGIQNKEAEVRIFHCCQCTSVETVTELTEFAKAIPGFANLDLNDQVTLLKYGVYEAIFAMLSSVMNKDGMLVAYGNGFITREFLKSLRKPFCDIMEPKFDFAMKFNALELDDSDISLFVAAIICCGDRPGLLNVGHIEKMQEGIVHVLRLHLQSNHPDDIFLFPKLLQKMADLRQLVTEHAQLVQIIKKTESDAALHPLLQEIYRDMY

SEQ ID NO: 37162 - protein, 174 aa, Homo sapiens
MVDTESPLCPLSPLEAGDLESPLSEEFLQEMGNIQEISQSIGEDSSGSFGFTEYQYLGSCPGSDGSVITDTLSPASSPSSVTYPVVPGSVDESPSGALNIECRICGDKASGYHYGVHACEGCKGFFRRTIRLKLVYDKCDRSCKIQKKNRNKCQYCRFHKCLSVGMSHNAFCHT

SEQ ID NO: 37163 - protein, 420 aa, Homo sapiens
MATSLGSNTYNRQNWEDADFPILCQTCLGENPYIRMTKEKYGKECKICARPFTVFRWCPGVRMRFKKTEVCQTCSKLKNVCQTCLLDLEYGLPIQVRDAGLSFKDDMPKSDVNKEYYTQNMEREISNSDGTRPVGMLGKATSTSDMLLKLARTTPYYKRNRPHICSFWVKGECKRGEECPYRHEKPTDPDDPLADQNIKDRYYGINDPVADKLLKRASTMPRLDPPEDKTITTLYVGGLGDTITETDLRNHFYQFGEIRTITVVQRQQCAFIQFATRQAAEVAAEKSFNKLIVNGRRLNVKWGRSQAARGKEKEKDGTTDSGIKLEPVPGLPGALPPPPAAEEEASANYFNLPPSGPPAVVNIALPPPPGIAPPPPPGFGPHMFHPMGPPPPFMRAPGPIHYPSQDPQRMGAHAGKHSSP

SEQ ID NO: 37164 - protein, 371 aa, Homo sapiens
MATSLGSNTYNRQNWEDADFPILCQTCLGENPYIRMTKEKYGLPIQVRDAGLSFKDDMPKSDVNKEYYTQNMEREISNSDGTRPVGMLGKATSTSDMLLKLARTTPYYKRNRPHICSFWVKGECKRGEECPYRHEKPTDPDDPLADQNIKDRYYGINDPVADKLLKRASTMPRLDPPEDKTITTLYVGGLGDTITETDLRNHFYQFGEIRTITVVQRQQCAFIQFATRQAAEVAAEKSFNKLIVNGRRLNVKWGRSQAARGKEKEKDGTTDSGIKLEPVPGLPGALPPPPAAEEEASANYFNLPPSGPPAVVNIALPPPPGIAPPPPPGFGPHMFHPMGPPPPFMRAPGPIHYPSQDPQRMGAHAGKHSSP

SEQ ID NO: 37165 - protein, 212 aa, Homo sapiens
MAGPGPGPGDPDEQYDFLFKLVLVGDASVGKTCVVQRFKTGAFSERQGSTIGVDFTMKTLEIQGKRVKLQIWDTAGQERFRTITQSYYRSANGAILAYDITKRSSFLSVPHWIEDVRKYAGSNIVQLLIGNKSDLSELREVSLAEAQSLAEHYDILCAIETSAKDSSNVEEAFLRVATELIMRHGGPLFSEKSPDHIQLNSKDIGEGWGCGC

SEQ ID NO: 37166 - protein, 155 aa, Homo sapiens
MAGPGPGPGDPDEQYDFLFKLVLVGDASVGKTCVVQRFKTGAFSERQGSTIGVDFTMKTLEIQGKRVKLQIWDTAGQERFRTITQSYYRSANGAILAYDITKRSSFLSVPHWIEDVRKYAGSNIVQLLIEMQSCYVAQADLELLASSNPPASTSK

SEQ ID NO: 37167 - protein, 211 aa, Homo sapiens
MEEPPVREEEEEEGEEDEERDEVGPEGALGKSPFQLTAEDVYDISYLLGRELMALGSDPRVTQLQFKVVRVLEMLEALVNEGSLALEELKMERDHLRKEVEGLRRQSPPASGEVNLGPNKMVVDLTDPNRPRFTLQELRDVLQERNKLKSQLLVVQEELQCYKSGLIPPREGPGGRREKDAVVTSAKNAGRNKEEKTIIKKLFFFRSGKQT

SEQ ID NO: 37168 - protein, 895 aa, Homo sapiens
MTAWTMGARGLDKRGSFFKLIDTIASEIGELKQEMVRTDVNLENGLEPAETHSMVRHKDGGYSEEEDVKTCARDSGYDSLSNRLSILDRLLHTHPIWLQLSLSEEEAAEVLQAQPPGIFLVHKSTKMQKKVLSLRLPCEFGAPLKEFAIKESTYTFSLEGSGISFADLFRLIAFYCISRDVLPFTLKLPYAISTAKSEAQLEELAQMGLNFWSSPADSKPPNLPPPHRPLSSDGVCPASLRQLCLINGVHSIKTRTPSELECSQTNGALCFINPLFLKVHSQDLSGGLKRPSTRTPNANGTERTRSPPPRPPPPAINSLHTSPRLARTETQTSMPETVNHNKHGNVALPGTKPTPIPPPRLKKQASFLEAEGGAKTLSGGRPGAGPELELGTAGSPGGAPPEAAPGDCTRAPPPSSESRPPCHGGRQRLSDMSISTSSSDSLEFDRSMPLFGYEADTNSSLEDYEGESDQETMAPPIKSKKKRSSSFVLPKLVKSQLQKVSGVFSSFMTPEKRMVRRIAELSRDKCTYFGCLVQDYVSFLQENKECHVSSTDMLQTIRQFMTQVKNYLSQSSELDPPIESLIPEDQIDVVLEKAMHKCILKPLKGHVEAMLKDFHMADGSWKQLKENLQLVRQRNPQELGVFAPTPDFVDVEKIKVKFMTMQKMYSPEKKVMLLLRVCKLIYTVMENNSGRMYGADDFLPVLTYVIAQCDMLELDTEIEYMMELLDPSLLHGEGGYYLTSAYGALSLIKNFQEEQAARLLSSETRDTLRQWHKRRTTNRTIPSVDDFQNYLRVAFQEVNSGCTGKTLLVRPYITTEDVCQICAEKFKVGDPEEYSLFLFVDETWQQLAEDTYPQKIKAELHSRPQPHIFHFVYKRIKNDPYGIIFQNGEEDLTTS

SEQ ID NO: 37169 - protein, 944 aa, Homo sapiens
MLDSFSQESTLPFREARKRTSFQPVQVWRNFTASQTTESPACSGASLGEMTAWTMGARGLDKRGSFFKLIDTIASEIGELKQEMVRTDVNLENGLEPAETHSMVRHKDGGYSEEEDVKTCARDSGYDSLSNRLSILDRLLHTHPIWLQLSLSEEEAAEVLQAQPPGIFLVHKSTKMQKKVLSLRLPCEFGAPLKEFAIKESTYTFSLEGSGISFADLFRLIAFYCISRDVLPFTLKLPYAISTAKSEAQLEELAQMGLNFWSSPADSKPPNLPPPHRPLSSDGVCPASLRQLCLINGVHSIKTRTPSELECSQTNGALCFINPLFLKVHSQDLSGGLKRPSTRTPNANGTERTRSPPPRPPPPAINSLHTSPRLARTETQTSMPETVNHNKHGNVALPGTKPTPIPPPRLKKQASFLEAEGGAKTLSGGRPGAGPELELGTAGSPGGAPPEAAPGDCTRAPPPSSESRPPCHGGRQRLSDMSISTSSSDSLEFDRSMPLFGYEADTNSSLEDYEGESDQETMAPPIKSKKKRSSSFVLPKLVKSQLQKVSGVFSSFMTPEKRMVRRIAELSRDKCTYFGCLVQDYVSFLQENKECHVSSTDMLQTIRQFMTQVKNYLSQSSELDPPIESLIPEDQIDVVLEKAMHKCILKPLKGHVEAMLKDFHMADGSWKQLKENLQLVRQRNPQELGVFAPTPDFVDVEKIKVKFMTMQKMYSPEKKVMLLLRVCKLIYTVMENNSGRMYGADDFLPVLTYVIAQCDMLELDTEIEYMMELLDPSLLHGEGGYYLTSAYGALSLIKNFQEEQAARLLSSETRDTLRQWHKRRTTNRTIPSVDDFQNYLRVAFQEVNSGCTGKTLLVRPYITTEDVCQICAEKFKVGDPEEYSLFLFVDETWQQLAEDTYPQKIKAELHSRPQPHIFHFVYKRIKNDPYGIIFQNGEEDLTTS

SEQ ID NO: 37170 - protein, 783 aa, Homo sapiens
MESPGESGAGSPGAPSPSSFTTGHLAREKPAQDPLYDVPNASGGQAGGPQRPGRVVSLRERLLLTRPVWLQLQANAAAALHMLRTEPPGTFLVRKSNTRQCQALCMRLPEASGPSFVSSHYILESPGGVSLEGSELMFPDLVQLICAYCHTRDILLLPLQLPRAIHHAATHKELEAISHLGIEFWSSSLNIKAQRGPAGGPVLPQLKARSPQELDQGTGAALCFFNPLFPGDLGPTKREKFKRSFKVRVSTETSSPLSPPAVPPPPVPVLPGAVPSQTERLPPCQLLRRESSVGYRVPAGSGPSLPPMPSLQEVDCGSPSSSEEEGVPGSRGSPATSPHLGRRRPLLRSMSAAFCSLLAPERQVGRAAAALMQDRHTAAGQLVQDLLTQVRAGPEPQELQGIRQALSRARAMLSAELGPEKLLSPKRLEHVLEKSLHCSVLKPLRPILAARLRRRLAADGSLGRLAEGLRLARAQGPGAFGSHLSLPSPVELEQVRQKLLQLLRTYSPSAQVKRLLQACKLLYMALRTQEGEGAGADEFLPLLSLVLAHCDLPELLLEAEYMSELLEPSLLTGEGGYYLTSLSASLALLSGLGQAHTLPLSPVQELRRSLSLWEQRRLPATHCFQHLLRVAYQDPSSGCTSKTLAVPPEASIATLNQLCATKFRVTQPNTFGLFLYKEQGYHRLPPGALAHRLPTTGYLVYRRAEWPETQGAVTEEEGSGQSEARSRGEEQGCQGDGDAGVKASPRDIREQSETTAEGGQGQAQEGPAQPGEPEAEGSRAAEE

SEQ ID NO: 37171 - protein, 721 aa, Homo sapiens
MESPGESGAGSPGAPSPSSFTTGHLAREKPAQDPLYDVPNASGGQAGGPQRPGRVVSLRERLLLTRPVWLQLQANAAAALHMLRTEPPGTFLVRKSNTRQCQALCMRLPEASGPSFVSSHYILESPGGVSLEGSELMFPDLVQLICAYCHTRDILLLPLQLPRAIHHAATHKELEAISHLGIEFWSSSLNIKAQRGPAGGPVLPQLKARSPQELDQGTGAALCFFNPLFPGDLGPTKREKFKRSFKVRVSTETSSPLSPPAVPPPPVPVLPGAVPSQTERLPPCQLLRRESSVGYRVPAGSGPSLPPMPSLQEVDCGSPSSSEEEGVPGSRGSPATSPHLGRRRPLLRSMSAAFCSLLAPERQVGRAAAALMQDRHTAAGQLVQDLLTQVRAGPEPQELQGIRQALSRARAMLSAELGPEKLLSPKRLELEQVRQKLLQLLRTYSPSAQVKRLLQACKLLYMALRTQEGEGAGADEFLPLLSLVLAHCDLPELLLEAEYMSELLEPSLLTGEGGYYLTSLSASLALLSGLGQAHTLPLSPVQELRRSLSLWEQRRLPATHCFQHLLRVAYQDPSSGCTSKTLAVPPEASIATLNQLCATKFRVTQPNTFGLFLYKEQGYHRLPPGALAHRLPTTGYLVYRRAEWPETQGAVTEEEGSGQSEARSRGEEQGCQGDGDAGVKASPRDIREQSETTAEGGQGQAQEGPAQPGEPEAEGSRAAEE

SEQ ID NO: 37172 - protein, 461 aa, Homo sapiens [sequence omitted]

SEQ ID NO: 37173 - protein, 792 aa, Homo sapiens
MLPAGEIGASPAAPCCSESGDERKNLEEKSDINVTVLIGSKQVSEGTDNGDLPSYVSAFIEKEVGNDLKSLKKLDKLIEQRTVSKMQLEEQVLTISSEIPKRIRSALKNAEESKQFLNQFLEQETHLFSAINSHLLTAQPWMDDLGTMISQIEEIERHLAYLKWISQIEELSDNIQQYLMTNNVPEAASTLVSMAELDIKLQESSCTHLLGFMRATVKFWHKILKDKLTSDFEEILAQLHWPFIAPPQSQTVGLSRPASAPEIYSYLETLFCQLLKLQTSDELLTEPKQLPEKYSLPASPSVILPIQVMLTPLQKRFRYHFRGNRQTNVLSKPEWYLAQVLMWIGNHTEFLDEKIQPILDKVGSLVNARLEFSRGLMMLVLEKLATDIPCLLYDDNLFCHLVDEVLLFERELHSVHGYPGTFASCMHILSEETCFQRWLTVERKFALQKMDSMLSSEAAWVSQYKDITDVDEMKVPDCAETFMTLLLVITDRYKNLPTASRKLQFLELQKDLVDDFRIRLTQVMKEETRASLGFRYCAILNAVNYISTVLADWADNVFFLQLQQAALEVFAENNTLSKLQLGQLASMESSVFDDMINLLERLKHDMLTRQVDHVFREVKDAAKLYKKERWLSLPSQSEQAVMSLSSSACPLLLTLRDHLLQLEQQLCFSLFKIFWQMLVEKLDVYIYQEIILANHFNEGGAAQLQFDMTRNLFPLFSHYCKRPENYFKHIKEACIVLNLNVGSALLLKDVLQSASGQLPATAALNEVGIYKLAQQDVEILLNLRTNWPNTGK

SEQ ID NO: 37174 - protein, 122 aa, Homo sapiens
MAPQKDRKPKRSTWRFNLDLTHPVEDGIFDSGNFEQFLREKVKVNGKTGNLGNVVHIERFKNKITVVSEKQFSKRYLKYLTKKYLKKNNLRDWLRVVASDKETYELRYFQISQDEDESESED

SEQ ID NO: 37175 - protein, 160 aa, Homo sapiens [sequence omitted]

SEQ ID NO: 37176 - protein, 128 aa, Homo sapiens [sequence omitted]

SEQ ID NO: 37177 - protein, 156 aa, Homo sapiens [sequence omitted]

SEQ ID NO: 37178 - protein, 143 aa, Homo sapiens [sequence omitted]

SEQ ID NO: 37179 - protein, 133 aa, Homo sapiens [sequence omitted]

SEQ ID NO: 37180 - protein, 130 aa, Homo sapiens
MNDTVTIRTRKFMTNRLLQRKQMVIDVLHPGKATVPKTEIREKLAKMYKTTPDVIFVFGFRTHFGGGKTTGFGMIYDSLDYAKKNEPKHRLARHGLYEKKKTSRKQRKERKNRMKKVRGTAKANVGAGKK

SEQ ID NO: 37181 - protein, 132 aa, Homo sapiens
MNDTVTIRTRKFMTNRLLQRKQMVIDVLHPGKATVPKTEIREKLAKMYKTTPDVIFVFGFRTHFGGGKTTGFGMIYDSLDYAKKNEPKHRLARHGLYEKKKTSRKQRKERKNRMKKVRGTAKANVGAGKKKK

SEQ ID NO: 37182 - protein, 289 aa, Homo sapiens
MNDTVTIRTRKFMTNRLLQRKQMVIDVLHPGKATVPKTEIREKLAKMYKTTPDVIFVFGFRTHFGGGKTTGFGMIYDSLDYAKKNEPKHRLARHGLYEKKKTSRKQRKERKNRMKKVRGTAKANVGAGKKMRELGLGVQALGRISQEERCTDVKNSKARESRGVVWQVEVPGPWSVWTCGRLRRGCGKYLQVAVTWRKTENREQCCQACLLERALVRNGAFMSPASPAPAGSPHPVDGDLVLHLPEALSATLTLSPHIQAINKSFGPFFEIHQESSCFSPPSCLSGLGH

SEQ ID NO: 37183 - protein, 264 aa, Homo sapiens [sequence omitted]

SEQ ID NO: 37184 - protein, 900 aa, Homo sapiens
MRLFVSDGVPGCLPVLAAAGRARGRAEVLISTVGPEDCVVPFLTRPKVPVLQLDSGNYLFSTSAICRYFFLLSGWEQDDLTNQWLEWEATELQPALSAALYYLVVQGKKGEDVLGSVRRALTHIDHSLSRQNCPFLAGETESLADIVLWGALYPLLQDPAYLPEELSALHSWFQTLSTQEPCQRAAETVLKQQGVLALRPYLQKQPQPSPAEGRAVTNEPEEEELATLSEEEIAMAVTAWEKGLESLPPLRPQQNPVLPVAGERNVLITSALPYVNNVPHLGNIIGCVLSADVFARYSRLRQWNTLYLCGTDEYGTATETKALEEGLTPQEICDKYHIIHADIYRWFNISFDIFGRTTTPQQTKITQDIFQQLLKRGFVLQDTVEQLRCEHCARFLADRFVEGVCPFCGYEEARGDQCDKCGKLINAVELKKPQCKVCRSCPVVQSSQHLFLDLPKLEKRLEEWLGRTLPGSDWTPNAQFITRSWLRDGLKPRCITRDLKWGTPVPLEGFEDKVFYVWFDATIGYLSITANYTDQWERWWKNPEQVDLYQFMAKDNVPFHSLVFPCSALGAEDNYTLVSHLIATEYLNYEDGKFSKSRGVGVFGDMAQDTGIPADIWRFYLLYIRPEGQDSAFSWTDLLLKNNSELLNNLGNFINRAGMFVSKFFGGYVPEMVLTPDDQRLLAHVTLELQHYHQLLEKVRIRDALRSILTISRHGNQYIQVNEPWKRIKGSEADRQRAGTVTGLAVNIAALLSVMLQPYMPTVSATIQAQLQLPPPACSILLTNFLCTLPAGHQIGTVSPLFQKLENDQIESLRQRFGGGQAKTSPKPAVVETVTTAKPQQIQALMDEVTKQGNIVRELKAQKADKNEVAAEVAKLLDLKKQLAVAEGKPPEAPKGKKKK

SEQ ID NO: 37185 - protein, 546 aa, Homo sapiens
MRLFVSDGVPGCLPVLAAAGRARGRAEVLISTVGPEDCVVPFLTRPKVPVLQLDSGNYLFSTSAICRYFFLLSGWEQDDLTNQWLEWEATELQPALSAALYYLVVQGKKGEDVLGSVRRALTHIDHSLSRQNCPFLAGETESLADIVLWGALYPLLQDPAYLPEELSALHSWFQTLSTQEPCQRAAETVLKQQGVLALRPYLQKQPQPSPAEGRAVTNEPEEEELATLSEEEIAMAVTAWEKGLESLPPLRPQQNPVLPVAGERNVLITSALPYVNNVPHLGNIIGCVLSADVFARYSRLRQWNTLYLCGTDEYGTATETKALEEGLTPQEICDKYHIIHADIYRWFNISFDIFGRTTTPQQTKITQDIFQQLLKRGFVLQDTVEQLRCEHCARFLADRFVEGVCPFCGYEEARGDQCDKCGKLINAVELKKPQCKVCRSCPVVQSSQHLFLDLPKLEKRLEEWLGRTLPGSDWTPNAQFITRSWLRDGLKPRCITRDLKWGTPVPLEGFEDKVFYVWFDATIGYLSITANYTDQWERWWKNPEQP

SEQ ID NO: 37186 - protein, 145 aa, Homo sapiens
MNGRVDYLVTEEEINLTRGPSGLGFNIVGGTDQQYVSNDSGIYVSRIKENGAAALDGRLQEGDKILSVNGQDLKNLLHQDAVDLFRNAGYAVSLRVQHRLQVQNGPIGHRGEGDPSGIPIFMVLVPVFALTMVAAWAFMRYRQQL

SEQ ID NO: 37187 - protein, 188 aa, Homo sapiens
MLEGFQILVQNTVQGTIHKIKCVCDSQMSVSEMSCSESTSACQSLEDGSVPEILISLLYNATNGRLSAEVIKGSHLKNWAANRPPNTYVKLTLRKSTDQEMSKCKISIRRGRPNPVYKETFVFKVTLFQLSHVTLMLSVYNKSSMRRKMIGWIYLGLNSSGEELNHWTEMKESKGRQVRRWQALLESR

SEQ ID NO: 37188 - protein, 1194 aa, Homo sapiens
MHDLPPDSGARRGGRGLADHSFPAGARAPGQPPSRGAAYRRACPRDGERGGGGRPRQQVSPPRSPQREPRGGQLRTPRMRPSCSRSLESLRVGAKPPPFQRWPSDSWIRCGAHRDWDEPPPRGGRMDGWSGDRARAAAPTGLQPPGCKDHGCSSGSPFRDPAGSSVIRSGKGDRQEGPSFLRPPAVTVKKLQKWMYKGRLLSLGMKGRARGTAPKVTGTQAASPNVGALKVRENRVLSVPPDQRITLTDLFENAYGSSMKGRELEELKDNIEFRGHKPLNSITVSKKRNWLYQSTLRPLNLEEENKKCQDRSHLSISPVSLPKHQLSQSFLKSSKEYCTYVVCNATNSSLSKNCALDFNEENDADDEGEIWYNPIPEDDDLGISSALSFGEADSAVLKLPAVNLSMLSGSDLMKAERHTEDSLCSSEHAGDIQTTRSNGMNPIHPAHSTEFVQQYKQKLGHKTQEGIMVEDSPMLKSPFAGSGILAATNSTELGIMEPSSPNPSPVKKGSSINWSLPDKIKSPRTVRKLSMKMKKLPEFSRKLSVKGTLNYINSPDNTPSLSKYNCREVHHTDILPSGNTTTAAKRNVISRYHLDTSVSSQQSYQKKNSMSSKYSCKGGYLSDGDSPELTTKASKHGSENKFGKGKEIISNSCSKNEIDIDAFRHYSFSDQPKCSQYISGLMSVHFYGAEDLKPPRIDSKDVFCAIQVDSVNKARTALLTCRTTFLDMDHTFNIEIENAQHLKLVVFSWEPTPRKNRVCCHGTVVLPTLFRVTKTHQLAVKLEPRGLIYVKVTLMEQWENSLHGLDINQEPIIFGVDIQKVVEKENIGLMVPLLIQKCIMEIEKRGCQVVGLYRLCGSAAVKKELREAFERDSKAVGLCENQYPDINVITGVLKDYLRELPSPLITKQLYEAVLDAMAKSPLKMSSNGCENDPGDSKYTVDLLDCLPEIEKATLKMLLDHLKLVASYHEVNKMTCQNLAVCFGPVLLSQRQEPSTHNNRVFTDSEELASALDFKKHIEVLHYLLQLWPVQRLTVKKSTDNLFPEQKSSLNYLRQKKERPHMLNLSGTDSSGVLRPRQNRLDSPLSNRYAGDWSSCGENYFLNTKENLNDVDYDDVPSEDRKIGENYSKMDGPEVMIEQPIPMSKECTFQTYLTMQTVESTVDRKNNLKDLQESIDTLIGNLERELNKNKLNMSF

SEQ ID NO: 37189 - protein, 863 aa, Homo sapiens
MHDLPPDSGARRGGRGLADHSFPAGARAPGQPPSRGAAYRRACPRDGERGGGGRPRQQVSPPRSPQREPRGGQLRTPRMRPSCSRSLESLRVGAKPPPFQRWPSDSWIRCGAHRDWDEPPPRGGRMDGWSGDRARAAAPTGLQPPGCKDHGCSSGSPFRDPAGSSVIRSGKGDRQEGPSFLRPPAVTVKKLQKWMYKGRLLSLGMKGRARGTAPKVTGTQAASPNVGALKVRENRVLSVPPDQRITLTDLFENAYGSSMKGRELEELKDNIEFRGHKPLNSITVSKKRNWLYQSTLRPLNLEEENKKCQDRSHLSISPVSLPKHQLSQSFLKSSKEYCTYVVCNATNSSLSKNCALDFNEENDADDEGEIWYNPIPEDDDLGISSALSFGEADSAVLKLPAVNLSMLSGSDLMKAERHTEDSLCSSEHAGDIQTTRSNGMNPIHPAHSTEFVQQYKQKLGHKTQEGIMVEDSPMLKSPFAGSGILAATNSTELGIMEPSSPNPSPVKKGSSINWSLPDKIKSPRTVRKLSMKMKKLPEFSRKLSVKGTLNYINSPDNTPSLSKYNCREVHHTDILPSGNTTTAAKRNVISRYHLDTSVSSQQSYQKKNSMSSKYSCKGGYLSDGDSPELTTKASKHGSENKFGKGKEIISNSCSKNEIDIDAFRHYSFSDQPKCSQYISGLMSVHFYGAEDLKPPRIDSKDVFCAIQVDSVNKARTALLTCRTTFLDMDHTFNIEIENAQHLKLVVFSWEPTPRKNRVCCHGTVVLPTLFRVTKTHQLAVKLEPRGLIYVKVTLMEQWENSLHGLDINQEPIIFGVDIQKVVEKENIGLMVPLLIQKCIMEIEKRGCQVLSYYGSLLLPLLID

SEQ ID NO: 37190 - protein, 985 aa, Homo sapiens
MAASVAAAARRLRRAIRRSPAWRGLSHRPLSSEPPAAKASAVRAAFLNFFRDRHGHRLVPSASVRPRGDPSLLFVNAGMNQFKPIFLGTVDPRSEMAGFRRVANSQKCVRAGGHHNDLEDVGRDLSHHTFFEMLGNWAFGGEYFKEEACNMAWELLTQVYGIPEERLWISYFDGDPKAGLDPDLETRDIWLSLGVPASRVLSFGPQENFWEMGDTGPCGPCTEIHYDLAGGVGAPQLVELWNLVFMQHNREADGSLQPLPQRHVDTGMGLERLVAVLQGKHSTYDTDLFSPLLNAIQQGCRAPPYLGRVGVADEGRTDTAYRVVADHIRTLSVCISDGIFPGMSGPPLVLRRILRRAVRFSMEILKAPPGFLGSLVPVVVETLGDAYPELQRNSAQIANLVSEDEAAFLASLERGRRIIDRTLRTLGPSDMFPAEVAWSLSLCGDLGLPLDMVELMLEEKGVQLDSAGLERLAQEEAQHRARQAEPVQKQGLWLDVHALGELQRQGVPPTDDSPKYNYSLRPSGSYEFGTCEAQVLQLYTEDGTAVASVGKGQRCGLLLDRTNFYAEQGGQASDRGYLVRAGQEDVLFPVARAQVCGGFILHEAVAPECLRLGDQVQLHVDEAWRLGCMAKHTATHLLNWALRQTLGPGTEQQGSHLNPEQLRLDVTTQTPLTPEQLRAVENTVQEAVGQDEAVYMEEVPLALTAQVPGLRSLDEVYPDPVRVVSVGVPVAHALDPASQAALQTSVELCCGTHLLRTGAVGDLVIIGDRQLSKGTTRLLAVTGEQAQQARELGQSLAQEVKAATERLSLGSRDVAEALRLSKDIGRLIEAVETAVMPQWQRRELLATVKMLQRRANTAIRKLQMGQAAKKTQELLERHSKGPLIVDTVSAESLSVLVKVVRQLCEQAPSTSVLLLSPQPMGKVLCACQVAQGAMPTFTAEAWALAVCSHMGGKAWGSRVVAQGTGSTTDLEAALSIAQTYALSQL

SEQ ID NO: 37191 - protein, 1274 aa, Homo sapiens
MASGSGDSVTRRSVASQFFTQEEGPGIDGMTTSERVVDLLNQAALITNDSKITVLKQVQELIINKDPTLLDNFLDEIIAFQADKSIEVRKFVIGFIEEACKRDIELLLKLIANLNMLLRDENVNVVKKAILTMTQLYKVALQWMVKSRVISELQEACWDMVSAMAGDIILLLDSDNDGIRTHAIKFVEGLIVTLSPRMADSEIPRRQEHDISLDRIPRDHPYIQYNVLWEEGKAALEQLLKFMVHPAISSINLTTALGSLANIARQRPMFMSEVIQAYETLHANLPPTLAKSQVSSVRKNLKLHLLSVLKHPASLEFQAQITTLLVDLGTPQAEIARNMPSSKDTRKRPRDDSDSTLKKMKLEPNLGEDDEDKDLEPGPSGTSKASAQISGQSDTDITAEFLQPLLTPDNVANLVLISMVYLPEAMPASFQAIYTPVESAGTEAQIKHLARLMATQMTAAGLGPGVEQTKQCKEEPKEEKVVKTESVLIKRRLSAQGQAISVVGSLSSMSPLEEEAPQAKRRPEPIIPVTQPRLAGAGGRKKIFRLSDVLKPLTDAQVEAMKLGAVKRILRAEKAVACSGAAQVRIKILASLVTQFNSGLKAEVLSFILEDVRARLDLAFAWLYQEYNAYLAAGASGSLDKYEDCLIRLLSGLQEKPDQKDGIFTKVVLEAPLITESALEVVRKYCEDESRTYLGMSTLRDLIFKRPSRQFQYLHVLLDLSSHEKDKVRSQALLFIKRMYEKEQLREYVEKFALNYLQLLVHPNPPSVLFGADKDTEVAAPWTEETVKQCLYLYLALLPQNHKLIHELAAVYTEAIADIKRTVLRVIEQPIRGMGMNSPELLLLVENCPKGAETLVTRCLHSLTDKVPPSPELVKRVRDLYHKRLPDVRFLIPVLNGLEKKEVIQALPKLIKLNPIVVKEVFNRLLGTQHGEGNSALSPLNPGELLIALHNIDSVKCDMKSIIKATNLCFAERNVYTSEVLAVVMQQLMEQSPLPMLLMRTVIQSLTMYPRLGGFVMNILSRLIMKQVWKYPKVWEGFIKCCQRTKPQSFQVILQLPPQQLGAVFDKCPELREPLLAHVRSFTPHQQAHIPNSIMTILEASGKQEPEAKEAPAGPLEEDDLEPLTLAPAPAPRPPQDLIGLRLAQEKALKRQLEEEQKLKPGGVGAPSSSSPSPSPSARPGPPPSEEAMDFREEGPECETPGIFISMDDDSGLTEAALLDSSLEGPLPKETAAGGLTLKEERSPQTLAPVGEDAMKTPSPAAEDAREPEAKGNS

SEQ ID NO: 37192 - protein, 673 aa, Homo sapiens
MASGSGDSVTRRSVASQFFTQEEGPGIDGMTTSERVVDLLNQAALITNDSKITVLKQVQELIINKDPTLLDNFLDEIIAFQADKSIEVRKFVIGFIEEACKRDIELLLKLIANLNMLLRDENVNVVKKAILTMTQLYKVALQWMVKSRVISELQEACWDMVSAMAGDIILLLDSDNDGIRTHAIKFVEGLIVTLSPRMADSEIPRRQEHDISLDRIPRDHPYIQYNVLWEEGKAALEQLLKFMVHPAISSINLTTALGSLANIARQRPMFMSEVIQAYETLHANLPPTLAKSQVSSVRKNLKLHLLSVLKHPASLEFQAQITTLLVDLGTPQAEIARNMPSSKDTRKRPRDDSDSTLKKMKLEPNLGEDDEDKDLEPGPSGTSKASAQISGQSDTDITAEFLQPLLTPDNVANLVLISMVYLPEAMPASFQAIYTPVESAGTEAQIKHLARLMATQMTAAGLGPGVEQTKQCKEEPKEEKVVKTESVLIKRRLSAQGQAISVVGSLSSMSPLEEEAPQAKRRPEPIIPVTQPRLAGAGGRKKIFRLSDVLKPLTDAQVEAMKLGAVKRILRAEKAVACSGAAQVRIKILASLVTQFNSGLKAEVLSFILEDVRARLDLAFAWLYQEYNAYLAAGASPRLCWRRHSSQRVPWRWSASTARMRVAPIWACPHFET

SEQ ID NO: 37193 - protein, 272 aa, Homo sapiens
MHLRLISWLFIILNFMEYIGSQNASRGRRQRRMHPNVSQGCQGGCATCSDYNGCLSCKPRLFFALERIGMKQIGVCLSSCPSGYYGTRYPDINKCTKCKADCDTCFNKNFCTKCKSGFYLHLGKCLDNCPEGLEANNHTMECVSIVHCEVSEWNPWSPCTKKGKTCGFKRGTETRVREIIQHPSAKGNLCPPTNETRKCTVQRKKCQKGERGKKGRERKRKKPNKGESKEAIPDSKSLESSKEIPEQRENKQQQKKRKVQDKQKSVSVSTVH

SEQ ID NO: 37194 - protein, 292 aa, Homo sapiens
MHLRLISWLFIILNFMEYIGSQNASRGRRQRRMHPNVSQGCQGGCATCSDYNGCLSCKPRLFFALERIGMKQIGVCLSSCPSGYYGTRYPDINKCTKCKADCDTCFNKNFCTKCKSGFYLHLGKCLDNCPEGLEANNHTMECVSIVHCEVSEWNPWSPCTKKGKTCGFKRGTETRVREIIQHPSAKGNLCPPTNETRKCTVQRKKCQKGERGKKGRERKRKKPNKGESKEAIPDSKSLESSKEIPEQRENKQQQKKRKVQDKQKSGIEVTLAEGLTSVSQRTQPTPCRRRYL

SEQ ID NO: 37195 - protein, 576 aa, Homo sapiens
MIVFGWAVFLASRSLGQGLLLTLEEHIAHFLGTGGAATTMGNSCICRDDSGTDDSVDTQQQQAENSAVPTADTRSQPRDPVRPPRRGRGPHEPRRKKQNVDGLVLDTLAVIRTLVDNDQEPPYSMITLHEMAETDEGWLDVVQSLIRVIPLEDPLGPAVITLLLDECPLPTKDALQKLTEILNLNGEVACQDSSHPAKHRNTSAVLGCLAEKLAGPASIGLLSPGILEYLLQCLKLQSHPTVMLFALIALEKFAQTSENKLTISESSISDRLVTLESWANDPDYLKRQVGFCAQWSLDNLFLKEGRQLTYEKVNLSSIRAMLNSNDVSEYLKISPHGLEARCDASSFESVRCTFCVDAGVWYYEVTVVTSGVMQIGWATRDSKFLNHEGYGIGDDEYSCAYDGCRQLIWYNARSKPHIHPCWKEGDTVGFLLDLNEKQMIFFLNGNQLPPEKQVFSSTVSGFFAAASFMSYQQCEFNFGAKPFKYPPSMKFSTFNDYAFLTAEEKIILPRHRRLALLKQVSIRENCCSLCCDEVADTQLKPCGHSDLCMDCALQLETCPLCRKEIVSRIRQISHIS

SEQ ID NO: 37196 - protein, 117 aa, Homo sapiens
MIVFGWAVFLASRSLGQGLLLTLEEHIAHFLGTGGAATTMGNSCICRDDSGTDDSVDTQQQQAENSAVPTADTRSQPRDPVRPPRRGRGPHEPRRKKQNVDGLVLDTLAVIRTLVDK

SEQ ID NO: 37197 - protein, 92 aa, Homo sapiens
MAYRGQGQKVQKVMVQPINLIFRYLQNRSRIQVWLYEQVNMRIEGCIIGFDEYMNLVLDDAEEIHSKTKSRKQLGRIMLKGDNITLLQSVSN

SEQ ID NO: 37198 - protein, 76 aa, Homo sapiens
MSKAHPPELKKFTDKKFSLKLNGGRHVQGILRGFDPFMNLVIDECVEMATSGQQKNIGMVEIRGNSIIMLEALERV

SEQ ID NO: 37199 - protein, 240 aa, Homo sapiens
MTVGKSSKMLQHIDYRMRCILQDGRIFIGTFKAFDKHMNLILCDCDEFRKIKPKNSKQAEREEKRVLGLVLLRGENLVSMTVEGPPPKDTGIARVPLAGAAGGPGIGRAAGRGIPAGVPMPQAPAGLAGPVRGVGGPSQQVMTPQGRGTVAAAAAAATASIAGAPTQYPPGRGGPPPPMGRGAPPPGMMGPPPGMRPPMGPPMGIPPGRGTPMGMPPPGMRPPPPGMRGPPPPGMRPPRP

SEQ ID NO: 37200 - protein, 231 aa, Homo sapiens
MTVGKSSKMLQHIDYRMRCILQDGRIFIGTFKAFDKHMNLILCDCDEFRKIKPKNSKQAEREEKRVLGLVLLRGENLVSMTVEGPPPKDTGIARVPLAGAAGGPGIGRAAGRGIPAGVPMPQAPAGLAGPVRGVGGPSQQVMTPQGRGTVAAAAAAATASIAGAPTQYPPGRGGPPPPMGRGAPPPGMMGPPPGMRPPMGPPMGIPPGRGTPMGMPPPGMRPPPPGMRGLL

SEQ ID NO: 37201 - protein, 289 aa, Homo sapiens
MTVGKSSKMLQHIDYRMRCILQDGRIFIGTFKAFDKHMNLILCDCDEFRKIKPKNSKQAEREEKRVLGLVLLRGENLVSMTVEGPPPKDTGIARVPLAGAAGGPGIGRAAGRGIPAGVPMPQAPAGLAGPVRGVGGPSQQVMTPQGRGTVAAAAAAATASIAGAPTQYPPGRGGPPPPMGRGAPPPGMMGPPPGMRPPMGPPMGIPPGRGTPMGMPPPGMRPPPPGGCEAFFDPWPQSMEVAPQRRGLDSSGPRYHRPVCFLCCCSWSLMGLSGFLTGPPPPGMRPPRP

SEQ ID NO: 37202 - protein, 319 aa, Homo sapiens
MKIELSMQPWNPGYSSEGATAQETYTCPKMIEMEQAEAQLAELDLLASMFPGENELIVNDQLAVAELKDCIEKKTMEGRSSKVYFTINMNLDVSDEKMAMFSLACILPFKYPAVLPEITVRSVLLSRSQQTQLNTDLTAFLQKHCHGDVCILNATEWVREHASGYVSRDTSSSPTTGSTVQSVDLIFTRLWIYSHHIYNKCKRKNILEWAKELSLSGFSMPGKPGVVCVEGPQSACEEFWSRLRKLNWKRILIRHREDIPFDGTNDETERQRKFSIFEEKVFSVNGARGNHMDFGQLYQFLNTKGCGDVFQMFFGVEGQ

SEQ ID NO: 37203 - protein, 312 aa, Homo sapiens
MEPGSVENLSIVYRSRDFLVVNKHWDVRIDSKAWRETLTLQKQLRYRFPELADPDTCYGFRFCHQLDFSTSGALCVALNKAAAGSAYRCFKERRVTKAYLALLRGHIQESRVTISHAIGRNSTEGRAHTMCIEGSQGCENPKPSLTDLVVLEHGLYAGDPVSKVLLKPLTGRTHQLRVHCSALGHPVVGDLTYGEVSGREDRPFRMMLHAFYLRIPTDTECVEVCTPDPFLPSLDACWSPHTLLQSLDQLVQALRATPDPDPEDRGPRPGSPSALLPGPGRPPPPPTKPPETEAQRGPCLQWLSEWTLEPDS

SEQ ID NO: 37204 - protein, 545 aa, Homo sapiens
MWLDRRGWLRVLGHWRYDLRRPSFTRTWSGDKGPMAETVSTQVGTEGGLRASHQQNGDAGGDAKVELSPGPPKPAGREVEPAPVGGEHPSAAAPGPGKHKKRRGATRERVVPPPKKRRTGVSFGDEHFAETSYYFEGGLRKVRPYYFDFRTYCKGRWVGHSLLHVFSTEFRAQPLAYYEAAVRAGRLQLNEKPVQDLNIVLKDNDFLRNTVHRHEPPVTAEPIRLLAENEDVVVVDKPSSIPVHPCGRFRHNTVIFILGKEHQLKELHPLHRLDRLTSGVLMFAKTAAVSERIHEQVRDRQLEKEYVCRVEGEFPTEEVTCKEPILVVSYKVGVCRVDPRGKPCETVFQRLSYNGQSSVVRCRPLTGRTHQIRVHLQFLGHPILNDPIYNSVAWGPSRGRGGYIPKTNEELLRDLVAEHQAKQSLDVLDLCEGDLSPGLTDSTAPSSELGKDDLEELAAAAQKMEEVAEAAPQELDTIALASEKAVETDVMNQETDPLCAECRLVRQDPLPQDLVMFLHALRYKGPGFEYFSPMPAWAQDDWQKD

SEQ ID NO: 37205 - protein, 484 aa, Homo sapiens
MWLDRRGWLRVLGHWRYDLRRPSFTRTWSGDKGPMAETVSTQVGTEGGLRASHQQNGDAGGDAKVELSPGPPKPAGREVEPAPVGGEHPSAAAPGPGKHKKRRGATRERVVPPPKKRRTGVSFGDEHFAETSYYFEGGLRKDNDFLRNTVHRHEPPVTAEPIRLLAENEDVVVVDKPSSIPVHPCGRFRHNTVIFILGKEHQLKELHPLHRLDRLTSGVLMFAKTAAVSERIHEQVRDRQLEKEYVCRVEGEFPTEEVTCKEPILVVSYKVGVCRVDPRGKPCETVFQRLSYNGQSSVVRCRPLTGRTHQIRVHLQFLGHPILNDPIYNSVAWGPSRGRGGYIPKTNEELLRDLVAEHQAKQSLDVLDLCEGDLSPGLTDSTAPSSELGKDDLEELAAAAQKMEEVAEAAPQELDTIALASEKAVETDVMNQETDPLCAECRLVRQDPLPQDLVMFLHALRYKGPGFEYFSPMPAWAQDDWQKD

SEQ ID NO: 37206 - protein, 414 aa, Homo sapiens
MAASIVRRGMLLARQVVLPQLSPAGKRYLLSSAYVDSHKWEAREKEHYCLADLASLMDKTFERKLPVSSLTISRLIDNISSREEIDHAEYYLYKFRHSPNCWYLRNWTIHTWIRQCLKYDAQDKALYTLVNKVQYGIFPDNFTFNLLMDSFIKKENYKDALSVVFEVMMQEAFEVPSTQLLSLYVLFHCLAKKTDFSWEEERNFGASLLLPGLKQKNSVGFSSQLYGYALLGKVELQQGLRAVYHNMPLIWKPGYLDRALQVMEKVAASPEDIKLCREALDVLGAVLKALTSADGASEEQSQNDEDNQGSEKLVEQLDIEETEQSKLPQYLERFKALHSKLQALGKIESEGLLSLTTQLVKEKLSTCEAEDIATYEQNLQQWHLDLVQLIQREQQQREQAKQEYQAQKAAKASA

SEQ ID NO: 37207 - protein, 428 aa, Homo sapiens
MAASIVRRGMLLARQVVLPQLSPAGKRYLLSSAYVDSHKWEAREKEHYCLADLASLMDKTFERKLPVSSLTISRLIDNISSREEIDHAEYYLYKKGECSSSNPQNYSRFRHSPNCWYLRNWTIHTWIRQCLKYDAQDKALYTLVNKVQYGIFPDNFTFNLLMDSFIKKENYKDALSVVFEVMMQEAFEVPSTQLLSLYVLFHCLAKKTDFSWEEERNFGASLLLPGLKQKNSVGFSSQLYGYALLGKVELQQGLRAVYHNMPLIWKPGYLDRALQVMEKVAASPEDIKLCREALDVLGAVLKALTSADGASEEQSQNDEDNQGSEKLVEQLDIEETEQSKLPQYLERFKALHSKLQALGKIESEGLLSLTTQLVKEKLSTCEAEDIATYEQNLQQWHLDLVQLIQREQQQREQAKQEYQAQKAAKASA

SEQ ID NO: 37208 - protein, 439 aa, Homo sapiens
MAAARCWRPLLRGPRLSLHTAANAAATATETTCQDVAATPVARYPPIVASMTADSKAARLRRIERWQATVHAAESVDEKLRILTKMQFMKYMVYPQTFALNADRWYQYFTKTVFLSGLPPPPAEPEPEPEPEPEPALDLAALRAVACDCLLQEHFYLRRRRRVHRYEESEVISLPFLDQLVSTLVGLLSPHNPALAAAALDYRCPVHFYWVRGEEIIPRGHRRGRIDDLRYQIDDKPNNQIRISKQLAEFVPLDYSVPIEIPTIKCKPDKLPLFKRQYENHIFVGSKTADPCCYGHTQFHLLPDKLRRERLLRQNCADQIEVVFRANAIASLFAWTGAQAMYQGFWSEADVTRPFVSQAVITDGKYFSFFCYQLNTLALTTQADQNNPRKNICWGTQSKPLYETIEDNDVKGFNDDVLLQIVHFLLNRPKEEKSQLLEN

SEQ ID NO: 37209 - protein, 218 aa, Homo sapiens
MARKKVRPRLIAELARRVRALREQLNRPRDSQLYAVDYETLTRPFSGRRLPVRAWADVRRESRLLQLLGRLPLFGLGRLVTRKSWLWQHDEPCYWRLTRVRPDYTAQNLDHGKAWGILTFKGKTESEAREIEHVMYHDWRLVPKHEEEAFTAFTPAPEDSLASVPYPPLLRAMIIAERQKNGDTSTEEPMLNVQRIRMEPWDYPAKQEDKGRAKGTPV

SEQ ID NO: 37210 - protein, 563 aa, Homo sapiens
MFSRNHRSRVTVARGSALEMEFKRGRFRLSLFSDLPEDTELQRKLDHEIRMREGACKLLAACSQREQALEATKSLLVCNSRILSYMGELQRRKEAQVLGKTSRRPSDSGPPAERSPCRGRVCISDLRIPLMWKDTEYFKNKGDLHRWAVFLLLQLGEHIQDTEMILVDRTLTDISFQSNVLFAEAGPDFELRLELYGACVEEEGALTGGPKRLATKLSSSLGRSSGRRVRASLDSAGGSGSSPILLPTPVVGGPRYHLLAHTTLTLAAVQDGFRTHDLTLASHEENPAWLPLYGSVCCRLAAQPLCMTQPTASGTLRVQQAGEMQNWAQVHGVLKGTNLFCYRQPEDADTGEEPLLTIAVNKETRVRAGELDQALGRPFTLSISNQYGDDEVTHTLQTESREALQSWMEALWQLFFDMSQWKQCCDEIMKIETPAPRKPPQALAKQGSLYHEMAIEPLDDIAAVTDILTQREGARLETPPPWLAMFTDQPALPNPCSPASVAPAPDWTHPLPWGRPRTFSLDAVPPDHSPRARSVAPLPPQRSPRTRGLCSKGQPRTWLQSPV

SEQ ID NO: 37211 - protein, 550 aa, Homo sapiens
MQDRLHILEDLNMLYIRQMALSLEDTELQRKLDHEIRMREGACKLLAACSQREQALEATKSLLVCNSRILSYMGELQRRKEAQVLGKTSRRPSDSGPPAERSPCRGRVCISDLRIPLMWKDTEYFKNKGDLHRWAVFLLLQLGEHIQDTEMILVDRTLTDISFQSNVLFAEAGPDFELRLELYGACVEEEGALTGGPKRLATKLSSSLGRSSGRRVRASLDSAGGSGSSPILLPTPVVGGPRYHLLAHTTLTLAAVQDGFRTHDLTLASHEENPAWLPLYGSVCCRLAAQPLCMTQPTASGTLRVQQAGEMQNWAQVHGVLKGTNLFCYRQPEDADTGEEPLLTIAVNKETRVRAGELDQALGRPFTLSISNQYGDDEVTHTLQTESREALQSWMEALWQLFFDMSQWKQCCDEIMKIETPAPRKPPQALAKQGSLYHEMAIEPLDDIAAVTDILTQREGARLETPPPWLAMFTDQPALPNPCSPASVAPAPDWTHPLPWGRPRTFSLDAVPPDHSPRARSVAPLPPQRSPRTRGLCSKGQPRTWLQSPV

SEQ ID NO: 37212 - protein, 513 aa, Homo sapiens
MREGACKLLAACSQREQALEATKSLLVCNSRILSYMGELQRRKEAQVLGKTSRRPSDSGPPAERSPCRGRVCISDLRIPLMWKDTEYFKNKGDLHRWAVFLLLQLGEHIQDTEMILVDRTLTDISFQSNVLFAEAGPDFELRLELYGACVEEEGALTGGPKRLATKLSSSLGRSSGRRVRASLDSAGGSGSSPILLPTPVVGGPRYHLLAHTTLTLAAVQDGFRTHDLTLASHEENPAWLPLYGSVCCRLAAQPLCMTQPTASGTLRVQQAGEMQNWAQVHGVLKGTNLFCYRQPEDADTGEEPLLTIAVNKETRVRAGELDQALGRPFTLSISNQYGDDEVTHTLQTESREALQSWMEALWQLFFDMSQWKQCCDEIMKIETPAPRKPPQALAKQGSLYHEMAIEPLDDIAAVTDILTQREGARLETPPPWLAMFTDQPALPNPCSPASVAPAPDWTHPLPWGRPRTFSLDAVPPDHSPRARSVAPLPPQRSPRTRGLCSKGQPRTWLQSPV

SEQ ID NO: 37213 - protein, 609 aa, Homo sapiens
MEGPSLRGPALRLAGLPTQQDCNIQEKIDLEIRMREGIWKLLSLSTQKDQVLHAVKNLMVCNARLMAYTSELQKLEEQIANQTGRCDVKFESKERTACKGKIAISDIRIPLMWKDSDHFSNKERSRRYAIFCLFKMGANVFDTDVVNVDKTITDICFENVTIFNEAGPDFQIKVEVYSCCTEESSITNTPKKLAKKLKTSISKATGKKISSVLQEEDDEMCLLLSSAVFGVKYNLLAHTTLTLESAEDSFKTHNLSINGNEESSFWLPLYGNMCCRLVAQPACMAEDAFAGFLNQQQMVEGLISWRRLYCVLRGGKLYCFYSPEEIEAKVEPALVVPINKETRIRAMDKDAKKRIHNFSVINPVPGQAITQIFAVDNREDLQKWMEAFWQHFFDLSQWKHCCEELMKIEIMSPRKPPLFLTKEATSVYHDMSIDSPMKLESLTDIIQKKIEETNGQFLIGQHEESLPPPWATLFDGNHQMVIQKKVLYPASEPLHDEKGKKRQAPLPPSDKLPFSLKSQSNTDQLVKDNWGKTSVSQTSSLDTKLSTLMHHLQKPMAAPRKLLPARRNRLSDGEHTDTKTNFEAKPVPAPRQKSIKDILDPRSWLQAQV

SEQ ID NO: 37214 - protein, 527 aa, Homo sapiens
MEGPSLRGPALRLAGLPTQQDCNIQEKIDLEIRMREGIWKLLSLSTQKDQVLHAVKNLMVCNARLMAYTSELQKLEEQIANQTGRCDVKFESKERTACKGKIAISDIRIPLMWKDSDHFSNKERSRRYAIFCLFKMGANVFDTDVVNVDKTITDICFENVTIFNEAGPDFQIKVEVYSCCTEESSITNTPKKLAKKLKTSISKATGKKISSVLQEEDDEMCLLLSSAVFGVKYNLLAHTTLTLESAEDSFKTHNLSINGNEESSFWLPLYGNMCCRLVAQPACMAEDAFAGFLNQQQMVEGLISWRRLYCVLRGGKLYCFYSPEEIEAKVEPALVVPINKSLVLFEDSLEGIQLAISQSFKETRIRAMDKDAKKRIHNFSVINPVPGQAITQIFAVDNREDLQKWMEAFWQHFFDLSQWKHCCEELMKIEIMSPRKPPLFLTKEATSVYHDMSIDSPMKLESLTDIIQKKIEETNGQFLIGQHEESLPPPWATLFDGNHQMVIQKKNNSNQLHNLQKLPATSKFLFT

SEQ ID NO: 37215 - protein, 163 aa, Homo sapiens
MEGPSLRGPALRLAGLPTQQDCNIQEKIDLEIRMREGIWKLLSLSTQKDQVLHAVKNLMVCNARLMAYTSELQKLEEQIANQTGRCDVKFESKERTACKGKIAISDIRIPLMWKDSDHFSNKERSRRYAIFCLFKMGANVFDTDVVNVDKTITDICFENVTIL

SEQ ID NO: 37216 - protein, 255 aa, Homo sapiens
MVKLTAELIEQAAQYTNAVRDRELDLRGYKIPVIENLGATLDQFDAIDFSDNEIRKLDGFPLLRRLKTLLVNNNRICRIGEGLDQALPCLTELILTNNSLVELGDLDPLASLKSLTYLSILRNPVTNKKHYRLYVIYKVPQVRVLDFQKVKLKERQEAEKMFKGKRGAQLAKDIARRSKTFNPGAGLPTDKKKGGPSPGDVEAIKNAIANASTLAEVERLKGLLQSGQIPGRERRSGPTDDGEEEMEEDTVTNGS

SEQ ID NO: 37217 - protein, 400 aa, Homo sapiens
MSGRVGDLSPKQAETLAKFRENVQDVLPALPNPDDYFLLRWLRARNFDLQKSEALLRKYMEFRKTMDIDHILDWQPPEVIQKYMPGGLCGYDRDGCPVWYDIIGPLDPKGLLFSVTKQDLLKTKMRDCERILHECDLQTERLGKKIETIVMIFDCEGLGLKHFWKPLVEVYQEFFGLLEENYPETLKFMLIVKATKLFPVGYNLMKPFLSEDTRRKIIVLGNNWKEGLLKLISPEELPAQFGGTLTDPDGNPKCLTKINYGGEIPKSMYVRDQVKTQYEHSVQINRGSSHQVEYEILFPGCVLRWQFSSDGADIGFGVFLKTKMGERQRAGEMTDVLPSQRYNAHMVPEDGNLTCSEAGVYVLRFDNTYSFVHAKKVSFTVEVLLPDEGMQKYDKELTPV

SEQ ID NO: 37218 - protein, 341 aa, Homo sapiens
MEFRKTMDIDHILDWQPPEVIQKYMPGGLCGYDRDGCPVWYDIIGPLDPKGLLFSVTKQDLLKTKMRDCERILHECDLQTERLGKKIETIVMIFDCEGLGLKHFWKPLVEVYQEFFGLLEENYPETLKFMLIVKATKLFPVGYNLMKPFLSEDTRRKIIVLGNNWKEGLLKLISPEELPAQFGGTLTDPDGNPKCLTKINYGGEIPKSMYVRDQVKTQYEHSVQINRGSSHQVEYEILFPGCVLRWQFSSDGADIGFGVFLKTKMGERQRAGEMTDVLPSQRYNAHMVPEDGNLTCSEAGVYVLRFDNTYSFVHAKKVSFTVEVLLPDEGMQKYDKELTPV

SEQ ID NO: 37219 - protein, 323 aa, Homo sapiens
MVIQKYMPGGLCGYDRDGCPVWYDIIGPLDPKGLLFSVTKQDLLKTKMRDCERILHECDLQTERLGKKIETIVMIFDCEGLGLKHFWKPLVEVYQEFFGLLEENYPETLKFMLIVKATKLFPVGYNLMKPFLSEDTRRKIIVLGNNWKEGLLKLISPEELPAQFGGTLTDPDGNPKCLTKINYGGEIPKSMYVRDQVKTQYEHSVQINRGSSHQVEYEILFPGCVLRWQFSSDGADIGFGVFLKTKMGERQRAGEMTDVLPSQRYNAHMVPEDGNLTCSEAGVYVLRFDNTYSFVHAKKVSFTVEVLLPDEGMQKYDKELTPV

SEQ ID NO: 37220 - protein, 384 aa, Homo sapiens
MNATGTPVAPESCQQLAAGGHSRLIVLHYNHSGRLAGRGGPEDGGLGALRGLSVAASCLVVLENLLVLAAITSHMRSRRWVYYCLVNITLSDLLTGAAYLANVLLSGARTFRLAPAQWFLREGLLFTALAASTFSLLFTAGERFATMVRPVAESGATKTSRVYGFIGLCWLLAALLGMLPLLGWNCLCAFDRCSSLLPLYSKRYILFCLVIFAGVLATIMGLYGAIFRLVQASGQKAPRPAARRKARRLLKTVLMILLAFLVCWGPLFGLLLADVFGSNLWAQEYLRGMDWILALAVLNSAVNPIIYSFRSREVCRAVLSFLCCGCLRLGMRGPGDCLARAVEAHSGASTTDSSLRPRDSFRGSRSLSFRMREPLSSISSVRSI

SEQ ID NO: 37221 - protein, 473 aa, Homo sapiens
MASRSLGGLSGIRGGGGGGGKKSLSARNAAVERRNLITVCRFSVKTLIDRSCFETIDDSSPEFNNFAAILEQILSHRLKEISQSCRWLAHLQIPLQGQVTWFGYESPRSFWDYIRVACRKVSQNCICSIENMENVSSSRAKGRAWIRVALMEKHLSEYISTALRDFKTTRRFYEDGAIVLGEEANMLAGMLLGLNAIDFSFCLKGEGLDGSFPAVIDYTPYLKYIQSSDSISSDEEELRTLGSSGSESSTPENVGPPFLMDENSWFNKCKRVKQKYQLTLEQKGYLEELLRLRENQLSESVSQNKILLQRIEDSDLAHKLEKEQLEYIIVELQDQLTVLKNNDLRSRQELTAHLTNQWPSPGALDVNAVALDTLLYRKHNKQWYEKSYQSLDQLSAEVSLSQTSLDPGQSQEGDGKQDTLNVMSEGKEDTPSLLGLCGSLTSVASYKSLTSLKSNDYLASPTTEMTSPGLTPS

SEQ ID NO: 37222 - protein, 329 aa, Homo sapiens
MGQVTWFGYESPRSFWDYIRVACRKVSQNCICSIENMENVSSSRAKGRAWIRVALMEKHLSEYISTALRDFKTTRRFYEDGAIVLGEEANMLAGMLLGLNAIDFSFCLKGEGLDGSFPAVIDYTPYLKYIQSSDSISSDEEELRTLGSSGSESSTPENVGPPFLMDENSWFNKCKRVKQKYQLTLEQKGYLEELLRLRENQLSESVSQNKILLQRIEDSDLAHKLEKEQLEYIIVELQDQLKSYQSLDQLSAEVSLSQTSLDPGQSQEGDGKQDTLNVMSEGKEDTPSLLGLCGSLTSVASYKSLTSLKSNDYLASPTTEMTSPGLTPS

SEQ ID NO: 37223 - protein, 165 aa, Homo sapiens
MDENSWFNKCKRVKQKYQLTLEQKGYLEELLRLRENQLSESVSQNKILLQRIEDSDLAHKLEKEQLEYIIVELQDQLKSYQSLDQLSAEVSLSQTSLDPGQSQEGDGKQDTLNVMSEGKEDTPSLLGLCGSLTSVASYKSLTSLKSNDYLASPTTEMTSPGLTPS

SEQ ID NO: 37224 - protein, 407 aa, Homo sapiens
MASRSLGGLSGIRGGGGGGGKKSLSARNAAVERRNLITVCRFSVKTLIDRSCFETIDDSSPEFNNFAAILEQILSHRLKGQVTWFGYESPRSFWDYIRVACRKVSQNCICSIENMENVSSSRAKGRAWIRVALMEKHLSEYISTALRDFKTTRRFYEDGAIVLGEEANMLAGMLLGLNAIDFSFCLKGEGLDGSFPAVIDYTPYLKYIQSSDSISSDEEELRTLGSSGSESSTPENVGPPFLMDENSWFNKCKRVKQKYQLTLEQKGYLEELLRLRENQLSESVSQNKILLQRIEDSDLAHKLEKEQLEYIIVELQDQLKSYQSLDQLSAEVSLSQTSLDPGQSQEGDGKQDTLNVMSEGKEDTPSLLGLCGSLTSVASYKSLTSLKSNDYLASPTTEMTSPGLTPS

SEQ ID NO: 37225 - protein, 456 aa, Homo sapiens
MASRSLGGLSGIRGGGGGGGKKSLSARNAAVERRNLITVCRFSVKTLIDRSCFETIDDSSPEFNNFAAILEQILSHRLKGQVTWFGYESPRSFWDYIRVACRKVSQNCICSIENMENVSSSRAKGRAWIRVALMEKHLSEYISTALRDFKTTRRFYEDGAIVLGEEANMLAGMLLGLNAIDFSFCLKGEGLDGSFPAVIDYTPYLKYIQSSDSISSDEEELRTLGSSGSESSTPENVGPPFLMDENSWFNKCKRVKQKYQLTLEQKGYLEELLRLRENQLSESVSQNKILLQRIEDSDLAHKLEKEQLEYIIVELQDQLTVLKNNDLRSRQELTAHLTNQWPSPGALDVNAVALDTLLYRKHNKQWYEKSYQSLDQLSAEVSLSQTSLDPGQSQEGDGKQDTLNVMSEGKEDTPSLLGLCGSLTSVASYKSLTSLKSNDYLASPTTEMTSPGLTPS

SEQ ID NO: 37226 - protein, 2226 aa, Homo sapiens
MVLAGLIRKLGHQLAEIRERALKSILCKIEHNLICYADLIQERQLFLHLLEWFNFPSVPMKEEVLNLLSRLVKYPPAVQHLVDVGAVEFLSKLRSNVEPNLQAEIDGILDGLFLLPSEVPALSSASYQTNQTELSKNPEILTGYFPQDKSNFQQMEVPPRPVVNQTVKCLKFSTFPWLPLTTTDRHVLSSNESSLRSSNHTLIWNTCELLKDVIMQDFPAEIFLQRPKIVQSLLSLLKLAFGDGKHRLALQSVSCLQQLCMYLRNRLNFHRDPGFFSNKHDTVSQNSSLSYCHEARGTHHSQNPSPGSSSPRPSVVGRTGQRPRGDGQDWDAASSSGSSSHAHVNSRISVHSPLDMGHIDLPELETEDTLELQFQQLSLPQFCVSILESAVPLLRTGSRQVIIRVLELLTEDMTLIGEAISTDIWDDSSLFGIDMKEKLLLVLGALGETMCYHKSSISLEQPEVMLVHHRMAFISISLFAVRLLQTLLPVEKASEFLSEPMSTALFLLSLDMPISLEYPNIHEAVVAYLEQLNSENYSIYKRTAEAVYSIECTCNFLSDIGKEGEKNLLELVELADQALRSFSYHQHFPLIKEIISICSKIWKSAQASPLLQGESQKVLLHMLSHPLPRVKAETYHCCLEITKECLGVHNVTKPVSSLCNGIHFLLHPKVLYEISVFGIQEPESEVNTAAKAILLYLLQGRLMMTALTWNKFIESLCPVIPILQGYADTEDPLGNCILLLSKASSDTEEMLPCTTRLKSMLRLLLVKKPSVRSLALKLLAFHLTSEEGADTKRPLIDARVLSRVTDLFIGKKPIELRLDDRRELVIKLETVEKVYEIFTSDDVDLVLRKSAAEQLAVIMQDIKMHAVVKKLCLIDKIIEYLNECVSQDGKVVECLVQPCLTLLRKVLCGDPVMRVSLSQQSSLLTVLFRVSLIFHEDCSVVTEVGALFCLLLFDEVSRMDMWSVNPSNKPSLPSVFSLPVSVFRRYHLPVHVIGHHAVSPYSIVLPLSADCLALKPVSDMLRIAWNLSWYHGSDNLLKQMNSETKTQEILDALKLSTEDILTLKITHMASGLQDCLHSIVQAATHREVRAAVTRMSFYLLNDRLSLKGCPGPCGVTLKSLAWHTALNRFLQVLPACTEDEKLLIDIIHFLNKLIKEQRKNSSLELLNWILELLLRHSANPLLDLLVLTESQAREETDDIRTAVRQQLQKELIALFDTLLLNFMEVTDRKCSELLYVFQTQLALKLLQCLKVTDAPHFYGLPSLERTLRGMANLTAFPGWSSHSPLTKPLDICVKYLSGLLEVITSFYVERGGNAMSFMGKGVTKSTILCLLHLSHEMMAQAGSLEWMSLWFLPLGSHSEEHIPTQQGLAWLIPLWVDRDPEVRFTSLGLGSALTTLETGCVALANSCQNISGGLWGTVVNILLDQSECSMVRREAAFILQNLLVIPMPTEIIKDYTWQGPCVHDEDSGLSLIGKPALQALLYHCHFYEHLNQMVKHCYLGRCMFDLNFSAFDRNSESNDLNGLDDSFKFWRAPSRTSQDRDPSSLSTSETTVAPSLGSTEFQPLVQSTTLLPEASHDQFVAQGHQESTSPRPPHDSSLSAPLPKLCVFVTPSLLSAMCSLLDNLLTIAPRDTAKAFRQAHLIELLCSIADATLIQTCVQELRALLPSSPPAEHTQAQVSFLLEYLSSLSRLLQSCLLVEPDLVIQDELVKPLITNIIGILTICTKDVLDKELISAFYHTWTHLFNLLAMLLRKAGAITLPFVTVALAKHWTAAIDMFCTCAGLSATCPALYTASLQFLSVLLTEEAKGHLQAKSKTHLCCSPTVASLLDDSQENQKSLEQLSDVILQCYEGKSSKDILKRVAANALMSLLAVSRRAQKHALKANLIDNCMEQMKHINAQLNLDSLRPGKAALKKKEDGVIKELSIAMQLLRNCLYQNEECKEAALEAHLVPVLHSLWPWILMDDSLMQISLQLLCVYTANFPNGCSSLCWSSCGQHPVQATHRGAVSNSLMLCILKLASQMPLENTTVQQMVFMLLSNLALSHDCKGVIQKSNFLQNFLSLALPKGGNKHLSNLTILWLKLLLNISSGEDGQQMILRLDGCLDLLTEMSKYKHKSSPLLPLLIFHNVCFSPANKPKILANEKVITVLAACLESENQNAQRIGAAALWALIYNYQKAKTALKSPSVKRRVDEAYSLAKKTFPNSEANPLNAYYLKCLENLVQLLNSS

SEQ ID NO: 37227 - protein, 601 aa, Homo sapiens
MVLAGLIRKLGHQLAEIRERALKSILCKIEHNLICYADLIQERQLFLHLLEWFNFPSVPMKEEVLNLLSRLVKYPPAVQHLVDVGAVEFLSKLRSNVEPNLQAEIDGILDGLFLLPSEVPALSSASYQTNQTELSKNPEILTGYFPQDKSNFQQMEVPPRPVVNQTVKCLKFSTFPWLPLTTTDRHVLSSNESSLRSSNHTLIWNTCELLKDVIMQDFPAEIFLQRPKIVQSLLSLLKLAFGDGKHRLALQSVSCLQQLCMYLRNRLNFHRDPGFFSNKHDTVSQNSSLSYCHEARGTHHSQNPSPGSSSPRPSVVGRTGQRPRGDGQDWDAASSSGSSSHAHVNSRISVHSPLDMGHIDLPELETEDTLELQFQQLSLPQFCVSILESAVPLLRTGSRQVIIRVLELLTEDMTLIGEAISTDIWDDSSLFGIDMKEKLLLVLGALGETMCYHKSSISLEQPEVMLVHHRMAFISISLFAVRLLQTLLPVEKASEFLSEPMSTALFLLSLDMPISLEYPNIHEAVVAYLEQLNSENYSIYKRTAEAVYSIECTCNFLSDIGKEGEKNLLELVELADQALRSFSYHQHFPLIKEIISICSKM

SEQ ID NO: 37228 - protein, 2200 aa, Homo sapiens
MVLAGLIRKLGHQLAEIRERALKSILCKIEHNLICYADLIQERQLFLHLLEWFNFPSVPMKEEVLNLLSRLVKYPPAVQHLVDVGAVEFLSKLRSNVEPNLQAEIDGILDGLFLLPSEVPALSSASYQTNQTELSKNPEILTGYFPQDKSNFQQMEVPPRPVVNQTVKCLKFSTFPWLPLTTTDRHVLSSNESSLRSSNHTLIWNTCELLKDVIMQDFPAEIFLQRPKIVQSLLSLLKLAFGDGKHRLALQSVSCLQQLCMYLRNRLNFHRDPGFFSNKHDTVSQNSSLSYCHEARGTHHSQNPSPGSSSPRPSVVGRTGQRPRGDGQDWDAASSSGSSSHAHVNSRISVHSPLDMGHIDLPELETEDTLELQFQQLSLPQFCVSILESAVPLLRTGSRQVIIRVLELLTEDMTLIGEAISTDIWDDSSLFGIDMKEKLLLVLGALGETMCYHKSSISLEQPEVMLVHHRMAFISISLFAVRLLQTLLPVEKASEFLSEPMSTALFLLSLDMPISLEYPNIHEAVVAYLEQLNSENYSIYKRTAEAVYSIECTCNFLSDIGKEGEKNLLELVELADQALRSFSYHQHFPLIKEIISICSKIWKSAQASPLLQGESQKVLLHMLSHPLPRVKAETYHCCLEITKECLGVHNVTKPVSSLCNGIHFLLHPKVLYEISVFGIQEPESEVNTAAKAILLYLLQGRLMMTALTWNKFIESLCPVIPILQGYADTEDPLGNCILLLSKASSDTEEMLPCTTRLKSMLRLLLVKKPSVRSLALKLLAFHLTSEEGADTKRPLIDARVLSRVTDLFIGKKPIELRLDDRRELVIKLETVEKVYEIFTSDDVDLVLRKSAAEQLAVIMQDIKMHAVVKKLCLIDKIIEYLNECVSQDGKVVECLVQPCLTLLRKVLCGDPVMRVSLSQQSSLLTVLFRVSLIFHEDCSVVTEVGALFCLLLFDEVSRMDMWSVNPSNKPSLPSVFSLPVSVFRRYHLPVHVIGHHAVSPYSIVLPLSADCLALKPVSDMLRIAWNLSWYHGSDNLLKQMNSETKTQEILDALKLSTEDILTLKITHMASGLQDCLHSIVQAATHREVRAAVTRMSFYLLNDRLSLKGCPGPCGVTLKSLAWHTALNRFLQVLPACTEDEKLLIDIIHFLNKLIKEQRKNSSLELLNWILELLLRHSANPLLDLLVLTESQAREETDDIRTAVRQQLQKELIALFDTLLLNFMEVTDRKCSELLYVFQTQLALKLLQCLKVTDAPHFYGLPSLERTLRGMANLTAFPGWSSHSPLTKPLDICVKYLSGLLEVITSFYVERGGNAMSFMGKGVTKSTILCLLHLSHEMMAQAGSLEWMSLWFLPLGSHSEEHIPTQQGLAWLIPLWVDRDPEVRFTSLGLGSALTTLETGCVALANSCQNISGGLWGTVVNILLDQSECSMVRREAAFILQNLLVIPMPTEIIKDYTWQGPCVHDEDSGLSLIGKPALQALLYHCHFYEHLNQMVKHCYLGRCMFDLNFSAFDRNSESNDLNGLDDSFKFWRAPSRTSQDRDPSSLSTSETTVAPSLGSTEFQPLVQSTTLLPEASHDQFVAQGHQESTSPRPPHDSSLSAPLPKLCVFVTPSLLSAMCSLLDNLLTIAPRDTAKAFRQAHLIELLCSIADATLIQTCVQELRALLPSSPPAEHTQAQVSFLLEYLSSLSRLLQSCLLVEPDLVIQDELVKPLITNIIGILTICTKDVLDKELISAFYHTWTHLFNLLAMLLRKAGAITLPFVTVALAKHWTAAIDMFCTCAGLSATCPALYTASLQFLSVLLTEEAKGHLQAKSKTHLCCSPTVASLLDDSQENQKSLEQLSDVILQCYEGKSSKDILKRVAANALMSLLAVSRRAQKHALKANLIDNCMEQMKHINAQLNLDSLRPGKAALKKKEDGVIKELSIAMQLLRNCLYQNEECKEAALEAHLVPVLHSLWPWILMDDSLMQISLQLLCVYTANFPNGCSSLCWSSCGQHPVQATHRGAVSNSLMLCILKLASQMPLENTTVQQMVFMLLSNLALSHDCKGVIQKSNFLQNFLSLALPKGGNKHLSNLTILWLKLLLNISSGEDGQQMILRLDGCLDLLTEMSKYKHKSSPLLPLLIFHNVCFSPANKPKILANEKVITVLAACLESENQNAQRIGAAALWALIYNYQKAKTALKSPSVKRRVDEAYSLAKKTP

SEQ ID NO: 37229 - protein, 879 aa, Homo sapiens
MVLAGLIRKLGHQLAEIRERALKSILCKIEHNLICYADLIQERQLFLHLLEWFNFPSVPMKEEVLNLLSRLVKYPPAVQHLVDVGAVEFLSKLRSNVEPNLQAEIDGILDGLFLLPSEVPALSSASYQTNQTELSKNPEILTGYFPQDKSNFQQMEVPPRPVVNQTVKCLKFSTFPWLPLTTTDRHVLSSNESSLRSSNHTLIWNTCELLKDVIMQDFPAEIFLQRPKIVQSLLSLLKLAFGDGKHRLALQSVSCLQQLCMYLRNRLNFHRDPGFFSNKHDTVSQNSSLSYCHEARGTHHSQNPSPGSSSPRPSVVGRTGQRPRGDGQDWDAASSSGSSSHAHVNSRISVHSPLDMGHIDLPELETEDTLELQFQQLSLPQFCVSILESAVPLLRTGSRQVIIRVLELLTEDMTLIGEAISTDIWDDSSLFGIDMKEKLLLVLGALGETMCYHKSSISLEQPEVMLVHHRMAFISISLFAVRLLQTLLPVEKASEFLSEPMSTALFLLSLDMPISLEYPNIHEAVVAYLEQLNSENYSIYKRTAEAVYSIECTCNFLSDIGKEGEKNLLELVELADQALRSFSYHQHFPLIKEIISICSKIWKSAQASPLLQGESQKVLLHMLSHPLPRVKAETYHCCLEITKECLGVHNVTKPVSSLCNGIHFLLHPKVLYEISVFGIQEPESEVNTAAKAILLYLLQGRLMMTALTWNKFIESLCPVIPILQGYADTEDPLGNCILLLSKASSDTEEMLPCTTRLKSMLRLLLVKKPSVRSLALKLLAFHLTSEEGADTKRPLIDARVLSRVTDLFIGKKPIELRLDDRRELVIKLETVEKVYEIFTSDDVDLVLRKSAAEQLAVIMQGCRMFGTTMPHTLEEGFMW

SEQ ID NO: 37230 - protein, 398 aa, Homo sapiens
MESGLLRPAPVSEVIVLHYNYTGKLRGARYQPGAGLRADAVVCLAVCAFIVLENLAVLLVLGRHPRFHAPMFLLLGSLTLSDLLAGAAYAANILLSGPLTLKLSPALWFAREGGVFVALTASVLSLLAIALERSLTMARRGPAPVSSRGRTLAMAAAAWGVSLLLGLLPALGWNCLGRLDACSTVLPLYAKAYVLFCVLAFVGILAAICALYARIYCQVRANARRLPARPGTAGTTSTRARRKPRSLALLRTLSVVLLAFVACWGPLFLLLLLDVACPARTCPVLLQADPFLGLAMANSLLNPIIYTLTNRDLRHALLRLVCCGRHSCGRDPSGSQQSASAAEASGGLRRCLPPGLDGSFSGSERSSPQRDGLDTSGSTGSPGAPTAARTLVSEPAAD

SEQ ID NO: 37231 - protein, 310 aa, Homo sapiens
MESGLLRPAPVSEVIVLHYNYTGKLRGARYQPGAGLRADAVVCLAVCAFIVLENLAVLLVLGRHPRFHAPMFLLLGSLTLSDLLAGAAYAANILLSGPLTLKLSPALWFAREGGVFVALTASVLSLLAIALERSLTMARRGPAPVSSRGRTLAMAAAAWGVSLLLGLLPALGWNCLGRLDACSTVLPLYAKAYVLFCVLAFVGILAAICALYALAGLAAHAQRGAPGLCGMLGPPHPAAVARRGVPGAHLSCTPAGRSLPGTGHGQLTSEPHHLHAHQPRPAPRAPAPGLLRTPLLRQRPEWLPAVGERG

SEQ ID NO: 37232 - protein, 582 aa, Homo sapiens
MMNFLRRRLSDSSFIANLPNGYMTDLQRPEPQQPPPPPPPGPGAASASAAPPTASPGPERRPPPASAPAPQPAPTPSVGSSFFSSLSQAVKQTAASAGLVDAPAPAPAAARKAKVLLVVDEPHADWAKCFRGKKVLGDYDIKVEQAEFSELNLVAHADGTYAVDMQVLRNGTKVVRSFRPDFVLIRQHAFGMAENEDFRHLIIGMQYAGLPSINSLESIYNFCDKPWVFAQLVAIYKTLGGEKFPLIEQTYYPNHKEMLTLPTFPVVVKIGHAHSGMGKVKVENHYDFQDIASVVALTQTYATAEPFIDSKYDIRVQKIGNNYKAYMRTSISGNWKTNTGSAMLEQIAMSDRYKLWVDTCSEMFGGLDICAVKAVHGKDGKDYIFEVMDCSMPLIGEHQVEDRQLITELVISKMNQLLSRTPALSPQRPLTTQQPQSGTLKDPDSSKTPPQRPPPQGGPGQPQGMQPPGKVLPPRRLPPGPSLPPSSSSSSSSSSSAPQRPGGPTTHGDAPSSSSSLAEAQPPLAAPPQKPQPHPQLNKSQSLTNAFSFSESSFFRSSANEDEAKAETIRSLRKSFASLFSD

SEQ ID NO: 37233 - protein, 478 aa, Homo sapiens
MMNFLRRRLSDSSFIANLPNGYMTDLQRPEPQQPPPPPPPGPGAASASAAPPTASPGPERRPPPASAPAPQPAPTPSVGSSFFSSLSQAVKQTAASAGLVDAPAPAPAAARKAKVLLVVDEPHADWAKCFRGKKVLGDYDIKVEQAEFSELNLVAHADGTYAVDMQVLRNGTKVVRSFRPDFVLIRQHAFGMAENEDFRHLIIGMQYAGLPSINSLESIYNFCDKPWVFAQLVAIYKTLGGEKFPLIEQTYYPNHKEMLTLPTFPVVVKIGHAHSGMGKVKVENHYDFQDIASVVALTQTYATAEPFIDSKYDIRVQKIGNNYKAYMRTSISGNWKTNTGSAMLEQIAMSDRYKLWVDTCSEMFGGLDICAVKAVHGKDGKDYIFEVMDCSMPLIGEHQVEDRQLITELVISKMNQLLSRTPALSPQRPLTTQQPQSGTLKDPDSSKTPPQRPPPQGCLQYILDCNGIAVGPKQVQAS

SEQ ID NO: 37234 - protein, 462 aa, Homo sapiens
MECPEGQLPISSENDSTPTVSTSEVTSQQEPQILVDRGSETTYESSADIAGDEGTQIPADEDTQTDADSSAQAAAQAPENFQEGKDMSESQDEVPDEVENQFILRLPLEHACTVRNLARSQSVKMKDKLKIDLLPDGRHAVVEVEDVPLAAKLVDLPCVIESLRTLDKKTFYKTADISQMLVCTADGDIHLSPEEPAASTDPNIVRKKERGREEKCVWKHGITPPLKNVRKKRFRKTQKKVPDVKEMEKSSFTEYIESPDVENEVKRLLRSDAEAVSTRWEVIAEDGTKEIESQGSIPGFLISSGMSSHKQGHTSSEYDMLREMFSDSRSNNDDDEDEDDEDEDEDEDEDEDEDKEEEEEDCSEEYLERQLQAEFIESGQYRANEGTSSIVMEIQKQIEKKEKKLHKIQNKAQRQKDLIMKVENLTLKNHFQSVLEQLELQEKQKNEKLISLQEQLQRFLKK

SEQ ID NO: 37235 - protein, 376 aa, Homo sapiens
MSESQDEVPDEVENQFILRLPLEHACTVRNLARSQSVKMKDKLKIDLLPDGRHAVVEVEDVPLAAKLVDLPCVIESLRTLDKKTFYKTADISQMLVCTADGDIHLSPEEPAASTDPNIVRKKERGREEKCVWKHGITPPLKNVRKKRFRKTQKKVPDVKEMEKSSFTEYIESPDVENEVKRLLRSDAEAVSTRWEVIAEDGTKEIESQGSIPGFLISSGMSSHKQGHTSSEYDMLREMFSDSRSNNDDDEDEDDEDEDEDEDEDEDEDKEEEEEDCSEEYLERQLQAEFIESGQYRANEGTSSIVMEIQKQIEKKEKKLHKIQNKAQRQKDLIMKVENLTLKNHFQSVLEQLELQEKQKNEKLISLQEQLQRFLKK

SEQ ID NO: 37236 - protein, 302 aa, Homo sapiens
MSESQDEVPDEVENQFILRLPLEHACTVRNLARSQSVKMKDKLKIDLLPDGRHAVVEVEDVPLAAKLVDLPCVIESLRTLDKKTFYKTADISQMLVCTADGDIHLSPEEPAASTDPNIVRKKERGREEKCVWKHGITPPLKNVRKKRFRKTQKKVPDVKEMEKSSFTEYIESPDVENEVKRLLRSDAEAVSTRWEVIAEDGTKEIESQGSIPGFLISSGMSSHKQGHTSSVMEIQKQIEKKEKKLHKIQNKAQRQKDLIMKVENLTLKNHFQSVLEQLELQEKQKNEKLISLQEQLQRFLKK

SEQ ID NO: 37237 - protein, 547 aa, Homo sapiens
MEVEEAFQAVGEMGIYQMYLCFLLAVLLQLYVATEAILIALVGATPSYHWDLAELLPNQSHGNQSAGEDQAFGDWLLTANGSEIHKHVHFSSSFTSIASEWFLIANRSYKVSAASSFFFSGVFVGVISFGQLSDRFGRKKVYLTGFALDILFAIANGFSPSYEFFAVTRFLVGMMNGGMSLVAFVLLNECVGTAYWALAGSIGGLFFAVGIAQYALLGYFIRSWRTLAILVNLQGTVVFLLSLFIPESPRWLYSQGRLSEAEEALYLIAKRNRKLKCTFSLTHPANRSCRETGSFLDLFRYRVLLGHTLILMFIWFVCSLVYYGLTLSAGDLGGSIYANLALSGLIEIPSYPLCIYLINQKWFGRKRTLSAFLCLGGLACLIVMFLPEKKDTGVFAVVNSHSLSLLGKLTISAAFNIVYIYTSELYPTVIRNVGLGTCSMFSRVGGIIAPFIPSLKYVQWSLPFIVFGATGLTSGLLSLLLPETLNSPLLETFSDLQVYSYRRLGEEALSLQALDPQQCVDKESSLGSESEEEEEFYDADEETQMIK

SEQ ID NO: 37238 - protein, 245 aa, Homo sapiens
MEVEEAFQAVGEMGIYQMYLCFLLAVLLQLYVATEAILIALVGATPSYHWDLAELLPNQSHGNQSAGEDQAFGDWLLTANGSEIHKHVHFSSSFTSIASEWFLIANRSYKVSAASSFFFSGVFVGVISFGQLSDRFGRKKVYLTGFALDILFAIANGFSPSYEFFAVTRFLVGMMNGGMSLVAFVLLNECVGTAYWALAGSIGGLFFAVGIAQYALLGYFIRSWRTLAILVNLQGTVVFLLSLVD

SEQ ID NO: 37239 - protein, 538 aa, Homo sapiens
MASDPIFTLAPPLHCHYGAFPPNASGWEQPPNASGVSVASAALAASAASRVATSTDPSCSGFAPPDFNHCLKDWDYNGLPVLTTNAIGQWDLVCDLGWQVILEQILFILGFASGYLFLGYPADRFGRRGIVLLTLGLVGPCGVGGAAAGSSTGVMALRFLLGFLLAGVDLGVYLMRLELCDPTQRLRVALAGELVGVGGHFLFLGLALVSKDWRFLQRMITAPCILFLFYGWPGLFLESARWLIVKRQIEEAQSVLRILAERNRPHGQMLGEEAQEALQDLENTCPLPATSSFSFASLLNYRNIWKNLLILGFTNFIAHAIRHCYQPVGGGGSPSDFYLCSLLASGTAALACVFLGVTVDRFGRRGILLLSMTLTGIASLVLLGLWDCEHPIFPTVWAQQGNPNRDLNEAAITTFSVLGLFSSQAAAILSTLLAAEVIPTTVRGRGLGLIMALGALGGLSGPAQRLHMGHGAFLQHVVLAACALLCILSIMLLPETKRKLLPEVLRDGELCRRPSLLRQPPPTRCDHVPLLATPNPAL

SEQ ID NO: 37240 - protein, 520 aa, Homo sapiens
MASDPIFTLAPPLHCHYGAFPPNASGWEQPPNASGVSVASAALAASAASRVATSTDPSCSGFAPPDFNHCLKDWDYNGLPVLTTNAIGQWDLVCDLGWQVILEQILFILGFASGYLFLGYPADRFGRRGIVLLTLGLVGPCGVGGAAAGSSTGVMALRFLLGFLLAGVDLGVYLMRLELCDPTQRLRVALAGELVGVGGHFLFLGLALVSKDWRFLQRMITAPCILFLFYGWPGLFLESARWLIVKRQIEEAQSVLRILAERNRPHGQMLGEEAQEALQDLENTCPLPATSSFSFASLLNYRNIWKNLLILGFTNFIAHAIRHCYQPVGGGGSPSDFYLCSLLASGTAALACVFLGVTVDRFGRRGILLLSMTLTGIASLVLLGLWDYLNEAAITTFSVLGLFSSQAAAILSTLLAAEVIPTTVRGRGLGLIMALGALGGLSGPAQRLHMGHGAFLQHVVLAACALLCILSIMLLPETKRKLLPEVLRDGELCRRPSLLRQPPPTRCDHVPLLATPNPAL

SEQ ID NO: 37241 - protein, 207 aa, Homo sapiens
MASDPIFTLAPPLHCHYGAFPPNASGWEQPPNASGVSVASAALAASAASRVATSTDPSCSGFAPPDFNHCLKDWDYNGLPVLTTNAIGQWDLVCDLGWQVILEQILFILGFASGYLFLGYPADRFGRRGIVLLTLGLVGPCGVGGAAAGSSTGVMALRFLLGFLLAGVDLGVYLMPNDHRSLHPLPVLWLAWFVPGVRTVADSEAAD

SEQ ID NO: 37242 - protein, 321 aa, Homo sapiens
MATGGQQKENTLLHLFAGGCGGTVGAIFTCPLEVIKTRLQSSRLALRTVYYPQVHLGTISGAGMVRPTSVTPGLFQVLKSILEKEGPKSLFRGLGPNLVGVAPSRAVYFACYSKAKEQFNGIFVPNSNIVHIFSAGSAAFITNSLMNPIWMVKTRMQLEQKVRGSKQMNTLQCARYVYQTEGIRGFYRGLTASYAGISETIICFAIYESLKKYLKEAPLASSANGTEKNSTSFFGLMAAAALSKGCASCIAYPHEVIRTRLREEGTKYKSFVQTARLVFREEGYLAFYRGLFAQLIRQIPNTAIVLSTYELIVYLLEDRTQ

SEQ ID NO: 37243 - protein, 1212 aa, Homo sapiens
MEPRPTAPSSGAPGLAGVGETPSAAALAAARVELPGTAVPSVPEDAAPASRDGGGVRDEGPAAAGDGLGRPLGPTPSQSRFQVDLVSENAGRAAAAAAAAAAAAAAAGAGAGAKQTPADGEASGESEPAKGSEEAKGRFRVNFVDPAASSSAEDSLSDAAGVGVDGPNVSFQNGGDTVLSEGSSLHSGGGGGSGHHQHYYYDTHTNTYYLRTFGHNTMDAVPRIDHYRHTAAQLGEKLLRPSLAELHDELEKEPFEDGFANGEESTPTRDAVVTYTAESKGVVKFGWIKGVLVRCMLNIWGVMLFIRLSWIVGQAGIGLSVLVIMMATVVTTITGLSTSAIATNGFVRGGGAYYLISRSLGPEFGGAIGLIFAFANAVAVAMYVVGFAETVVELLKEHSILMIDEINDIRIIGAITVVILLGISVAGMEWEAKAQIVLLVILLLAIGDFVIGTFIPLESKKPKGFFGYKSEIFNENFGPDFREEETFFSVFAIFFPAATGILAGANISGDLADPQSAIPKGTLLAILITTLVYVGIAVSVGSCVVRDATGNVNDTIVTELTNCTSAACKLNFDFSSCESSPCSYGLMNNFQVMSMVSGFTPLISAGIFSATLSSALASLVSAPKIFQALCKDNIYPAFQMFAKGYGKNNEPLRGYILTFLIALGFILIAELNVIAPIISNFFLASYALINFSVFHASLAKSPGWRPAFKYYNMWISLLGAILCCIVMFVINWWAALLTYVIVLGLYIYVTYKKPDVNWGSSTQALTYLNALQHSIRLSGVEDHVKNFRPQCLVMTGAPNSRPALLHLVHDFTKNVGLMICGHVHMGPRRQAMKEMSIDQAKYQRWLIKNKMKAFYAPVHADDLREGAQYLMQAAGLGRMKPNTLVLGFKKDWLQADMRDVDMYINLFHDAFDIQYGVVVIRLKEGLDISHLQGQEELLSSQEKSPGTKDVVVSVEYSKKSDLDTSKPLSEKPITHKVEEEDGKTATQPLLKKESKGPIVPLNVADQKLLEASTQFQKKQGKNTIDVWWLFDDGGLTLLIPYLLTTKKKWKDCKIRVFIGGKINRIDHDRRAMATLLSKFRIDFSDIMVLGDINTKPKKENIIAFEEIIEPYRLHEDDKEQDIADKMKEDEPWRITDNELELYKTKTYRQIRLNELLKEHSSTANIIVMSLPVARKGAVSSALYMAWLEALSKDLPPILLVRGNHQSVLTFYS

SEQ ID NO: 37244 - protein, 1196 aa, Homo sapiens
MEPRPTAPSSGAPGLAGVGETPSAAALAAARVELPGTAVPSVPEDAAPASRDGGGVRDEGPAAAGDGLGRPLGPTPSQSRFQVDLVSENAGRAAAAAAAAAAAAAAAGAGAGAKQTPADGEASGESEPAKGSEEAKGRFRVNFVDPAASSSAEDSLSDAAGVGVDGPNVSFQNGGDTVLSEGSSLHSGGGGGSGHHQHYYYDTHTNTYYLRTFGHNTMDAVPRIDHYRHTAAQLGEKLLRPSLAELHDELEKEPFEDGFANGEESTPTRDAVVTYTAESKGVVKFGWIKGVLVRCMLNIWGVMLFIRLSWIVGQAGIGLSVLVIMMATVVTTITGLSTSAIATNGFVRGGGAYYLISRSLGPEFGGAIGLIFAFANAVAVAMYVVGFAETVVELLKEHSILMIDEINDIRIIGAITVVILLGISVAGMEWEAKAQIVLLVILLLAIGDFVIGTFIPLESKKPKGFFGYKSEIFNENFGPDFREEETFFSVFAIFFPAATGILAGANISGDLADPQSAIPKGTLLAILITTLVYVGIAVSVGSCVVRDATGNVNDTIVTELTNCTSAACKLNFDFSSCESSPCSYGLMNNFQVMSMVSGFTPLISAGIFSATLSSALASLVSAPKIFQALCKDNIYPAFQMFAKGYGKNNEPLRGYILTFLIALGFILIAELNVIAPIISNFFLASYALINFSVFHASLAKSPGWRPAFKYYNMWISLLGAILCCIVMFVINWWAALLTYVIVLGLYIYVTYKKPDVNWGSSTQALTYLNALQHSIRLSGVEDHVKNFRPQCLVMTGAPNSRPALLHLVHDFTKNVGLMICGHVHMGPRRQAMKEMSIDQAKYQRWLIKNKMKAFYAPVHADDLREGAQYLMQAAGLGRMKPNTLVLGFKKDWLQADMRDVDMYINLFHDAFDIQYGVVVIRLKEGLDISHLQGQEELLSSQEKSPGTKDVVVSVEYSKKSDLDTSKPLSEKPITHKESKGPIVPLNVADQKLLEASTQFQKKQGKNTIDVWWLFDDGGLTLLIPYLLTTKKKWKDCKIRVFIGGKINRIDHDRRAMATLLSKFRIDFSDIMVLGDINTKPKKENIIAFEEIIEPYRLHEDDKEQDIADKMKEDEPWRITDNELELYKTKTYRQIRLNELLKEHSSTANIIVMSLPVARKGAVSSALYMAWLEALSKDLPPILLVRGNHQSVLTFYS

SEQ ID NO: 37245 - protein, 1021 aa, Homo sapiens
MAELPTTETPGDATLCSGRFTISTLLSSDEPSPPAAYDSSHPSHLTHSSTFCMRTFGYNTIDVVPTYEHYANSTQPGEPRKVRPTLADLHSFLKQEGRHLHALAFDSRPSHEMTDGLVEGEAGTSSEKNPEEPVRFGWVKGVMIRCMLNIWGVILYLRLPWITAQAGIVLTWIIILLSVTVTSITGLSISAISTNGKVKSGGTYFLISRSLGPELGGSIGLIFAFANAVGVAMHTVGFAETVRDLLQEYGAPIVDPINDIRIIAVVSVTVLLAISLAGMEWESKAQVLFFLVIMVSFANYLVGTLIPPSEDKASKGFFSYRADIFVQNLVPDWRGPDGTFFGMFSIFFPSATGILAGANISGDLKDPAIAIPKGTLMAIFWTTISYLAISATIGSCVVRDASGVLNDTVTPGWGACEGLACSYGWNFTECTQQHSCHYGLINYYQTMSMVSGFAPLITAGIFGATLSSALACLVSAAKVFQCLCEDQLYPLIGFFGKGYGKNKEPVRGYLLAYAIAVAFIIIAELNTIAPIISNFFLCSYALINFSCFHASITNSPGWRPSFQYYNKWAALFGAIISVVIMFLLTWWAALIAIGVVLFLLLYVIYKKPEVNWGSSVQAGSYNLALSYSVGLNEVEDHIKNYRPQCLVLTGPPNFRPALVDFVGTFTRNLSLMICGHVLIGPHKQRMPELQLIANGHTKWLNKRKIKAFYSDVIAEDLRRGVQILMQAAGLGRMKPNILVVGFKKNWQSAHPATVEDYIGILHDAFDFNYGVCVMRMREGLNVSKMMQAHINPVFDPAEDGKEASARVDPKALVKEEQATTIFQSEQGKKTIDIYWLFDDGGLTLLIPYLLGRKRRWSKCKIRVFVGGQINRMDQERKAIISLLSKFRLGFHEVHILPDINQNPRAEHTKRFEDMIAPFRLNDGFKDEATVNEMRRDCPWKISDEEITKNRVKSLRQVRLNEIVLDYSRDAALIVITLPIGRKGKCPSSLYMAWLETLSQDLRPPVILIRGNQENVLTFYCQ

SEQ ID NO: 37246 - protein, 1030 aa, Homo sapiens
MAELPTTETPGDATLCSGRFTISTLLSSDEPSPPAAYDSSHPSHLTHSSTFCMRTFGYNTIDVVPTYEHYANSTQPGEPRKVRPTLADLHSFLKQEGRHLHALAFDSRPSHEMTDGLVEGEAGTSSEKNPEEPVRFGWVKGVMIRCMLNIWGVILYLRLPWITAQAGIVLTWIIILLSVTVTSITGLSISAISTNGKVKSGGTYFLISRSLGPELGGSIGLIFAFANAVGVAMHTVGFAETVRDLLQEYGAPIVDPINDIRIIAVVSVTVLLAISLAGMEWESKAQVLFFLVIMVSFANYLVGTLIPPSEDKASKGFFSYRADIFVQNLVPDWRGPDGTFFGMFSIFFPSATGILAGANISGDLKDPAIAIPKGTLMAIFWTTISYLAISATIGSCVVRDASGVLNDTVTPGWGACEGLACSYGWNFTECTQQHSCHYGLINYYQTMSMVSGFAPLITAGIFGATLSSALACLVSAAKVFQCLCEDQLYPLIGFFGKGYGKNKEPVRGYLLAYAIAVAFIIIAELNTIAPIISNFFLCSYALINFSCFHASITNSPGWRPSFQYYNKWAALFGAIISVVIMFLLTWWAALIAIGVVLFLLLYVIYKKPEVNWGSSVQAGSYNLALSYSVGLNEVEDHIKNYRPQCLVLTGPPNFRPALVDFVGTFTRNLSLMICGHVLIGPHKQRMPELQLIANGHTKWLNKRKIKAFYSDVIAEDLRRGVQILMQAAGLGRMKPNILVVGFKKNWQSAHPATVEDYIGILHDAFDFNYGVCVMRMREGLNVSKMMQAHINPVFDPAEDGKEASARGARPSVSGALDPKALVKEEQATTIFQSEQGKKTIDIYWLFDDGGLTLLIPYLLGRKRRWSKCKIRVFVGGQINRMDQERKAIISLLSKFRLGFHEVHILPDINQNPRAEHTKRFEDMIAPFRLNDGFKDEATVNEMRRDCPWKISDEEITKNRVKSLRQVRLNEIVLDYSRDAALIVITLPIGRKGKCPSSLYMAWLETLSQDLRPPVILIRGNQENVLTFYCQ

SEQ ID NO: 37247 - protein, 1029 aa, Homo sapiens
MAELPTTETPGDATLCSGRFTISTLLSSDEPSPPAAYDSSHPSHLTHSSTFCMRTFGYNTIDVVPTYEHYANSTQPGEPRKVRPTLADLHSFLKEGRHLHALAFDSRPSHEMTDGLVEGEAGTSSEKNPEEPVRFGWVKGVMIRCMLNIWGVILYLRLPWITAQAGIVLTWIIILLSVTVTSITGLSISAISTNGKVKSGGTYFLISRSLGPELGGSIGLIFAFANAVGVAMHTVGFAETVRDLLQEYGAPIVDPINDIRIIAVVSVTVLLAISLAGMEWESKAQVLFFLVIMVSFANYLVGTLIPPSEDKASKGFFSYRADIFVQNLVPDWRGPDGTFFGMFSIFFPSATGILAGANISGDLKDPAIAIPKGTLMAIFWTTISYLAISATIGSCVVRDASGVLNDTVTPGWGACEGLACSYGWNFTECTQQHSCHYGLINYYQTMSMVSGFAPLITAGIFGATLSSALACLVSAAKVFQCLCEDQLYPLIGFFGKGYGKNKEPVRGYLLAYAIAVAFIIIAELNTIAPIISNFFLCSYALINFSCFHASITNSPGWRPSFQYYNKWAALFGAIISVVIMFLLTWWAALIAIGVVLFLLLYVIYKKPEVNWGSSVQAGSYNLALSYSVGLNEVEDHIKNYRPQCLVLTGPPNFRPALVDFVGTFTRNLSLMICGHVLIGPHKQRMPELQLIANGHTKWLNKRKIKAFYSDVIAEDLRRGVQILMQAAGLGRMKPNILVVGFKKNWQSAHPATVEDYIGILHDAFDFNYGVCVMRMREGLNVSKMMQAHINPVFDPAEDGKEASARGARPSVSGALDPKALVKEEQATTIFQSEQGKKTIDIYWLFDDGGLTLLIPYLLGRKRRWSKCKIRVFVGGQINRMDQERKAIISLLSKFRLGFHEVHILPDINQNPRAEHTKRFEDMIAPFRLNDGFKDEATVNEMRRDCPWKISDEEITKNRVKSLRQVRLNEIVLDYSRDAALIVITLPIGRKGKCPSSLYMAWLETLSQDLRPPVILIRGNQENVLTFYCQ

SEQ ID NO: 37248 - protein, 304 aa, Homo sapiens
METVPPAVDLVLGASACCLACVFTNPLEVVKTRLQLQGELQARGTYPRPYHGFIASVAAVARADGLWGLQKGLAAGLLYQGLMNGVRFYCYSLACQAGLTQQPGGTVVAGAVAGALGAFVGSPAYLIKTQLQAQTVAAVAVGHQHNHQTVLGALETIWRQQGLLGLWQGVGGAVPRVMVGSAAQLATFASAKAWVQKQQWLPEDSWLVALAGGMISSIAVVVVMTPFDVVSTRLYNQPVDTAGRGQLYGGLTDCMVKIWRQEGPLALYKGLGPAYLRLGPHTILSMLFWDELRKLAGRAQHKGT

SEQ ID NO: 37249 - protein, 108 aa, Homo sapiens
MGCCGCGGCGGGCGGCSGGCGGGCGGGCGGGGCGGGCGSCTTCRCYRVGCCSSCCPCCRGCCGGCCSTPVICCCRRTCSSCGCGYGKGCCQQKGCCQQKCCCQKQCCC

SEQ ID NO: 37250 - protein, 105 aa, Homo sapiens
MGCCGCGGCGGGCGGCGGGCSGGCGGGCGGGCGSCTTCRCYRVGCCSSCCPCCRGCCGGCCSTPVICCCRRTCHSCGCGCGCGKGCCQQKGCCQQKGCCKKQCCC

SEQ ID NO: 37251 - protein, 487 aa, Homo sapiens
MERSGQRVTTWDCDQGKHSDSDYREDGMDLGSDAGSSSSSSRASSQSNSTKVTPCSECKSSSSPGGSLDLVSALEDYEEPFPVYQKKVIDEWAPEEDGEEEEEEDERDQRGYRDDRSPAREPGDVSARTRSGGGGGRSATTAMPPPVPNGNLHQHDPQDLRHNGNVVVAGRPSCSRGPRRAIQKPQPAGGRRSGRGPAAGGLCLQPPDGGTCVPEEPPVPPMDWEALEKHLAGLQFREQEVRNQGQARTNSTSAQKNERESIRQKLALGSFFDDGPGIYTSCSKSGKPSLSSRLQSGMNLQICFVNDSGSDKDSDADDSKTETSLDTPLSPMSKQSSSYSDRDTTEEESESLDDMDFLTRQKKLQAEAKMALAMAKPMAKMQVEVEKQNRKKSPVADLLPHMPHISECLMKRSLKPTDLRDMTIGQLQVIVNDLHSQIESLNEELVQLLLIRDELHTEQDAMLVDIEDLTRHAESQQKHMAEKMPAK

SEQ ID NO: 37252 - protein, 474 aa, Homo sapiens
MERSGQRVTTWDCDQGKHSDSDYREDGMDLGSDAGSSSSSSRASSQSNSTKVTPCSECKSSSSPGGSLDLVSALEDYEEPFPVYQKKVIDEWAPEEDGEEEEEEDERDQRGYRDDRSPAREPGDVSARTRSGGGGGRSATTAMPPPVPNGNLHQHDPQDLRHNGNVVVAGRPSCSRGPRRAIQKPQPAGGRRSGRGPAAGGLCLQPPDGGTCVPEEPPVPPMDWEALEKHLAGLQFREQEAQKNERESIRQKLALGSFFDDGPGIYTSCSKSGKPSLSSRLQSGMNLQICFVNDSGSDKDSDADDSKTETSLDTPLSPMSKQSSSYSDRDTTEEESESLDDMDFLTRQKKLQAEAKMALAMAKPMAKMQVEVEKQNRKKSPVADLLPHMPHISECLMKRSLKPTDLRDMTIGQLQVIVNDLHSQIESLNEELVQLLLIRDELHTEQDAMLVDIEDLTRHAESQQKHMAEKMPAK

SEQ ID NO: 37253 - protein, 255 aa, Homo sapiens
MERSGQRVTTWDCDQGKHSDSAQKNERESIRQKLALGSFFDDGPGIYTSCSKSGKPSLSSRLQSGMNLQICFVNDSGSDKDSDADDSKTETSLDTPLSPMSKQSSSYSDRDTTEEESESLDDMDFLTRQKKLQAEAKMALAMAKPMAKMQVEVEKQNRKKSPVADLLPHMPHISECLMKRSLKPTDLRDMTIGQLQVIVNDLHSQIESLNEELVQLLLIRDELHTEQDAMLVDIEDLTRHAESQQKHMAEKMPAK

SEQ ID NO: 37254 - protein, 244 aa, Homo sapiens
MVHQDNCSYQAQKNERESIRQKLALGSFFDDGPGIYTSCSKSGKPSLSSRLQSGMNLQICFVNDSGSDKDSDADDSKTETSLDTPLSPMSKQSSSYSDRDTTEEESESLDDMDFLTRQKKLQAEAKMALAMAKPMAKMQVEVEKQNRKKSPVADLLPHMPHISECLMKRSLKPTDLRDMTIGQLQVIVNDLHSQIESLNEELVQLLLIRDELHTEQDAMLVDIEDLTRHAESQQKHMAEKMPAK

SEQ ID NO: 37255 - protein, 92 aa, Homo sapiens
MGCCGCGSCGCSGGCGGGCGGGCGGGCGSCTTCRCYRVGCCSSCCPCCRGCCGGCCSTPVICCCRRTCSSCGCGCGKGCCQQKSCCQKQCCC

SEQ ID NO: 37256 - protein, 210 aa, Homo sapiens
MATETVELHKLKLAELKQECLARGLETKGIKQDLIHRLQAYLEEHAEEEANEEDVLGDETEEEETKPIELPVKEEEPPEKTVDVAAEKKVVKITSEIPQTERMQKRAERFNVPVSLESKKAARAARFGISSVPTKGLSSDNKPMVNLDKLKERAQRFGLNVSSISRKSEDDEKLKKRKERFGIVTSSAGTGTTEDTEAKKRKRAERFGIA

SEQ ID NO: 37257 - protein, 338 aa, Homo sapiens
MSDFDSNPFADPDLNNPFKDPSVTQVTRNVPPGLDEYNPFSDSRTPPPGGVKMPNVPNTQPAIMKPTEEHPAYTQIAKEHALAQAELLKRQEELERKAAELDRREREMQNLSQHGRKNNWPPLPSNFPVGPCFYQDFSVDIPVEFQKTVKLMYYLWMFHAVTLFLNIFGCLAWFCVDSARAVDFGLSILWFLLFTPCSFVCWYRPLYGAFRSDSSFRFFVFFFVYICQFAVHVLQAAGFHNWGNCGWISSLTGLNQNIPVGIMMIIIAALFTASAVISLVMFKKVHGLYRTTGASFEKAQQEFATGVMSNKTVQTAAANAASTAASSAAQNAFKGNQI

SEQ ID NO: 37258 - protein, 157 aa, Homo sapiens
MSDFDSNPFADPDLNNPFKDPSVTQVTRNVPPGLDEYNPFSDSRTPPPGGVKMPNVPNTQPAIMKPTEEHPAYTQIAKEHALAQAELLKRQEELERKAAELDRREREMQNLSQHGRKNNWPPLPSNFPVGPCFYQDFSVDIPVEFQKTVKLMYYLWM

SEQ ID NO: 37259 - protein, 329 aa, Homo sapiens
MSAFDTNPFADPVDVNPFQDPSVTQLTNAPQGGLAEFNPFSETNAATTVPVTQLPGSSQPAVLQPSVEPTQPTPQAVVSAAQAGLLRQQEELDRKAAELERKERELQNTVANLHVRQNNWPPLPSWCPVKPCFYQDFSTEIPADYQRICKMLYYLWMLHSVTLFLNLLACLAWFSGNSSKGVDFGLSILWFLIFTPCAFLCWYRPIYKAFRSDNSFSFFVFFFVFFCQIGIYIIQLVGIPGLGDSGWIAALSTLDNHSLAISVIMMVVAGFFTLCAVLSVFLLQRVHSLYRRTGASFQQAQEEFSQGIFSSRTFHRAASSAAQGAFQGN

SEQ ID NO: 37260 - protein, 201 aa, Homo sapiens
MSFATLRPAPPGRYLYPEVSPLSEDEDRGSDSSGSDEKPCRVHAARCGLQGARRRAGGRRAGGGGPGGRPGREPRQRHTANARERDRTNSVNTAFTALRTLIPTEPADRKLSKIETLRLASSYISHLGNVLLAGEACGDGQPCHSGPAFFHAARAGSPPPPPPPPPARDGENTQPKQICTFCLSNQRKLSKDRDRKTAIRS

SEQ ID NO: 37261 - protein, 324 aa, Homo sapiens
MALLALASAVPSALLALAVFRVPAWACLLCFTTYSERLRICQMFVGMRSPKLEECEEAFTAAFQGLSDTEINYDERSHLHDTFTQMTHALQELAAAQGSFEVAFPDAAEKMKKVITQLKEAQACIPPCGLQEFARRFLCSGCYSRVCDLPLDCPVQDVTVTRGDQAMFSCIVNFQLPKEEITYSWKFAGGGLRTQDLSYFRDMPRAEGYLARIRPAQLTHRGTFSCVIKQDQRPLARLYFFLNVTGPPPRAETELQASFREVLRWAPRDAELIEPWRPSLGELLARPEALTPSNLFLLAVLGALASASATVLAWMFFRWYCSGN

SEQ ID NO: 37262 - protein, 243 aa, Homo sapiens
MALLALASAVPSALLALAVFRVPAWACLLCFTTYSERLRICQMFVGMRSPKLEECEEAFTAAFQGLSDTEISEETIHTSSVSWGRCRGRAGEAQRVRLRDRQRETVRGERLKDHENNRDLGTERHRQGKTAGQRLREGRMESQRGEDGDSERGEDGDSEREEDGDSEGKMETQEYGESERGGWTLRGGWRVRRMETHRKGRMESQERLETGEGIETQKGEDGDSEGGRWRLKEDGNPERGGQR

SEQ ID NO: 37263 - protein, 211 aa, Homo sapiens
MALLALASAVPSALLALAVFRVPAWACLLCFTTYSERLRICQMFVGMRSPKLEECEEAFTAAFQGLSDTEISEETIHTSSVSWGRCRGRAGEAQRVRLRDRQRETVRGERLKDHENNRDLGTERHRQGKTAGQRLREGRMESQRGEDGDSERGRMETQRERKMETRKDGDSGVWRVREGRMDTREDGESGGWRLIERGGWRVRRGWRLERE

SEQ ID NO: 37264 - protein, 468 aa, Homo sapiens
MRGSPGDAERRQRWGRLFEELDSNKDGRVDVHELRQGLARLGGGNPDPGAQQGISSEGDADPDGGLDLEEFSRYLQEREQRLLLMFHSLDRNQDGHIDVSEIQQSFRALGISISLEQAEKILHSMDRDGTMTIDWQEWRDHFLLHSLENVEDVLYFWKHSTVLDIGECLTVPDEFSKQEKLTGMWWKQLVAGAVAGAVSRTGTAPLDRLKVFMQVHASKTNRLNILGGLRSMVLEGGIRSLWRGNGINVLKIAPESAIKFMAYEQIKRAILGQQETLHVQERFVAGSLAGATAQTIIYPMEVLKTRLTLRRTGQYKGLLDCARRILEREGPRAFYRGYLPNVLGIIPYAGIDLAVYETLKNWWLQQYSHDSADPGILVLLACGTISSTCGQIASYPLALVRTRMQAQASIEGGPQLSMLGLLRHILSQEGMRGLYRGIAPNFMKVIPAVSISYVVYENMKQALGVTSR

SEQ ID NO: 37265 - protein, 438 aa, Homo sapiens
MRGSPGDAERRQRWGRLFEELDSNKDGRVDVHELRQGLARLGGGNPDPGAQQGISSEGDADPDGGLDLEEFSRYLQEREQRLLLMFHSLDRNQDGHIDVSEIQQSFRALGISISLEQAEKILHSMDRDGTMTIDWQEWRDHFLLHSLENVEDVLYFWKHSTVLDIGECLTVPDEFSKQEKLTGMWWKQLVAGAVAGAVSRTGTAPLDRLKVFMQVHASKTNRLNILGGLRSMVLEGGIRSLWRGNGINVLKIAPESAIKFMAYEQIKRAILGQQETLHVQERFVAGSLAGATAQTIIYPMEVLKTRLTLRRTGQYKGLLDCARRILEREGPRAFYRGYLPNVLGIIPYAGIDLAVYETLKNWWLQQYSHDSADPGILVLLACGTISSTCGQIASYPLALVRTRMQAQDVSVYKTDTVPTLIELTGRRGRKMLNKSFWN

SEQ ID NO: 37266 - protein, 482 aa, Homo sapiens
MRGSPGDAERRQRWGRLFEELDSNKDGRVDVHELRQGLARLGGGNPDPGAQQGISSEGDADPDGGLDLEEFSRYLQEREQRLLLMFHSLDRNQDGHIDVSEIQQSFRALGISISLEQAEKILHSMDRDGTMTIDWQEWRDHFLLHSLENVEDVLYFWKHSTLSSAGFSAWIKDSTAEQNRSKTTVLARRSGSHLKSQHFGRPKWADHEVLDIGECLTVPDEFSKQEKLTGMWWKQLVAGAVAGAVSRTGTAPLDRLKVFMQVHASKTNRLNILGGLRSMVLEGGIRSLWRGNGINVLKIAPESAIKFMAYEQIKRAILGQQETLHVQERFVAGSLAGATAQTIIYPMEVLKTRLTLRRTGQYKGLLDCARRILEREGPRAFYRGYLPNVLGIIPYAGIDLAVYETLKNWWLQQYSHDSADPGILVLLACGTISSTCGQIASYPLALVRTRMQAQGWSTVARFQITATSAFQVQAILLPQPPE

SEQ ID NO: 37267 - protein, 435 aa, Homo sapiens
MRGSPGDAERRQRWGRLFEELDSNKDGRVDVHELRQGLARLGGGNPDPGAQQGISSEGDADPDGGLDLEEFSRYLQEREQRLLLMFHSLDRNQDGHIDVSEIQQSFRALGISISLEQAEKILHSMDRDGTMTIDWQEWRDHFLLHSLENVEDVLYFWKHSTVLDIGECLTVPDEFSKQEKLTGMWWKQLVAGAVAGAVSRTGTAPLDRLKVFMQVHASKTNRLNILGGLRSMVLEGGIRSLWRGNGINVLKIAPESAIKFMAYEQIKRAILGQQETLHVQERFVAGSLAGATAQTIIYPMEVLKTRLTLRRTGQYKGLLDCARRILEREGPRAFYRGYLPNVLGIIPYAGIDLAVYETLKNWWLQQYSHDSADPGILVLLACGTISSTCGQIASYPLALVRTRMQAQGWSTVARFQITATSAFQVQAILLPQPPE

SEQ ID NO: 37268 - protein, 346 aa, Homo sapiens
  MOD_RES (273)..(273): Selenocysteine
MNNQARTPAPSSARTSTSVRASTPTRTPTPLRTPTPVRTRTPIRTLTPVLTPSPAGTSPLVLTPAPAQIPTLVPTPALARIPRLVPPPAPAWIPTPVPTPVPVRNPTPVPTPARTLTPPVRVPAPAPAQLLAGIRAALPVLDSYLAPALPLDPPPEPAPELPLLPEEDPEPAPSLKLIPSVSSEAGPAPGPLPTRTPLAANSPGPTLDFTFRADPSAIGLADPPIPSPVPSPILGTIPSAISLQNCTETFPSSSENFALDKRVLIRVTYCGLXSYSLRYILLKKSLEQQFPNHLLFEEDRAAQATGEFEVFVNGRLVHSKKRGDGFVNESRLQKIVSVIDEEIKKR

SEQ ID NO: 37269 - protein, 124 aa, Homo sapiens
MVLCWLLLLVMALPPGTTGVKDCVFCELTDSMQCPGTYMHCGDDEDCFTGHGVAPGTGPVINKGCLRATSCGLEEPVSYRGVTYSLTTNCCTGRLCNRAPSSQTVGATTSLALGLGMLLPPRLL

SEQ ID NO: 37270 - protein, 751 aa, Homo sapiens
MAFRTICVLVGVFICSICVKGSSQPQARVYLTFDELRETKTSEYFSLSHHPLDYRILLMDEDQDRIYVGSKDHILSLNINNISQEALSVFWPASTIKVEECKMAGKDPTHGCGNFVRVIQTFNRTHLYVCGSGAFSPVCTYLNRGRRSEDQVFMIDSKCESGKGRCSFNPNVNTVSVMINEELFSGMYIDFMGTDAAIFRSLTKRNAVRTDQHNSKWLSEPMFVDAHVIPDGTDPNDAKVYFFFKEKLTDNNRSTKQIHSMIARICPNDTGGLRSLVNKWTTFLKARLVCSVTDEDGPETHFDELEDVFLLETDNPRTTLVYGIFTTSSSVFKGSAVCVYHLSDIQTVFNGPFAHKEGPNHQLISYQGRIPYPRPGTCPGGAFTPNMRTTKEFPDDVVTFIRNHPLMYNSIYPIHKRPLIVRIGTDYKYTKIAVDRVNAADGRYHVLFLGTDRGTVQKVVVLPTNNSVSGELILEELEVFKNHAPITTMKISSKKQQLYVSSNEGVSQVSLHRCHIYGTACADCCLARDPYCAWDGHSCSRFYPTGKRRSRRQDVRHGNPLTQCRGFNLKAYRNAAEIVQYGVKNNTTFLECAPKSPQASIKWLLQKDKDRRKEVKLNERIIATSQGLLIRSVQGSDQGLYHCIATENSFKQTIAKINFKVLDSEMVAVVTDKWSPWTWASSVRALPFHPKDIMGAFSHSEMQMINQYCKDTRQQHQQGDESQKMRGDYGKLKALINSRKSRNRRNQLPES

SEQ ID NO: 37271 - protein, 233 aa, Homo sapiens
MDQVFMIDSKCESGKGRCSFNPNVNTVSVMINEELFSGMYIDFMGTDAAIFRSLTKRNAVRTDQHNSKWLSEPMFVDAHVIPDGTDPNDAKVYFFFKEKLTDNNRSTKQIHSMIARICPNDTGGLRSLVNKWTTFLKARLVCSVTDEDGPETHFDELEDVFLLETDNPRTTLVYGIFTTSSSVFKGSAVCVYHLSDIQTVFNGPFAHKEGPNHQLISYQGRIPYPRPGTNTCV

SEQ ID NO: 37272 - protein, 713 aa, Homo sapiens
MAKSPENSTLEEILGQYQRSLREHASRSIHQLTCALKEGDVTIGEDAPNLSFSTSVGNEDARTAWPELQQSHAVNQLKDLLRQQADKESEVSPSRRRKMSPLRSLEHEETNMPTMHDLVHTINDQSQYIHHLEAEVKFCKEELSGMKNKIQVVVLENEGLQQQLKSQRQEETLREQTLLDASGNMHNSWITTGEDSGVGETSKRPFSHDNADFGKAASAGEQLELEKLKLTYEEKCEIEESQLKFLRNDLAEYQRTCEDLKEQLKHKEFLLAANTCNRVGGLCLKCAQHEAVLSQTHTNVHMQTIERLVKERDDLMSALVSVRSSLADTQQREASAYEQVKQVLQISEEANFEKTKALIQCDQLRKELERQAERLEKELASQQEKRAIEKDMMKKEITKEREYMGSKMLILSQNIAQLEAQVEKVTKEKISAINQLEEIQSQLASREMDVTKVCGEMRYQLNKTNMEKDEAEKEHREFRAKTNRDLEIKDQEIEKLRIELDESKQHLEQEQQKAALAREECLRLTELLGESEHQLHLTRQEKDSIQQSFSKEAKAQALQAQQREQELTQKIQQMEAQHDKTENEQYLLLTSQNTFLTKLKEECCTLAKKLEQISQKTRSEIAQLSQEKRYTYDKLGKLQRRNEELEEQCVQHGRVHETMKQRLRQLDKHSQATAQQLVQLLSKQNQLLLERQSLSEEVDRLRTQLPSMPQSDC

SEQ ID NO: 37273 - protein, 360 aa, Homo sapiens
MAKSPENSTLEEILGQYQRSLREHASRSIHQLTCALKEGDVTIGEDAPNLSFSTSVGNEDARTAWPELQQSHAVNQLKDLLRQQADKESEVSPSRRRKMSPLRSLEHEETNMPTMHDLVHTINDQSQYIHHLEAEVKFCKEELSGMKNKIQVVVLENEGLQQQLKSQRQEETLREQTLLDASGNMHNSWITTGEDSGVGETSKRPFSHDNADFGKAASAGEQLELEKLKLTYEEKCEIEESQLKFLRNDLAEYQRTCEDLKEQLKHKEFLLAANTCNRVGGLCLKCAQHEAVLSQTHTNVHMQTIERLVKERDDLMSALVSVRSSLADTQQREASAYEQVKQVLQISEEANFEKTKHPSQ

SEQ ID NO: 37274 - protein, 634 aa, Homo sapiens
MAKSPENSTLEEILGQYQRSLREHASRSIHQLTCALKEGDVTIGEDAPNLSFSTSVGNEDARTAWPELQQSHAVNQLKDLLRQQADKESEVSPSRRRKMSPLRSLEHEETNMPTMHDLVHTINDQSQYIHHLEAEVKFCKEELSGMKNKIQVVVLENEGLQQQLKSQRQEETLREQTLLDASGNMHNSWITTGEDSGVGETSKRPFSHDNADFGKAASAGLLDASEKLKLTYEEKCEIEESQLKFLRNDLAEYQRTCEDLKEQLKHKEFLLAANTCNRVGGLCLKCAQHEAVLSQTHTNVHMQTIERLVKERDDLMSALVSVRSSLADTQQREASAYEQVKQVLQISEEANFEKTKALIQCDQLRKELERQAERLEKELASQQEKRAIEKDMMKKEITKEREYMGSKMLILSQNIAQLEAQVEKVTKEKISAINQLEEIQSQLASREMDVTKVCGEMRYQLNKTNMEKDEAEKEHREFRAKTNRDLEIKDQEIEKLRIELDESKQHLEQEQQKAALAREECLRLTELLGESEHQLHLTRSEIAQLSQEKRYTYDKLGKLQRRNEELEEQCVQHGRVHETMKQRLRQLDKHSQATAQQLVQLLSKQNQLLLERQSLSEEVDRLRTQLPSMPQSDC

SEQ ID NO: 37275 - protein, 669 aa, Homo sapiens
MAKSPENSTLEEILGQYQRSLREHASRSIHQLTCALKEGDVTIGEDAPNLSFSTSVGNEDARTAWPELQQSHAVNQLKDLLRQQADKESEVSPSRRRKMSPLRSLEHEETNMPTMHDLVHTINDQSQYIHHLEAEVKFCKEELSGMKNKIQVVVLENEGLQQQLKSQRQEETLREQTLLDASKLKLTYEEKCEIEESQLKFLRNDLAEYQRTCEDLKEQLKHKEFLLAANTCNRVGGLCLKCAQHEAVLSQTHTNVHMQTIERLVKERDDLMSALVSVRSSLADTQQREASAYEQVKQVLQISEEANFEKTKALIQCDQLRKELERQAERLEKELASQQEKRAIEKDMMKKEITKEREYMGSKMLILSQNIAQLEAQVEKVTKEKISAINQLEEIQSQLASREMDVTKVCGEMRYQLNKTNMEKDEAEKEHREFRAKTNRDLEIKDQEIEKLRIELDESKQHLEQEQQKAALAREECLRLTELLGESEHQLHLTRQEKDSIQQSFSKEAKAQALQAQQREQELTQKIQQMEAQHDKTENEQYLLLTSQNTFLTKLKEECCTLAKKLEQISQKTRSEIAQLSQEKRYTYDKLGKLQRRNEELEEQCVQHGRVHETMKQRLRQLDKHSQATAQQLVQLLSKQNQLLLERQSLSEEVDRLRTQLPSMPQSDC

SEQ ID NO: 37276 - protein, 837 aa, Homo sapiens
MLRTAMGLRSWLAAPWGALPPRPPLLLLLLLLLLLQPPPPTWALSPRISLPLGSEERPFLRFEAEHISNYTALLLSRDGRTLYVGAREALFALSSNLSFLPGGEYQELLWGADAEKKQQCSFKGKDPQRDCQNYIKILLPLSGSHLFTCGTAAFSPMCTYINMENFTLARDEKGNVLLEDGKGRCPFDPNFKSTALVVDGELYTGTVSSFQGNDPAISRSQSLRPTKTESSLNWLQDPAFVASAYIPESLGSLQGDDDKIYFFFSETGQEFEFFENTIVSRIARICKGDEGGERVLQQRWTSFLKAQLLCSRPDDGFPFNVLQDVFTLSPSPQDWRDTLFYGVFTSQWHRGTTEGSAVCVFTMKDVQRVFSGLYKEVNRETQQWYTVTHPVPTPRPGACITNSARERKINSSLQLPDRVLNFLKDHFLMDGQVRSRMLLLQPQARYQRVAVHRVPGLHHTYDVLFLGTGDGRLHKAVSVGPRVHIIEELQIFSSGQPVQNLLLDTHRGLLYAASHSGVVQVPMANCSLYRSCGDCLLARDPYCAWSGSSCKHVSLYQPQLATRPWIQDIEGASAKDLCSASSVVSPSFVPTGEKPCEQVQFQPNTVNTLACPLLSNLATRLWLRNGAPVNASASCHVLPTGDLLLVGTQQLGEFQCWSLEEGFQQLVASYCPEVVEDGVADQTDEGGSVPVIISTSRVSAPAGGKASWGADRSYWKEFLVMCTLFVLAVLLPVLFLLYRHRNSMKVFLKQGECASVHPKTCPVVLPPETRPLNGLGPPSTPLDHRGYQSLSDSPPGSRVFTESEKRPLSIQDSFVEVSPVCPRPRVRLGSEIRDSVV

SEQ ID NO: 37277 - protein, 742 aa, Homo sapiens
MLRTAMGLRSWLAAPWGALPPRPPLLLLLLLLLLLQPPPPTWALSPRISLPLGSEERPFLRFEAEHISNYTALLLSRDGRTLYVGAREALFALSSNLSFLPGGEYQELLWGADAEKKQQCSFKGKDPQRDCQNYIKILLPLSGSHLFTCGTAAFSPMCTYINMENFTLARDEKGNVLLEDGKGRCPFDPNFKSTALVVDGELYTGTVSSFQGNDPAISRSQSLRPTKTESSLNWLQDPAFVASAYIPESLGSLQGDDDKIYFFFSETGQEFEFFENTIVSRIARICKGDEGGERVLQQRWTSFLKAQLLCSRPDDGFPFNVLQDVFTLSPSPQDWRDTLFYGVFTSQWHRGTTEGSAVCVFTMKDVQRVFSGLYKEVNRETQQWYTVTHPVPTPRPGACITNSARERKINSSLQLPDRVLNFLKDHFLMDGQVRSRMLLLQPQARYQRVAVHRVPGLHHTYDVLFLGTGDGRLHKAVSVGPRVHIIEELQIFSSGQPVQNLLLDTHRGLLYAASHSGVVQVPMANCSLYRSCGDCLLARDPYCAWSGSSCKHVSLYQPQLATRPWIQDIEGASAKDLCSASSVVSPSFVPTGEKPCEQVQFQPNTVNTLACPLLSNLATRLWLRNGAPVNASASCHVLPTGDLLLVGTQQLGEFQCWSLEEGFQQLVASYCPEVVEDGVADQTDEGGSVPVIISTSRVSAPAGGKASWGADRSWARTQLLDLSSLYQAVATREDSASSGEIS

SEQ ID NO: 37278 - protein, 215 aa, Homo sapiens
MPAFNRLFPLASLVLIYWVSVCFPVCVEVPSETEAVQGNPMKLRCISCMKREEVEATTVVEWFYRPEGGKDFLIYEYRNGHQEVESPFQGRLQWNGSKDLQDVSITVLNVTLNDSGLYTCNVSREFEFEAHRPFVKTTRLIPLRVTEEAGEDFTSVVSEIMMYILLVFLTLWLLIEMIYCYRKVSKAEEAAQENASDYLAIPSENKENSAVPVEE

SEQ ID NO: 37279 - protein, 833 aa, Homo sapiens
MAPHWAVWLLAARLWGLGIGAEVWWNLVPRKTVSSGELATVVRRFSQTGIQDFLTLTLTEPTGLLYVGAREALFAFSMEALELQGAISWEAPVEKKTECIQKGKNNQTECFNFIRFLQPYNASHLYVCGTYAFQPKCTYVNMLTFTLEHGEFEDGKGKCPYDPAKGHAGLLVDGELYSATLNNFLGTEPIILRNMGPHHSMKTEYLAFWLNEPHFVGSAYVPESVGSFTGDDDKVYFFFRERAVESDCYAEQVVARVARVCKGDMGGARTLQRKWTTFLKARLACSAPNWQLYFNQLQAMHTLQDTSWHNTTFFGVFQAQWGDMYLSAICEYQLEEIQRVFEGPYKEYHEEAQKWDRYTDPVPSPRPGSCINNWHRRHGYTSSLELPDNILNFVKKHPLMEEQVGPRWSRPLLVKKGTNFTHLVADRVTGLDGATYTVLFIGTGDGWLLKAVSLGPWVHLIEELQLFDQEPMRSLVLSQSKKLLFAGSRSQLVQLPVADCMKYRSCADCVLARDPYCAWSVNTSRCVAVGGHSGSLLIQHVMTSDTSGICNLRGSKKVRPTPKNITVVAGTDLVLPCHLSSNLAHARWTFGGRDLPAEQPGSFLYDARLQALVVMAAQPRHAGAYHCFSEEQGARLAAEGYLVAVVAGPSVTLEARAPLENLGLVWLAVVALGAVCLVLLLLVLSLRRRLREELEKGAKATERTLVYPLELPKEPTSPPFRPCPEPDEKLWDPVGYYYSDGSLKIVPGHARCQPGGGPPSPPPGIPGQPLPSPTRLHLGGGRNSNANGYVRLQLGGEDRGGLGHPLPELADELRRKLQQRQPLPDSNPEESSV

SEQ ID NO: 37280 - protein, 1053 aa, Homo sapiens
MSRRKQAKPQHINSEEDQGEQQPQQQTPEFADAAPAAPAAGELGAPVNHPGNDEVASEDEATVKRLRREETHVCEKCCAEFFSISEFLEHKKNCTKNPPVLIMNDSEGPVPSEDFSGAVLSHQPTSPGSKDCHRENGGSSEDMKEKPDAESVVYLKTETALPPTPQDISYLAKGKVANTNVTLQALRGTKVAVNQRSADALPAPVPGANSIPWVLEQILCLQQQQLQQIQLTEQIRIQVNMWASHALHSSGAGADTLKTLGSHMSQQVSAAVALLSQKAGSQGLSLDALKQAKLPHANIPSATSSLSPGLAPFTLKPDGTRVLPNVMSRLPSALLPQAPGSVLFQSPFSTVALDTSKKGKGKPPNISAVDVKPKDEAALYKHKCKYCSKVFGTDSSLQIHLRSHTGERPFVCSVCGHRFTTKGNLKVHFHRHPQVKANPQLFAEFQDKVAAGNGIPYALSVPDPIDEPSLSLDSKPVLVTTSVGLPQNLSSGTNPKDLTGGSLPGDLQPGPSPESEGGPTLPGVGPNYNSPRAGGFQGSGTPEPGSETLKLQQLVENIDKATTDPNECLICHRVLSCQSSLKMHYRTHTGERPFQCKICGRAFSTKGNLKTHLGVHRTNTSIKTQHSCPICQKKFTNAVMLQQHIRMHMGGQIPNTPLPENPCDFTGSEPMTVGENGSTGAICHDDVIESIDVEEVSSQEAPSSSSKVPTPLPSIHSASPTLGFAMMASLDAPGKVGPAPFNLQRQGSRENGSVESDGLTNDSSSLMGDQEYQSRSPDILETTSFQALSPANSQAESIKSKSPDAGSKAESSENSRTEMEGRSSLPSTFIRAPPTYVKVEVPGTFVGPSTLSPGMTPLLAAQPRRQAKQHGCTRCGKNFSSASALQIHERTHTGEKPFVCNICGRAFTTKGNLKVHYMTHGANNNSARRGRKLAIENTMALLGTDGKRVSEIFPKEILAPSVNVDPVVWNQYTSMLNGGLAVKTNEISVIQSGGVPTLPVSLGATSVVNNATVSKMDGSQSGISADVEKPSATDGVPKHQFPHFLEENKIAVS

SEQ ID NO: 37281 - protein, 616 aa, Homo sapiens
MSRRKQAKPQHINSEEDQGEQQPQQQTPEFADAAPAAPAAGELGAPVNHPGNDEVASEDEATVKRLRREETHVCEKCCAEFFSISEFLEHKKNCTKNPPVLIMNDSEGPVPSEDFSGAVLSHQPTSPGSKDCHRENGGSSEDMKEKPDAESVVYLKTETALPPTPQDISYLAKGKVANTNVTLQALRGTKVAVNQRSADALPAPVPGANSIPWVLEQILCLQQQQLQQIQLTEQIRIQVNMWASHALHSSGAGADTLKTLGSHMSQQVSAAVALLSQKAGSQGLSLDALKQAKLPHANIPSATSSLSPGLAPFTLKPDGTRVLPNVMSRLPSALLPQAPGSVLFQSPFSTVALDTSKKGKGKPPNISAVDVKPKDEAALYKHKCRSSLPSTFIRAPPTYVKVEVPGTFVGPSTLSPGMTPLLAAQPRRQAKQHGCTRCGKNFSSASALQIHERTHTGEKPFVCNICGRAFTTKGNLKVHYMTHGANNNSARRGRKLAIENTMALLGTDGKRVSEIFPKEILAPSVNVDPVVWNQYTSMLNGGLAVKTNEISVIQSGGVPTLPVSLGATSVVNNATVSKMDGSQSGISADVEKPSATDGVPKHQFPHFLEENKIAVS

SEQ ID NO: 37282 - protein, 953 aa, Homo sapiens
MAETLPGSGDSGPGTASLGPGVAETGTRRLSELRVIDLRAELKKRNLDTGGNKSVLMERLKKAVKEEGQDPDEIGIELEATSKKSAKRCVKGLKMEEEGTEDNGLEDDSRDGQEDMEASLENLQNMGMMDMSVLDETEVANSSAPDFGEDGTDGLLDSFCDSKEYVAAQLRQLPAQPPEHAVDGEGFKNTLETSSLNFKVTPDIEESLLEPENEKILDILGETCKSEPVKEESSELEQPFAQDTSSVGPDRKLAEEEDLFDSAHPEEGDLDLASESTAHAQSSKADSLLAVVKREPAEQPGDGERTDCEPVGLEPAVEQSSAASELAEASSEELAEAPTEAPSPEARDSKEDGRKFDFDACNEVPPAPKESSTSEGADQKMSSFKEEKDIKPIIKDEKGRVGSGSGRNLWVSGLSSTTRATDLKNLFSKYGKVVGAKVVTNARSPGARCYGFVTMSTSDEATKCISHLHRTELHGRMISVEKAKNEPAGKKLSDRKECEVKKEKLSSVDRHHSVEIKIEKTVIKKEEKIEKKEEKKPEDIKKEEKDQDELKPGPTNRSRVTKSGSRGMERTVVMDKSKGEPVISVKTTSRSKERSSKSQDRKSESKEKRDILSFDKIKEQRERERQRQREREIRETERRREREQREREQRLEAFHERKEKARLQRERLQLECQRQRLERERMERERLERERMRVERERRKEQERIHREREELRRQQEQLRYEQERRPGRRPYDLDRRDDAYWPEGKRVAMEDRYRADFPRPDHRFHDFDHRDRGQYQDHAIDRREGSRPMMGDHRDGQHYGDDRHGHGGPPERHGRDSRDGWGGYGSDKRLSEGRGLPPPPRGGRDWGEHNQRLEEHQARAWQGAMDAGAASREHARWQGGERGLSGPSGPGHMASRGGVAGRGGFAQGGHSQGHVVPGGGLEGGGVASQDRGSRVPHPHPHPPPYPHFTRRY

SEQ ID NO: 37283 - protein, 115 aa, Homo sapiens
MAETLPGSGDSGPGTASLGPGVAETGTRRLSELRVIDLRAELKKRNLDTGGNKSVLMERLKKAVKEEGQDPDEIGIELEATSKKSAKRCVKGGHGSKSGEPAEYGHDGHECARRN

SEQ ID NO: 37284 - protein, 221 aa, Homo sapiens
MWSAGRGGAAWPVLLGLLLALLVPGGGAAKTGAELVTCGSVLKLLNTHHRVRLHSHDIKYGSGSGQQSVTGVEASDDANSYWRIRGGSEGGCPRGSPVRCGQAVRLTHVLTGKNLHTHHFPSPLSNNQEVSAFGEDGEGDDLDLWTVRCSGQHWEREAAVRFQHVGTSVFLSVTGEQYGSPIRGQHEVHGMPSANTHNTWKAMEGIFIKPSVEPSAGHDEL

SEQ ID NO: 37285 - protein, 1060 aa, Homo sapiens
MELWAPQRLPQTRGKATAPSKDPDRGFRRDGHHRPVPHSWHNGERFHQWQDNRGSPQPQQEPRADHQQQPHYASRPGDWHQPVSGVDYYEGGYRNQLYSRPGYENSYQSYQSPTMREEYAYGSYYYHGHPQWLQEERVPRQRSPYIWHEDYREQKYLDEHHYENQHSPFGTNSETHFQSNSRNPCKDSPASNSGQEWPGELFPGSLLAEAQKNKPSLASESNLLQQRESGLSSSSYELSQYIRDAPERDDPPASAAWSPVQADVSSAGPKAPMKFYIPHVPVSFGPGGQLVHVGPSSPTDGQAALVELHSMEVILNDSEEQEEMRSFSGPLIREDVHKVDIMTFCQQKAAQSCKSETLGSRDSALLWQLLVLLCRQNGSMVGSDIAELLMQDCKKLEKYKRQPPVANLINLTDEDWPVLSSGTPNLLTGEIPPSVETPAQIVEKFTRLLYYGRKKEALEWAMKNHLWGHALFLSSKMDPQTYSWVMSGFTSTLALNDPLQTLFQLMSGRIPQAATCCGEKQWGDWRPHLAVILSNQAGDPELYQRAIVAIGDTLAGKGLVEAAHFCYLMAHVPFGHYTVKTDHLVLLGSSHSQEFLKFATTEAIQRTEIFEYCQMLGRPKSFIPSFQVYKLLYASRLADYGLVSQALHYCEAIGAAVLSQGESSHPVLLVELIKLAEKLKLSDPLVLERRSGDRDLEPDWLAQLRRQLEQKVAGDIGDPHPTRSDISGAGGTTTENTFYQDFSGCQGYSEAPGYRSALWLTPEQTCLLQPSPQQPFPLQPGSYPAGGGAGQTGTPRPFYSVPETHLPGTGSSVAVTEATGGTVWEEMLQTHLGPGENTVSQETSQPPDGQEVISKPQTPLAARPRSISESSASSAKEDEKESSDEADKNSPRNTAQRGKLGDGKEHTKSSGFGWFSWFRSKPTKNASPAGDEDSSDSPDSEETPRASSPHQAGLGLSLTPSPESPPLPDVSAFSRGRGGGEGRGSASSGGAAAGAGVGGLSGPESVSFELCSNPGVLLPPPALKGAVPLYNPSQVPQLPTATSLNRPNRLAQRRYPTQPC

SEQ ID NO: 37286 - protein, 624 aa, Homo sapiens
MELWAPQRLPQTRGKATAPSKDPDRGFRRDGHHRPVPHSWHNGERFHQWQDNRGSPQPQQEPRADHQQQPHYASRPGDWHQPVSGVDYYEGGYRNQLYSRPGYENSYQSYQSPTMREEYAYGSYYYHGHPQWLQEERVPRQRSPYIWHEDYREQKYLDEHHYENQHSPFGTNSETHFQSNSRNPCKDSPASNSGQEWPGELFPGSLLAEAQKNKPSLASESNLLQQRESGLSSSSYELSQYIRDAPERDDPPASAAWSPVQADVSSAGPKAPMKFYIPHVPVSFGPGGQLVHVGPSSPTDGQAALVELHSMEVILNDSEEQEEMRSFSGPLIREDVHKVDIMTFCQQKAAQSCKSETLGSRDSALLWQLLVLLCRQNGSMVGSDIAELLMQDCKKLEKYKRQPPVANLINLTDEDWPVLSSGTPNLLTGEIPPSVETPAQIVEKFTRLLYYGRKKEALEWAMKNHLWGHALFLSSKMDPQTYSWVMSGFTSTLALNDPLQTLFQLMSGRIPQAATCCGEKQWGDWRPHLAVILSNQAGDPELYQRAIVAIGDTLAGKGLVEAAHFCYLMAHVPFGHYTVKTDHLVLLGSSHRYATWEKGNSKDIFQGTVLALVGFYGSSFHFLM

SEQ ID NO: 37287 - protein, 541 aa, Homo sapiens
MRGFVHFHHAAYSFLPPGGILLPLHRPSWATWLDFLILKVAVGTRLHRVPVKIKRMCVNGLCRARKHRHLCCGEKQWGDWRPHLAVILSNQAGDPELYQRAIVAIGDTLAGKGLVEAAHFCYLMAHVPFGHYTVKTDHLVLLGSSHSQEFLKFATTEAIQRTEIFEYCQMLGRPKSFIPSFQVYKLLYASRLADYGLVSQALHYCEAIGAAVLSQGESSHPVLLVELIKLAEKLKLSDPLVLERRSGDRDLEPDWLAQLRRQLEQKVAGDIGDPHPTRSDISGAGGTTTENTFYQDFSGCQGYSEAPGYRSALWLTPEQTCLLQPSPQQPFPLQPGSYPAGGGAGQTGTPRPFYSVPETHLPGTGSSVAVTEATGGTVWEEMLQTHLGPGENTVSQETSQPPDGQEVISKPQTPLAARPRSISESSASSAKEDEKESSDEADKNSPRNTAQRGKLGDGKEHTKSSGFGWFSWFRSKPTKNASPAGDEDSSDSPDSEVGVKAEDPHPAGGQLRALGLEACLDQRVFPLSSAPTLVFFFLHLP

SEQ ID NO: 37288 - protein, 307 aa, Homo sapiens
MSMILSASVIRVRDGLPLSASTDYEQSTGMQECRKYFKMLSRKLAQLPDRCTLKTGHYNINFISSLGVSYMMLCTENYPNVLAFSFLDELQKEFITTYNMMKTNTAVRPYCFIEFDNFIQRTKQRYNNPRSLSTKINLSDMQTEIKLRPPYQISMCELGSANGVTSAFSVDCKGAGKISSAHQRLEPATLSGIVGFILSLLCGALNLIRGFHAIESLLQSDGDDFNYIIAFFLGTAACLYQCYLLVYYTGWRNVKSFLTFGLICLCNMYLYELRNLWQLFFHVTVGAFVTLQIWLRQAQGKAPDYDV

SEQ ID NO: 37289 - protein, 888 aa, Homo sapiens
MQTPRASPPRPALLLLLLLLGGAHGLFPEEPPPLSVAPRDYLNHYPVFVGSGPGRLTPAEGADDLNIQRVLRVNRTLFIGDRDNLYRVELEPPTSTELRYQRKLTWRSNPSDINVCRMKGKQEGECRNFVKVLLLRDESTLFVCGSNAFNPVCANYSIDTLQPVGDNISGMARCPYDPKHANVALFSDGMLFTATVTDFLAIDAVIYRSLGDRPTLRTVKHDSKWFKEPYFVHAVEWGSHVYFFFREIAMEFNYLEKVVVSRVARVCKNDVGGSPRVLEKQWTSFLKARLNCSVPGDSHFYFNVLQAVTGVVSLGGRPVVLAVFSTPSNSIPGSAVCAFDLTQVAAVFEGRFREQKSPESIWTPVPEDQVPRPRPGCCAAPGMQYNASSALPDDILNFVKTHPLMDEAVPSLGHAPWILRTLMRHQLTRVAVDVGAGPWGNQTVVFLGSEAGTVLKFLVRPNASTSGTSGLSVFLEEFETYRPDRCGRPGGGETGQRLLSLELDAASGGLLAAFPRCVVRVPVARCQQYSGCMKNCIGSQDPYCGWAPDGSCIFLSPGTRAAFEQDVSGASTSGLGDCTGLLRASLSEDRAGLVSVNLLVTSSVAAFVVGAVVSGFSVGWFVGLRERRELARRKDKEAILAHGAGEAVLSVSRLGERRAQGPGGRGGGGGGGAGVPPEALLAPLMQNGWAKATLLQGGPHDLDSGLLPTPEQTPLPQKRLPTPHPHPHALGPRAWDHGHPLLPASASSSLLLLAPARAPEQPPAPGEPTPDGRLYAARPGRASHGDFPLTPHASPDRRRVVSAPTGPLDPASAADGLPRPWSPPPTGSLRRPLGPHAPPAATLRRTHTFNSGEARPGDRHRGCHARPGTDLAHLLPYGGADRTAPPVP

SEQ ID NO: 37290 - protein, 677 aa, Homo sapiens
MQTPRASPPRPALLLLLLLLGGAHGLFPEEPPPLSVAPRDYLNHYPVFVGSGPGRLTPAEGADDLNIQRVLRVNRTLFIGDRDNLYRVELEPPTSTELRYQRKLTWRSNPSDINVCRMKGKQEGECRNFVKVLLLRDESTLFVCGSNAFNPVCANYSIDTLQPVGDNISGMARCPYDPKHANVALFSDGMLFTATVTDFLAIDAVIYRSLGDRPTLRTVKHDSKWFKEPYFVHAVEWGSHVYFFFREIAMEFNYLEKVVVSRVARVCKNDVGGSPRVLEKQWTSFLKARLNCSVPGDSHFYFNVLQAVTGVVSLGGRPVVLAVFSTPSNSIPGSAVCAFDLTQVAAVFEGRFREQKSPESIWTPVPEDQVPRPRPGCCAAPGMQYNASSALPDDILNFVKTHPLMDEAVPSLGHAPWILRTLMRHQLTRVAVDVGAGPWGNQTVVFLGSEAGTVLKFLVRPNASTSGTSGLSVFLEEFETYRPDRCGRPGGGETGQRLLSLELDAASGGLLAAFPRCVVRVPVARCQQYSGCMKNCIGSQDPYCGWAPDGSCIFLSPGTRAAFEQDVSGASTSGLGDCTGLLRASLSEDRAGLVSVNLLVTSSVAAFVVGAVVSGFSVGVCVRASEGCCGRVCQVGHACRVCVHERRSWWPQRPGRWLSRRWGFQKARGSPRCRLGV

SEQ ID NO: 37291 - protein, 462 aa, Homo sapiens
MKPNIIFVLSLLLILEKQAAVMGQKGGSKGRLPSEFSQFPHGQKGQHYSGQKGKQQTESKGSFSIQYTYHVDANDHDQSRKSQQYDLNALHKTTKSQRHLGGSQQLLHNKQEGRDHDKSKGHFHRVVIHHKGGKAHRGTQNPSQDQGNSPSGKGISSQYSNTEERLWVHGLSKEQTSVSGAQKGRKQGGSQSSYVLQTEELVANKQQRETKNSHQNKGHYQNVVEVREEHSSKVQTSLCPAHQDKLQHGSKDIFSTQDELLVYNKNQHQTKNLNQDQQHGRKANKISYQSSSTEERRLHYGENGVQKDVSQSSIYSQTEEKAQGKSQKQITIPSQEQEHSQKANKISYQSSSTEERRLHYGENGVQKDVSQRSIYSQTEKLVAGKSQIQAPNPKQEPWHGENAKGESGQSTNREQDLLSHEQKGRHQHGSHGGLDIVIIEQEDDSDRHLAQHLNNDRNPLFT

SEQ ID NO: 37292 - protein, 402 aa, Homo sapiens
MKPNIIFVLSLLLILEKQAAVMGQKGGSKGRLPSEFSQFPHGQKGQHYSGQKGKQQTESKGSFSIQYTYHVDANDHDQSRKSQQYDLNALHKTTKSQRHLGGSQQLLHNKQEGRDHDKSKGHFHRVVIHHKGGKAHRGTQNPSQDQGNSPSGKGISSQYSNTEERLWVHGLSKEQTSVSGAQKGRKQGGSQSSYVLQTEELVANKQQRETKNSHQNKGHYQNVVEVREEHSSKVQTSLCPAHQDKLQHGSKDIFSTQDELLVYNKNQHQTKNLNQDQQHGRKANKISYQSSSTEERRLHYGENGVQKDVSQRSIYSQTEKLVAGKSQIQAPNPKQEPWHGENAKGESGQSTNREQDLLSHEQKGRHQHGSHGGLDIVIIEQEDDSDRHLAQHLNNDRNPLFT

SEQ ID NO: 37293 - protein, 520 aa, Homo sapiens
METWSVEQVCSWLVEKNLGELVHRFQEEEVSGAALLALNDRMVQQLVKKIGHQAVLMDLIKKYKQNTQGLKSPENPKKAALVMQTEAARDYRDEESSSPARHGEQMPSFYPAENLDNGLIDQRVLKQRRNVKQILARSKALQWTKSYVLPEFPYDVKCMLAEQKCPDHSMRIRIIEFLQADMTKYLEGSLYPSTQQYNDVVNALLQAHPFLDEDGCGFFLWKRALKDRFKYVRRPIEDDEQVIRNKCKFGHRRGQTRKSLADIRFDEIKLVQIKEEAVCFDSELDEHIKWFQQEYVKTEKDWREIDKRMSQTLEIRRKMIGSRTPLKDILKLFPFLKCPYQMFREFQLLTRTDIYKKTRHILESYSENILTSFSVVDNPINIVLQEKMKHYTDEDMLKYMKMTATCLLLPDVFGDDPSLFVIMNEQVQVSTPVLEVKNPFNMEVCEFSLYLERERLTKVDDCVTALAALVAAFHVFRIECPRRLSQTFNFLETLIFDMHSPYFPSLKEKENEVGFQHPLT

SEQ ID NO: 37294 - protein, 221 aa, Homo sapiens
METWSVEQVCSWLVEKNLGELVHRFQEEEVSGAALLALNDRMVQQLVKKIGHQAVLMDLIKKYKQNTQGLKSPENPKKAALVMQTEAARDYRDEESSSPARHGEQMPSFYPAENLDNGLIDQRVLKQRRNVKQILARSKALQWTKSYVLPEFPYDVKCMLAEQKCPDHSMRIRIIEFLQADMTKYLEGSLYPSTQQYNDVVNALLQAHPFLDEDGCGFAGV

SEQ ID NO: 37295 - protein, 544 aa, Homo sapiens
MRSSKLQSPSPSQEKQGVYLQETAMETWSVEQVCSWLVEKNLGELVHRFQEEEVSGAALLALNDRMVQQLVKKIGHQAVLMDLIKKYKQNTQGLKSPENPKKAALVMQTEAARDYRDEESSSPARHGEQMPSFYPAENLDNGLIDQRVLKQRRNVKQILARSKALQWTKSYVLPEFPYDVKCMLAEQKCPDHSMRIRIIEFLQADMTKYLEGSLYPSTQQYNDVVNALLQAHPFLDEDGCGFFLWKRALKDRFKYVRRPIEDDEQVIRNKCKFGHRRGQTRKSLADIRFDEIKLVQIKEEAVCFDSELDEHIKWFQQEYVKTEKDWREIDKRMSQTLEIRRKMIGSRTPLKDILKLFPFLKCPYQMFREFQLLTRTDIYKKTRHILESYSENILTSFSVVDNPINIVLQEKMKHYTDEDMLKYMKMTATCLLLPDVFGDDPSLFVIMNEQVQVSTPVLEVKNPFNMEVCEFSLYLERERLTKVDDCVTALAALVAAFHVFRIECPRRLSQTFNFLETLIFDMHSPYFPSLKEKENEVGFQHPLT

SEQ ID NO: 37296 - protein, 465 aa, Homo sapiens
MAEAVFHAPKRKRRVYETYESPLPIPFGQDHGPLKEFKIFRAEMINNNVIVRNAEDIEQLYGKGYFGKGILSRSRPSFTISDPKLVAKWKDMKTNMPIITSKRYQHSVEWAAELMRRQGQDESTVRRILKDYTKPLEHPPVKRNEEAQVHDKLNSGMVSNMEGTAGGERPSVVNGDSGKSGGVGDPREPLGCLQEGSGCHPTTESFEKSVREDASPLPHVCCCKQDALILQRGLHHEDGSQHIGLLHPGDRGPDHEYVLVEEAECAMSEREAAPNEELVQRNRLICRRNPYRIFEYLQLSLEEAFFLVYALGCLSIYYEKEPLTIVKLWKAFTVVQPTFRTTYMAYHYFRSKGWVPKVGLKYGTDLLLYRKGPPFYHASYSVIIELVDDHFEGSLRRPLSWKSLAALSRVSVNVSKELMLCYLIKPSTMTDKEMESPECMKRIKVQEVILSRWVSSRERSDQDDL

SEQ ID NO: 37297 - protein, 448 aa, Homo sapiens
MAEAVFHAPKRKRRVYETYESPLPIPFGQDHGPLKEFKIFRAEMINNNVIVRNAEDIEQLYGKGYFGKGILSRSRPSFTISDPKLVAKWKDMKTNMPIITSKRYQHSVEWAAELMRRQGQDESTVRRILKDYTKPLEHPPVKRNEEAQVHDKLNSGMVSNMEGTAGGERPSVVNGDSGKSGGVGDPREPLGCLQEGSGCHPTTESFEKSVREDASPLPHVCCCKQDALILQRGLHHEDGSQHIGLLHPGDRGPDHEYVLVEEAECAMSEREAAPNEELVQRNRLICRRNPYRIFEYLQLSLEEEPLTIVKLWKAFTVVQPTFRTTYMAYHYFRSKGWVPKVGLKYGTDLLLYRKGPPFYHASYSVIIELVDDHFEGSLRRPLSWKSLAALSRVSVNVSKELMLCYLIKPSTMTDKEMESPECMKRIKVQEVILSRWVSSRERSDQDDL

SEQ ID NO: 37298 - protein, 439 aa, Homo sapiens
MAEAVFHAPKRKRRVYETYESPLPIPFGQDHGPLKEFKIFRAEMINNNVIVRNAEDIEQLYGKGYFGKGILSRSRPSFTISDPKLVAKWKDMKTNMPIITSKRYQHSVEWAAELMRRQGQDESTVRRILKDYTKPLEHPPVKRNEEAQVHDKLNSGMVSNMEGTAGGERPSVVNGDSGKSGGVGDPREPLGCLQEGSGCHPTTESFEKSVREDASPLPHVCCCKQDALILQRGLHHEDGSQHIGLLHPGDRGPDHEYVLVEEAECAMSEREAAPNEEAFFLVYALGCLSIYYEKEPLTIVKLWKAFTVVQPTFRTTYMAYHYFRSKGWVPKVGLKYGTDLLLYRKGPPFYHASYSVIIELVDDHFEGSLRRPLSWKSLAALSRVSVNVSKELMLCYLIKPSTMTDKEMESPECMKRIKVQEVILSRWVSSRERSDQDDL

SEQ ID NO: 37299 - protein, 406 aa, Homo sapiens
MAEAVFHAPKRKRRVYETYESPLPIPFGQDHGPLKEFKIFRAEMINNNVIVRNAEDIEQLYGKGYFGKGILSRSRPSFTISDPKLVAKWKDMKTNMPIITSKRYQHSVEWAAELMRRQGQDESTVRRILKDYTKPLEHPPVKRNEEAQVHDKLNSGMVSNMEGTAGGERPSVRGLHHEDGSQHIGLLHPGDRGPDHEYVLVEEAECAMSEREAAPNEELVQRNRLICRRNPYRIFEYLQLSLEEAFFLVYALGCLSIYYEKEPLTIVKLWKAFTVVQPTFRTTYMAYHYFRSKGWVPKVGLKYGTDLLLYRKGPPFYHASYSVIIELVDDHFEGSLRRPLSWKSLAALSRVSVNVSKELMLCYLIKPSTMTDKEMESPECMKRIKVQEVILSRWVSSRERSDQDDL

SEQ ID NO: 37300 - protein, 402 aa, Homo sapiens
MAEAVFHAPKRKRRVYETYESPLPIPFGQDHGPLKEFKIFRAEMINNNVIVRNAEDIEQLYGKGYFGKGILSRSRPSFTISDPKLVAKWKDMKTNMPIITSKRYQHSVEWAAELMRRQGQDESTVRRILKDYTKPLEHPPVKRNEEAQVHDKLNSGMVSNMEGTAGGERPSVVNGDSGKSGGVGDPREPLGCLQEGSGCHPTTESFEKSVREDASPLPHVCCCKQDALILQRGLHHEDGSQHIGLLHPGDRGPDHEYVLVEEAECAMSEREAAPNEEAFFLVYALGCLSIYYEKEPLTIVKLWKAFTVVQPTFRTTYMAYHYFRSKGWVPKVGLKYGTDLLLYRKGPPFYHASYSVIIELVDDHFEGSLRRPLSWKSLAALSRVSVNVSKVTQHQLCHWSVT

SEQ ID NO: 37301 - protein, 469 aa, Homo sapiens
MARGLGAPHWVAVGLLTWATLGLLVAGLGGHDDLHDDLQEDFHGHSHRHSHEDFHHGHSHAHGHGHTHESIWHGHTHDHDHGHSHEDLHHGHSHGYSHESLYHRGHGHDHEHSHGGYGESGAPGIKQDLDAVTLWAYALGATVLISAAPFFVLFLIPVESNSPRHRSLLQILLSFASGGLLGDAFLHLIPHALEPHSHHTLEQPGHGHSHSGQGPILSVGLWVLSGIVAFLVVEKFVRHVKGGHGHSHGHGHAHSHTRGSHGHGRQERSTKEKQSSEEEEKETRGVQKRRGGSTVPKDGPVRPQNAEEEKRGLDLRVSGYLNLAADLAHNFTDGLAIGASFRGGRGLGILTTMTVLLHEVPHEVGDFAILVQSGCSKKQAMRLQLLTAVGALAGTACALLTEGGAVGSEIAGGAGPGWVLPFTAGGFIYVATVSVLPELLREASPLQSLLEVLGLLGGVIMMVLIAHLE

SEQ ID NO: 37302 - protein, 314 aa, Homo sapiens
MEDKRNIQIIEWEHLDKKKFYVFGVAMTMMIRVSVYPFTLIRTRLQVQKGKSLYHGTFDAFIKILRADGITGLYRGFLVNTFTLISGQCYVTTYELTRKFVADYSQSNTVKSLVAGGSASLVAQSITVPIDVVSQHLMMQRKGEKMGRFQVRGNPEGQGVVAFGQTKDIIRQILQADGLRGFYRGYVASLLTYIPNSAVWWPFYHFYAEQLSYLCPKECPHIVFQAVSGPLAAATASILTNPMDVIRTRVQVEGKNSIILTFRQLMAEEGPWGLMKGLSARIISATPSTIVIVVGYESLKKLSLRPELVDSRHW

SEQ ID NO: 37303 - protein, 466 aa, Homo sapiens
MAEEQDLSEVELSPVGSEEPRCLSPGSAPSLGPDGGGGGSGLRASPGPGELGKVKKEQQDGEADDDKFPVCIREAVSQVLSGYDWTLVPMPVRVNGASKSKPHVKRPMNAFMVWAQAARRKLADQYPHLHNAELSKTLGKLWRLLNESDKRPFIEEAERLRMQHKKDHPDYKYQPRRRKNGKAAQGEAECPGGEAEQGGTAAIQAHYKSAHLDHRHPGEGSPMSDGNPEHPSGQSHGPPTPPTTPKTELQSGKADPKRDGRSMGEGGKPHIDFGNVDIGEISHEVMSNMETFDVAELDQYLPPNGHPGHVSSYSAAGYGLGSALAVASGHSAWISKPPGVALPTVSPPGVDAKAQVKTETAGPQGPPHYTDQPSTSQIAYTSLSLPHYGSAFPSISRPQFDYSDHQPSGPYYGHSGQASGLYSAFSYMGPSQRPLYTAISDPSPSGPQSHSPTHWEQPVYTTLSRP

SEQ ID NO: 37304 - protein, 286 aa, Homo sapiens
MAEEQDLSEVELSPVGSEEPRCLSPGSAPSLGPDGGGGGSGLRASPGPGELGKVKKEQQDGEADDDKFPVCIREAVSQVLSGYDWTLVPMPVRVNGASKSKPHVKRPMNAFMVWAQAARRKLADQYPHLHNAELSKTLGKLWRLLNESDKRPFIEEAERLRMQHKKDHPDYKYQPRRRKNGKAAQGEAECPGGEAEQGGTAAIQAHYKSAHLDHRHPGEGSPMSDGNPEHPSGQSHGPPTPPTTPKTELQSGKADPKRDGRPSPSGPQSHSPTHWEQPVYTTLSRP

SEQ ID NO: 37305 - protein, 1469 aa, Homo sapiens
MDVDAEREKITQEIKELERILDPGSSGSHVEISESSLESDSEADSLPSEDLDPADPPISEEERWGEASNDEDDPKDKTLPEDPETCLQLNMVYQEVIQEKLAEANLLLAQNREQQEELMRDLAGSKGTKVKDGKSLPPSTYMGHFMKPYFKDKVTGVGPPANEDTREKAAQGIKAFEELLVTKWKNWEKALLRKSVVSDRLQRLLQPKLLKLEYLHQKQSKVSSELERQALEKQGREAEKEIQDINQLPEEALLGNRLDSHDWEKISNINFEGSRSAEEIRKFWQNSEHPSINKQEWSREEEERLQAIAAAHGHLEWQKIAEELGTSRSAFQCLQKFQQHNKALKRKEWTEEEDRMLTQLVQEMRVGSHIPYRRIVYYMEGRDSMQLIYRWTKSLDPGLKKGYWAPEEDAKLLQAVAKYGEQDWFKIREEVPGRSDAQCRDRYLRRLHFSLKKGRWNLKEEEQLIELIEKYGVGHWAKIASELPHRSGSQCLSKWKIMMGKKQGLRRRRRRARHSVRWSSTSSSGSSSGSSGGSSSSSSSSSEEDEPEQAQAGEGDRALLSPQYMVPDMDLWVPARQSTSQPWRGGAGAWLGGPAASLSPPKGSSASQGGSKEASTTAAAPGEETSPVQVPARAHGPVPRSAQASHSADTRPAGAEKQALEGGRRLLTVPVETVLRVLRANTAARSCTQKEQLRQPPLPTSSPGVSSGDSVARSHVQWLRHRATQSGQRRWRHALHRRLLNRRLLLAVTPWVGDVVVPCTQASQRPAVVQTQADGLREQLQQARLASTPVFTLFTQLFHIDTAGCLEVVRERKALPPRLPQAGARDPPVHLLQASSSAQSTPGHLFPNVPAQEASKSASHKGSRRLASSRVERTLPQASLLASTGPRPKPKTVSELLQEKRLQEARAREATRGPVVLPSQLLVSSSVILQPPLPHTPHGRPAPGPTVLNVPLSGPGAPAAAKPGTSGSWQEAGTSAKDKRLSTMQALPLAPVFSEAEGTAPAASQAPALGPGQISVSCPESGLGQSQAPAASRKQGLPEAPPFLPAAPSPTPLPVQPLSLTHIGGPHVATSVPLPVTWVLTAQGLLPVPVPAVVSLPRPAGTPGPAGLLATLLPPLTETRAAQGPRAPALSSSWQPPANMNREPEPSCRTDTPAPPTHALSQSPAEADGSVAFVPGEAQVAREIPEPRTSSHADPPEAEPPWSGRLPAFGGVIPATEPRGTPGSPSGTQEPRGPLGLEKLPLRQPGPEKGALDLEKPPLPQPGPEKGALDLGLLSQEGEAATQQWLGGQRGVRVPLLGSRLPYQPPALCSLRALSGLLLHKKALEHKATSLVVGGEAERPAGALQASLGLVRGQLQDNPAYLLLRARFLAAFTLPALLATLAPQGVRTTLSVPSRVGSESEDEDLLSELELADRDGQPGCTTATCPIQGAPDSGKCSASSCLDTSNDPDDLDVLRTRHARHTRKRRRLV

SEQ ID NO: 37306 - protein, 97 aa, Homo sapiens
MSSAPEPPTFKKEPPKEKEFQSPGLRGVRTTTLFRAVNPELFIKPNKPVMAFGLVTLSLCVAYIGYLHAIQENKKDLYEAIDSEGHSYMRRKTSKWD

SEQ ID NO: 37307 - protein, 860 aa, Homo sapiens
MTEGTKKTSKKFKFFKFKGFGSLSNLPRSFTLRRSSASISRQSHLEPDTFEATQDDMVTVPKSPPAYARSSDMYSHMGTMPRPSIKKAQNSQAARQAQEAGPKPNLVPGGVPDPPGLEAAKEVMVKATGPLEDTPAMEPNPSAVEVDPIRKPEVPTGDVEEERPPRDVHSERAAGEPEAGSDYVKFSKEKYILDSSPEKLHKELEEELKLSSTDLRSHAWYHGRIPREVSETLVQRNGDFLIRDSLTSLGDYVLTCRWRNQALHFKINKVVVKAGESYTHIQYLFEQESFDHVPALVRYHVGSRKAVSEQSGAIIYCPVNRTFPLRYLEASYGLGQGSSKPASPVSPSGPKGSHMKRRSVTMTDGLTADKVTRSDGCPTSTSLPRPRDSIRSCALSMDQIPDLHSPMSPISESPSSPAYSTVTRVHAAPAAPSATALPASPVARRSSEPQLCPGSAPKTHGESDKGPHTSPSHTLGKASPSPSLSSYSDPDSGHYCQLQPPVRGSREWAATETSSQQARSYGERLKELSENGAPEGDWGKTFTVPIVEVTSSFNPATFQSLLIPRDNRPLEVGLLRKVKELLAEVDARTLARHVTKVDCLVARILGVTKEMQTLMGVRWGMELLTLPHGRQLRLDLLERFHTMSIMLAVDILGCTGSAEERAALLHKTIQLAAELRGTMGNMFSFAAVMGALDMAQISRLEQTWVTLRQRHTEGAILYEKKLKPFLKSLNEGKEGPPLSNTTFPHVLPLITLLECDSAPPEGPEPWGSTEHGVEVVLAHLEAARTVAHHGGLYHTNAEVKLQGFQARPELLEVFSTEFQMRLLWGSQGASSSQARRYEKFDKVLTALSHKLEPAVRSSEL

SEQ ID NO: 37308 - protein, 703 aa, Homo sapiens
MTAVGRRCPALGSRGAAGEPEAGSDYVKFSKEKYILDSSPEKLHKELEEELKLSSTDLRSHAWYHGRIPREVSETLVQRNGDFLIRDSLTSLGDYVLTCRWRNQALHFKINKVVVKAGESYTHIQYLFEQESFDHVPALVRYHVGSRKAVSEQSGAIIYCPVNRTFPLRYLEASYGLGQGSSKPASPVSPSGPKGSHMKRRSVTMTDGLTADKVTRSDGCPTSTSLPRPRDSIRSCALSMDQIPDLHSPMSPISESPSSPAYSTVTRVHAAPAAPSATALPASPVARRSSEPQLCPGSAPKTHGESDKGPHTSPSHTLGKASPSPSLSSYSDPDSGHYCQLQPPVRGSREWAATETSSQQARSYGERLKELSENGAPEGDWGKTFTVPIVEVTSSFNPATFQSLLIPRDNRPLEVGLLRKVKELLAEVDARTLARHVTKVDCLVARILGVTKEMQTLMGVRWGMELLTLPHGRQLRLDLLERFHTMSIMLAVDILGCTGSAEERAALLHKTIQLAAELRGTMGNMFSFAAVMGALDMAQISRLEQTWVTLRQRHTEGAILYEKKLKPFLKSLNEGKEGPPLSNTTFPHVLPLITLLECDSAPPEGPEPWGSTEHGVEVVLAHLEAARTVAHHGGLYHTNAEVKLQGFQARPELLEVFSTEFQMRLLWGSQGASSSQARRYEKFDKVLTALSHKLEPAVRSSEL

SEQ ID NO: 37309 - protein, 506 aa, Homo sapiens
MKRRSVTMTDGLTADKVTRSDGCPTSTSLPRPRDSIRSCALSMDQIPDLHSPMSPISESPSSPAYSTVTRVHAAPAAPSATALPASPVARRSSEPQLCPGSAPKTHGESDKGPHTSPSHTLGKASPSPSLSSYSDPDSGHYCQLQPPVRGSREWAATETSSQQARSYGERLKELSENGAPEGDWGKTFTVPIVEVTSSFNPATFQSLLIPRDNRPLEVGLLRKVKELLAEVDARTLARHVTKVDCLVARILGVTKEMQTLMGVRWGMELLTLPHGRQLRLDLLERFHTMSIMLAVDILGCTGSAEERAALLHKTIQLAAELRGTMGNMFSFAAVMGALDMAQISRLEQTWVTLRQRHTEGAILYEKKLKPFLKSLNEGKEGPPLSNTTFPHVLPLITLLECDSAPPEGPEPWGSTEHGVEVVLAHLEAARTVAHHGGLYHTNAEVKLQGFQARPELLEVFSTEFQMRLLWGSQGASSSQARRYEKFDKVLTALSHKLEPAVRSSEL

SEQ ID NO: 37310 - protein, 792 aa, Homo sapiens
MAPALPSPHKAVARPELLLDTAAHSGKLRAPDGGEGAECAGHNGGPSWGVGQGQSQEPSRQGIPQAPWLVSWQRRGFPPSSFCPGPLRTEKLRAGRCPLLLCGGAAGEPEAGSDYVKFSKEKYILDSSPEKLHKELEEELKLSSTDLRSHAWYHGRIPREVSETLVQRNGDFLIRDSLTSLGDYVLTCRWRNQALHFKINKVVVKAGESYTHIQYLFEQESFDHVPALVRYHVGSRKAVSEQSGAIIYCPVNRTFPLRYLEASYGLGQGSSKPASPVSPSGPKGSHMKRRSVTMTDGLTADKVTRSDGCPTSTSLPRPRDSIRSCALSMDQIPDLHSPMSPISESPSSPAYSTVTRVHAAPAAPSATALPASPVARRSSEPQLCPGSAPKTHGESDKGPHTSPSHTLGKASPSPSLSSYSDPDSGHYCQLQPPVRGSREWAATETSSQQARSYGERLKELSENGAPEGDWGKTFTVPIVEVTSSFNPATFQSLLIPRDNRPLEVGLLRKVKELLAEVDARTLARHVTKVDCLVARILGVTKEMQTLMGVRWGMELLTLPHGRQLRLDLLERFHTMSIMLAVDILGCTGSAEERAALLHKTIQLAAELRGTMGNMFSFAAVMGALDMAQISRLEQTWVTLRQRHTEGAILYEKKLKPFLKSLNEGKEGPPLSNTTFPHVLPLITLLECDSAPPEGPEPWGSTEHGVEVVLAHLEAARTVAHHGGLYHTNAEVKLQGFQARPELLEVFSTEFQMRLLWGSQGASSSQARRYEKFDKVLTALSHKLEPAVRSSEL

SEQ ID NO: 37311 - protein, 702 aa, Homo sapiens
MTERCSLWSALSAAACCFYRGSFVQVQFSKEKYILDSSPEKLHKELEEELKLSSTDLRSHAWYHGRIPREVSETLVQRNGDFLIRDSLTSLGDYVLTCRWRNQALHFKINKVVVKAGESYTHIQYLFEQESFDHVPALVRYHVGSRKAVSEQSGAIIYCPVNRTFPLRYLEASYGLGQGSSKPASPVSPSGPKGSHMKRRSVTMTDGLTADKVTRSDGCPTSTSLPRPRDSIRSCALSMDQIPDLHSPMSPISESPSSPAYSTVTRVHAAPAAPSATALPASPVARRSSEPQLCPGSAPKTHGESDKGPHTSPSHTLGKASPSPSLSSYSDPDSGHYCQLQPPVRGSREWAATETSSQQARSYGERLKELSENGAPEGDWGKTFTVPIVEVTSSFNPATFQSLLIPRDNRPLEVGLLRKVKELLAEVDARTLARHVTKVDCLVARILGVTKEMQTLMGVRWGMELLTLPHGRQLRLDLLERFHTMSIMLAVDILGCTGSAEERAALLHKTIQLAAELRGTMGNMFSFAAVMGALDMAQISRLEQTWVTLRQRHTEGAILYEKKLKPFLKSLNEGKEGPPLSNTTFPHVLPLITLLECDSAPPEGPEPWGSTEHGVEVVLAHLEAARTVAHHGGLYHTNAEVKLQGFQARPELLEVFSTEFQMRLLWGSQGASSSQARRYEKFDKVLTALSHKLEPAVRSSEL

SEQ ID NO: 37312 - protein, 700 aa, Homo sapiens
MTERCSLWSALSAAACCFYRGSFVQFSKEKYILDSSPEKLHKELEEELKLSSTDLRSHAWYHGRIPREVSETLVQRNGDFLIRDSLTSLGDYVLTCRWRNQALHFKINKVVVKAGESYTHIQYLFEQESFDHVPALVRYHVGSRKAVSEQSGAIIYCPVNRTFPLRYLEASYGLGQGSSKPASPVSPSGPKGSHMKRRSVTMTDGLTADKVTRSDGCPTSTSLPRPRDSIRSCALSMDQIPDLHSPMSPISESPSSPAYSTVTRVHAAPAAPSATALPASPVARRSSEPQLCPGSAPKTHGESDKGPHTSPSHTLGKASPSPSLSSYSDPDSGHYCQLQPPVRGSREWAATETSSQQARSYGERLKELSENGAPEGDWGKTFTVPIVEVTSSFNPATFQSLLIPRDNRPLEVGLLRKVKELLAEVDARTLARHVTKVDCLVARILGVTKEMQTLMGVRWGMELLTLPHGRQLRLDLLERFHTMSIMLAVDILGCTGSAEERAALLHKTIQLAAELRGTMGNMFSFAAVMGALDMAQISRLEQTWVTLRQRHTEGAILYEKKLKPFLKSLNEGKEGPPLSNTTFPHVLPLITLLECDSAPPEGPEPWGSTEHGVEVVLAHLEAARTVAHHGGLYHTNAEVKLQGFQARPELLEVFSTEFQMRLLWGSQGASSSQARRYEKFDKVLTALSHKLEPAVRSSEL

SEQ ID NO: 37313 - protein, 313 aa, Homo sapiens
MDNKKRLAYAIIQFLHDQLRHGGLSSDAQESLEVAIQCLETAFGVTVEDSDLALPQTLPEIFEAAATGKEMPQDLRSPARTPPSEEDSAEAERLKTEGNEQMKVENFEAAVHFYGKAIELNPANAVYFCNRAAAYSKLGNYAGAVQDCERAICIDPAYSKAYGRMGLALSSLNKHVEAVAYYKKALELDPDNETYKSNLKIAELKLREAPSPTGGVGSFDIAGLLNNPGFMSMASNLMNNPQIQQLMSGMISGGNNPLGTPGTSPSQNDLASLIQAGQQFAQQMQQQNPELIEQLRSQIRSRTPSASNDDQQE

SEQ ID NO: 37314 - protein, 753 aa, Homo sapiens [sequence omitted]

SEQ ID NO: 37315 - protein, 501 aa, Homo sapiens
MERARPEPPPQPRPLRPAPPPLPVEGTSFWAAAMEPPPSSPTLSAAASATLASSCGEAVASGLQPAVRRLLQVKPEQVLLLPQPQAQNEEAAASSAQARLLQFRPDLRLLQPPTASDGATSRPELHPVQPLALHVKAKKQKLGPSLDQSVGPRGAVETGPRASRVVKLEGPGPALGYFRGDEKGKLEAEEVMRDSMQGGAGKSPAAIREGVIKTEEPERLLEDCRLGAEPASNGLVHGSAEVILAPTSGAFGPHQQDLRIPLTLHTVPPGARIQFQGAPPSELIRLTKVPLTPVPTKMQSLLEPSVKIETKDVPLTVLPSDAGIPDTPFSKDRNGHVKRPMNAFMVWARIHRPALAKANPAANNAEISVQLGLEWNKLSEEQKKPYYDEAQKIKEKHREEFPGWVYQPRPGKRKRFPLSVSNVFSGTTQNIISTNPTTVYPYRSPTYSVVIPSLQNPITHPVVHALTVGLPLAMEIFRVQCQNALVIMKTGTQNMRVSFQL

SEQ ID NO: 37316 - protein, 549 aa, Homo sapiens
MDVVEVAGSWWAQEREDIIMKYEKGHRAGLPEDKGPKPFRSYNNNVDHLGIVHETELPPLTAREAKQIRREISRKSKWVDMLGDWEKYKSSRKLIDQAYKGMPMNIRGPMWSVLLNTEEMKLKNPGRYQIMKEKGKKSSEHIQRIDRDVSGTLRKHIFFRDRYGTKQRELLHILLAYEEYNPEVGYCRDLSHIAALFLLYLPEEDAFWALVQLLASERHSLQGFHSPNGGTVQGLQDQQEHVVATSQPKTMGHQDKKDLCGQCSPLGCLIRILIDGISLGLTLRLWDVYLVEGEQALMPITRIAFKVQQKRLTKTSRCGPWARFCNRFVDTWARDEDTVLKHLRASMKKLTRKKGDLPPPAKPEQGSSASRPVPASRGGKTLCKGDRQAPPGPPARFPRPIWSASPPRAPRSSTPCPGGAVREDTYPVGTQGVPSPALAQGGPQGSWRFLQWNSMPRLPTDLDVEGPWFRHYDFRQSCWVRAISQEDQLAPCWQAEHPAERVRSAFAAPSTDSDQGTPFRARDEQQCAPTSGPCLCGLHLESSQFPPGF

SEQ ID NO: 37317 - protein, 98 aa, Homo sapiens
MLSRLQELRKEEETLLRLKAALHDQLNRLKVEELALQSMISSRRGDEMLSSHTVPEQSHDMLVHVDNEASINQTTLELSTKSHVTEEEEEEEEEESDS

SEQ ID NO: 37318 - protein, 68 aa, Homo sapiens
MLSRLQELRKEEETLLRLKAALHDQLNRLKMLVHVDNEASINQTTLELSTKSHVTEEEEEEEEEESDS

SEQ ID NO: 37319 - protein, 340 aa, Homo sapiens
MAEGGELMSRLLSENADLKKQVRLLKENQMLRRLLSQSCQEGGGHDLLPPRAHAYPEAGSPGSGVPDFGRFTSVADTPSQLQTSSLEDLLCSHAPLSSEDDTSPGCAAPSQAPFKAFLSPPEPHSHRGTDRKLSPLLSPLQDSLVDKTLLEPREMVRPKKVCFSESSLPTGDRTRRSYYLNEIQSFAGAEKDARVVGEIAFQLDRRILAYVFPGVTRLYGFTVANIPEKIEQTSTKSLDGSVDERKLRELTQRYLALSARLEKLGYSRDVHPAFSEFLINTYGILKQRPDLRANPLHSSPAALRKLVIDVVPPKFLGDSLLLLNCLCELSKEDGKPLFAW

SEQ ID NO: 37320 - protein, 186 aa, Homo sapiens
MVRPKKVCFSESSLPTGDRTRRSYYLNEIQSFAGAEKDARVVGEIAFQLDRRILAYVFPGVTRLYGFTVANIPEKIEQTSTKSLDGSVDERKLRELTQRYLALSARLEKLGYSRDVHPAFSEFLINTYGILKQRPDLRANPLHSSPAALRKLVIDVVPPKFLGDSLLLLNCLCELSKEDGKPLFAW

SEQ ID NO: 37321 - protein, 665 aa, Homo sapiens
MVEAIVEFDYQAQHDDELTISVGEIITNIRKEDGGWWEGQINGRRGLFPDNFVREIKKEMKKDPLTNKAPEKPLHEVPSGNSLLSSETILRTNKRGERRRRRCQVAFSYLPQNDDELELKVGDIIEVVGEVEEGWWEGVLNGKTGMFPSNFIKELSGESDELGISQDEQLSKSSLRETTGSESDGGDSSSTKSEGANGTVATAAIQPKKVKGVGFGDIFKDKPIKLRPRSIEVENDFLPVEKTIGKKLPATTATPDSSKTEMDSRTKSKDYCKVIFPYEAQNDDELTIKEGDIVTLINKDCIDVGWWEGELNGRRGVFPDNFVKLLPPDFEKEGNRPKKPPPPSAPVIKQGAGTTERKHEIKKIPPERPEMLPNRTEEKERPEREPKLDLQKPSVPAIPPKKPRPPKTNSLSRPGALPPRRPERPVGPLTHTRGDSPKIDLAGSSLSGILDKDLSDRSNDIDLEGFDSVVSSTEKLSHPTTSRPKATGRRPPSQSLTSSSLSSPDIFDSPSPEEDKEEHISLAHRGVDASKKTSKTVTISQVSDNKASLPPKPGTMAAGGGGPAPLSSAAPSPLSSSLGTAGHRANSPSLFGTEGKPKMEPAASSQAAVEELRTQVRELRSIIETMKDQQKREIKQLLSELDEEKKIRLRLQMEVNDIKKALQSK

SEQ ID NO: 37322 - protein, 628 aa, Homo sapiens
MEVSAAKAPSAADLSEIEIKKEMKKDPLTNKAPEKPLHEVPSGNSLLSSETILRTNKRGERRRRRCQVAFSYLPQNDDELELKVGDIIEVVGEVEEGWWEGVLNGKTGMFPSNFIKELSGESDELGISQDEQLSKSSLRETTGSESDGGDSSSTKSEGANGTVATAAIQPKKVKGVGFGDIFKDKPIKLRPRSIEVENDFLPVEKTIGKKLPATTATPDSSKTEMDSRTKSKDYCKVIFPYEAQNDDELTIKEGDIVTLINKDCIDVGWWEGELNGRRGVFPDNFVKLLPPDFEKEGNRPKKPPPPSAPVIKQGAGTTERKHEIKKIPPERPEMLPNRTEEKERPEREPKLDLQKPSVPAIPPKKPRPPKTNSLSRPGALPPRRPERPVGPLTHTRGDSPKIDLAGSSLSGILDKDLSDRSNDIDLEGFDSVVSSTEKLSHPTTSRPKATGRRPPSQSLTSSSLSSPDIFDSPSPEEDKEEHISLAHRGVDASKKTSKTVTISQVSDNKASLPPKPGTMAAGGGGPAPLSSAAPSPLSSSLGTAGHRANSPSLFGTEGKPKMEPAASSQAAVEELRTQVRELRSIIETMKDQQKREIKQLLSELDEEKKIRLRLQMEVNDIKKALQSK

SEQ ID NO: 37323 - protein, 427 aa, Homo sapiens
MGEETIGKKLPATTATPDSSKTEMDSRTKSKDYCKVIFPYEAQNDDELTIKEGDIVTLINKDCIDVGWWEGELNGRRGVFPDNFVKLLPPDFEKEGNRPKKPPPPSAPVIKQGAGTTERKHEIKKIPPERPEMLPNRTEEKERPEREPKLDLQKPSVPAIPPKKPRPPKTNSLSRPGALPPRRPERPVGPLTHTRGDSPKIDLAGSSLSGILDKDLSDRSNDIDLEGFDSVVSSTEKLSHPTTSRPKATGRRPPSQSLTSSSLSSPDIFDSPSPEEDKEEHISLAHRGVDASKKTSKTVTISQVSDNKASLPPKPGTMAAGGGGPAPLSSAAPSPLSSSLGTAGHRANSPSLFGTEGKPKMEPAASSQAAVEELRTQVRELRSIIETMKDQQKREIKQLLSELDEEKKIRLRLQMEVNDIKKALQSK

SEQ ID NO: 37324 - protein, 294 aa, Homo sapiens
MAMSSGGSGGGVPEQEDSVLFRRGTGQSDDSDIWDDTALIKAYDKAVASFKHALKNGDICETSGKPKTTPKRKPAKKNKSQKKNTAASLQQWKVGDKCSAIWSEDGCIYPATIASIDFKRETCVVVYTGYGNREEQNLSDLLSPICEVANNIEQNAQENENESQVSTDESENSRSPGNKSDNIKPKSAPWNSFLPPPPPMPGPRLGPGKPGLKFNGPPPPPPPPPPHLLSCWLPPFPSGPPIIPPPPPICPDSLDDADALGSMLISWYMSGYHTGYYMGFRQNQKEGRCSHSLN

SEQ ID NO: 37325 - protein, 262 aa, Homo sapiens
MAMSSGGSGGGVPEQEDSVLFRRGTGQSDDSDIWDDTALIKAYDKAVASFKHALKNGDICETSGKPKTTPKRKPAKKNKSQKKNTAASLQQWKVGDKCSAIWSEDGCIYPATIASIDFKRETCVVVYTGYGNREEQNLSDLLSPICEVANNIEQNAQENENESQVSTDESENSRSPGNKSDNIKPKSAPWNSFLPPPPPMPGPRLGPGKIIPPPPPICPDSLDDADALGSMLISWYMSGYHTGYYMGFRQNQKEGRCSHSLN

SEQ ID NO: 37326 - protein, 282 aa, Homo sapiens
MAMSSGGSGGGVPEQEDSVLFRRGTGQSDDSDIWDDTALIKAYDKAVASFKHALKNGDICETSGKPKTTPKRKPAKKNKSQKKNTAASLQQWKVGDKCSAIWSEDGCIYPATIASIDFKRETCVVVYTGYGNREEQNLSDLLSPICEVANNIEQNAQENENESQVSTDESENSRSPGNKSDNIKPKSAPWNSFLPPPPPMPGPRLGPGKPGLKFNGPPPPPPPPPPHLLSCWLPPFPSGPPIIPPPPPICPDSLDDADALGSMLISWYMSGYHTGYYMEMLA

SEQ ID NO: 37327 - protein, 250 aa, Homo sapiens
MAMSSGGSGGGVPEQEDSVLFRRGTGQSDDSDIWDDTALIKAYDKAVASFKHALKNGDICETSGKPKTTPKRKPAKKNKSQKKNTAASLQQWKVGDKCSAIWSEDGCIYPATIASIDFKRETCVVVYTGYGNREEQNLSDLLSPICEVANNIEQNAQENENESQVSTDESENSRSPGNKSDNIKPKSAPWNSFLPPPPPMPGPRLGPGKIIPPPPPICPDSLDDADALGSMLISWYMSGYHTGYYMEMLA

SEQ ID NO: 37328 - protein, 992 aa, Homo sapiens
MKTETVPPFQETPAGSSCHLNNLLSSRKLMAVGVLLGWLLVIHLLVNVWLLCLLSALLVVLGGWLGSSLAGVASGRLHLERFIPLATCPPCPEAERQLEREINRTIQMIIRDFVLSWYRSVSQEPAFEEEMEAAMKGLVQELRRRMSVMDSHAVAQSVLTLCGCHLQSYIQAKEATAGKNGPVEPSHLWEAYCRATAPHPAVHSPSAEVTYTRGVVNLLLQGLVPKPHLETRTGRHVVVELITCNVILPLISRLSDPDWIHLVLVGIFSKARDPAPCPASAPEQPSVPTSLPLIAEVEQLPEGRASPVAAPVFLSYSEPEGSAGPSPEVEEGHEAVEGDLGGMCEERKVGNNSSHFLQPNVRGPLFLCEDSELESPLSELGKETIMLMTPGSFLSDRIQDALCALESSQALEPKDGEASEGAEAEEGPGTETETGLPVSTLNSCPEIHIDTADKEIEQGDVTASVTALLEGPEKTCPSRPSCLEKDLTNDVSSLDPTLPPVLLSSSPPGPLSSATFSFEPLSSPDGPVIIQNLRITGTITAREHSGTGFHPYTLYTVKYETALDGENSSGLQQLAYHTVNRRYREFLNLQTRLEEKPDLRKFIKNVKGPKKLFPDLPLGNMDSDRVEARKSLLESFLKQLCAIPEIANSEEVQEFLALNTDARIAFVKKPFMVSRIDKMVVSAIVDTLKTAFPRSEPQSPTEELSEAETESKPQTEGKKASKSRLRFSSSKISPALSVTEAQDKILYCLQEGNVESETLSMSAMESFIEKQTKLLEMQPTKAPEKDPEQPPKGRVDSCVSDAAVPAQDPSNSDPGTETELADTALDLLLLLLTEQWKWLCTENMQKFLRLIFGTLVQRWLEVQVANLTSPQRWVQYLLLLQESIWPGGVLPKFPRPVRTQEQKLAAEKQALQSLMGVLPDLVVEILGVNKCRLSWGLVLESLQQPLINRHLIYCLGDIILEFLDLSASVEESAATTSASDTPGNSKRMGVSS

SEQ ID NO: 37329 - protein, 803 aa, Homo sapiens
MKTETVPPFQETPAGSSCHLNNLLSSRKLMAVGVLLGWLLVIHLLVNVWLLCLLSALLVVLGGWLGSSLAGVASGRLHLERFIPLATCPPCPEAERQLEREINRTIQMIIRDFVLSWYRSVSQEPAFEEEMEAAMKGLVQELRRRMSVMDSHAVAQSVLTLCGCHLQSYIQAKEATAGKNGPVEPSHLWEAYCRATAPHPAVHSPSAEVTYTRGVVNLLLQGLVPKPHLETRTGRHVVVELITCNVILPLISRLSDPDWIHLVLVGIFSKARDPAPCPASAPEQPSVPTSLPLIAEVEQLPEGRASPVAAPVFLSYSEPEGSAGPSPEVEEGHEAVEGDLGGMCEERKVGNNSSHFLQPNVRGPLFLCEDSELESPLSELGKETIMLMTPGSFLSDRIQDALCALESSQALEPKDGEASEGAEAEEGPGTETETGLPVSTLNSCPEIHIDTADKEIEQGDVTASVTALLEGPEKTCPSRPSCLEKDLTNDVSSLDPTLPPVLLSSSPPGPLSSATFSFEPLSSPDGPVIIQNLRITGTITAREHSGTGFHPYTLYTVKYETALDGENSSGLQQLAYHTVNRRYREFLNLQTRLEEKPDLRKFIKNVKGPKKLFPDLPLGNMDSDRVEARKSLLESFLKQLCAIPEIANSEEVQEFLALNTDARIAFVKKPFMVSRIDKMVVSAIVDTLKTAFPRSEPQSPTEELSEAETESKPQTEGKKASKSRLRFSSSKISPALSVTEAQDKILYCLQEGNVTKLLEMQPTKAPEKDPEQPPKGRVDSCVSDAAVPAQDPSNSDPAEHAMC
